United States Patent Application Publication US 2008/0008996 A1 - sequence listing, part 12

SEQ ID NO: 74986 - DNA, 434 bp, Zea mays
agcttcagctccatttatgttatggatgggcttttagtcagtccaattaccttcggcctttcttgcagcttcctgacttccatggatagcgatgggtccctgatccgaaggtatcttcatgcaaagataggcaggatgaagaattgcttctaaagcattgagggtgccacgaccaataattgcattgtaagggtattccatgtcaacaatgtcaaacacaacttgctcagttctagtgttgttgatgaacccgaaggtcactgacatggtgatcttgcccaatgctacaatctgtcttcctccgaagccacagagaggatgtgtagcatcatgaatcttatcttctggctcttgcatttgtctgaaggccttaacaaatatgatgtcagctgcactgcctgtgtcaaccaagacattgtggaccagcaatcctt

SEQ ID NO: 74987 - DNA, 439 bp, Zea mays
  unsure (1)..(439): unsure at all n locations
cgaacaatgggtttcgggctctcatgcttgctaagttntgcatactatatcattttgacataatatcagttggcagccaagtccaacatgaaggccaatcaacattatgcaccatccaatgattaagtcaggttcggctcaattatcactcttaatgcacttagatctcaaccaaatatcatattcaatcacaacctcatgatgatttaacattacatttgatactttaacctaatgatgtgatgatctatcatgcacatctaacaactttatgtgtcgcataaaacctaattttgtgttaaaaagacacatagtgcctcacaggccaaatgggtgtacacataaatctccaccccgtatgcacacagatgatgaagcgccccaacacccatgcagatagccaaatactcttaaccgatcatgtntcagaaatatgcac

SEQ ID NO: 74988 - DNA, 409 bp, Zea mays
  unsure (1)..(409): unsure at all n locations
gcttgtgatntatcctatcacatagttttgtattgtgaccatatgataagaatcattattttccaattggccctttatttcataatcaaaaactgatgtataccctcaagtgcttcatgttccttagtggctacacaagtcacaaaagagataagatttganaataatatgcacttgagattcagttggtaccacccttgctactaactccaaatatgacttatacatccattatcgagcacccagcttgatccatggagggagtgatcatttttcttatcttgctcttcaaacatcacatngtgatcctgttacgagcttggataggttgccgccaagtgcccttgttccataggtgtttctttgtgggttatacttagcgttaccttttcttgatacatcattggtt

SEQ ID NO: 74989 - DNA, 423 bp, Zea mays
tctttaatgctctttctatataaaacatccatctatactgatcatgaccaccgaccttagcctcatatagaagatgtataaagagatgctgcataggattgaagaaactcggtggaaatattttttccaatttgcacaaaagcacctgtgcctctttctgtttttgttccatcacatctcttctgatttctttagcacacaactgtctgtagaaatagttatcttcagctaatgttttccatacaacatcggaaatgtacccacgaaacattacaggcatgagcctttccataattatgtggaagtcatggctcttcagtccattcatcttcattgtcttcaagttcacagatcttctaaaaccagcagcataaccatcgggtgtgatggaacttcccaaggtattaggcccacctacagatc

SEQ ID NO: 74990 - DNA, 437 bp, Zea mays
  unsure (1)..(437): unsure at all n locations
agcttgtgaagattcttcattccaacatgtgctaatcggcggtgccagagccagcccatgttagtcttagcaattaagcaagtgtcgagttcagctctatcaaaatctactaagtatagctgaccctctaacactcccttaaatgctactgaatcatcacttcttctaaagacagtaacacttatatccgtaaaaagacagttgtaacccattttacataattgcgaaactgaaagcaagttataatctaaagaatctacaagaaaaacattggaaatagaatggtcatgagatatagaaattntacccaatcctttgaccaaaccttgatattcatccccgaatgtgatagctcgttggggatcttgttttttctcataggaggagaacatcttcttctcccctgtcatgtggtttgtgcacccgctatcgatgat

SEQ ID NO: 74991 - DNA, 435 bp, Zea mays
tccttcgaaggatgttctgtcaaaaatatccctcgaggtactaatgagcatgttgatttgctagctaagtcagcagcacaggggctgcccttaccttcggatgtgttcttcgaaacaataaaagcaccttcagtggaacttcttgaaagagcagtcctcaatatatctcctgtttatagtgaagactggagaactgagatcatctcttaccttcagggtaacttcctttcagatgacgaaacttataacaggaggatagaggcaagagctcgtccatatgtcatgatagaaggggagttgtacaagcatggagtttgtgctccattactcaagtgtttatctagagccgaagacatagaattaatgaaagaaatacatgcaggcctgtgtggatctcacattggatctaggccgttacttggaaaagttttccgt

SEQ ID NO: 74992 - DNA, 429 bp, Zea mays
agcttgttcattgcactcaaccgaagtaccgctgttggttttccttcgtaacaagaggaagagcttcaggaaaatttaaaaagtcaagaacttcatcaaaaattgtgaggaattcatcattaaatggcaagggtacgctccactgccagggttacacgtgacggaaaagaagccgaagctgctgaaaccgctccgatttccgaagtgatgaaacggtcggggctagtagttccggaggatgtttctgacgaatgtgcacctgccactgaaactgagcaggttggtgctgaggaaggtgaatctgaagatgattacagtgccctgccatctaaacctagccacctggagtttgggaggtccactgttaccgaagatgatatggctaagttgatgaagttaggctatttcagtgaagccaaaaagaagctg

SEQ ID NO: 74993 - DNA, 430 bp, Zea mays
  unsure (1)..(430): unsure at all n locations
tgcctanaatggactgtcagtgtattagtaacttagtgtgttatagctgaaactctaaaaaacagccaatggtgctctgtttggagctcagttgtgattaatccatatggtcttagaccaagagctgtgtagcaaaatggaagaccatatataggagaacaaatttatttaaatgagtttggtttggtgctacacaaaaaaaaggaataaaagtggctcaaatttggactgtcacctaggtggctgaattttgaattttcggatttggaattgtataagtctgaatttcagtgattgtgactgattttggagcttcctgatgcataatccataaggttttaaactatggtttctatagagaaattgaagaccataagttggggtacaaatgtctttaagggtgatggatatgatcctacacaaaaagtgt

SEQ ID NO: 74994 - DNA, 424 bp, Zea mays
agcttggcttgaccacacgtccacgacctcatccataccacattcagtggatcaatgattcaggcaaggttaaggtaacacacatggtacgagtgcatttctccattggtatgtattatgattatgcggattgcgatgtagtacctatggaagcttgttctcttttgttgggtagaccttgggaatatgatactgatgcacgtcaccatggtaggagtaatacatacacttttaggcataaagataaaaacattactttgctacctttgactcttgctgaaattgtacaagctgataaagatagagctgcaagtacccataagaaaacaactaatgagacagaaattcagcaacaaattatattgaaagctcctgtcatgcttgctactaaatctgatcttcttgaaactcatgctactgatgc

SEQ ID NO: 74995 - DNA, 413 bp, Zea mays
gcttgcacaagtttctcatacgcaccacatagagcagtagatgttctacaccttttacatagaccatagtgctagccctttcctcaacatcaagagtaccaatgaactcttccacattgaacactcgtctcttatgttagagagaggtagctaagtccttccaagaacgtgggtacttggcgactataccggcaaccacaaacttgtcaagcaaaggacaaggaaaaagatcgagctccttagctagtgcctgaaactcatgagcctgttccactacagatcggatctcaaccatctggtaaacatacagctgctccatgagatacacgtcgcgtccagcgtttataactccacactttgcaacaagagcatccacaagtcttccccgtgggaaggagatatagcttttctgg

SEQ ID NO: 74996 - DNA, 440 bp, Zea mays
cacctgcggcatgcaagcttttatagacaggagagattcaaagattactaccacctccattaatccacatggatatgccgcttatagataagttgataaaacaagtgtcatgatcctcaaagaaggggtatgagaatgatcagaagtgagagatttatgcagatcaacatctgatacttgagaacgggttatagcagatacccagataacgaggcagaatcattaagggatccagagattctgatgataaagccacaacatgattcacaaggaaagagatcaccatatccatgcgaaaggagaggtaggcaacaagatcagctggatgatcaacaggaatgctatgaagtttcacgggcaaggatttatggaaagaaacagggccttgatagggtttgcgcaactatacaccaccaacaatttttgtgacactacaagtg

SEQ ID NO: 74997 - DNA, 221 bp, Zea mays
  unsure (1)..(221): unsure at all n locations
tgatggtcaagtcaaaaggcaggccccaatatantttgtttctgaagtccttagtttatcaaagaaaaattatacagagttggagaagatactgtatgctgtcttgatggcctccaggaagcttcggcactattttcaagcttacaacataattgttccttcatcacaacctctgaaggatattatgaggaacagagaagctactgggaggattggaaaat

SEQ ID NO: 74998 - DNA, 352 bp, Zea mays
tttagtattctatccttaatgaaaagtaccatagtatagggtaaattccttgcgatataaaaagttcaatggtgcataaaactttgacatcaactatatgtatgcactaatttaaaggaatttaatctatccttttgggttctaagaatgatgattcatttgcgatccacatataaggatcatcatttgtgaaaccctctcttgtgtttctaatgctctcttttctaagtggttcaataaggtccttccaagtgttttcaagatggattcaaaatccacgaatataagagtcttggttgtttcaatcattgagtgtcaatggggctcatatcaagtatgattgaaccacacc

SEQ ID NO: 74999 - DNA, 431 bp, Zea mays
tcggatccttagccttgcaacttttgtcaatatggcccgaaacaacctgcgaatcagttttaagtatggcccttctgattcccattgcttttagcttccgaagacctagaatcaatgcttcgtactcagcaatgttatttgtgcagttaaaatcaagctttgccgcataacaagttttgactttggaaggtgaaaccaacacagcagccgctcctgctccaaaggttccccaagatccatcacaaaacactgtccaagcttcgttgtctttattcgtttcgtcctcctgagcccctggcgtccaatcagcaataaagtctgccagcgcctgtgactgaatcgaagatctatgaacatattcaatacaaaattcattgagctctgcagcccattttccaatccttccagtagcttctcggttcctcatgata

SEQ ID NO: 75000 - DNA, 263 bp, Zea mays
aaggaaatagccgaagcgggagcacaacaagctcagccgaagcaggtcatgcacactgcttcgtatcattcgccttacatcccagaagatgtaggcaatcaccctgcagtttctgttgcttcggcgagtcaacctcaagctttctggcaacagccttcgcctccaccaccgcttgaacaaggccagcagccagaaaggagcccatatgctccacaccaaagggacttcagagaacagtccgaagctcgcacagtcaacagcac

SEQ ID NO: 75001 - DNA, 430 bp, Zea mays
tcggcatctttatttgcttcttcttcctgagcccttggcgtccagtcagcgatgaagtctactaacgcctgggactggatcgaggatctatgtacataatcaatgctgaatttgttgagttctacagcccacttcccaatccttccagtagcttctctgtttctcataatatctttcaaaggctgagatgaagggacaattatatggaatgcctgaaagtagtgttgaagcttcctggaggccattaagacagcatacaacaccttctccaattctgtataatttttctttgataagcttagaacttcggagacaaagtatattggggcttgctttttgatttgtccttcaagtttctcctgcacaagcgtcgcacttactgcagaatgcgaagctgccacatataatagtaatggagcccctggcgcac

SEQ ID NO: 75002 - DNA, 369 bp, Zea mays
  unsure (1)..(369): unsure at all n locations
agcatggtcagntccatggtacaccataacttatcacgctgagctaaaaggtttagttgagaagcacaaattggttctatgttgcaacaatccgaaagctaaccttgtagagtcaatttggtttgatcctgaaagaaagagagccacttatcttgctagtgcacttgcatagggctatgagaggacaaccaatccatgtccaaaataacgtcgtagcactgcaaggggtaatattttgagattggtgtagaatgtatggccttgcanagcaccttgcattgaggtatataacataagcaagaaataagttgaccaattaccactcgcaccaagacatgttgaggtagaggtaccacatctgaactcaaa

SEQ ID NO: 75003 - DNA, 419 bp, Zea mays
tgtaccttataacacgaggatacaagaagctggagtggttgtctgaaggctcttgaactgcttgaagcattaatgtagctttggtgcttttgtgactgatcagctctggagcagctagagtgatgtagttgtgggcttttgaacaatagctggagtgatatgaaatattaatgatgtagttgtgggcttttgaattgcttcaagctggagtgatgtcgctgtggtgcttttgtgactgatcatctctggagcttttgtgaatgatctaactatctgcaaatgatctaattgtgaatgatattataaattgcgatgcttttgtgaacatataattgtggtgccttgtgttatgtgatggatctattactgtgatatactgattaactgtgtatgtctttattatttgtgtataaaaatct

SEQ ID NO: 75004 - DNA, 438 bp, Zea mays
agcttaggtttggctttaagataacacagataggtttggtattgctatgatatatttttgtggacagcaaataaagtttttagggacaacctttattcatatctttcatttctctttccttaatttccatttagggtttctagggtaggtttgaactacaacagggctttaataatttcgaaaaattctgtaaaaattacagcgggttgtcactagctattttagctcgctttaagaatttgaggcttaaagtaaaaaagttaggccttagacaaaaataacaaaagttatgcaataagggccacttcacactacacctcctagttaggggtaggttctgtcctaaaggttatttttcgtgacatcctctggtaataatatgtccttgtgctaagaatcacaggagactaaggggtggttatttagctatgattctct

SEQ ID NO: 75005 - DNA, 313 bp, Zea mays
tgctgtttgttaatagaatcccgacctgaaaccataccgactaacgttcacgatgttgcatgtattttacataggccagaatggacctcctccacaagccgcttcccaatacatgggagaatgcactttatggggacacctgacgcacacgctctgtaccatggactccccatgaaagagtagtgaacccactgtctagctatgctgctagcagaaatacagccatcaggttcctctccaatctttaaatacatgatgattggacttctacaatcatcagagacagactcggggtgatctataaatttacact

SEQ ID NO: 75006 - DNA, 438 bp, Zea mays
agcttacaggttctcggagatgaccaggggcttctgaggaagaatccacccgaggcatgtcaggtcaatccacagctccagtcagaatgacgacaaaggtagccagcttcagaggtcatagtacacctcacaatcttcggggcaacaacaaagctctttcatgccaccagctccaaggggccgaggcgccaggggctttggaggaagatatggggatcagcccaggaagatctattgcttattctgtggtgaggacaagggccataataaaagaatgtgccaaatcaccattcagaagcaaaaggagatcgcagaagccgaagctcggcagaatcagccgaagcaggtcttgcgcactgcttcgtgccattcttcctatataccagaatatgtgggcaatcatcctgcagcttctgttgcttcgactatccattcaca

SEQ ID NO: 75007 - DNA, 435 bp, Zea mays
tatctatgttgtgcttggtgcgtccaggaagctgcgccactattttcaggcacacagggttgtggtggtgacctccttcccgttaagggccatcctccacaactctaacgccataggcaacatcgccaagtgggccgcagagcttgctgagttccaactggacttccagcctcgccacgctgttaagagccaggtcctggctgacttcatcgtggaatggaccacatccccgagcgttcctgggggtccggatcctaactcggaccccacacctatggagcctatggctccggtcttcaccgagccgtactggatgctctacttcgacgggtctgcccgccagcaaggtggcggtgctggggtggtcctcgtcgaccccagtggagatcaagtgaagtacatggtgcaccttgagttcaaggccaccaacaacat

SEQ ID NO: 75008 - DNA, 436 bp, Zea mays
agcttaatcccgaagaatgtgttttcggggtaccatcatgaaagttactcggatttattgtcagccaccggggaattgaggctaatcctgataagatcgaagctatcatgaaaatggaagcaccacgatcacaaaagaaggttcaacgacttattagatgtatggcagctctgagcagatacatattcaggctgggagaaaaaggtttaccattttacaagctactcaagaaagtggataagtttcagtggacttcagaagcacaggaagctctagatgcactgaagaaattcttgacgacaccaccagtgctgaagccgccacgacgagccacgtcaactcaaccagctgaagatctgctactgtatatctcttgcacgactcacgtggtaagcaccgcgttggtagtcgagcgagcaaaagaaggacatgccta

SEQ ID NO: 75009 - DNA, 440 bp, Zea mays
  unsure (1)..(440): unsure at all n locations
ttctactagccccgagaggcagagggggagaagctctggnggaatgtatggtaatcaacccaaaaaactgttctacctattctgtggtgaggacaagggacacaccacaaggacgtgttgtaacacccctggtgttactaaaactgaaatctggcataacatcatgtgcattagcatatctgtgattttaatgactctagagtgcctttactaggtttaagaaaactttgaatgcaagtagtagtgagtaggaagtttagagaaaaccctcatatgtaatcccaaataatgaaatttgaatttagtcatattttgtccaaagtcaaattatcaaacttatagagttttccataccaaatagctntcatgtgtattggatttcaggtcttataggaaagaggtgggatttcagaatctggatctcaggtttagcgtgattc

SEQ ID NO: 75010 - DNA, 421 bp, Zea mays
agcttcggcatagtgacatgtctcaagacgatggagtgaaccgacctaaagatgaaatgaccaataaacccatgatagtttgtgtcatgattgtaatcgactgtgaagggcataaatgtaatttcacacaggctgcgccctgtgcctataaatagatgaacagtgcccctgtactattcacgctatcttgtaatcgctcgcgcgcaacacttggatttttgccttctatcaagccgaaggtataaatgtaattaaatatcgtatttaaatatccaagtttgtataatgataatatataaatgatattattatgtgattatttgtgtttatcttttatgttttatatgtttcatctttcattatcctataaccgtaatcatgaaggtacgtccttcatgaccttcgttcgaagatcattata

SEQ ID NO: 75011 - DNA, 441 bp, Zea mays
  unsure (1)..(441): unsure at all n locations
actcagctgagcagtaccggcttcgtctganaccctggganactggtgatcagcatgtccttcagcttctgccatgatgtgattgttcctggccgaagagaggagtaccaggtttgtgcaacattcttgactgccatgacaaaagatttcgctatgactgcagtattgcccccatatgaagatatggtagcttcgtagctcatcagaaactgcttcggatctgagtgtccatcatacatagggagctggggtggcttgtaagatgggggccagggtgtagcctgcagttctgctgacagaggagaagcatcatcaaaagcaaaatttccatgatggcaatcttcataccattcatcctcgttgtagaagccctcttggtgcagctctctgtgctggggtcttcggtgttgctcctcttgggtaagatgacatacttcttca

SEQ ID NO: 75012 - DNA, 341 bp, Zea mays
  unsure (1)..(341): unsure at all n locations
agctngaaagactgcttcggcaggagagctttctaacgtgaagacttgttcggtccacggagtcgctttatccgagcgcgagttacttctcgcagaaggtgatgagtgaggtatccgtatcccggaggcgtaggagtccctcggctcggtcagccttggctgcttacgtgtactccgtcgtttccaggatccgctttccgaagtagtcaagaagcacgaaagtaatcctgctgaaaagagatcctttttcgaggaaaaattcgacgcagagggggtctccccccttttagcccccgagggagggtcgggctttgcctacgttaggccgaccctcccttgac

SEQ ID NO: 75013 - DNA, 409 bp, Zea mays
  unsure (1)..(409): unsure at all n locations
ntaatgctgaatatcatattggtgataatcttaagatcattttgactaagtttggttttataaaaaagatcatataaaatacgaattatgcaatgaaagtagttggcatgagagcagcttgataccaattccaaaatttcaacaacatctacaatccagtttttaataatgcaagcccttacacattttctcttggtgatggatggggtcataaggggatatcccttggcgtatgtttttttgcgaacgacatagtgttagttgatgaaagctatgcaggagtaaatagaaaactagagttgtggcaagagactctagagtacaaaggttttaggctcagtagaactaaaactgagtatatgagatgtgacttcacactattacacatgaggaaggagatgttagtttg

SEQ ID NO: 75014 - DNA, 144 bp, Zea mays
agcttgtcctattggtgggttataaagtatgttatattaatgatgcgactatgaaggtattgatgaagtgagagtgtttatagtcaaaatgacaatataatgaccacccatttaaaataaataaattagggggtggttgctccc

SEQ ID NO: 75015 - DNA, 434 bp, Zea mays
tcagcattattagctgaggcgtcacccagcagcgactgctgatcgctgagttttaacatcggtggtgctcagccatcagagttgtccgataataatgctagttagctagttagttagtagtaatagatccatcaacgaaggtaagtgtcaccaataaagcacgattttttcggtcagttagcaccagaacccaacccaattaagagagccttctggaagttctggtccgttcttcagtggagataaggtaattatgtccctctcactagtgagatgtgcgataactgattaccaagcatgcttcatggttttaaacttttctgtagtggatggggtacgccgatttaactaggatgctactggttgttatatactgccttgagacagagggaacatgatggtggtaatcagtggtgatgcgagtgatgcctgct

SEQ ID NO: 75016 - DNA, 314 bp, Zea mays
aacttatgggagtgagttcaccggaggtgggttcttatgttggtcacttgttatcaaatgcttcgaatcaagaactaatgcacacatttgcttagtattatagacctttgtgttactaatcatcatctttttatggacattatgatcattagacgaacgtcgtgaatgacatgcctacattatcttatagattagctagaactcaaaatgacgaatacaaccattgtatcccatagatttatttgtatttgcattccacacaacatgcatgaatattaacgaaatttatatttctaagataccttctgattgct

SEQ ID NO: 75017 - DNA, 437 bp, Zea mays
  unsure (1)..(437): unsure at all n locations
ngaccatatgggacgccgaataatgcccctcacatcttctctcactcaaatcattcttcacatagaaccattgtttcatccaagagcccgaccatttcttccgaaatgttggtatgggatatcttgcgtcagagcggggcacaaagttgtagcacccgaagttgttgtggtactgatccttcctaggtgccttcgtctggtaagataattcatgaatattatagaagcacatggcatctggctctagcccttggatcatcatagcccaaataaaaactcccactttaattaaagctttgggagtaagctgatgaaggtatatttcaaatgtatttaacacttcaatcagcatcctatgcaaaggaaaacacaacctagccttcacaaaacatttaagaaccactacttcatctgcttcaggaagaggaacggtactc

SEQ ID NO: 75018 - DNA, 425 bp, Zea mays
ttaagcgacgcggctgcagctttcaaagtaaagatatctttttttgtggtcggagctaacagttaccggcaaaatacgacaagcggacatgggctgtccggtgcacaccggaccgttcggtgcgccatgtccggtgcgccatcttctgaagctcaaacggctacttttaacggctagtacacgtgggatgtctggtgcaccaccggacagaccggtgcacctgtccggtgtgccgcaaaaagctgcagaactgctttccaacggctatatttgagttggggcctatatatacttcacccaaccggccatgtggaggtgtgggagcacaagaaacataccaaggcatattgtagacatttccaagtgctcaaacacccaagtgcttaatagaatcactcggtgattagcagaagtgctttgtgaag

SEQ ID NO: 75019 - DNA, 401 bp, Zea mays
tttacgtgtgattattttggttgcacgtgtgttatgaataaaaaaggtaaactactaagcaggcacgacttgaaaattctccgggccatctttcttgagccaaccagtcgattaggcacgtttgctgcgctagaactccagtcaaactagtgggaactgcatcgatctcttacgaaaaaatgatgtgacaggtaataatcactagaagaagaagaaaaaacactcggtcgaattaatcaatgcttgaaaatgaaaatctcatctcttaagcatcccgtcctcttatcattagacttttggaaacctcttgtggataccttatggccctgttcagagttaataagtagtcagcgaacaaattggtaattagattaaatcatctaactatattagctcactaa

SEQ ID NO: 75020 - DNA, 430 bp, Zea mays
agcttaagctacataagcagccattcctagcaaccatgccaaggaattttcctaagactcctgcctcctcttcaataggttggccgagctcgttacagataactacaattcgttttcctttttgaagggtccaaacatgtttaagtttgttcggaccacgacttattgcttcattagtttgacctatgcagttttatgttagaaacaattaaaagaatggttgaaattttaaaataaattacaatttatgaagtgtaagaaccttcaacagaatcctctatatccgcatcatcaggagaagggtacactccagaagtagtctcaaaagatgttgtatcttttttatgatgatctgaaaacatataataatggagagatttcagttgctgtccctaaacatataataaaatttgaaaagtaggacatagta

SEQ ID NO: 75021 - DNA, 329 bp, Zea mays
acaaaaaatggtatggatgccaaacttcaagcctcccgaaaaattgaaccataaatacactatatactacagctccaagttacaataggccacccccggtaccgcccaaaaggttctacaataacacctaaacctccctcaaaaccatatccgccgcttcgctcagaaactggccgacaaccttgtccaagatggcttcggccaattatctaaatacatcgcctctcttccggcgggggccccggagatgcctcaccacgttctgagggaagagaagagaccactataatactatttccaacccgcgaccaagtctggaaaagaaaata

SEQ ID NO: 75022 - DNA, 431 bp, Zea mays
agcttgtagactaacatctcatgcataatatatcaacaagagcacatagatgaactgattagcaagcttaagaccattgaggtagtgaaaataagatatatccatggcttagcaaagcatatatatgtcgagcaaataaaaaaaataactgcaaagctggcattattcatgtagtatatggaagtgcaaaggacgacacacaaaatggaaagagattacattactgaagaattaagacatccgtgaaaggcatggtcctgtgcaactaaaaaaagacactcgcttgatatatagacctaatatgtagtacttagttttgcaaatatttgcctattatcttgggagatgccatatcaaagagactacaatttaattaatttctagttctctatccatactctaataacattgtgaaagagaacaaaatattg

SEQ ID NO: 75023 - DNA, 428 bp, Zea mays
  unsure (1)..(428): unsure at all n locations
ntaggattnntcaaaaaaattactacgtacgatatgatgtcaaatgctgcagccttcacctaacttgaactagcagaattccaacgcttgacgtttttttttgtcatggcttgtttgtttgttaagcttgcgttacggaatgaagggaatgttcttgtttcaccagtttctgactggtggtatgcaaaggtgaatgttttgcagtgcgtctgttgtgatcattttgtcttgccatatgctcccatttaccatgttttgttggatattttcacgtangataggtcaggaaagaaagaaagaaaaaacaatacttttcataataatataaaataaatgataacggataaaacgcagggagagggaagaaaaaacaaagggagacgacgcatatgagcaaaagatgccatgcgctctttttccctcaccac

SEQ ID NO: 75024 - DNA, 411 bp, Zea mays
agctttcacttagtgtcgcttttcaccctcatactgatggtcagtcagagcgaacgatccaaaccttggaagatatgttgcgtgcttgtgttctgtcatggaagggtagctgggaggatcatcttacattggcagagtttgcttataacaacagctaccaggctagcatcaagatggcaccacttgaggctttgtatggcaggcggtgtatctcccctctgtgttgggagactctgggagagagatccctggttggtcctgattgggttcagcagacttcttaaaaggttcgagaaattcgtcagaatattttggcagctcatagccgtcagaagagttatgctaatgtgaggaggcgggatgtggaatttgcagtgggtgaccaagtccttctcagggtatcacctacta

SEQ ID NO: 75025 - DNA, 393 bp, Zea mays
atcttctcttagaaaatatatcacatgagcttaagacaatgatctcgacgttgagtatacgacggttaatacttgactcttgagtggtcatggttttctcctaagcttctactcgttcggttggagcaaactggtatccctattctagttcgcctctgcttgacgatcacattgacggtttctcatctaacctatgaatggaatgcctaaacgctttctaaaaactaatgccgacggtttcctcatatctctggaaggcatattaatctaatctgccgatcgcttttcctgcatatctaattagttgctcatccgtgagctctgaaatgctgcgatgggcatagaaatatgcttagagctgaaataacagtcttccatcgcactccctcatca

SEQ ID NO: 75026 - DNA, 436 bp, Zea mays
  unsure (1)..(436): unsure at all n locations
ttaaaaagtgctctacaactttggtatttttaccttcacaagattcaatagttagcaaggtcaaaaagtgttaacacgatagctctgtccagatttggacaaattcagatttgcgacttcaaaaatccacaactacaggttcagacatccaaacaaattgatcctagactttctggaaagggaataaaattttctacatatcatttataaatatctcaaggtgattcaatatttaactaaggacaaaagacactagaaggctttgctgtccagaactggacagattcagtcttcacaccttaaacatccataactaaatcttcagatcaccaaaaagagtgatccaagactttttggaaagcttagaanaagtaatacataacttttataatcatcaagaagtgattctatgtttaaccacatcatacaattcagt

SEQ ID NO: 75027 - DNA, 441 bp, Zea mays
tactcagcttcgcctcgcctgaccctagagctcggactcaacctcgaccttcgacgatggactccgcctcgcccgaccccagggctcggactcagcctcgacctcggacgacggactccgcctcgcccgatcccagggctcggactcagcctcgaccacggaagacggtctccgcctcgcccgaccccagggctcggactcagcctcgacctcggaggaatcaccgcctcgcccgaccttgggatcggaccgaccatgccgcagggggtacatcattaccctaccccagctagctcaggctactgggaacaagaccggcgtcccatctggctcgccccggtaaacaagtaatgatggcaccccgtgtgctccatgacgacggcggttctcagccccctacagaagcaaggagacgtcagcaaggacccgacagctccgaca

SEQ ID NO: 75028 - DNA, 239 bp, Zea mays
cgagctcagctattgtaggcttatagagttgttcactccgtgagatggggaaaaattccttgaatagtcctgtcacatatttagtgaaggctatagtatcagatttgatgcttagtggactactaaacagtactaactgaaatgttctaaagtaccttgatggagtgctacgcgagttactagtgatcaaacgtaggcaggtttgctccacttatgagcgctttacccattgcctctac

SEQ ID NO: 75029 - DNA, 420 bp, Zea mays
  unsure (1)..(420): unsure at all n locations
ntagctctgtcgaggggtagctctcctcggtggagatattgctggtacggngtctaccagtttcgattaggcgtgaccccattccgctcttcctcgatgcgtagagcctcaccctcaggggtcgagggtgccttgggctgggccgagggtgcctcgggctcgggcgtgtcgtcggtcttgacggagggttgatgtaagtctcgggagaagacgtccgggggaaccgttgtccgtcccgaggctattttagccagctcgtttacagtctcgttgtatcgtcgagcgacgtggttgagctcgagcccgtagaacttgtcttctaggcgccgaacctcgtcacagtaggcttccatcttcgggtcgcggcaatgagagttcttcatgacttggtcgatgacaagctgcgagtcgccacgagcg

SEQ ID NO: 75030 - DNA, 57 bp, Zea mays
agcttggctctcgtgcagttcttgaacaccaataatacgttcaggtgggactgtggg

SEQ ID NO: 75031 - DNA, 408 bp, Zea mays
tggcttccgtatcactcacacctacggcctgtcggagacctatggaccatccacggtgtgcgcctggaagccggaatgggacaggctgccagccgacgagcgcgcccggctccacgcgcgtcagggcgtccgttacgtcggcctggagggcctggacgtggtggacccgaagacgatggtgccggtcccggccgacggcaccacgatgggggagatcgtgatgcgcgggaacggcgtcatgaaggggtacctgaagaacccggaggcgaacgcggaggcgttcgagaacgggtggttccactcgggcgacctgagcgtgcggcacggcgacgggtacgtcgaggtgagggaccgcgccaaagacatcatcatctccggcggggagaacatcagcagcctggaggtgga

SEQ ID NO: 75032 - DNA, 330 bp, Zea mays
  unsure (1)..(330): unsure at all n locations
aacgttatcttgatttccgacaaaccaacatatctcttgagaaagtcttcgttagacaacttactcttgctgagtaattgcgaacttctggccttattgcatggtgccattcaagaggttaaattgctctgtagaggatagggctaaaggccggtgggcctgtccttcttatattaggatatcccttctataaaagaattaatgatgatcgtctcggacgctaacatgtgtttcaattccaaccactctatagatcntaagtggaaaccctcgtagcctttcttttgcctctctccgagaggtgaataaagtcttgcaaacttgtctcat

SEQ ID NO: 75033 - DNA, 429 bp, Zea mays
tatcctgacccaacaaagaggtgagctgaatggaagtgccattaaaccagatttcatcagaccgcttcatctgctactaaccgactatatacattgaatcttttgaagaagaaaaaaaaactacaacttgaatcttaaacgacaaggtcaagataaatattaccgctgcacccatggtactccctccataatttttttctatttgaggttttgtagttcatttccgtactgtttggcgtcaattatgaaaggatggaggcagtataacacaaaaaatgcaggggtttgctgttctgacgagagtcatcatgcaaccaaaatgaaagtgatgctccagccataactgctccttgtggtaccaagttaccaactcggaagcagactactgattcgatagaaagctccctactctttcctagcataataatg

SEQ ID NO: 75034 - DNA, 420 bp, Zea mays
agctttcacacgcttgccccagtgatctgctaatcatgtttgaataactctctgataagtcgctccagcgtttgtgaggccgaacaacatggaggtatagcagaaggctccgaacggggtgatgaatgctattttttcctcgtcttcttttgccagactaatctgatgatacccagagtagcaacccaagaaagacaacacagaacatccggcggttgaatccaccacctggtctatcctaggaagcccgaagggatccttcggacagtgtttgttgagatccgtatagtcgacgcacatgcaccaatccactttattctttttgagtacaagaacaggattagctaaccactcaggatgtaacacctctctaatgaatccggtcgcgaccaagcgagcctgctcagcacggatggcttc

SEQ ID NO: 75035 - DNA, 430 bp, Zea mays
tatgataaagttaactgggcaattttgtattgcatgatgcaaaagaaggttttggtgacatttggtgtgattgggttatgaagactgtcaaagggggtaaagtggcgattaaaagtaatgatttaattggtccatattttgcaactcataaaggtgttcggcagggtgatcctttttcaccccttttatttaatctggttgctgatggtttggcttgcattattcaacaagctcaggaaaaaggtttgattcgtggtctgattcctcacatcattccaaatggttgttgttgtcttcaatatgctgatgatactatctttctaattcaagattgtttggaaggagctagaaatcttaaatttatcctctgtctatttgaacatatgtctgggctgaaaataaattttcacaaaagtgaaattatttgctt

SEQ ID NO: 75036 - DNA, 124 bp, Zea mays
gctctgtgtggagatgggagaggatttgatctctttggtgtgtcttgtattgaatgctagctcttgaaggtgtagaagagtggaaaacttggatgccattgaacgtggggtggtttccctcttc

SEQ ID NO: 75037 - DNA, 393 bp, Zea mays
  unsure (1)..(393): unsure at all n locations
agcttgcccgagctgggctatgggcgagccttaggtgcgccccctgcctgaagaggccctcgggcgaggcgtgaattcgttcgggactactgttcccgcccgaggccgggctcgggcgaggcgggattgcgtcccttggtagacgaggccttgacctaaaccgcgcccatcattcttcgcggttcgtgctgatggtggntaccagctgtgtttaggagtggtgggggtacccctaattacgagacccgacagtagcccccgagcctcgaagggagtgttggtactcgctcggaggctttgccgcattttttgcgaggggaccggcctctatcggttatattttgttccggtgggtgcgcgcgagcgcacccgctgtgtgtatcctctgaagcc

SEQ ID NO: 75038 - DNA, 439 bp, Zea mays
  unsure (1)..(439): unsure at all n locations
tctaaagggagagcacattntaggattaacaaatgttcattttgagaaagacaggatttgtagcgcatgccaagcagggaagcaaattggtgctcaccatccacacaagaacatcatgacgaccgacaggccactggagctcctacacatggatctattcggcccgattgcttacataagcatcggcgggagtaagtactgtctagttattgtggatgattattctcgcttcacttgggtattctttttgcaggaaaaatctcatacccaagagaccttaaagggattcttgagacgagctcaaaatgagttcggcttgaggatcaaaaagattagaagcgacaacgggacggagttcaagaactctcaaattgaaggcttccttgaggaggagggcatcaagcatgagttctcttccccctacactccacaacaaaat

SEQ ID NO: 75039 - DNA, 441 bp, Zea mays
atcttaagtcacctgcagctgcagcttctaagggagaacacgtgataggtttattctttgtgaccttcacaaaaatagaccttgtgcagcttgtcaagcatgtaaacaagtgggaggagcgcatcacatcatgaatgtgatgaccacatcatgacccctggagctgctacatatggacctcttcggacccgtcgcctatctaagcatatgaggaagtaagtttggcttatttattgttgatgacttttcccgcttcacttgggtgttctttttgcaagataagtttgaaacccatgggaccctcaagcgcttcctaaggagagctcataacgagtttgagctcaatgtgaaaaatattatgagcgacaatgggtccgagttcaagaaccttcaagtggaggagtaccttgaggaggaacggatcactctccagctctcctc

SEQ ID NO: 75040 - DNA, 439 bp, Zea mays
tctaaagggagaacacatcttgggactaacaaatattcattttgagaaagacaggatttgtagagcatgtcaggcagggaagcaagttggtgttcatcatccacacaagaacatcatgacgaccgacaggccactcgagctcctacacatagacctattcggcccgatagcttacataagcatcggcgggagtaagtactatctagttattgtggatgactattctcgcttcacttgggtgttctttttgcaggaaaaatctcatacccaagagaccttatagggattcttgagacgagctcaaaatgagttcggcttgaggatcaagaaaataagaagcgacaacgggacggagttcaagaactctcatattgaaggctttcttgaggaggagggcatcaagcatgggttctcttttccctacaccccacaacaaaat

SEQ ID NO: 75041 - DNA, 429 bp, Zea mays
  unsure (1)..(429): unsure at all n locations
agcttctaaagggagaacacactntatgactaaccaatgttcattttgagaaagacaggatttgtagcgcatgtcaagcanggaagcaagttggcactcatcatccacacaagaacataatgacgactgacaggccactggagctcctacacatggatctattcggcccgatcgcttacataagcatcggcgggagtaagtactgtctagttattggggatgattattctcgcttcacttgggtattctttttacaggaaaaatctcaaacccaagagaccttaaagggattcttgagacgagctcaaaatgagttcggcttaaggatcaagaaaataagaagcgacaatggaacggagttcaagaactctcaaatngaaagctctcttgaggaggagggcatcaagcatgagttctcttctcctacac

SEQ ID NO: 75042 - DNA, 381 bp, Zea mays
tctgtcaagtgggcccgcctgggtgtccggtgcacactggacatctactgttccttgtccggtgtgccagtatgggcacgcctgccatctgcgcgcgcagagcgcgcatttattgcgcggcagagagccgttggcgcggagatagccgttgctctggagtcgcaccggacagtccggtgcacaccggacagtccggtgaattatagtggactagccgttggagtttcccgacgctggcgagttcctgaggacgacctcccttggcgcatcggacactgtccggtgtacaccggacagtccggtgaattatagccgagtcgcctctagaaattcccgaaagtggcgagtttgagtctgagtccccctggtgcaccggacatg

SEQ ID NO: 75043 - DNA, 374 bp, Zea mays
gcttatggtatgtgccgcaggcccgctcttgttatctgaattcacgaggtaatgttcatcatttggtatacaccttgaggggtccaccaaattctttgagagacagaactgggagctggacattttaaccgatggtcgccggacattccgagcctagtcatccgtatttgttggatcttgtcaggttgatcagtctattcacgagctctgctgtttgagactcagagagatgggtgaatgattcttcctccgacaggtgcgtttactgatcaatgaactgtactagtatctcgatcctacggcaaaggttatgttctcttgaacaaatgcagcatctctgaattatagcattccttggaaagatgagcgccatt

SEQ ID NO: 75044 - DNA, 422 bp, Zea mays
tgcacacatagctcatttgaatacctttgatcacatctcttttatatgctatgactaatgtgttttcaagtctatttcaaaccaagtcatatgtatattgaaagggaattggagtcttcggcgaagacaaagggcttcactccgtatctcatacttcgccatcactccgagcaactctctattctttggggagaaatgagcatcaaagaaaaggacttcatccttggggagagagttaaagctcaaaagcaaaaggaccggacttcgtctttggtataatcctaactcgtttacttatgaccaaaggggaagaaatcacttccagggctctaatggttccatttttggcgattcatgccaaaaagggggagaaatgagcccaaagcaaaagaccgcaccaccaccaccaaattcaaaaactt

SEQ ID NO: 75045 - DNA, 420 bp, Zea mays
agcttaatgcccctcctaaaagaatgtcttattttgttaagggcaaagctcccatgcctcaggataacaagggctatattttatatcctgctggttatcctgaggataagattagcagaattcatgctaagaaaactcattctgtttctcaccatgctcttatttataagaatgaggcttctatctctaggcgttctacccatgttaaaaatgcctaaaaggaaatctcctactgcatcaaatgatcataatatttcatttaagacttttgacgcttcatatgtgctcactaacaaatcaagcaaagtagttgccaaatatgttgggggcaaacacaaagggtcaaggacttgtgtttgggaacccaacgtgcttgtttctaatgtgaaaggacccaagatcgttggggtacctaagaac

SEQ ID NO: 75046 - DNA, 441 bp, Zea mays
  unsure (1)..(441): unsure at all n locations
tggaggcgtcgatggggatcctacttagagtagaatccttcttttcttctttcgtcgccttgaatgcgacgggttgcacctcgggtgtggaggtgtcgccttgctccaagttgatgatttgtttggagcctttgatcatcaattcaaagctcacaaactttcctatcacttcctcgggagacattagcttatatctaggatcaccacgaattaattgaacttgtgtaggattacgaaaaacaagtgatcttagaataaccttgaccatctcatggtcatcccatttggtgctcccgagattgcgcacttggttcaccaaggtcttgagctggttgtacattgcttgtggctcctctccttggttgaagacgaatcgaccgagctccccctccatcgtctcccgcttggtgattntgtcacctcatctccttcgtgcgcggg

SEQ ID NO: 75047 - DNA, 426 bp, Zea mays
  unsure (1)..(426): unsure at all n locations
ataatctatgctagtggctcgacgatagactcatatgcatcggccctttgtttaactatgttcaaatgatcccactttgcatgtgcgttctctgtatgcaccaattttagtgtgctaatgggcgatgattcctttgttataattgtgtcacacaactctggttttgangcttgataataatggggcttcacatacttcctttgtgaaggacacaactgtgagggaatcactgcatcggcatgcatgaaacaaattagtagagagagattaaaggccagtaagggtagaaaaatatattaggtgaaaccatttgaggacaatccaattatgtaagcagaaatttgttgttattgtttagataaagtatcattgcattntcgttatgttattatagtttgtagtactaatatgatagtatttacatat

SEQ ID NO: 75048 - DNA, 168 bp, Zea mays
gattgcttatattagcattatcgggagtaagtactgtctaattattgtggatgattattctcgcttcacttgggtgttctttttgcaggaaaaatctcaaacccaatagatcttaaagggattcttgagacgggctcaaaacgaatttggcttaaggattaagaaaat

SEQ ID NO: 75049 - DNA, 337 bp, Zea mays
  unsure (1)..(337): unsure at all n locations
gtcttagttagtcttagttttacagggtagtttgctatatcctgtgcatttatgtttgtcatgatgaactatgtttggtttggatctttgtaatgactgttaccagagtgtgggtataccctgcattttggtttacctattatgttaatggagttagttatatagttgggaaaccttttattccactttcctctntatctgagaagttgtgtggtctgtgttggagatcagagaagatgctcatctgttcagtgctgttgaagaattctatcctcttttcttatgctgcaagaattgccagatcagttctgatgtgtggttgcattctgcagatgtc

SEQ ID NO: 75050 - DNA, 375 bp, Zea mays
caaaccgaagcccacaaagctgaagtcgaatgtttgttagaaaagcttgcataaatgaatgaaaatctcgaagttgcaaaggcgaagcagaaaataagtgaagtggaaagatcaagggtgcaaaacaaagttgaagagcttcgagattccaaggagagatgctacgaaacttccttggagtgcgcgaggaagctgaaaaatagatttgcaaaggtgggagcatactcttcggaacataaatttattcgcggtgatcccgaaggggttatccagtggattggcgaagaggctgagcttttgatgatatactcagcgatcgtggggatttctgtgctttcgccggtgcacgaagggtcgcgtgaaatttggagaaag

SEQ ID NO: 75051 - DNA, 235 bp, Zea mays
acatcaaatcacaccactacaacccaccatcgcctcctgcagaagacccactcggttcctacaacattttggttaggacgtggaactaaatgccatacctcgctcctagtgaaagtgttgagctcctcttgcatcgccaccacccaatccgaatcttgaagtgcttcctctatcctatgtggcttaatagaggaaacaaaagagtaatgctcacaaaaatgtgcaacacgagatc

SEQ ID NO: 75052 - DNA, 412 bp, Zea mays
tgtgaaggttcttcatccccacatgtgctaagcggcgatgccacaaccaacccatgctagtcttagcaattaagcatgcatctagaccggcctcctcttttgcaaaatcaactaaatagagtttgccgtctaatacacccttataagctaaagaaccatcacttcttctaaagacagacacatctacatttgtgaatagacaattatatcccatattacataattgacttacggataacaaattatatccaagcgactctactaagaatacattagaaatagagtgctcatttgagattgcaatcttgcctaagcctttaaccttgccttgattcccgtcaccgaatatgattgaatcttgggagtctttattcttgacgtaggaggtgaacatcttcttctcccacgtcat

SEQ ID NO: 75053 - DNA, 312 bp, Zea mays
cactttaatctaagcttctaccaaacgccggtgcctcgtcccttggtcactattttgtctgaccaaactagatgtacggtctccaatacctgcctcactcgtcatttcaactgctcatacagacctaggatttggggtttttctaactcaatcactactggaatacctaagcaagcgcatattggtatactacctacacttccaacacctacctatcacaatgatctatatcacttgaaagcttacatggtggatttgctgactccaacataaatgtcgtcctgccactagtcacgtgagatcatatgacgt

SEQ ID NO: 75054 - DNA, 302 bp, Zea mays
tagaagtaagcgtattcctatgatctatttatgatctccttcaccaagcatgataagacagggacgcgctctatcggcgaaagctcaataaatggtgtgtacgcataaccatatgcatcgtcaaaatataaacattggaatgatagcttattacatttacacttacaatatattacacattgcaacgtctcatatgtgtgtacaacggcatgaaatactctttgagcactatctatggaacccagtgcaatagctgagtgacaaccatgtgcataatggcttacgccatccttataatttca

SEQ ID NO: 75055 - DNA, 136 bp, Zea mays
atgtcttttcttcagggcaatttcctttcagatgacgaagcttatcataagagaatagcggcaagagccccgccatatgtaataatagaagggaggtatacaaacatggaatccggtctacaatacctaaatgcct

SEQ ID NO: 75056 - DNA, 269 bp, Zea mays
tatggactggggagaagaataatactagcaggaacacatgcgccacaacacccttgcagttatatttggacagaattcgtgagcagggatgaaaccttcactgaagccaaccaaagggttgtatatatatgggcagacatcactgattatgtatgcagggagatggaactcgaccacaacttggtgaacatgaattctggggcatgccatcactgcatgagcaactcaacgtggctcccatgcacatatactttgctggctcacatgca

SEQ ID NO: 75057 - DNA, 214 bp, Zea mays
gaaaaggatgaaaaaaaaccttcccatgctttcgtacacaacgaagcataggaaatttttccttcgaaacttttccctattttctgaagcacctgccttttttgtgtagcataacgatgattctatatatgtctaaatggatgtttatgaatgcaaatgacatgatggcatgtaatgtgcaaatgaatattagaagacatgttcaaaaaccata

SEQ ID NO: 75058 - DNA, 388 bp, Zea mays
  unsure (1)..(388): unsure at all n locations
atgtcgccacttacttgatgctaacatgtacttttcttcaccaaagccatcttcaacacttcgcccataaaaaagatcaattctcattttcaattgcctgtctgcaggacaagtgataattacaataagtaaattataatctacatttatataatctagactaccaaacagctacatatagtagattataatctggattatataatttagattataatccaacggccagactgttcgacgaaaatgttatagtgattgtaggcttaaatgtagtcatatgctnttacagatgatccaagcaaggagagttagttgatctaagtactgcttgacccatacctaatgcaaaacagtgtttatttcttacaaatggtggcagacaccatac

SEQ ID NO: 75059 - DNA, 395 bp, Zea mays
  unsure (1)..(395): unsure at all n locations
acatgtgctaagcggcgatgccacatccagcccatgctagtcttagctattaagcatgcatctagaccggcctcttcttttgcaaaatcaactaaataaagtttgccgtctaatacacccttaaaagctagtgaaccatcacttcttctaaagacagacacatctacatttgtaaatagacagttataccccatgttgcataattgactaacagatagcaaattatatccaagagactctactaaaaacacattagatatggagtgctcattagaaattgcaatgttacctaacccttttaccttgccttgattcccatcnaccgaatataatgaatcttgggaatccttattctggacgtaggaggtgaacatcttcttcttccccgtcatatg

SEQ ID NO: 75060 - DNA, 376 bp, Zea mays
  unsure (1)..(376): unsure at all n locations
ntggctggattggttacggggagagacaaaagtttctcttcttgattatagctcaacctgacggttctgagttcactgttgagaattgccttgtgttgggttaaccaattcataccagaaattacatctatatcctggccttttagaacaatcatgttagcaggaaagttccgtccggccattgttactggcacttcataggccacttctctagtaaaaatgtgtcccccaggtgaatgaattntaaatccctcttttgattcatggcatgcaatatgatgttgccccacaaatttcttgctaatgaatgtatccgaagcaccagaatcaaaaagaataattgctatgtgactgggcacgggaaacgtaccaatca

SEQ ID NO: 75061 - DNA, 275 bp, Zea mays
ctgcttcggcaggagagcttccgaacgtgaagtactgttctgtccacggagtcgctttatccgagcgcaagttacttatcgcagaaggtgatgagtgaggtatccgtatcccggaggcgtatgagtccctctgctctgtcagccttggctgcttacgtgtactccgtcgtttacaagatccgctttccgaagtagtcaagaagcacgaaagaaatcctgctaaaaagagatcctttttcgaggaaaaattcgacgcagagggggtctcccccctt

SEQ ID NO: 75062 - DNA, 398 bp, Zea mays
tcaacggagccaatatgatggcccaaaaattatgcaaaataatattcattgtgtttggtcaaattagaaaatatgatgatgatgatctttttctgagaaaaagaaatagcatgatgaccatggcataaaggacttagcataatacataccactcaaatggaaaatataaaacagagaaggttgaggaaaccaaatccagttagatatgtgaagcaatgtttacatcatcaaatgacagtggaagctaaaaatagaataccatcagagactaatttaccaatacctcagtatgagacaaatattgcagttatcattttagaggatgtttccagaagatatgagtcaagagttgaccatacctcaatatagtcaatttgtatgtggcccgttccctgatc

SEQ ID NO: 75063 - DNA, 271 bp, Zea mays
aatacacccttaaaagcgagtgaaccatcacttcttttaaagacagacacatctacatttgtaaatagacaggtatatcccatattgcataattgactaacagatagtaaattatatcccagagactcaactaaaaacacattagaaattgagtgctcatttgagattgcaattttacctaacccttgtaccttgccttgattcccatcaccgaatatgattgaatcttgggaatccttattcttgacgtaggaggtgaacatcttcttct

SEQ ID NO: 75064 - DNA, 438 bp, Zea mays
  unsure (1)..(438): unsure at all n locations
tctaaagggagatncacatttgggactaacaaatatttattttgagaaagacaggatttgtagcgcatgccaagcatggaagcaagttggtgttcatcatccacacaagaacatcatgacggccgacaagccgcttatactactccacttggatttattcgatccgatagcttacataaacatcggcaggagtaagtattgtcttgtaattgtggatgattattctcgcttcacttgggtattctttttgcaggaaaaatctcaaacccaagagaccttaaagggattcttgagatgggctcaaaatgagtttggcttaaggataaaaaagataagaagcgacaatggaacagagttcaagaactctcaaattgaaggctntcttgaggagganggcatcaagcatgagttctcttctccctacatgccacaacaaaa

SEQ ID NO: 75065 - DNA, 386 bp, Zea mays
ctttatctagctgctgaaaaaacttttgtgtgatcttttttatattataacaattgtgtatgtagttggtggagatttggagcgagtagacggcgagcatctcaatatttgcactattcggggatttgtcgtgccgaaagcgatgggctgtacatcgaaccggctaatcctgtttcaatgaacgcattttctttctcatcgctgtcaggtactgtcgtatacgtagttgtagaatttcaagtttatattatctgagcgattgagttacatatgtttaaaaaaatactattattttacatttagttttataccatttggctatgttcacgtcagtacaaactacctctatagcgacggtcatagagatattttactgatgtttttcg

SEQ ID NO: 75066 - DNA, 182 bp, Zea mays
ttttaacccttttttttaaaaaaattttttttaaaaaaaaggggggcaagaatacccccaacatacacatctaaaaaacaacaaccccagaaccctaccaatgacaaaagcgaaaaagaaacagggggggcaaagcccgccacgtcacaaggagaccaaaccatgcccgagagaaaacgagc

SEQ ID NO: 75067 - DNA, 416 bp, Zea mays
  unsure (1)..(416): unsure at all n locations
gttgagcctatggaaagggacgacgtgcatggtgttgaagtatgtgagggagataaccatatgtgctggccagatttggatcatggaggcgacgtgggggcatcatgtgatgtccagggacaagaactaatgggagggagccagcacatgatggggataggattacagagatagagggcggtgatgataaatgagaagaagtttttttataatcattcttttcacctattcgttttttttaacgcaattactattcctagattcactctcaaaacataattatagtttagacttgaaattagtggaaaaattcatattgtgcctcaattcaaaatgacacaagtggagcatagctgcggcgtatctttctgctcccaaactgatccangttttcagtcacctgaaacttcaagtca

SEQ ID NO: 75068 - DNA, 194 bp, Zea mays
tttttttttttttttttttttttttctctcaaaaggtgttatctataaaatgttggttgagacgcgacatggggcgggggtgtaatgggcaggtccgctttgtgcgagaattgcaagaattctgggaattttaatcgctgtgaaactcgagaatttgggagttgttgattgcaagaaattaagtcgatgctgag

SEQ ID NO: 75069 - DNA, 477 bp, Zea mays
tctaaagggagaacacgtgatatgtctaaccaatgttcaattcgtttaagatagaccttgtgcagcttgtcaagcatggaaatatgtgggaggagcgcatcacagcaagaatgtgatgaccacttcaagacccctggagctgctgcatatggacctcttcggacccgtcgcctatctgagcatatgaggaagtaagtatggtttagttattgttgatgacttttcccgcttcacttgggtgttctttttgcaggaaaaatccgaaacccaacggactctcaaacgctgtctcatgagagctcaaaatgagtttgagctcatagtgaaaaagataagaagcgacaacgggtccgagttcaagaaccttcaagtggaggagttccttgaagaggaaggaatcaagcacgagttctccgctccctacacaccacatcataatggtgtggtagagaggaagaacatgacgctcatcgacat

SEQ ID NO: 75070 - DNA, 347 bp, Zea mays
gaccttgtttacatgcaatctctgcaaatgccaggcacatgtgtgtttaatccactggaacttggtacatctgaccattaagtcagccagattatgcggatgggaatcttaccttccaaagaaacccttacatctgcatttgcataagcatcacccctttgctgtgcaagcatgctgagcttataaaaggcctaacatataaggaacccagtgagtgcactaacataaaaaaaagtgtgagcacgcctacagataccacaagtaaaggcctggaatccaggatagcgcttcaaggcttaagtggatctgtgagcagttctttgtccaaatagaatggaagaaacaat

SEQ ID NO: 75071 - DNA, 238 bp, Zea mays
caccccttttgctacaatgtagcttcaaggagagggacaacatcgagacttgggctttcatgcaacagtggttccacctctatacacagacgtgtgtgatgacaacctccgacacctcttgtcgccaagaagcatgatgaacccgggttgcccctagtgcatgttccacctcccagtcctatgcttctgtctctatggctggataaaatactcgtggttcgtgagctcgctcgactcg

SEQ ID NO: 75072 - DNA, 194 bp, Zea mays
tggagcaatattggacatgtaaaaacctctatatttaaggtacatggtgtttacagtctcttgttggagtgtccccaccacttatttagcggctacaggagcacgctacacgccgcatcggtgccccctatggtgcatgtcaaatcatggtaagcttctctctccctccagatgaagttggactctaccgagcg

SEQ ID NO: 75073 - DNA, 250 bp, Zea mays
tctatcaaaatccaccaaagatagctaaccctctaacactcccttaaatgctattgaatcatcacttcttctaaagacagtgacacctacatcagtaaatagacagttgtagcccatttgacatagttgcgaaacagaaagcaaattgtaatctaaagaatctacaagaaaaacattggaaataagatggtcaggtgatatagcaattgtacccaatcctttgaccaaaccttgatttccatccccgaat

SEQ ID NO: 75074 - DNA, 370 bp, Zea mays
gtgcagctggtcaagcatggaaacaagtgggaggctctcatcacaccaaaaatgtgatgacaacatcaagacccctggagctgctacatatggacctcttcggacccgtcgcctatctgagcataggaggaagtaagtatggtctatttattgctgatgactcttcccgcttcacttgggtgttctttttgcaggataagtctgagacccaacgaaccctcaagcgcttcctaacgagagctcaaaatgagtttgagctcaaagtgaagaagatcaggagcgacaacgggtcctagatcaagaaccttcaagtggaggagtttcttgaggaggaggggatcaagcacgagttctccgctccctacacacc

SEQ ID NO: 75075 - DNA, 445 bp, Zea mays
  unsure (1)..(445): unsure at all n locations
ttcttcctctcatccatggcgaacccgactcatgctttcctccgtgtcggngattcgatgcatgcgtgacccttccgttctctaggggtgtgaccgcggctccgcaactccttcgacaaatcccacatgcatcttcaagctgcgactcgtcccgccatcgcatctcctcgtcttcccaggtaccatcttactctcctccatcccgcccctctcttcaatctcctccgccgacgccctcgtttggatatctctcgtatctagctgttacgtatccaatcgtcccccatgtactgattatggtataggttgcatccacgtccgtggttaagagtttatccaccctgtattgactcctagcaagtgtgaattgctgtatgaagagatgcttcaacttcagttggttcatagttaaactccctagcagttaacgatttctggcaccatt

SEQ ID NO: 75076 - DNA, 353 bp, Zea mays
  unsure (1)..(353): unsure at all n locations
aaaaaaaaaaagagtgtaccgatgaccacacaaaaatactaanggctttgggcaaacaaaccccaaatttttcttcctacccaacaacgggggaaataaaacccaacccacacacccaagggagccccgcaacccacacaacaaagagtgaaacagagccagaagggaaaaacaaaggaagaggacagccacacaaaaaacacgagcaaggggagcaagggaggcaacaaaagaagaagcgacaaggaaaacagccaacgaaagggaacaaacctgaaacataatactaccgagcaacaaaacagccaacgaagcagaaaaagccgaacagcagctacaacaaccacaaacaa

SEQ ID NO: 75077 - DNA, 299 bp, Zea mays
aaaaaaaaaaaagggtttttaaaaaggggcccaacaccacacaatataataaattctcaattaaactttaatacaaatattacacttataaattaactcataatttaataaatttcaaaatatatttataatttattatattttacaacttataaatttctacatcatttaatattaaacttcattattattattaaaatcataaatctataaaaattttaaacttaattatttaaaactttaatcttttcaaatattttaaatactatttcattttcatacatcatatacatatttta

SEQ ID NO: 75078 - DNA, 368 bp, Zea mays
  unsure (1)..(368): unsure at all n locations
agatagtgagtaccctaaccatgtctataaactctctaatgcgctttatgggctcaagcaagccccaagagcatggtatgaatgcctaagagattttcttatcgctaatggcttaaaagttggtaaagccgatcctactctctttactaaaacaattgcaaatgatttgtttgtatgccaaatttatgttgatgatatcatatttgggtctactaacaaatcttcttgtgaagagtttagtaggatcatgattcanaaattcgagatgtcaatgatgggggagatgaagtatnttctatggattgaagtcaagcaactccaagatggcaccttcattatccatacgaagtcactcatacatactcacc

SEQ ID NO: 75079 - DNA, 236 bp, Zea mays
  unsure (1)..(236): unsure at all n locations
atcacggatagcatcaacattaatgtctctacatctcatacaaatagaaacatgatcaatggtggatgtagagggtttgcaaacatttaattcatgaatcttaacatgtaatataacattttcatttctaagattggaaacaatatcattgcaaacatttaaattcttagccttaacaattaatttatcattctcaatcttaangctagaaatagattcattcaatttatcaatct

SEQ ID NO: 75080 - DNA, 188 bp, Zea mays
ccatgctacgcataattgatggccgtacccaactacacctacctgaagctcaagatgctgggccccaacggggtcatcaccgtcggtcccacgtacaaacacgcgttcgaatgcgacgtggagtgcgtggagtacgccgaggccctcgccgagtccgaggccctcattcgcgacctggagaacctctc

SEQ ID NO: 75081 - DNA, 195 bp, Zea mays
ataacacacatttgtacataagttatcatagtattatatatttccgttgcaacgcacgggcactcacctagtaaaaaatattatgcggagagcggagacaatcaataaaaatcttgagatctttttggtgaatagtttacgtgagtattgttgtgagccgtcgcaatgcacgatcaaccgactagtattttacta

SEQ ID NO: 75082 - DNA, 339 bp, Zea mays
ttttcacatcatacaataattttaataaagcggaatttgaaatagaagatgggataacgagacagcttgatcagcactcccatggccggtatgtaaagcaatgacgtacgactgggagtctctcccccggcgcaccctctttcttgtgctagatatgcgaccccggctgacggacaaatggccgggagagccgctatccaacggctccagcggtctgactaaaaccaaaagcatccatgcttgcattgtggattttgcgcttgcagaagatgacagcatacgacccgctaattgaataccaagagatttcttcctcatgggtctctccaattcccttat

SEQ ID NO: 75083 - DNA, 234 bp, Zea mays
cttacccagatctgggtcatgaatctatttccaatgcttcgggctaaggctgggatatctatcaaatctgatgctgacaagctgaagtttggtctattcacaatatttccatgcgtgcagccagccttcagaaaagcagtagctgtgccccgagaagctaccagggcgcagaagtcggcgtgcccaccaataacttcgtgaagggcatcaacctcgccttcaatatattctaat

SEQ ID NO: 75084 - DNA, 231 bp, Zea mays
ttaataggttttcgaattaatatttgccaacttgctatgtatagcctacttgctccttgtttccttgagagcaatgggttgaggctcatggattggaccattcaatgcgtcgtccacgtaccttgcctccttgatcatcattcgcccgcttacaaatattccaagaacttcttcgggcgacatcttggtgtacctaggattttcacgaatattgttcaccaaatgaggatc

SEQ ID NO: 75085 - DNA, 344 bp, Zea mays
  unsure (1)..(344): unsure at all n locations
acacacggcgatcttcttatatgtcatcccaagaccagccaacatcttctttgcgaaagacatattctttggcaacttatgattctccgggagaacctcgcccatcagttggacaatgtcgttgtaagcactgtttgaaatgttgtgcttcgactntatcgccattagtcttgtgagagtcccaagaactgacatctgagtgtgctcgtgcagtctctcttctcccgcggcgagtagccggaagaattcctgagcatcgcgtggaagctgccccggctcctcagcgttcatttcaacactcctaccaagatcatgcaacatgtcgtgcatcctatcatgatcat

SEQ ID NO: 75086 - DNA, 267 bp, Zea mays
  unsure (1)..(267): unsure at all n locations
agcagctaaaagtattattaaccactgctccggtattggctcaaccagacattgaanagccctttgatgtgtattgtgacgcatcatgcagtggtctcggctgcgttctaatgcaagaaagccgagtgatagcttatgcttaaagcaagtgcgcccgcatgatgaacattatccaactcatgacctgtatttagctacggtggttcatgcactaaaaatatggcatcattatctgctggggaatgtctgtcacaattatacagatca

SEQ ID NO: 75087 - DNA, 301 bp, Zea mays
aacttcatgatatgaactaaattacccttacaagcatcatgcataacatcaattgtaaaaaaagatgaaagtagcatgattatttaattaagtttacatggcaagtttaattcatagcatggtgagtgattaatgtagaagactcaaaaccaatttaaacaagagggaatacatcacatagtattggattgatcttctttgaatgttgaatgacacgttccatttgagaaacacattctcatgttgtgagactacataaacacttatatagaaacattagtctcacaactctagtcatata

SEQ ID NO: 75088 - DNA, 310 bp, Zea mays
cttggatctcaactggaaaagaatccaattaagtaggtagctagatatgtccatgcatgcaaactaattaaggcatgcttatatatgcacctcgtatcatgagccacagcccttgccgtccttgaagatggggacgttgccgcacgccgtcatgccgctgtatggtggcaggttcacgttcttgatcccgcacgcaccgcctgcgcacacgtttaatcgcatcacaatacatgaaggagcgacctacaggaggagtataaacatgtatcccgctcgtaccgttgtcatgagcgccggcaccgttgggctg

SEQ ID NO: 75089 - DNA, 326 bp, Zea mays
cataggtttcaccgaaatccaaaccttcgacttgagagtatcctttggccacaagtcgaactttgttccttgtcaccacaccatgctcgtcttgcttgttgcggaagacccatttggttcctacaacattttggttaggacgtggaactaaatgccatacctcattccttgtgaaattgttgagctcctcttgcatcgccaccacccaatccgaatcttggagagcttcctctaccctgtgtggctcaatagaggaaacaaaagagtaatgttcacaaaaatgagcaacccgagatctagtagttacccccttatgaatgtctccg

SEQ ID NO: 75090 - DNA, 202 bp, Zea mays
tttgcattcataaatagagtctaaccgtcaatgaaagattggccttgcctcggcaaagcccgaccactcctcggtggctagaatgggggaacccactctgcgtcaaaattttactcgaaaaagtcttttgccagaacatctttcataccgtttcgactgcttcgatagcggtgtcctaaaaacgacgagagtacacgtaagc

SEQ ID NO: 75091 - DNA, 210 bp, Zea mays
ttcatgtgttgtctgttacaaatgacacaattacccactttgggatgcacaagtatgtgaatctgtgaatagccgtttatgatggtgaccttattataaagattttagtactccctatgcactatactatttgttgatgccttctttatttatatttatatgacagttcagcccagttggccattactttgctagtgctgcacatgacac

SEQ ID NO: 75092 - DNA, 343 bp, Zea mays
tagtcttagcaattaagcaagtgtcgcgttcagctctattgaaatcaactaagtatagctgaccctctaacaatcccttaaatgctactgaatcatcacttcttctaaagacagtaacacttatatccgtaaaaagacaattgtagcccattttgcataattgagaaacagaaagcaagttgtaatctaaagaatctacaagaaaaaccttggaaatagaatggttaggtgatatatgatagtcgcctagagggggggtgaatagggcgaaactgatatttacaaatataaacacaactacaagccgggttagcgttagaaatataaacgagtcagagagaga

SEQ ID NO: 75093 - DNA, 216 bp, Zea mays
  unsure (1)..(216): unsure at all n locations
tctagaaatttctataaatttcctaagcctggcagaaaaagaaaagggaaaatgatgaacagtgatgtgctgaaaccagcccgaaccgggccacgttcaggcgaaacgcgcccgcgcgcgcgaccgcgttgttcattntgcgcagaggacctcgactgtttcaataaccgggtaagaaccctcggncactattcactggttctctgacaatcacac

SEQ ID NO: 75094 - DNA, 181 bp, Zea mays
aagtatgggttaagtattggtgatgacttttccgcttcaacttgggtgttgcttttgcacgaaaaatccgaatacccaagggactctcaaacgctttctcatgagagctcaaaatgaagttgagctcaaagtgaataagataagaagcgacaacgggtacgagttcaaagaacctcaagtg

SEQ ID NO: 75095 - DNA, 340 bp, Zea mays
  unsure (1)..(340): unsure at all n locations
ttttttttttttnactacaactatggggtgttctttttatttatgccctcccacaacacaagaatctgttagtaccatcacacttgaaatccgtcttttttaaccattcaatttccaatggcatgtgcaatcattccctttgcagtacactctatatctatttctatccgacttttgtattacaagctcaaactcctcatttatagcatattgcctcacaactagtctaaactctttcatcgatggatatagagtacccaacttcaaatcacggtgatcaacatcgtgcaatatattgaccatttcttgcttttcatcatcaactggcatggcaccatct

SEQ ID NO: 75096 - DNA, 266 bp, Zea mays
  unsure (1)..(266): unsure at all n locations
tttttttttttttaanaaananaggagggtttttttaatatttaaaaattatatgnattgttatatatttgattatgttatgaatagtagtattttagatatgagtgtaaggatttgtatttatagagcataagtcagccaaagtgtcccctggtctggcgcaccggacactctgtgcaccaccggacagtgtccggtgcaccatggactccaactccgaactgctcaccttcgcgaattctatgaactagtccgctataattacc

SEQ ID NO: 75097 - DNA, 244 bp, Zea mays
gtggtgcaccggacagtccggtgcgcgacccccttccttatctgtcgcatccgaccgttggctggcggtcctgttggcgcaccggacactgtccggtgtgcccaactgaccattggcgcgggccacgcgtcgcacgctgattgcgctggtgaccgttggctcgggcggctctgactcaccggacagtccggtgattttttagccgcggcgctttcttccttttccgagagcgacgagttcgtcg

SEQ ID NO: 75098 - DNA, 198 bp, Zea mays
gtgtggctctcacctcaacgctctggtaggtggcatggctgcaaaagtttcacccctacctttcagagaagtatgataggatcaattccatcaagttcctccggatctacgccacttctatcatcgctactgatggcgaggaagaagtgatggtaaactacttccatgttgcattaaccatgtctggtcatggctcat

SEQ ID NO: 75099 - DNA, 283 bp, Zea mays
tatacacccttaaaagctagtgaaccatcacttcttctaaagacagacacatctacatttgtgaatagacagttatatcccatattgcataattgactaaccgatagcaaattatatccaagagactctactaaaaacacattagagatagagtgctcattagaaatggcaattgtacctaacccttttaccttgccttgattcccatcaccaaatataatggaatcttgggaatccctattcttgacgtaggaggtgaacatcttcttctcccccgtcatat

SEQ ID NO: 75100 - DNA, 54 bp, Zea mays
  unsure (1)..(54): unsure at all n locations
ccccccaaccaaccacacctccaaaacctccanaaacaaaacaaaaaaaaaaga

SEQ ID NO: 75101 - DNA, 155 bp, Zea mays
tgggggaggtttgaagaactgaacctcggtaaaacaaatcaccgtgtcatccgctctatttatttggttgatttgtttttgccctctctttcggactcgattatatttctaacgctaaccccggcttgtagttgtgatgaaagtttgtaaatttc

SEQ ID NO: 75102 - DNA, 193 bp, Zea mays
atctttgtggagtgaatcgggatgttattgaacattcgctcaatgttgacccatccttcagaccccgcaagcagaggcttcggaaaatgtctgatgacaaggccgaaggggctcgcaacgaagtaaaaagactcctaagtgcaggagttatcagagaagtgaagtatccagaatggctagctaacactgttat

SEQ ID NO: 75103 - DNA, 192 bp, Zea mays
atggataagcataacattaatgtctcctacatctagtacaaatggaaacatgatcaacattatgtgtagagggtttgcaaacatttaattcatcaatcctagcatgtaacatggcattttcatttctaagattggaaatagaaatattgcaaacatttaaatccttagccttagcaactaatttatcattct

SEQ ID NO: 75104 - DNA, 110 bp, Zea mays
accaatgatctttgtggtgtcaacagagatgtcatcgagcattcacttaatgtggatccatcttttaggccaaggaagcaaagatgtaagaagatgtctgatgataaaac

SEQ ID NO: 75105 - DNA, 204 bp, Zea mays
tcctgctgctcagtctgacatccttggcttttggtcttcttgcgggggcgagcttcttcagtttcttgtcgtagtccaatttgagggtgcggtaagcttcacgggtattggcctcttcgccttcagctagcgagaggctctcttgaagggacgctttttcttctgaaagttccctgactttctgctccaggctttccacctggg

SEQ ID NO: 75106 - DNA, 165 bp, Zea mays
acatcttggttaagacgtggaactaaatgacatacctcattcctcgtgaaagtgttgagttcctcttgcattgccaacacccaatccgaatctcttaatgcgtcttccaccctatatggctcaatagaagacacaaaagagtaatgttcacaaaaatgagcgaca

SEQ ID NO: 75107 - DNA, 80 bp, Zea mays
aaaaacaaacaactgtttcaaaccccccccaccaagggggggaaaaaaaaaacaaaaacctctttttatcaaaaaaaaaa

SEQ ID NO: 75108 - DNA, 433 bp, Zea mays
  unsure (1)..(433): unsure at all n locations
tctacagggagaacacgtgataggttagactaacgtgcttttcttaaaagatagaccttgtgcagcttgtcaagtagggtaacaagtgggaggagtgcatcacagcaagaatgtgatgaccacatcaagacccctggagctgctgcatatggacctcttcggacccgtcgcctatctgagcataggaggaagtaagtatggtctagttattgttgatgacttttcccgcttcacttgggtgttctttntgcaggataagtctgaaacccaagggaccctcaagcgcttcctcatgagagctcaaaatgagtttgagctcaaggtgaagaagataaggagcgacaacgggtccgaattcaagaacctttcagtggatgagttccttgatgaggaggggatcaagcacgagttctctgttcctaccaccacacaa

SEQ ID NO: 75109 - DNA, 400 bp, Zea mays
cacgtggtgacatggtttggacatgtctaacaacgaccttcatagacaccaatgcatagtggaaccctatgccacaatagcaatggaagagagacaggagaaaaccaaagttgacatgggaaggggaattaaaaaataagtgaaaaaaaaacacaaagatttaacctaaaataagaatgcatggaaaacagttatccatatgactgaccttcgactagtggtttctgttggatttcaactctagcctactccaacttgcttggactaaaagggatccgtgttgttgtatgctcgtcttaattttacttttacatttattatgcctgtgtaacagattaaaactggaagtgcttcttaacaggtttctacttaatcattgcataggtcatgtaatcattat

SEQ ID NO: 75110 - DNA, 394 bp, Zea mays
  unsure (1)..(394): unsure at all n locations
tgtanattcctttaggcgagttcaaagcttcgaacaacctgaaccgactcttaccatcccgttgcagatctgcagctcatccaacaaaccaatcatcgggcatcctttgctctttggggctgtcgcttcccgcggggctgatgttggcatccacgtctccaagaccggtgaaacattagacgatttcgacgtgatcctttccatcgaccagctgaacaagatgtgccgagatgtcacccagatcaggttctccgctcgctccgaacagaacgtgcacgtcgagcatgtcgacgggcagtgggtcgccgtccagcccgaggtggcaaatcccatcgcctgcatgccgagggtacgagtgtcttaaactctttgcgctctgatagctgtgtgtcat

SEQ ID NO: 75111 - DNA, 397 bp, Zea mays
  unsure (1)..(397): unsure at all n locations
agcttcgcacctctgaactgactcggctgtatcattctttgctgttggccaatagaatcctgacctgaagaccttcccgactagtgttctagaggctgcatgtatttcacattgcccagcatggacctcctccagaagttgcttcccagtggatgggagaatacacttcatgaggactcctgatgcaccccttctgtacaatgtttccccaataagtgtatagtgagccgactgtctggcaatgcgctctgccgagttcttgtcgtctggttcttcttcattctttatatacttaatgatcggccttctccagtcgtcagagtctgactcgagttgatctatgatgttgcattcttctgtttgatccatagagatactcngctgttggatttcttgc

SEQ ID NO: 75112 - DNA, 401 bp, Zea mays
  unsure (1)..(401): unsure at all n locations
tctttatcaaatggacgtgaaaagtgccttcctaaatggaccgatcaatgaagaggtctatgttgagcaaactcccggctttgaagatagtgagtaccctaaccatgtttataaactctctaaagcgctttatgggctcaagcaagccccaagagcatggtatgaatgccttagaaatttccttatcactaatggattcaaagtcggaaaggccgatcctacactctttaccaaaactcttgacaaagatttgtttgtatgccaaatttatgttgatgatatcatatttgggtctactaacgaatctacatgtgaagaatttagtaggatcatgacacaaaaattcgagatgtctatgatgggggagttgaagtatttcttangatttcaagtgaagcaac

SEQ ID NO: 75113 - DNA, 447 bp, Zea mays
agcttgtctcttcaattaaccctcttcgaatgttaattcaagaaagaaggtaaaggatataacaataagataatgaaaacaatatgtaaatcgagaacagtaaggtatatcacctatctggatgtgcatatatatcatttaatgtcctgtaggatatcaaatgattacatatataccttcaatttcacacaagcgaaggtatcttcgaaggctgagcaggtcaatattctatgctcaagggcatgtcgttatgcatggcactgttcctctatttatagtcatgaggtatatcttcgtatgaaattacaaacgtgccccaaatcctatacatggtaactaataatattatgagggcaatattgtacttttctatcagttcatcttgcagatcaagtctttcacaacatctatatttgtctttgcttcatagaatcgagcacatcaccc

SEQ ID NO: 75114 - DNA, 301 bp, Zea mays
  unsure (1)..(301): unsure at all n locations
tctagatatgtcgaggtgacaaatgatgagggtgaattggtagttactaaggtcgcagctaagcaacttcgtcggttgcctatcattcctcggctttcaaggctgttcctcaacaaggaaatagctctgcatatgacgtggccaaagaatggtgtacgtctcgtcactgatccagacataatggtccatccgtcggacggtgatgcgtggaaggcatttgacgagtttgatcccgaatttgcaaacgaccctatgagtgtacggcttggtctatcgacngacggattcacacctttcaata

SEQ ID NO: 75115 - DNA, 417 bp, Zea mays
  unsure (1)..(417): unsure at all n locations
agctngagcatatgtgtttcttcagggatgttgctgtacacctgtaacacccggattttaggggtccaaaacccggggttaacataaacaccaggtatgctgggaccaagtctcaaacatatgatgtatagtggcacaggatcgaatgtcacatctttatatataacaggagttctatacaaaataaataattacattataaggagacaacggtccagcaacccaaagttgactgggagacgacgacctatacctctcacgaactcatcgcagcatcctctatgagcatcatcctgcagtacctgttcttgacctgtggtgtatgtgagacagcaagagtgagctcacatacgttcatcgctcaacaagttgtggggaataatgtgcatgaactcgccaaaggtgggagctcacgtg

SEQ ID NO: 75116 - DNA, 460 bp, Zea mays
ttcttctaacctgatgcactggggtaggagatttccattcgagaatatccttaaccttgctgggatcaaccgcaattcccttagctgataaaatatgccctaaaaattggatctcctccaaccaaaatgcacacttgctgaatttagcataaagttgatgttctcttaagtgcattaaaacaatccgcaaatgctctgcatgctcttccttattcttagaatagatcagaatatcatcgataaaaaccaccacaaatttgtctaattctggcatgaataccgaattcattaagtacatgaaatgagctggagcatttgttaatccaaaggacatggccaaatactcaaataatctatatcgagttgtgaaagtcgtcttgggtatgtccccaggtcgaagtcttatctgataatagcccgatctgagatcaatcttataaaacacccgggctctagtaag

SEQ ID NO: 75117 - DNA, 422 bp, Zea mays
  unsure (1)..(422): unsure at all n locations
agcttggcttgaccacacgtccactacctcatccataccacatttactggatcaatgattcagacaaggttaaggtaacacacatggtacaagtgaatttctccattggtatgtattctaattatgcggattgcgatgtagtacctatggaagcttgttctcttttgttgggtagaccttgggaatatgatactgatgcatgtcaccatggtaggagtaatacatacacttttaggcataaagataaaaacattattntgctacctttgactcttactgaaattgtacaagctaataaagatagagctgcaagtacccatagggaaccaactaatgagacaaaaattcagcaacaaattaaattgaaagctcatgtcatgcttgctactaaatctgatcttcttgaacctcatgctactgat

SEQ ID NO: 75118 - DNA, 372 bp, Zea mays
tggccaaaatagtttaataaaaactccaaacattcttctcaagtgacgggtcaatagggatttctgaaattcagaattctgaattttagcccttgagccaaagaccgagcttgttcaccttgatccctagctcaattcctaatgaccccattgacaaaattgtgcctaactaacccctctacctcatatcagaagatggcgtcgggacacatgccttggacacgtcaaacccgtgatcttctctctgtgcgcggcagtgagacaaacccgatttctcctctctctatctcttgatccagtcaacaaaacctgcaagcctccacacacaaacgacaaaggaatgtcagaggaagagatctctcaatgggatca

SEQ ID NO: 75119 - DNA, 433 bp, Zea mays
  unsure (1)..(433): unsure at all n locations
agcttcatcttttgattntaagagatacacataacaaaatctagtagagtcatcgataaaagtaataaaatatcgcttgcctcctttagtcaatattccgttcatctcacataaatcggaatgtattaagtctagtggtgccaaattcctcgcctccgcagccttgtgaggcttgcgaggttgcttatattgcacgcacacctggcacttagaacctttgactaaatcaaattttgggattaaatttaaatctgctaaccgcgagacacaaccaaaattgatatgacaaagtcgtgaatgctaaatatacgactcattcgaaacaacattgttcacagacttattacacgcatcatgcanagataagcggaacacgcctccgctgtcatagccttttccaacaaacgttccatacttagacagtatacattta

SEQ ID NO: 75120 - DNA, 376 bp, Zea mays
cgctgtgaagattcttcatcccaacatgtgctagtcggcgatgccagagccagcccatgttagtcttagcaattaagcaagtgtagagttcagctctatcaaaatctaccaagtatagctgaccctctaacactcccttaaatgctattgaatcatcacttcttctaaagacagtgacacctacgtcagtgaaaagacagttgtagcccattttgcataattgagatacagaaagcaaattgtaatctaatgaatctacaagaaaaacattggaaatagaatggtcaggagatatagctattttaccaagacctttgaacaaaccttgatttccatccccgaatgtgatagctcgttggggatctttgtttttctc

SEQ ID NO: 75121 - DNA, 434 bp, Zea mays
agcttctaaagggagaacatgtgataggtctaacaaatgttactttcgaaaaagatagaccttgtgcatcttgtcaagcatgtaaacaggtgggaagctctcatcataccaagaatgtgatgactacatcaagacctttggagttacttcatatggacctcttcggacccgtcgcatatctaagcattgaggaagtaagtatggtcttggtatcattgatgacttttcccgcttcacttgggtattctttttgtaggacaaatctaaaacccaagggaccctcaagcgctttctaaggagagctcaaaatgagtttgagctcaaggtgaaaaagataatgagcgacaacgggtccgagttcaaaaaccttcaagtagaggagtaccttgaggaggaaggaatctaacacgagttcttcgctccctacacaccac

SEQ ID NO: 75122 - DNA, 396 bp, Zea mays
cgcttgggtttgaaatgattcagctgataccgggctagtgtcttgcacgagaagaaagtctcggtgtagtgtctccgtctgagtcaattaaggaccttgtcgatgtaggcttgatgatcgaggaccctttaactggtcacatgcctcgtcatgggtaagccttgcctcgggcagactaatgccggaataagacaacacgaaatgggcgtggagcggtggcgagagtaacgtgtaccctccgtggcaagaggctggacggaggtgtagctgtgctctcggattgcatgaacctgatccggtcttaagaaccccggtggcgggttgacatatgccagggttaagtgctacatatgtcgtgtgattggagatcctcagctgaatataatcgattccgat

SEQ ID NO: 75123 - DNA, 336 bp, Zea mays
  unsure (1)..(336): unsure at all n locations
agctttgagaagacaaaactngcaattatttaaatacaacaaacagcagcctaaattccaccaaattcaccctgttggggtatgcaccctatatacagaaatattaatttatcaatcttgacaccaggggcggacccagctaaggccatgggtgtacatgtagaaccgatatttttgcaaaaagacgaaaaaaatcgaagtttgcaggcataatacatgtgtaccacactttaaatgaatcagatcagatccaaatagaaatagcttgggtttgggagctcggnttcgcacaacaggaaaggaagaaaaggggtgggcgtacctggtgggtgctcg

SEQ ID NO: 75124 - DNA, 455 bp, Zea mays
ttcctcttcttcggaatattcttctataatggttctttttcaccttcatttaaggcttcagttatccttttccttttttggcctccggcacctttgttcagattttcgtaatcagggtattcgaaacccagggcgtccagcactcggtttagtcttcgcttcggacgggtgccgaaggccgcgatcatcaattgatcttcttttttggaatagttcccaagtatttcgttgcacattgcttcaattgtttccagccactcttggcaaggtgttttaaagtatttcttaaatttgtaatagtaaggcaaacgcacaagttcaccttctttctttttccccttcagcttcggcatttcccattcttttaaactaggaaaaacttggaaagccaagaactcctgaaccaggtctcttgtactaatatgatctgcaacaattctgattcattcattggt

SEQ ID NO: 75125 - DNA, 412 bp, Zea mays
  unsure (1)..(412): unsure at all n locations
agcttcctcccttctttggcggaagtcgttgtcagcccggatgtactcatccatcttctaaagcagcttctctagagtttgtgggggcttcctggcgaaatattgggcagtaggtcctgggcgaagacctttgatcatggcttcaatgataatatcattgggcaccgtaggcgcttgtgccctcaatcgcaagaaccttcgtacatatgcccgaaggtattcttcgtggtcttgcgtgcattggaacagagcctgagttgtgatcggctttatttgaaagccctaaaaactagtaaccaacatgtccttaagcttctgccacgacgtgatagtccctggccgaagagaagaataccatgnttgggctacattccggactggcatgacgaaggacttcgccataactgcagta

SEQ ID NO: 75126 - DNA, 379 bp, Zea mays
  unsure (1)..(379): unsure at all n locations
cgcttaaacccctaaaagattgtctaattntgttaatggttatgctcccatggctcaggataacgagggtaacattttataccctgtcgattatccggagcacaaaattaggagaattcattctaggaagtctcactctggctctcatcatgcttttatgtataagagtgaggcatctagttataggcaatccactcatgttaaattgcctaagaagaaaacttctattgcatcaaatgagcctattatttcatttaagacttttgatgcttcatatgttttaactaacaaatcaggcaaagtagttgccaaatatgttggggccaaacacaanggctcaaaggcttgtgtttgggtacccaaggtgcttgtttctaat

SEQ ID NO: 75127 - DNA, 389 bp, Zea mays
agctagaagccatggtaagtatcatatgttagtaaaatgcgaattgactcaagcctagctacgggtgcataggtttcaccgaaatccaaaccttcgacttgtgaatatcccttggccacaagtcgggctttgttccttgtcaccacaccatgctcgtcttgcttgttgcggaagacccacttggttcctacaacattttggttaggacgtggaactaaatgccatacctcattccttgtgaaattgttgagctcctcttgcatcgccaccacccaatccgaatcttgaagtgcttcctctaccctttgtggctcaatagaggaaacaaaagagtaatgctcacaaaagtgtgcaacaacgagatctagtggctacccccttatgaatgt

SEQ ID NO: 75128 - DNA, 401 bp, Zea mays
gccgacacactacatcaactttgaagctcaggctgccatagttgctttcaatgctatttgtacacatattggaacgagggatcttgtttaggaatttttagcttttaatacatggccactaacgcctgagtgggaaatgccgaagatgcctgaagtagacgctttggacgccgagcctgggctggttaggctttgttacaagtttaaattcaaatatgagtttggagaacctagtgatgggtggctatattatgttgaagcgaaatgtaacaagatacttggtaactatagcaagcctgaagtcgaagctttacaacagtcttttggggctcgaaagaggcatcagttgaatggtgtctttaatgctatcgaactttttttattctgactatcctattatg

SEQ ID NO: 75129 - DNA, 427 bp, Zea mays
agcttgaagaggtaaatgtggacgccacatctaactctgaagcacatgaagaaggagctgatgagtgcctaatgtttctcggggcaactgaatcattttgttgttttttcaattctatggctgggatgcaactgctgcagaactaaaattgactgtatatctcaaggcatacagaaatacaatacctgcccctatacactaatctcaaaagtggaagttcttgcaggtttgtgtctttcaactcatcaatttagtttaattatgggcgctttatatttgctggaagcagctagtaacttagtatacattacatattgtgtttgcattctcttctccgagagtcattgagtgtgtggggtgtgggagagcaatggtcatatgggttcatacctcttatacaatacacaaatcgtgcagggatggctgg

SEQ ID NO: 75130 - DNA, 326 bp, Zea mays
  unsure (1)..(326): unsure at all n locations
tagcacgcgtcatccatcgggagctcggtctatggttttgcttcnagaccgctcccaccgctcatataagctcatataacaacatccgtcgccgccgtttccatcccattttctctcctctctccgtcgccgcctcgggccaaaccctacgcaggtacgcttccgccgccgtgtcctcctcttttgctgacggctcgatttgcgaaatcacatgttttggtgccctatctggtctccatttcaccgtgtcatatttctgttccttctacagggagttgattgatcgattgcagccatgaggtactctctctctggtcgcttctact

SEQ ID NO: 75131 - DNA, 442 bp, Zea mays
  unsure (1)..(442): unsure at all n locations
agcttcttcaccatgtgatcacggttatcttgagaagggtgatcaatgcatttcccttttagttgtgtcaagcttcttattagcctctcattttcttctttgagcttttgatatgtatcatcttttgttcctgtaaattctagctcaaaagaagatttgcttgtcgatggacaacaagcattagcacatggtaacatagtttcaatttgaatacatgtgcaagagtgaggttgttgagattttaagttttctatcacaacctcatgagctatatttaatatgatatgatcatccataagattttcatgagaacttagaagcatatcatacttatcttgaaaagctagaatttcaacttttagcttttctacttggtctttaagcaaggcattcctatntactaattgagcgatacaatgtaaagaagtatcttgctcaattg

SEQ ID NO: 75132 - DNA, 385 bp, Zea mays
actcaacggagcgttaggttccaccgccacccaactttatattctacaatgttactagtaaatgatggaggaacgaatcatgttctgccatgcactctcggatccttaactacggaaagacatgcatgtttaatatacgacccagttgaaactactaattgcttcgcagcaacattctaagccacgatgacaacgaatatcggacactatgacagcagccttcagtctgcgcgcagtggcctacgatatcaccctcatatttcaactgtctgagtcaaacttatcttcaacgcctacgtaggaataccaggactattatcctagagcaacctgcagcttactcctgaattgtaactaaccccacccttaagccccccaggattgc

SEQ ID NO: 75133 - DNA, 398 bp, Zea mays
agcttataaaaattagaataacatccctggttggattggttctaagtcatgattccggaacaaacgaacacaccctaaagccttgttcgtttgtgtcggattgcacccggaatcattccagttaatcaaaatttatataaattagagaaacaatccgattagaaatcattccgacccaccaatccgtaacaaccgaacggtgcctaagtggatttttgacttgttatagatttaaaccgagtcaatatcattcaatctacatggatttatgtcaaaatgaacaagcccgaatggggttgttttccatggtgaaaagttttcggttgtgacagcggatgtggcatcgaatgtcaaaaggagtttttagatactaataaaaatctaattacataactcga

SEQ ID NO: 75134 - DNA, 386 bp, Zea mays
ggaccttaaaactaagctgctagaaaagaaaaggaaattaatgaacagtctcggtccgtaagtagcccgagccagcccaactacgggtgaaaacgcacctgcgcacgcccgcgcagttgactttgcagaaaagtccctagtgttttgactaactagaactgggttcgccgcactattgctatgagtcgctgacatcttgcagaaacatcctcatatttctatttcttttccacaaacatccttgacctcggcgcgctcgccattcatccccgacacggcccataccggccatggccggcaatggctgctatggctagtgatcggggaagcataatcgactaaggatgacgctcggacactcgtcaatttgacatgaacgcactgag

SEQ ID NO: 75135 - DNA, 441 bp, Zea mays
  unsure (1)..(441): unsure at all n locations
agctntatcaaatggacatgaagagtgccatccttaatggaccaatcaaggaggaggtctatgttgagaaacctcccggttttgaagatagtgagtaccctaaccatgtttataaactctctaaggtgctttatgggctcaagcaagctccaacagcatggtatgaatgcctaagagattttcttatcactaatggcttcaaagtcggaaaagtcgatcctactctctttactaaaacaattgcaaatgatttgtttgtatgccaaatttatgttgatgatatcatatttgggtctactaacaaatctacttgtgaagagtttagtaggattatgattcanaaattcgagatgtctatgatgggggagttaaaatacttcctatgatttcaagtgaagcaactccaagagggcaccttcatcagccaaacgaagtacattc

SEQ ID NO: 75136 - DNA, 373 bp, Zea mays
  unsure (1)..(373): unsure at all n locations
tctaaagggagagcacattntaggattaacaaatgttcattttgagaaagacaggatttgtagcgcatgccaggcagggaagcaagttggagtccatcatccacacaagaacatcatgacgaccgacaggccgcttgagctactccacatggatctattcggcccgattgcttacataagcatcggcgggagtaagtattgtctttgaatagtggatgattattctcgcttcacttgggtattctttttgcaggaaaaatctcaaacccaagagaccttaaagggattcttgagacgggctcaaaatgagttcggcttaaggatcaagaaaattagaagcgacaacgggacggagttcaagaactcacaaatc

SEQ ID NO: 75137 - DNA, 411 bp, Zea mays
agctttggacacacatgtgaactgtagcttattttatcacccgcagacagacagtcagactgaaagaactaatcagatcctagaagatatgttgagagcctgtgcgttgcaagacaagtcaggatgggacaaaagattaccttatgcagaattctcctacaacaatagttatcatgccagcttgaagatgtcaccgtttcaggcactctatgggcggagttgtaggactccgctgcattgggaccagcctggagagagacaggggtttggccccgacatctttctttgaacctaaaagaatatcaaaatgggtcgggagaacctgtagacagcttagtcaagacagcgaagctatgctgacagaatgagaagagaactgatgtttgaagtgtgagactacctctatctgga

SEQ ID NO: 75138 - DNA, 457 bp, Zea mays
tttaaatgtgtgtcatcaatcaccaaagagggggagattgaatgtgcattcatcccttttgtgagttttggtgatttggataacaacacatttaaaggtctaacaagtttgctaagtgttgaacagggaattcagtatgatgaacatacttgaatagtgtataatgatcagtgaacaaagttcaacacaaggtcaaataaccagtgagacaatgcaaatggatataatatggtctctatattggtttgaatatatggacaagtcctgagaaatcactatgcataaatacgagcataatagaggttgaagtgattaagaggattggtcaagccaaagtgaacaagatatgaggaatcgtgaattggcttgaccatattactattagtccatatatgaatatatgagaatcaaactagagcttgattgatctctagcagtatatctagatgacattcaa

SEQ ID NO: 75139 - DNA, 428 bp, Zea mays
  unsure (1)..(428): unsure at all n locations
agctntttcttgaagatccatttgcaacctataggttgacaaccatagggacggtcaacgacctcccaagttccattagacataatagattccatctcactccttactgcttccttccataagtcagcatcaggagaggaatatgcctcactaatggtagttggtgtgtcttccacaaggtacactataaagtcattaccaaaggattttgtaaccctctgtctcttgctctttcgagtgactatagtgtcatcctcctcagggatgtgcacgtgagaatcctcagcatgatctataggaatcgacagttcgtgctcatggngtattataatctcatgacttgtatcactaggtgtattcttcatgggaaactcattctcaaaaaatggtgcgtctcttgattccatgatagtatcaacatacatatc

SEQ ID NO: 75140 - DNA, 456 bp, Zea mays
tgtgaagattcttcatcccaacatgggctagtcggcgatgccatagccaacccatattagtcttagcaattaagcaagtatcgagttcagctctattaaaatcaactaagtatagctgaccctctaatactcccttaaatgctactgaatcatcacttcttctaaagacaggaacacctatatctgtaaaaagacagttgtaacccattttgcataattgagaaattgaaagcaagttataatctaaagaatctacaagaaaaacattataaatggaatggtctggtgatatagcaattttaccaagtcctttgaccaaaccttgatttccatccctgaatgtgatagctctttgggaatcttcagttttctcataggaggagaacatccttttctcccctgtcatgtgggttgtgcatccgctatcaataatccaacttgagcccccggatgcat

SEQ ID NO: 75141 - DNA, 410 bp, Zea mays
  unsure (1)..(410): unsure at all n locations
agcnnngtgaataagacgtgcttttattttagcgactcaacccacttaacgattatgtgacctgcaatcgcctgataagttccgatacgattgttattaattagaacaggcttaattttacattccacacatcatgcgccctgtgcctataaatggaggatcaacactcccatactgttcccgcaagcttgttagctcttacactcaacacttggattaggaggactgtgtaaagacaaatgtattaatgtgaggcaatgcctggttgtagtancataatgtcgttaacgacatccagttttaattataagcttaaagccgcatcacttcctcgtgtataatctaatatatcgcatcatatatgatattacagctntgtatcaccaagtgtctgacctcccagacttttg

SEQ ID NO: 75142 - DNA, 355 bp, Zea mays
  unsure (1)..(355): unsure at all n locations
agcttatgaagattcttcattccaacatgtgctagacggcggngccagagccagcccatattagtcttagctattaaacatgcatctagatcgacattttctttagtgaaatctactaaataaagcttgtcgtctaatacacctttaaaagctaatgaaccatcacttcttctaaagacagatacatcaatatttgtaaataaacaattatatcccatatgatataattgacttgcagaaagtaaattgtaaccaagcgattttactaagaacacattggaaattgaatgctcggtagtgatggctatttttcccaaacctttgaccttgccatgattcccatctncaaagatga

SEQ ID NO: 75143 - DNA, 456 bp, Zea mays
  unsure (1)..(456): unsure at all n locations
tctacacgctngccccagtgatcggctaagcatgtctgaatggctctctggtaagtcgctccagcgtttttgaggccaaacgacatggaggtatagcagaaagctccaaacggggtgatgaatgcagttttttccttgtcttcttttgccaggttgatttgatggtacccggagtagcaatccaagaaggacaacatagaacacccagcggtcgagtctaccacctggtctattctaggaagtccaaagggatccttcggacaatgtttgttgagatctgtatagtcgacgcacatgcgccaattcactntattcttttttagtacaagaacaggatttgctaaccacttatgatgcagtacttctctaatgaacccttctgcgactaagcgagttagctcggcacgaatagcttctctcctgtcaggcgtgaaacgacgcaacttttgtcgtatc

SEQ ID NO: 75144 - DNA, 418 bp, Zea mays
agcttgggaaggttcttcatcctcacatgtgctaagcggcgatgccacagccagcccatgctagtcttagctattaagcatgcatctagaccggcctcttcttttgcaaaatcaactaaataaagtttgccgtctaatacacccttaaaagctagtgaaccatcacttcttctaaagacagacacatctacatttgtaaatagacagttataccccatgttgcataattgactaacagatagcaaattatatccaagagactctactaaaaacacattagatatggagtgctcattagaaattgcaattttacctaacccttttaccttgccttaattcccatcaccgaatataattgaatcttgggaatccttattcttgacgtaggaggtgaacatcttcttctcccccgtcatat

SEQ ID NO: 75145 - DNA, 461 bp, Zea mays
actcagcttctaagggagaacacgtgataggtctaaccaatgtacatttcgaaaaagatagaccttgtgcagcttgtcaagcaggtaaacaggtgggaggagcacatcacagcaagaatgtgatgaccacttcaagacctctggagctgctgcatatggacctcttcggacccgtcgcctatctgagcataggaggaagtaagtatggtctagttattgttgatgacttttcccgcttcacttgggtgttctttttgcaggataagtctgaaacccaagggaccctcaagcgcttcctaaggagagctcaaaatgagtttgagctcaaggtgaagaagataagaagcgacaacgggtccgaattcaagaatcttcaagtggaggagttccttgaggaggaggggatcaagcacgagttctccgctccctacacacctcagcaaaatggtgtggtagagtgg

SEQ ID NO: 75146 - DNA, 442 bp, Zea mays
  unsure (1)..(442): unsure at all n locations
agcttgngaagattcttcatcccaacatgggctagtcggcggggccagagccaccccatgttagtcttagcaattaagcatgtgtcgagttcagctctttcaaaatctactaagtatagctgaccctctaacacacccttaaatgctattgaatcatcacttcttctaaagacagtgacacctacatcagtgaaaagacagttgtagcccatttgacataattgtgaaacggaaagcaaattgtaatctaaagaatctacaagaaaaacattggaaatagaatggtcaggagatatagcaattttacccaatcctttgaccaaaccttgatttccatccccgaatgtgatagctcgttggggatcttgtgttttctcatatgaagagaacatcttcttctcccctgtcatgtggtttgtgcacccgctggcgagtattcaat

SEQ ID NO: 75147 - DNA, 429 bp, Zea mays
  unsure (1)..(429): unsure at all n locations
tataccacagataagtattgaagtgcagatataatgactagttagacagagagtcaggatacaatacagaacagagcacacagacgcaaggatttatcccgaggttcggccaagcctgaaatgcttgcctagtcctcgttggagttagccacacctgngcttggagtctatttcaactccttcctccgtttgctcagatctgtcagtatgacagatagagcctttcactattgagatgggttacaacaacaccgtggctgcttacaaacttctcggcagcacctcggtagagtaacgatacgctcaagaccttgctctagctctaagcagcacttctcctctctctaaaggcttatagctgtgccttctacacaaactatagagttacacacaagagggagagtgagaattgattcgagtgatgtctac

SEQ ID NO: 75148 - DNA, 346 bp, Zea mays
agcttcggaaagccaacactcttctatagagtgctgacaaccttcgccccaatccggtcccggaggcatcctaaactctcttcggcaacgccaccaaagagcaatgcccctggttgatagccgcatgatattgcataatccctcagctcttccttctcagccttagatagctttttgaccaagtatgtcttgaaaataaaaatccttttcctccgaagtatcttcggcaatctccttctctttctcgggcactggggccagggtctcttcggcagttgtagtagtttcttccacggccatatccaaaatcatcttatcaatatcagaaaatacgccctcaagattt

SEQ ID NO: 75149 - DNA, 412 bp, Zea mays
  unsure (1)..(412): unsure at all n locations
tgacattgctcccctgttggaaaccaatgccattcttaatgccagggcgtctcccattataaagcatactgtgagcaaatttaaatttttcattttcgagctcatgctcggcaattttagcacttagttgagctatgtgatcattttgtttcttaatcatggcaaggtgatcatccatagcttctacattaacatctctacatctagtaaaaatagataaatgctcaacaatagatgtagatggtttgtgtcgggtaccgtaattaggggtacccccaacactcctaaacacggctggtaaccaccatcagcacaagctgcagagactgatgggcacgattcangtcaaggcttcgtctacccaagggacgcgatctcgcctcgcccgagcctagccttcggcgggaactgt

SEQ ID NO: 75150 - DNA, 419 bp, Zea mays
agcttccttgatctcgtagggtccaatgtaacgaggagctaacttgcccttgatcccgaatctctggacacccttggtgggtgacaccttaagataaacatggtctcccacttcaaactgtcgaggcttccgcctcttatcatgatagctcttttgtctggcctgagcagcttctaagttcttcttgatgactctgacctttgcctctgcttcaagtaccaaatctggcccaaaaatttccctctctcctgcttgagaccaattcagcggggttctgcatcttctcccatacaaagcttcaaaaggtgccatctttagactagactggtagctctgccaaggaaagacacttgtcccaatcctttccgtagtgcagtacacatgcccttaacatatcttccaaatctggttaccctttc

SEQ ID NO: 75151 - DNA, 435 bp, Zea mays
  unsure (1)..(435): unsure at all n locations
tcagcttctntgctgatccagtcaattgggccttcatgatcgcctcttacaaagttgtcctcgctggagtatgcgccaacattggcgaagctagtttttatttttcccacacgttctatggatttttcataacatttttctcttgaagagcaaagttctacaaccgttttctcccaatagtttttccagtaatcactgtcgtctcggtcagcttcggcgatagcacattttaatttgcttctgccaactgtttccgaagatcctcaatttcacatttttgggcttcagcttgggcatgggaagtagcttcgtcttcttttatcttattcaccaatgagtttaacattntatctttttcaagaccttcgttccttagttcaattacttcggaacgaaggttgttcanagctatagtacatccttcgtcttcagcac

SEQ ID NO: 75152 - DNA, 399 bp, Zea mays
  unsure (1)..(399): unsure at all n locations
agcttgtgagcactaatatgaaatccaacataactatagaagtgtgatgataaaagtgaagtgctcaaaccaagcagatgttcttttttgagaccacaaacaacgtgtttgagaagacaaacatatgctattgaaactgaaaaccttaaaggtgggtacatatatacctccttgtgtaaatcttcattaagaaaagcatttttgacatcaaactgaaagataaaccgctcatgaactaaagagatagcaatgggcgtgtgtacaatagtcatgcgagcaactagagaaaatgtcccatcataatcgtgctcattntttttgaaatcatgaacaataaaacatgccatgtaactctcgatggtggtatctaaatgagtttgagcccacttgcactgttag

SEQ ID NO: 75153 - DNA, 431 bp, Zea mays
  unsure (1)..(431): unsure at all n locations
ngagaaggggacaatagtagcatgcacaaaaccccttctaaagaatatcaagctttccaagaaggacatgagcaaacatcaagagaagaaagccaaagctcatgacaagtgcctcaaccacgcctccacatgctccacacaaggtaacaaacaagtcactcttccaaataagagaagatgcactagaaagtgttatcaatgtcatgagaagggacatgagattaagtcatgtccctacacaaaggataatggcttaactttagaaagaaagaggctcactaaccatgtagcaaacaagaagcaaggcaaaaaggagtcttgcaaaattaaaaatcagatttgctacacttgccgaagaaagggacacctatgcaaggattgtcccattagtgagtatcctaagcctaccatgtcaattcattcatactcac

SEQ ID NO: 75154 - DNA, 414 bp, Zea mays
  unsure (1)..(414): unsure at all n locations
agcttgtgacanagaagtagattcgattcttaaccagtgatttaggcccagatcccgataatgatcgatgacgagcagggattcctgtgactcacgctagagcaaagcaaaaacatctcactttccgatccgaaagtagtcctgttcctgttcttcgaatagcttgactcccctcactttcgaaagcagggccctttctacagatccgagtaaagtttcgataccgatatcatgccttgcaacagaagaagaagcagcatgtgcatattcccaggggaaaaaccacgtaagttgatttgaccatttacctcgaaacgagtccgaaggtctgagaaatgttgtaatacaatagttttagattggcctattcccttcaatccatatcagtcttcgaccatcggtaggaattctcaa

SEQ ID NO: 75155 - DNA, 163 bp, Zea mays
tattttaatgatggtggcgacgacaacaatgatgacatgttcatagaagatgaagatgaggatttctagtattgatagttgatttatgaactgttcagttcagattatccaatataacagttcagttcagtttagctttctgttcagttcagaaatcagttga

SEQ ID NO: 75156 - DNA, 432 bp, Zea mays
  unsure (1)..(432): unsure at all n locations
agcttagcaagtgcgagttatggatcagcttaattctattcttgcgtcacattataaaccgagagggattggctgtagatccggagaaggtaacaactatcttggactggaaagcaccaaaagatgtccgaggaatcaagagtttcatcgaaatggccggttattatcggcgtttcattgaaggtttatccaagattgccaggccaatgacagccttgttggcaaagaaggttgagttcaagtggaccccagtatgctagaagtcctttgagacattgaaagagaagttgacaacgacaccggtactaattctgccagatgttcacaagccattctcagtgtattgcgatgcttcgtacaccggactgggatgtgtgttgatgtangaaaggagagtaatggcatactcgtcccgacagttgaagattcatg

SEQ ID NO: 75157 - DNA, 373 bp, Zea mays
  unsure (1)..(373): unsure at all n locations
tgtcaatggggagcacattntaggactaaccaatgttcattntgagaaagaaaagatttgtagcacatgtcaagcagggaagcaagttggagctaataatccacacaagaacatcatgatgaccgagaggccacttgagctactccacatggatctattcggcccgattgcctacataagcatgggcgggagtaagtattgtcttgtaattgtggatgagaattctcacttcacttggttgttctttttgcaggaaaaatctcaaaaccaagagaccttaaaaagattcttgagataggctcaaaatgagttcggattgagaatcaagaagattaaaagcgacaatggaacagagttcaagaattctcaaatt

SEQ ID NO: 75158 - DNA, 445 bp, Zea mays
  unsure (1)..(445): unsure at all n locations
agcttaactntagttaaaatctattatcctttataatctttctctactcttcacttatcatgtttagtttcataaaaaacacatacaccctattaaaattagtataaaaatatagtttgaataatgatatatatggacattaaaaagcacaggtcatgcacacttacacataattatccacacaaaagataataattaagaattacattagtacatgacacatgaaagtttgagtatttaacgttttcgattatggtacctgaattacgtgaaataaatttgggtttcgggttcaagttacgagttttttttgcgcagatctgctcttagcctcccctccaaaaaaacattgattcaaacgatctttggcttgacccatacaacgctgggatggatgaaccatccaaggatgataatggaacattctcccagtataaaaaaattt

SEQ ID NO: 75159 - DNA, 439 bp, Zea mays
  unsure (1)..(439): unsure at all n locations
ttttcaccatattatcacgggtatcgtgagaaggttgagcatgacactttcccttcaaaagtgttaagctccttcttagccttcccacttcttccttgagctctttattttcttgtgtgatagaaatatcactaattcctgaaatttctaactcaatggaagattggcttgcttgataacaacaatttgtagcacatggtgatatagtttcaatttcaacacatgtgcacatgtgaggttggtattatttcaaattagttaacacaacctcatgagccatttctaacatgatatgtgaatccataaatttattatgagagcatacaagcatatcatgttnttctttgcaagctagattntcaatgtttagcttttctactgtgttcttgagcataacattnntattttctaattgagcaatatatgnatgaatgataat

SEQ ID NO: 75160 - DNA, 451 bp, Zea mays
  unsure (1)..(451): unsure at all n locations
agctnntacaattttatgatttttaataatgagctccatgaacgtggttntagaccttcggcgcaaggcttaccaagtacatttcgcggccagagctcattatgaaacgagcttattctgtgaggggttactactgggggcctttatagacaaaggtcctcaaagtgtaatattgtcaactaagtatgtttcatgtgctctcaaaggaaggtgaaacccacctttccgagccaatgctgggagaaaagacgaagcatagaagcttcggctttgtgcaagcaacacgccaacgaaagatgaaggagagagcttctgtttcacgatgatggcgcatgaagtaactttggaagagaagaatacaaaagcttgactagtgcaacatcaaanaggaaagaggacaacattaccctcacaagacttgcagcgcatgtgtataggaatttttagcata

SEQ ID NO: 75161 - DNA, 334 bp, Zea mays
tcgggaaaccaacactcttcgacagagtactgataacctttgctccagttcgttctcagatgcatcctaggctttcttcattaatgccgtcgaacagtaacgctcctggctggtagccataggatatagcataatcccgcagcttctctttctcagccttagataactcttgaccaattatgttttgaaaattgaagtctttttcctccaaaatatcttcggcaatctccttccctttttcaggcactgtggccagggtttcttcagcggctgcagtagcttcttctgcggccatatccaagagtattctatcaatatcagataatgtgctctc

SEQ ID NO: 75162 - DNA, 246 bp, Zea mays
tttttttcatgccaccgaacgagggtactttttatttgctaccatccgagcaaaaatacgaaagtctgctatagaacctctcctgtctcaccatgcttttatgtataaaagaggctctacccctagcaccaactctgttaattgtctaaaaaaaatcctgcgctccaatgacataatattattaaaactttgatgcactttgtattactaactatcagcaagtagtgcctatttgctgtggcaaca

SEQ ID NO: 75163 - DNA, 466 bp, Zea mays
  unsure (1)..(466): unsure at all n locations
gacccggatccttaagtcacctgcggcatgcaagcttctaagggagaacacatttttgattacaaatgttcatttgagaaagacaggatntgtagcgcgtgccaagccgggaagcaagttggaacccaacatccacacaagaacatcatgacgaccgataggccgcttgagctactccacatggatctattcggcccgattgcttacataagcatcggcgagagtaagtattgtcttgtaatagtggatgattattctcgcttcacttgggtgttctttttgcaggaaaaatctcaaacccaagagaccttaaagggattcttgagacgggctcaaaatgagttcggcttaaggatcaagaaaattagaagcgacaacgggacggagttcaagaactcacagatagaatgctttcttgaggagganggcatcaagcatgagttctcttcttcctacactccacaac

SEQ ID NO: 75164 - DNA, 276 bp, Zea mays
  unsure (1)..(276): unsure at all n locations
aaactccgctttccagatcagttctgatgtgtggttgcgttctgcttatgtcanagaacacgcgtagaggaggaaggcgtgctcagcaggagcgagccgctccgcacgatgaggtgccccagcagcagcacctgccgcccccgcccccgattgtcgttggacacaatgttttggaggcaaattaaggcggttcaggcaatcggtctaattttggcggccttcaacaacagcagcagcatcaacagcagcaagcaccaccccaaccttagatggctt

SEQ ID NO: 75165 - DNA, 406 bp, Zea mays
  unsure (1)..(406): unsure at all n locations
agcttatccaaaaagtttagtgattnttgtttttattaattaatttctaaaattccaggagtatagtttttggctattttaaatactgcataattacttatttagactaaaaatcataaaactatttttattaaatactatagaaatttcggagcctaacaaaattggtcttgtatttttagcatttttctaaaattttctagaaattctctaatcctggtagaaaaagaaaaaagagaaactatgaatagtgttgagctgaattcagcccaaaccagcctgcagaaaggaggacacgcgcgcgcccacgcccgcgatgccggtcttgcgaaaaggcacctgttgaatccaataactggtgaagagaccttagctactattcaatgtctcgctgacaaatgcacag

SEQ ID NO: 75166 - DNA, 373 bp, Zea mays
ttattccagtgtacccaggaccatgaagaataccttcatgcgtatgtccgaaggtttctgcgtctgagggcacagacgccaacagtgcccaatgaaattgtcattgaggccatgattaagggacttcggccgggaccttcaacacaatactttgtcaggaagccaccacaaactttggagaagctgctccagaagatggacgagtatatccgagctgacaatgacttccgccaaagaagggaggaggcattcaggttctctgaaatgaccaagggcttcggaggaagatttcatccgaggcacgtcaggtcaattcataactccactcagaatgatgatagagggagccaacagcaaaggccacaatacttct

SEQ ID NO: 75167 - DNA, 425 bp, Zea mays
  unsure (1)..(425): unsure at all n locations
agcttgctggacgtcgccctcgtacctgatacggcggngcagtcagtccccgacgtgactttatcgccgctcgtcgaccaagaggtaccgatcgattcccatcccacgtcatttggattcagcctcaacccgcctagcgaccccgctttggcgggcgctctcgtagaggcgagtccaaacccactagggtttcgtatgcggtcaccttgggaccggctgatggacgtctcgacctacgggccctccgggtccgaggaagacgacgagcccaacttctgttgggatttctctggacttggcaaccccagtgccatgcgggacttcatgaccgcatgtgactactgcctctccgactgttccgacggtagccgtagcctcngcaacgaggactgcggcccaagtcgctaatgcttccacgtcgatct

SEQ ID NO: 75168 - DNA, 303 bp, Zea mays
  unsure (1)..(303): unsure at all n locations
ngcataaagatttccacaaccaaacaggcgaagtacactgcagaagcctagatacaggctaatgcaagccaccaaagagtcccataatgcctttttcctttacttagaagcatgagtacaatcataaaaacaatcttttatgaaaaacatgaaggctgaagccaacaattacgtagatcagggggaaaaactacagttatagtgcaaccacaattatgaaattgcagaatcataagcaagcttcattatgactgaatctacacatcttatctatatgctctacacatggcactactagctctt

SEQ ID NO: 75169 - DNA, 445 bp, Zea mays
  unsure (1)..(445): unsure at all n locations
agcnttggatgtcttatgcggttagcatttatttatttaattcctaaatttaacttggtcaaaaagtctaagtgccatgtgtgtgttgaatcaaaacaacctcgcaagcctcacaaggctgctgaggcgaggagtttggcacctctagaacttgttcattctaatctgtgcgagatgaatggaattttgaccaaaggtggtaaaagatactttctcacttttatagatgactccactagatnttgttatgtgtatctcttaaaaacaaaagatgaagcgttcaattattttaaggcctataaagctgaagtagagaaccaacttgagagaaaaataaaacgggtaaggtctgatcgaggtggagaatatttctctaatgtgtccgatgagttctgcgtggaacatggtattattcatgagaggacaccgtcattctcaccacaat

SEQ ID NO: 75170 - DNA, 382 bp, Zea mays
  unsure (1)..(382): unsure at all n locations
ttctttgaatttaaattgaataatcattgaagcttaataatttaatttgaaaatctgaaataaaattttgtatataatgaatttgaagtaaattataaaattaaagtatttgaaaatttgaatttaaaaataattttattttcaaaaacatgaattttaagtatttgaaataaagttttgaatttaataaatttgaaatatttgaaaaggtagtttagaaattctgaaaacttgaatttgaagtatttgaacttaatgaatctaaaataaattttgtttttaaaattttgaatttaaaatatttgaaattgtaaatttcaaataattgattctcaaaattatggtcgggattatgtcaggcatatactntatattttatatc

SEQ ID NO: 75171 - DNA, 319 bp, Zea mays
tagcttttccatctcttgacacaaagtgttgtcagaggtcttcaccataagacagtggcaggaagccttacggctcagtgcatctgccaccacattggctttgcctgggtgataatggatctccagttcatagtccttaataagctcaagccatcgtctttgcctcatatttaattctgactgggtgaaaatgtacttcaaacttttatgatctgtatatatgtgacagatatttcccagcagatagtgacgccataggttcagggcatgaaccacagcagctagctccagatcatgagttgggtaatgctcctcatgt

SEQ ID NO: 75172 - DNA, 300 bp, Zea mays
atggctcacgataatgaaggctatattttatatcctgctaactatcctgagcataaaattaggagaattcatgctagaaaacctcataatgtttctcaccatgcttttatgtataaaaatgaggctactagccctatgcaatcaactcatgttaaattgcctaataagaaaactcctgctgcatcaaatgagcataatatttcatttaaaacttttgatgcatcttatgttttaactaacaaatcaggcaaagtagttgccaaatatgttgggggcaaacacaagagctccaaaacttgt

SEQ ID NO: 75173 - DNA, 251 bp, Zea mays
  unsure (1)..(251): unsure at all n locations
agcttatcgagncgtatgtttccgcttattacgctcgctagatttcaacagggcaaccaaagcacaagccgtcgtccgcggcgcccgatcggttttgcggcatggtcaaatccaactgcgcctgcgctaaatactccacccggctcctcccaaaccctagggtttaaacgcgatcctgaatcttctcccaaaccaagacaaccagctagcgattgctactacacaaaagagcggcaggggggggggggggg

SEQ ID NO: 75174 - DNA, 414 bp, Zea mays
  unsure (1)..(414): unsure at all n locations
tcttcaccatgtgatcacggttatcttgagaaggttgttctatgcacttcccttttagttgtgtcaagctcatttttagcctctcattttcttctttgagcttttgatatgtatcatcttttattcctgcaaattctagctcaaaggaagatttgcttgtcgacagacaacaagcattagcacatggtaatatagtttcaatttgaatatatgtgcatgattgaggttgttgtgattntaagtttcctattacaacctcatgagcaatatttaatatgatatgatcctccataagattttcatgagaacatagaagcatatcatattttttcttgaaaagctagattntcatcttttagctattctactcggtccttaagcaggcattcctacttactaatngagcgatacaat

SEQ ID NO: 75175 - DNA, 390 bp, Zea mays
  unsure (1)..(390): unsure at all n locations
agctngaagccatggttagtatcatatgccaataatataagaattgattcaagcctagctacgggtgcataggtttcaccgaaatccaaaccttcgacttgggagtatcctttggccacaagttgggctttgtttcttgtcaccacaccatgctcgtcttgcttgttgcggaacacccatttggttcctacaacattttgattaggacgtggaaccaaataccatacctcgttcctagtgaagttgttgagctcctcttgcatcgccaccacccaatccgaatcttgtagtgcttcctctaccctgtgtggctcaatagaggaaacaaaagagtaatgttcacaaaaatgtgcaacacgagatctactggttacccccttatggatgtcg

SEQ ID NO: 75176 - DNA, 368 bp, Zea mays
  unsure (1)..(368): unsure at all n locations
tctaaagggagaacacattntaggatttacaaatgttcattttgagaaagacaggatttgtagcgcatgccaggcaagaaagcaagctgggactcatcatccgcacaagaacatcatgacgaccgacaggccgcttgagctactccacatggatctattcggcctgattgcttacataagcatcggcgggagtaagtattgtcttgtaatagtggatgattattctcgcttcacttgggtattctttttacaggaaaaatctcaaacccaagagaccttaaagggattcttgagacgagctcaaaatgagttcggcttaaggatcaagaaaataagaagcgacaacgggacggagttcaagaactctc

SEQ ID NO: 75177 - DNA, 402 bp, Zea mays
gcttgggtatgcatatgaagttcagtttatctttcatcctcagacagacagtcagactgatagaactaatcaaatccttgcagatatattgagagcttgggcgttgcaagatcagtatggatggtacatgaggttaccttatgcagagttctcctatttctacaattaccaggctagcttgaagatgtctccatttcacgtgctttatgggaggagttgtacaactccattgcaatgggatccgcccggaaaaaacaagtgtgtgggccacacattttgctcaaatctgaagagaacatcaagatgtgtccggagaacctgaagataacacattccaggcagcgacgctatgtggaccacagaaagagacagctgagtttctagactgagattcgttacctg

SEQ ID NO: 75178 - DNA, 434 bp, Zea mays
  unsure (1)..(434): unsure at all n locations
taagcttgcacacccganatctagtaatgctctcagagtctactgccattttcacttattatcatacgattctgccatgctcatgcacactaaattaaaccaacgcgttcttgtggacatgacgagttatggggtgtttgaatgcactatagttaatgttagttggctaaaaattggtagtgaaattagctagctaactattagctaatttgttaaaaatagctactagcttaactattagttggatgtcctcacctaattttagtaaccagctattagctttagtgcattcaaacatagccttaatctccaataaagatctctcagtctccaactctccatcctagagtcactcatccnctccagcataacgaacttgaatccaggcttaaacgggatcaaagcttaaaattggactatccgattcctcgagg

SEQ ID NO: 75179 - DNA, 432 bp, Zea mays
agcttacatcccatacaaaggagggatgtatcacttaaaaccttcccaagaacaccactacagacaagtgatgacatgcgagactcacacatgtgaccaagacgatagtgctacttcgtcagcttccttcgtggtctctttagttgccacttgtttgcctcagttagggccacagtcaagtgcctcgttgttatgtatcgtattgctctgggttcttgactcaagagtttatttctctttattctttgagtccatctaattccttatttgttaacactgctgatggcacttcccacgctgttcacagtcatggcacccttcacacttcttggtttatggttccttctgtttctcacattcttgatcttaatttacaattgctatctgcttggtggctcacagatcatgatggccgtatcattcttgagtctg

SEQ ID NO: 75180 - DNA, 388 bp, Zea mays
  unsure (1)..(388): unsure at all n locations
gcgcatgtcaagcagggaagcaagttggtacccaccatccacacaagaacatcatggcgaccgataggccgcttgagctactccacatggatctattcggcccgatcgcttacataagcatcgacgggagtaagtattgtcttgtaattatggatgattattctcgcttcacttgggtattctttttgcaggaaaaatcacaaacccaagagaccttaaagggattcttgagatgggctcaaaatgagttcggattgaggatcaagaaaataagaagcgacaacgggacgaagttcaagaactctcanatagaaggatntcttgaggacgagggcatcaagcatgagttctcttcttcctacacaactcaacaaaatggtgtagtgga

SEQ ID NO: 75181 - DNA, 432 bp, Zea mays
  unsure (1)..(432): unsure at all n locations
agcttaaagatcggcttcagtggccttcttttctgtttctgatcactgatcttcggcatcatcatcctacacacatcaaaattttataaggcaaagggtaatcataagaaaaggtaagcaacaggtataagtttcataccggctntaacaggcttcgggcctcgtcactagccaattcttgaccacccttcccccaaatttgcgttatgaatctgcttcctatgcttcaggctatattaggaatgtcaactaaatctgatgcagataagctgaagtttggtctattcaaaatttttgcgtgcgtacaaccagctttcaaaaatgttgtagctgtgccgcgagaagctagcagggcacagaagtcaccatgccctgctattacttcgtcgagtgcctctacttcccctcgatatgttcgagggtgtggaaatg

SEQ ID NO: 75182 - DNA, 267 bp, Zea mays
ataccacagatagtattgaagtgcagatataaagacttgtattacatatagtcaggatacaatacagaacagagcacacagacgcaaggatttatcccgaggttcggccaagcctgaaatgcttgcctagtcctcgttggagttagccacacctgggcttggagtctatttcaactccttcctccgtttgctcagatctgtcagtatgacagatagagcctttcactattgagatgggttacaacaacaccgtggctgcttacaaac

SEQ ID NO: 75183 - DNA, 351 bp, Zea mays
  unsure (1)..(351): unsure at all n locations
agcttctaattaaatcatgactgcgcctaagcagcgttattataagagtgaaggtggatgtgctgctactttccacttcccttgatgagcaacaagcacctgcattgagtaatgcaagagtgagatgaaacatctcagcaagcgaattattttgacgagatatttaaaccacaaattgaattcatcaacattttaaaagagtcacaattagaatcagaaatacttgtagatatagaactcagtagtcccactataaccaataccatctcatttncttgaacaaccacaataggttctataacacttccctgcgtcaacaatacctgcaaatatcacttcaatgtatgcata

SEQ ID NO: 75184 - DNA, 410 bp, Zea mays
  unsure (1)..(410): unsure at all n locations
ngatgtccaatgaaacattngattcccagcagttacataatttacacacacagcacacacacacgccctgctttcatctatcacagttcacaggctccctcgctcccacctacgtgtatcggtttcacttcccatatacaaaaaaagggggtatcaacagcggcatcactcttaagaacgacgagtgatccttccgctggaataaatggaaaccggtgccttctctccaaccaaaggcatcaacttcggcagtcatatgtacatgaacacagcagctatagtccgcttagctcattgtgcatcccgtttcgcggttggttgggggtctaccagcgatcacgttaagagaaacaaagcaaagaatgggcctatggctttcccggtggctcttgatgttttgcgctgctccg

SEQ ID NO: 75185 - DNA, 435 bp, Zea mays
  unsure (1)..(435): unsure at all n locations
agcttctaaagggagaacacgtgataggtttaactaatgttcaattcgaaaaagatagaccttgtgcagcttgtcaagcagggaaacaggtgggaggctctcatcacaccaaaaatgtgatgacgacatcaagacccttggagatgctgcatatggacctttttggacccgtcgcctatctaagcataggaggaagtaagtatggtttagttattgttgatgacttttcccgcttcacttgggtgttctttntgcaggaaaagtccgaaacccaagggactctcaaacgcttcctcaggagagctcaaaatngagttgagctcaaagtgaagaagataaggagcgacaacgggtccgagttcaagaatcttcaagtggaggaattcctttgagaagaaaggatcaagcatgagttctccgctccctacacaccac

SEQ ID NO: 75186 - DNA, 343 bp, Zea mays
  unsure (1)..(343): unsure at all n locations
tgtagccnctactacaagcaccccggtgcaagataatataagcctcatcccacctcttgtgtttcatcttgcatcaacccatctgggcagggacacgcaacacaaaattcactagtcggttcggttgagggtcccctaggtccgaaacgccgacagttggcgcgccaggtaagggccgctgcgtgttgacaatactttcccgttaagttccagatggacaatcttcagcagcctcttcagcccgggacggtgctccgctttgggagtcttgagttcatgtcccccgacggcagttacgacatggtactcctccccccgcagcacgacaacaacgacagtcgtc

SEQ ID NO: 75187 - DNA, 446 bp, Zea mays
  unsure (1)..(446): unsure at all n locations
agcttaaagcaagttatagtgttgtggcttaagatgaaacttctattctagtgattaccaaaagatgtcaattgaagcaaactatcacggctaccaattgaaagataccaattgcaagatcatttattatcatagctccatgatacttaaggacaagcatctagtatcaccaaattttatagagcatgagcaatctaaaaatatgcaattactcatgacttaagataccaattccttgacttacagaggtaccccagtcctgattgctccatttcttgctcatcttctcttttccaccatgagactacacaagatcgctcaagatacaattagtctaanaagacgcaagttatgtgtgctccccctacacttgtgcatcaagtatttgaataacttgcactttgcacattctagctttcttagaactagaggggatcacaacatat

SEQ ID NO: 75188 - DNA, 398 bp, Zea mays
  unsure (1)..(398): unsure at all n locations
tccactcangcacctatgtggcctgactggcacatcttacactntcagccactacaagtgagtctacattaaaagtgagtttagattcttttgtccacacatatatagatgcgacaactgaaatgtgtgcttatggagactctgtagagacgtgatgtaggactgcaaccgacctatgttggttaagtgtagacggtgccattgatcttctagttgttatataaagagtttagttacattgtatagatacacaaaatatacgaacttgattaattgttcgttttagattgtccatggaatatgaacacacctaacaaaaagaattntatccaattgcagttcttttatatataatatgcaaaagcacgtaaacaggtgtaccgtgattattacacgtg

SEQ ID NO: 75189 - DNA, 392 bp, Zea mays
agcttgctcgagcttgaaccgtggaccctcgccaccggaacaacgcaatcgtgctcaccggagttcggaaccccgccggagcacgtggatcgggtgagtctctgcaccatttctcaattcgttgcacacatagcctctacatcaccccgtggagctcctcatgtcatttaattgaactataccgccatggtttggccggagcaggagccgccgccgacctctgccgcctgcgctcgtggccagggcagctccgacaacctctgacgccgacccgcacactgacgtgaccgtcgtgacctcccctacgtcactgaccaccccgccggagctctactggccgcggtaagcctcgccgccgtaatctatgccgcgggtacttgttaagccagcga

SEQ ID NO: 75190 - DNA, 246 bp, Zea mays
tgaagtacacttttacccaatcagaactaaatatgatgtatagaagatggcttgagctgattaaggtttatgaattaaaaatccactatcacccaagaaaagccaacgtggtggctgatacactaaatcgtaaggcttgctgccattgtcttacagtaaggattacgaacaccacattatgttaggaaatggagaagtaaacctggaataatcaacatggaaccttgaatcaattgaagcttgagt

SEQ ID NO: 75191 - DNA, 443 bp, Zea mays
  unsure (1)..(443): unsure at all n locations
acctgangcatcaagcttnnctttttgtgccttgactgtatttttttnttcttggcacggctggatcgtcttctggacagttaactaaggattaattataattgtgctcgggccactaactaaggattatagacgacgggatctacctacgggtgttaatgaaaactatatttaatactattaaattgaagactgaatcaggatagaactctggaaagcaaaaatgtgtcattgtgttatgttcaaaatttttatgtgcttatggatacaaacgacaaacataatggatttcctttgggattaaaagctaacaacaggtgcacaatagttatttagagatcaatatttatgtcatacccaccatactatgggacgaataaagatttgtaccataagatatggcctcacctaagagtattatacctcctaaacaaaattatata

SEQ ID NO: 75192 - DNA, 460 bp, Zea mays
  unsure (1)..(460): unsure at all n locations
tcgtcttgaccatactcttatatactcgtaatccaatttcgaagatacctgctcacacatttcacttggaaaatattgtcaaatcatgtttntgaggaccttcggaagccgaaggcccccaacatgaatttttatccacctcagttttcaggcttgcttcaagatatttcttttcttgctcaaatttttctgactgttggagcaattcattctttaagctgttattctcagtttggacttcagccaaagaaccctccatagtctgaataacaaaatctttcttttctaatgcaccttcgtgctctttaaccatgatttcaaggtcctggatggtgaagtctttctttttcagattagcttcgtaattttcaactntttcagccaaatcttggacgacggctnntgtcttctcttcttcgagatcttgttgcatttttagaaccttacttaataatatact

SEQ ID NO: 75193 - DNA, 384 bp, Zea mays
gccttaccattacaaattcaagagacatttcaaagtgccttgccaagaatggctggacacaatcgaagtaatgtgcaatgaaatactcggaaattattctaaaaaagaagaccaattgatgactgcggccttcagcacccgtccgaagcgaaggctaaaccgagtgatggatgctataggttttgaatatcctgactacgagcggctagacaagggtgccgaaggccaaaaaaggaagagagtagctagtgctctgaataaagacgatgaagatcaaccgaagaagaaaaaacaagagtctgaggcgaaaacagttgttccgaagaaaagaaaggcttcgactccgaagcaaaaaccaattgatgaaggagaagggacttatgc

SEQ ID NO: 75194 - DNA, 407 bp, Zea mays
aagacaggatttgtagcgcatgccaagcatggaagcaagttggtgctcatcatccacacaagaacatcatgactagtgacaggtcactggagctcctacacatggacctattcggcccgatcgcttacataaacatcggcggaagtaagtactgtctagttattgtggatgattattctcgcttcacttgggtgttctttttgcaggaaaaatctcatacccaagagaccttaaaaggattcttgagacgggctcacaatgagttcggcttaaggatcaagaaaattagaagcgacaacgggacggatgtcaagaactctcaaattgaatgcttccttgaggaggaaggcatcaagcatgagttctcttctcctacaccccataacataatggtgttgtggagagga

SEQ ID NO: 75195 - DNA, 425 bp, Zea mays
  unsure (1)..(425): unsure at all n locations
agcttgctacaagccttctttttcttctctatagcangaaccttactggaacactaccccacttaaaaagaatgagggtagatctcttgaatcttggtgatttgaactccttgaagtacctcataacaagagtgttacggggccttcttctgctgttgctgcttgaccaggctgcagagagatgactgtcacagggttgattctgggagaaccttcttcttatcttctcttcactatcttcttttcacttctcactggaggattctatcaaagagtattaccataatacagaggaggaagccaaagactatgaaccatgtgcaacagtcttcaacccaagaatcaccaagcattatgatcttatgggcgagggagtggaaaatggagttgcttgtgaattggcagaggggatttatctggagtgt

SEQ ID NO: 75196 - DNA, 424 bp, Zea mays
acattaactaaaaagagaacgttgcttcttatatcagcctaagcctatgctcctatgtgaaaaataacagatcaaagggtactgctgggatctcagctatctgatagcaagaaaactctgataatgtttttgttcaacaacaaagatgtctttacttggacagccaatgatctttgtggtgtcaacagagatgtcatcgaacattcacttaatgtggatccatctttcacgccaaggaagcaaagacttctgaagatgtctgatgattaagctgaaggtgctccgaacgaagttaagagactcctcagtgctggtgttatcagagaaataacatatccacaatgctagctaacactgttatggtgaggaaggctaatggcaaatggagaatgtgtatttgattcatagatctcaacaaagcatg

SEQ ID NO: 75197 - DNA, 441 bp, Zea mays
  unsure (1)..(441): unsure at all n locations
agcttctcctagagagattcactngaatgtctctataagaattctaagatatttgaagtatactcccaatattggtctatggtatcccaagggtgcacaatttgaattaattggatattcggattcggactatgcggggtgcaaagttgatagaaaaagcacctccggttgttgtcaatttcttggtagatctcttgtttcatggtcttctaagaaacaaaattcggttgctctatctaccgccgaggcggaaatatatcggccggaaattgttgtgctcaactattatggatgaaacaaaccttattggactatggagttattttcaagaatgtgcctctcatgtgtgataatgagagtgtnggtaaaatggctaccaatccggtccaacactcaagaaccaagcatattgatatccgacatcacttcttaagagatcat

SEQ ID NO: 75198 - DNA, 169 bp, Zea mays
  unsure (1)..(169): unsure at all n locations
ggtgaagaaaagacttgaaggtcaaggatgatncaagtgagaaaagatatggtgcatcgaggatcacgacttaagaatgtgacttataaccaatgaggcaacatctatggttatgtggtgtaagtcacaaggctcaagatcaagctcaagacatagagcaaggtcacta

SEQ ID NO: 75199 - DNA, 437 bp, Zea mays
agcttaaattccttgcatgtttatgcatccggttgttttatctggatcatcgacagcggatgcacaaaccatatgacgggggagaagaaaatgttcacctcctacatcaagaacaaggattcctaggatacgattatctttggagatgggaatcaaggcaaggtcaaaggtttgggaaaaatagccatcacaagcgagcactctatttcaaatgtatttttagtagagtcattaggatacaacctcctgtctgtaagtcaattgtgccacatgggctacaattgtttgtttacaaatgttgatgtatctgtctttagaaggagtgatggttcattagcatttaagggtgtattagacgacaaactctacttagttgatttttcgaaagaggaggctgatctagatgcatgctaaatagctaagactagtatgggctg

SEQ ID NO: 75200 - DNA, 341 bp, Zea mays
aaatctaagcttgacatggcgagtgttgatgcgtgtgggtatgcgttgtgtgtgtcgtgtgtcgacaaagtccggcgcgcatgggaggcaagccagctacaccattgcatggcgatggaccggagtcaagcatgcatgtatagggggtggttggagtgatatccttaaataattagaaggaaggctttacttataggtcatccacctatgttatattgctaaaaaaaaacttctattgcatcagacgagcccattatttaatttatgaactctgacgcttcatatatttaacttacaaataacgctaacacggttactaattattttgttgactaacacaa

SEQ ID NO: 75201 - DNA, 425 bp, Zea mays
agctttctacgcgtagctctttttgtttcaaccttctcctagatcatgcttttcatatcatgtacagcttcattccgaggccaaaggtccctgtgaatgtattatacatggaaaacatgttagttgtgtttttgaggaccttcggaaaatgaaggccccaacagtagcccctcgcagtattaatttgttataacaataaattcaaactgcgacatgaacgaaggccttaagccgaaggtccaaaaaaacaccttcccttcgctacaatagcgaaagtcaacgacagacagggcccgccaagttgcatggcactaggggtataaatatgaacccatagcggcagtatttgatatgccatttctgctgtttgcattattttctcaaaattttagcttttgctcactagctcttatcttgatttcgag

SEQ ID NO: 75202 - DNA, 337 bp, Zea mays
ctatatggttgaaacaagtccctagagcctggtatgatcatttgaaatcttttctactttctaagggttttaaaatgggatctatggacaaaactctctatctcctcaagcataataatgacacccttttagtctagatttacgtggatgatatcatatttggtggttcttctaatgctcttgtgtctagattttcagatcttatgagcagggaatttgagattagcatgatgggcgagctgaatttctttcttgtggtgcaaatcaagcatactcaagatgggacctttgtacattaaggcatgtatacataggacgtcctgaaaaagtttgacat

SEQ ID NO: 75203 - DNA, 387 bp, Zea mays
agcttaagccttcgtaataaaattttatatatattgtgagacaacataaaataaaaggtattatagggggtaaataagtcatagacgaattatattatatttacttaacatattgaatcattgaatacaataatacctctgccttggcaaaggttggattccagaaaatgcgatggtaattaccagaatgcgtgaacaggaaaggaatattgttcactatttataggcacaggacgcagcctgtgagaaattacaagtatgccccttataaaagcttacaacagtgactcatacctttatggactaaaaagtcattctatctttaagtcggtttgtaataccgaagcttcacgaaaagagaccttcggtcattttatacaaacagct

SEQ ID NO: 75204 - DNA, 284 bp, Zea mays
  unsure (1)..(284): unsure at all n locations
gacatggagaggctntcacgcgacgaaggccaagtactgcatagcaaanaaggagaaaatacaatgttgccctgatgtcatctgtaaataatgtatgtaaaaccatgaggtgcatgaatgcaattttgtacaaaggtgatttgccttccctataaatagatgaatagtaccatgtataaacctaccttttaaaggtcatagcttcacattgctcagcctttcaagaaccttcgtgccactttgtaccaaggagccgaaggtatgcttgtaaacctgtttaatac

SEQ ID NO: 75205 - DNA, 425 bp, Zea mays
agcttgcctcgggcagactaatatcattttaagatagcacgcaatgggagtggagagatggcgagagtagcgtgtaccctccgtggcaagaggctggacggtggtgtatctatgctctcggttggcgtgaacctgatctagtcttaagaaccccgatggcgagttgacatatgcaagggttaagtgctacatatgtcgtgtgattggagatccccagctgggtattaatcgattcggatcgccgttacttctcggacatgaagacttggtcactgccctgcaatctaagtcatggatggaatcttaatgagcaaaaatcatgttggattgattaatgtgatggtgaaattagactagatgccaacaaggtctattaatacttaatctccattaaaatgttgaaagtaggactcactttagtaagc

SEQ ID NO: 75206 - DNA, 435 bp, Zea mays
agcttgcttacttggtaagatgactaatgtctcccttcacgggtttaccggagaggacgttagatttattggaactcatacatactgatgtgtgtggaccaatgagtacgacagctaggggaggattccaatacttcataaccttcactgatgattttagtagatatgggtatgtctacttaatgaaacacaagtctgaatccttagaaaagttcaaagagtttcagaatgaagtagaaaatcagcgtggcaagaaaataaagcactgcgatcagatcgtggtggtgaatatttgagtcatgagtttagcaatcatctaaagaagtgtggaattgttccacagcttacgccgccttgaacgcctcaaaggaatggcgtgtctgagcgacgtaatcagactttattggatatggttcgatcaatgatgagccagtc

SEQ ID NO: 75207 - DNA, 453 bp, Zea mays
tatgaagattcttcatcccaacatgggctagtcggcggtgccagagccaacccatgttagtcttagcaattaagcatgtgtcgagttcagctctttcaaaatctactaagtatagctgaccctctaacacacctttaaatgctattgaatcatcacttcttctaaagacagtgacacctacatcagtaaatagacagttgtagcccatttgacataattgggaaacagaaagcaagttgtaatctaaagaatcaacaagaaaaacatttgaaatggaatggtcaggagaaatagcaattttacccaaacctttgaccaaaccttgatttccatccacgaatgtgatcgctctttgtggatcttggtttttctcatatgaggagaacatctttttctccccagtcatgtggttcgtgcacccgctgtcgagtatccaacttgagcccccggatg

SEQ ID NO: 75208 - DNA, 416 bp, Zea mays
  unsure (1)..(416): unsure at all n locations
agcttggcgtatagtataccctttaaagctagtgaaccatcacatcttctaaagacagacacatctacattggtaaacaaacagttatatcccatattgcataattgactaacagacagcaaattatatccaagagactctactaaaaacacattagagatagagcgctcatttgagattgcaattatacctaacccttgtaccttgccttgagtgccattaccgaatataattgaatcttgggaatctttattcttgacgtacgaggtgaacatcttcttctcccncgtcatatggtttgtgcatgcgctgtcaataattcatgttgaacccgcggatgcataaacctgcaatggaagattaggcttgggtcttatgtacccaactcatgttgggtgctgcagggtagcacaaat

SEQ ID NO: 75209 - DNA, 382 bp, Zea mays
  unsure (1)..(382): unsure at all n locations
tanagccatggtaagtagcataggccaataatatgcgaattgactcaagcctagctacgggtgcataggtttcaccgaaatccaaaccttcgacttgggagtatcccttggccacaagtcgagctttgttccttgtcaccacaccatgctcatcttgcttgttgcggaagacccatttggttcctacaacattttgattaggacgtggaactaaatgccataccttattcctagtgaagttgttgagctcctcttgcatcgccaccacccaatccgaatcttggagagcttcctctaccctgtgaggctcaatagaggaaacaaaagagtaatgctcacaaaaatgtgcaacacgagatctagtagttacccccttatgaat

SEQ ID NO: 75210 - DNA, 402 bp, Zea mays
agcttaaccttgtatcgaggataacccgcctttatctgaaaggtggatggtgcttaagcctctatgaaatcctttaaggtacaagctcgcgatatttacaacatgctgtcacaagtgcataaactgctatgagcatcacacttatactatgacacaatgcactatacattctctatgatatagacataatctcattaacctaattatgtgcacttggcatttaaggccaaaatgagcgttcctctccatacacataggtagggggagcaatctatattatatagaactttgattatgcttaattgacatatgcttttaatcatgtctctttccttcggaacagtcgcatatgtcctatctctatggcgccaacgctaagactaatatgtcttcatgagcatc

SEQ ID NO: 75211 - DNA, 342 bp, Zea mays
  unsure (1)..(342): unsure at all n locations
ngacaatgaagaaatggcgctcggcatttaaatcttcctccaaatcctcaagcaaaggagagggacagactacgcgttccgctccaagaagagttgctacaagtgtggtaagcccggtcactttattgcaaaatgatcattatcaagtgacagtgacaggggcgacgaccagaaagggagaagaaaagaaaaaaagtactacgagaagaagggcggcgatgcccatgtttgtgcggagtgggattccgacgaaagctcaagcaactcctccgacgacgaggacgccgtcaacatcaccgtcaccaaaaggcttctcttgcccaacgtcagtcacaagtgcct

SEQ ID NO: 75212 - DNA, 428 bp, Zea mays
  unsure (1)..(428): unsure at all n locations
agcttgtgctcctgtgtgaaaaagtaatgtataatagttnttgtggtcttcctctctttctgttaaaaccgctctccctttctcttttagctctctggaatgacttgatgtcagtactctccctttaactgtgacctttgatttataaacttatgccaggctgttccggtctcactttgtctaacctatggaccccattctaaactcaaaaaattgcaggtggcataatcatctgaatccagaaataaggaaagatgcttggactcctgaggaggaaagagcacttattgatgcccatcaagtgtttgggaataaatgggcagaaatagcaaatgctcttcccgaaggtacttatacacttgctaacttcatgggttcagtatagaaaatcacttattgcaataaacctcatgaaaagctggatactt

SEQ ID NO: 75213 - DNA, 437 bp, Zea mays
  unsure (1)..(437): unsure at all n locations
ntatgatctctgatgctcgagtaccaagtattgctcacatgcatagtcatagaagatgaaagacatttcaattaatccagaaaagcataagcgttcatacttgagacacacggagtgaaggtaagccattccgtgtgtagtgggtggacgtgggggcgtggacatgagctgggcaaggccgaactcggtgacgcaagcgccgagttcctgtgagagaaggatgttgcttgacttgatgttcccgtgaatgaacttcccgccgctacccacagagtgaaggtaagccattccgcgtgttgtgcccagagttatcttcaccctggtctcccagtccaatggggttcttccagcagctttgttacctggatttacaatcaacaattagtctgcaaccaactaccatacagtttcattttcatagaaatatgtataatgag

SEQ ID NO: 75214 - DNA, 364 bp, Zea mays
  unsure (1)..(364): unsure at all n locations
agcttgaagccatggtaagtagcatatgcttatgtatacgattngactcaagcctagctacgggtgcataggtttcaccgaaatccaaaccttcgacttgtgagtatcctttggccacaagtcgggctttgttccttgtcaccacaccatgctcgtcttgcttgttgcggaagacccacttggttcctacaacattttgattaggacgtggaaccaaatgtcatacctcattcctagtgaagttgttgagctcctcttgtatcgccaccacccaatccgaaccttgtagtgcttcctctaccctgtgtggctcaatagaggaaacaaaagagtaatgctcacaaaaatgtgcaacacgagatct

SEQ ID NO: 75215 - DNA, 453 bp, Zea mays
  unsure (1)..(453): unsure at all n locations
tggtggaaacaaannatgtatcccatgcctgtcatgtacaagataacatgaaaanttgcaatagaacaaaatagttttcacccactaaggaaccagcatattcctagaccatggacaaatatgagcagatggtgtatgttatgtgtttaacaaataaatatagtttgcaacactaagctagtgagcttcacataggaagccaagtagaagttcaggaaagaaactcaaactgttaagaaaagggcaaactcatcaagagtactgaccagagatatgggagggtcatgttttttaacaaagatggatgcctcaagacaaggctacgccattcctctttgtcaattttcccgtcatgctttgtatatgcttcctcaaatgtctagcaacatgcaacatcaaaagatatgagaaactgatcataatttcgatagatatatacactatacanaaata

SEQ ID NO: 75216 - DNA, 441 bp, Zea mays
  unsure (1)..(441): unsure at all n locations
caccatattatcacggttatcgtgagaatgttgagcatgacactttcccttcaaaagtgttaagctccttcttagccttccaacttcttccttgagctctttattttcttgtgtgatagaaatatcactaattcctgaaatttctagctcaatggaagattggcttgcttgataacaacaattgttagcacatggtgatatagtttcaatttcaacacatgtgcacatgtgaggttggtatgatttcaaattagttaacacaacctcatgagccatttctaacatgatatgtgaatccataaatttattatgagagcatacaagcatatcatgtttttcttgcaaagctagattntcaatggttagctnttctaccgtgttcttgagcataacattnttattttctaantgagcaatatatgatgaatgattaataacttt

SEQ ID NO: 75217 - DNA, 404 bp, Zea mays
ccccgtgacatgagaacgatagactattctcaagcaagaacatatgatgatgtcgagggacatcatggtgataatggggaaaaccactatcaaaactgccccttacttattgagcatatgctctatcaacattaaggagagattcatatatgctaaaagattaatacattcttttggacctttaccatgttgtagaggacttctcacacttgatagatattaatctcttgagagcttctccacacttgggccttattcattatactaacttagtcttgttgctaagacaccaaacttagaacaagttatagaattgggcactagaagaaacttctaattttatgattatcataagatatcaactgaagcgaactattacggctatcaattgagagatatcaatt

SEQ ID NO: 75218 - DNA, 417 bp, Zea mays
  unsure (1)..(417): unsure at all n locations
agcttgtgaagattcttcattccaacatgtggtagtcggggatgccaaagccatcccatgttagtcttagcaattaggcaagtgtcgagttcagctctatcaaaatctactaagtatagctgaccctctaacactcccttaaatgctattgaatcatcacttcttctaaagacaataacacctacatccgtaaaaagacagttgtagcccattttacacaattgtgaaactgaaagcaagttataatctaaagaatctacaagaaaaacatttgaaatggaatggtcaggtgatatagcaattttacccaatcctttgaccaaaccttgatttccatccccgaatgtgataactcgttggggatcttgggttttctcataagaagagaacnatcgtttctcccctgtcatgtgggtt

SEQ ID NO: 75219 - DNA, 450 bp, Zea mays
  unsure (1)..(450): unsure at all n locations
agctngagttattntattacagaccagagctaatagtgagtgcagagtagtaatattatacaaaccaagggaggcacagactcctcccgataagttcttaagcaaagatcctaagtggaggaccgagtcctcccgcacttcagtcttgtttttcttcttttggaaccaccttagcacagaagcagcaaaagtctgctacttcctcacctaaaaacaacgaagggataaaccctgagtatggaattactcagcaagtcttacccgactaaagaaaagactctcaagggtatgctggttatatgggagtcaagggaaggcttttcaataatcaaaagactctgttttgcagaaatgcttactaaagtggatccttaaaaatccaattntacttgtcaagttaagtaaaaatacctgcactagagntctttctaccctagttcaatcactggt

SEQ ID NO: 75220 - DNA, 328 bp, Zea mays
agtcgaggatcagccccagcggaatagtgtaatcactctcgtcggagttcgtgaacccgttggagcacgtggaccgggtaaccctctgtcggcgtttcgaccccggggggtccctggaccgacgagtaaattgtcgccgcgtgccccaacccaaatgggtcggcgcgagatggagcgtgaaggggggaaatggagccggagggagacaggcatgaaaggggaaaccgcggccttcgtgtttgtcccgcgcccaggtcgggtgcgcttgcagtaaggggttacaagcgtccgcgtgggagagagcgagaggcttatgcacgccgtcctg

SEQ ID NO: 75221 - DNA, 404 bp, Zea mays
  unsure (1)..(404): unsure at all n locations
agcttgngaagattcttcatcccaacatgtgctattcggcgatgccagagccagcccatgttagtcttagcaattaagcaagtgtcgagttcagctctatcaaaatctaccaagtatagctgaccctctaacactcccttaaatggtattgaatcatcacttgttctaaagacagtgacacctacatcagtaaagagacagctgtagcccattttgcataattgagatacagaaagcaaattgtagtctaatgaatctacaagaaaaacatttgaaatagaatggtcaggagatatagcaattttaccaagacctttgaccaaaccttgatttccatccccgaatgtgaatagctcgtggggatctcggntttctcgaggaggaaacatcttttctccctgcat

SEQ ID NO: 75222 - DNA, 393 bp, Zea mays
  unsure (1)..(393): unsure at all n locations
tggcagcaaaacagtgcatattctattaatgatgtggtaacttcacacctacccgtctgtttatatagtgctgcaggtaagaaggtgaatcgtcaggatttttacaccatgcaaacagctgcttacacccgctgcgcggtggaccacagaggtcaaatagtaaccctgcaaggtgggaccgctacgcgttcggaaactgaatcgtttctcgacaacgagctcggggaaggtgttttcggaccttcggcttcctgaagcctaagagactttttcacggatcaagctcgttacgaaaaacgatctagcaccgcgaaggggctactgttgggaccatgcttcgtcgccgaaggtcctgcacgaagaaacagctnccgctgaactgtctgcacgtga

SEQ ID NO: 75223 - DNA, 432 bp, Zea mays
agcttggagggaaaccttctattaagggtacatctgtcgcctcctcctccttattgtttgggttgttaccattcttgttttctcttggattggcctcaacacacacagagagagagagagataatactagtgagagtaaaataataataagtggcattgatattagtaaggtagtttagtataagaaacctccgactaataaatgctttgttcaagtttaacttatcctagaaaatgatggatagttgctctatgattctaataatattgacccaaataagtagtaggactaaatattgttttgaatgtgcatatgctaagagtaaacaaagcgttgtactttgtccttgccattcattcttataataagggtgttttgagatagaattgatttgattcttttcaagcgagctagctattcatgtgtctcta

SEQ ID NO: 75224 - DNA, 453 bp, Zea mays
  unsure (1)..(453): unsure at all n locations
ngagacagacattagccgctaccgacgacagcatatcgtctgtagtttattctattctaatttcaaggtaaaaacttttcttcaaccttttattgtttttaacaacgaaggagttttctaacgaaggtttcttctgcacagagtatgctattgagtaaagctttgagaatgcaacaggaccttgaagataaaaagcatgaagttataattgagggtttagaaagcaaaataaaagatcaagcagctgctcttgaaaagaaggatttcgagcttcagacaacaaaaggtttattggcagaagcttaagctaaaattgcaaagttgaatacggagcttctctcaaagtcagaaagcttcgaacaggaaaagcagaagtttaatgcaaaatttgaggctgaggtcgagaaaagttcanaatttgcaaaatcattgacagagcttcaaaacaaatgt

SEQ ID NO: 75225 - DNA, 436 bp, Zea mays
agcttcttaagggagagcacattctatgattaacaaatgttcattttgagaaagacaggatttgtagcgcatgtcaagccaaaaagcaagttggtgctcatcatccacacaaaaacatcatgacgaccgacaggccactggagctcctacacatggatctattcggcccgattgcttacataaacatcggcgggagtaagtactgtctagttattgtggatgattattctcgcttcacttgggtgttctttttgcaggaaaaatctcatacccaagaaactttaaagggattcttgagacgggctcaaaacgagttcggcttaaggatcaagaaaataagaagcgacaatgggacggagttcaagaactctcaaattgaaggcttctttgaggaggagggcatcaagcatgagttctcttctccttacaccccaca

SEQ ID NO: 75226 - DNA, 360 bp, Zea mays
atcaaatggatgtgaaaagtgctttcctcaatggactcttcaaggaagagggctatgttgagcaacctcccggctttgaagacagtgagtatcctaaccatgtctataagctctctaaggcgctttatgggctcaagcaagccccaagagcgtggtttgaatgccttagagatttccttattactaatggcttcaaagtcggaaaagccgatcctacactctttaccaaaacacttgaaaatgatttgtttgtatgccaaatttatgttgatgatattatatttgggtctactaacgaatctacatgtgaagagtttagtatgatcatgacacaaaagttcgagatgtctattatggggg

SEQ ID NO: 75227 - DNA, 426 bp, Zea mays
  unsure (1)..(426): unsure at all n locations
agcttcactccaacactatttaatcaaggtcatatatgtgtgagtctataaatgatgtccatgcccctgtgttttctgcatcataaaaccttgctatgttgatagagaagccataagagcttgaaaagaactcatgcaagcaacattttcagagaaccaacatcactagctaactacgttgtaagtttggggcaaatctgaccgatgtcttatcttagttactgctgcaaagggcataataactcaaactaaagagttctaacccacaaaaaacaaggatttagttcaaagctacgacaacagatctgaacaaacccataccatttgcttccacggccatagaattcatcagtgctgatactaaatctttcttggtacctttcacagaaatacccctccttcttcaagaatttagtgcacanagag

SEQ ID NO: 75228 - DNA, 422 bp, Zea mays
  unsure (1)..(422): unsure at all n locations
tgtncaagcatatttggtacccatcgctagatgggtccatcacggnaagtcaacaaagatctaggaacccaatagtcctttgtgttagcactaggtaaactcattacctttctagcacaagttgcaattttgggttgcctagttacatgagaattaattgacaagctaggagtgaaattgttaccaatgggacaatccttgcattgatgtcccttctttcggcatgtgtagcataggcgtttttcaagttttgaagatatcttctttccttgtttgttgcttgctacatggttagtaaaaacttccttttctaaccctatgcctttttgttttaaatggggacaagatctaagcaagtgtcccttcttggagcatttaaaacaaagtctatcatctttggtaataatcaagccatttttaat

SEQ ID NO: 75229 - DNA, 417 bp, Zea mays
  unsure (1)..(417): unsure at all n locations
agcttcggtgtctatatttatttcttctgtctaagcccctggcgtccagtcagcgatgaagtctgctaacgcctgggactgaattgaagatctatgcacatagtcaatagcgaattcgttaagctccgtagcccattttccaatccttccagtagcttctttgttcctcattatgtccttcagaggttgtgacgaaggaacaattatgtgatatgcttgaaaataatgtcgaagctttctggatgccattaacatagcatacaacaccttctctaattctatantaattttctttgacaaacttaaaacttcagagacgaagtatactggagcttgctttttgacttggccatctagcttctcctgtacaagcgctgcactcactacagagtgcgaactaccacatgtaagacaatg

SEQ ID NO: 75230 - DNA, 421 bp, Zea mays
  unsure (1)..(421): unsure at all n locations
actaagcttggaaggttcttcatccncacatgtgctaagcggcgatgccacagccagcccatgctagtcttagctattaagcatgcatctagaccagcctcttcttttgcaaaatcaactaaataaagtttgccgtctaatacacccttaaaagctagtgaaccatcacttcttctaaagacagacacatctatatttgtaaatagacagttataccccatatgacataattgactaacggatagcaaattatatccaagactctctactaaaaatacattagagatagaatgctcattagaaatcgcaattttacctaacccttttaccttgccttgattcccatcaccgaatataattgaatcttgggaatccttattcttgacgtaggaggtgaacatcttcttcttccccgtcatat

SEQ ID NO: 75231 - DNA, 370 bp, Zea mays
agcttgcacacatagaccaattttatacctttgatcttatctcttgtatatgctacgacttatgtggtgtgcagtctatttctaaccaagtcataggtatatcgaaagggaattggagtcttcagaaaagaaaaaggcttccacttcgttactcatacttcgccaccacttcgaacaactctctcttgtttgggggagaaatgaacatcaaagaaaaagacttcattcttgggggagagaagtaaagctccaacaccttaggagcgggcctccgctgtgggctaatcttaactcatttacttatgaccacagcggaagaaattacttcaatggctttaatgactcccgtttttgccaatcatgcccaaaa

SEQ ID NO: 75232 - DNA, 347 bp, Zea mays
  unsure (1)..(347): unsure at all n locations
tcacctccatctatgntatggattgctttcgagtctgttcaatttccttcggcccttctggcagcttcctgacttccatgaatagcaatgggcccttggtccgaaggtatcttcatgcaaagataagctgggtgaagaattgcttcgaaggcattgagagtaccacgaccaatgattgcattgtaagggtattccatatcaacaatatcaaatacaacttgttcagtccttgtgttgttaatgaattcgaaggttattggcattgtgatttttccaagtgctacgatctgccttccaccgaagccacaaaggggatgtgtggcatcatgaattttgtcttcgggctc

SEQ ID NO: 75233 - DNA, 372 bp, Zea mays
  unsure (1)..(372): unsure at all n locations
agcttctaaagggagagcacattttatgattaacaaatgttcattntgagaaagacaggatttgtagcgcatgccaggcggngaagcaagttggagtccatcatccatacaagaacatcatgacgaccgacaggccgcttgaactactccacatggatctattcggcccgatcgcttacataagcatcggcgggagtaagtattgtcttgtaatagtggatgattattctcgcttcacttgggtattctttttacaggaaaaatctcaaacccaagagaccttaaagggattcttgagacgggctcaaaatgagttcagcttaaggatcaagaaaataagaaagcgacacggaacggaggtcaagaactcac

SEQ ID NO: 75234 - DNA, 434 bp, Zea mays
  unsure (1)..(434): unsure at all n locations
aatgggtgtctacttggtgtatactccttcttctttncttccgccgccttgaatgcgacaggttgagcttccgatgtggtgggttcatcaagctccgtgattttcctcgagccttcgatcatgcactcaaaacttacaaaatgcccgattacttcctcgggggtcattatagtatatctaggattaccacgaattaattgaacttgagtaggggtaaagaaaatgagagatcttataataaccttaaccatttctgggtcgtcccactttacgctcccgaggttgcgcacttggttcaccaagggtttgagccggctgtacatgtgttggggctccttccctttgcgaagacgaaaaccgccgaacttcccctcngatcgtttccgctttgtgaactttgaagctcatctccctgtgcgcggtttgaacacatc

SEQ ID NO: 75235 - DNA, 376 bp, Zea mays
  unsure (1)..(376): unsure at all n locations
agcttctaaagggagatcacattntgggactaacaaatgttcattttgagaaagacagggtttgtagcgcatgtcaggcagggaatcaagttggtgttcatcatccacacaagaacattatgacgactgacaggccactcgagctcctacacatggacctattcggcccgatagcttacataagcatcagcgggagtaagtactgtctagttatcgtggatgactattctcgcttcacttgggtgttatttttgcaggaaaaatctcatacccaagagaccttaaagggattcttgagacgggctcaaaacgagttcggcttaaggatcaagaaaattagaagcgacaacggaacagagttcaagaactctcaaat

SEQ ID NO: 75236 - DNA, 417 bp, Zea mays
tcctccggccgccaccacgtctgcaccgactccgcgctggcaaacgcaggccgctccgaagcgcaccggcaggtcctcgctcccaccctcgccacgaaagcgaggaagagggtggaatgttgcatcctagctgggcagcaacagttcgccttccccggcatggctggaggacgcctcctccgcagagctggaggatggtttccaccaccagaagctggaagaggaggtggccagccgacccgcgcgggaggtagagccccggctcgcctcgctctccgccccagcaaggatgatgaacatccttgaagctgagggcgggaccgagaacgcagcccggtttgcctctccccatccaggggctggtggtcaccgtctcgggtggccaccggcgaggggatgcagcccggccgcgtgatg

SEQ ID NO: 75237 - DNA, 316 bp, Zea mays
  unsure (1)..(316): unsure at all n locations
aatgtgatgaccactttcaagacctctggagctgctgcatatggacctcttcagacccgtcgcctatctgagcataggaggaaataagtatggtctagttattggtgatgacttttcccgcttcacttgggtgttctttttgcacgataaatctgaaacacaagggaccctccaagcgctttctcaggagagcttataatgagtttgagctcaaggcgaaaaaaataggagcgacacgggtccgaattccgaatcttcagtggagagtccttgagaggagggatcaacccattnttcgtttctaccactcacatat

SEQ ID NO: 75238 - DNA, 438 bp, Zea mays
  unsure (1)..(438): unsure at all n locations
agcttctacctnctctgcctcttggagttggtggtctgaaagagctnntgtgtgtccctaatgattgggagttgtgctgatgccattgagtatgattttccctgtcgtctcttgagctgggattatggatcgtcctgacatgcctagggtggagtcttcctctgaagcccttggtcatctcagagtttctttaggcttcttcccttctctgttgaaagtcattgtcggctctgatgtattcatccatcttctgtagaagcttctccaaagtttgtgggggcttcctggtgaaatactgcgctgttggtcctggtcgaagccccttgatcataacttcaataactatctcatttgggcaccgtggtgcctgagctctgagacgcagacaccttcatacatacgcctgtaagtattcctcatggtcctatgtgcattgga

SEQ ID NO: 75239 - DNA, 450 bp, Zea mays
agatcaacctacctgacaagtttgtggctagtgtcatcattgctaaggggcctccttcatggaaggatttcacctaactctcaaacataagaggacatatatatcagttttagatttgattgcatctcttgatgttgaggataaagctcgagtcaaggacggacgatctaagactattgaaagtcaagccaatgcagccatgcagtagatatctcaatctcatggcaatgaaaaggccatgcaagggaaagaaaaccaagcccaaacttaccatttctttcaagaagaagaaaaagaagggtaaaggctgcttcatgtgtggtactactgatcattgggcaaagaagtgtcctcacccaaaggaagaaagcctccaccaaagtagaagactgcgaacatgccaatgctggagcggaaactagtgggtatagtaattcaccctctattttt

SEQ ID NO: 75240 - DNA, 388 bp, Zea mays
agcttgaggctgacatcagtctctaccgatctacagcatatcatcggtagtttattctattctaatttcaaggtaaagacttttctttgactttttattgtttttaacaatgaaggtgttttctaacgaaggttgcttctgcacagagcatgctattgagtaaagctttgaggatgcaacaagatcttgaagataaaaagcatgaagttataattgagggtttagaaagcaaaataaaagttccagcaactgctcttgaaaagaaggatttcaaacttcagacagcagagggtttattggcagaagctgaagctaaaattgcaaagttgaatacggagcttctctcaaagtcagaaagcttcgaacaagaaaaatatgaaattgatac

SEQ ID NO: 75241 - DNA, 462 bp, Zea mays
  unsure (1)..(462): unsure at all n locations
taagcttctgccttatagatattactataaggccatgtctgatttcacggataacttgatagtatatttaggccctgttccaatctcgcgagataaactttaacagcttttttttagctacttttagccatttgtaatctaaacaggagagctaatggtggtaattgaaactaaactttagcacttcaattcatatagctaaaatttagcaggaagctaaagtttatcccgtgagattgaaacggggtcttactggtctcaagtacagatacaatacaacttatctctattttcacacctactggtgttagtagatgtaacagcacttggtagtgcagagttgcagacttcagctccatgtaatgataccaacaggacattgctatgnttgctttatttagctttggattcttaaaggcaagctgtagatcgtgggatgcaacatgtggggtgttgagtgga

SEQ ID NO: 75242 - DNA, 117 bp, Zea mays
  unsure (1)..(117): unsure at all n locations
agctntgtgtggagttgggagaggatttgatctcttttggtgtgctttgcaatgaatgctagctcttgtatagtgggtggaagctgaaaaacttggatgcaatgaatggtggggtgg

SEQ ID NO: 75243 - DNA, 455 bp, Zea mays
  unsure (1)..(455): unsure at all n locations
tctaaagggagagcacattntaggactaaccaatgttcattntgagaaagacagggattgtagcgcatgccaggcaagaaagcaagttggagcccatcatccacacaagaacatcatgacgaccgacaggccgcttgagctactccacatggatctattcggcccgattgcttacataagcatcggcgggagtaagtattgtcttgtaatagttgatgattattctcgcttcacttgggtgttctttttgcaggaaaaatctcaaacccaagaaaccttaaagggattcttgagacgagctcaaaacgagttcggattaaggatcaagaaaattagaagcgacaacgggacggagttcaagaactctcaaatcgaaggcttccttgaggaggagggcatcaagcacgagttctcctctcctacacgccacaacaaaatggtgtagtggagtggaa

SEQ ID NO: 75244 - DNA, 433 bp, Zea mays
  unsure (1)..(433): unsure at all n locations
agcttgacaatgaggaaatggcgctcgtcatcattatcttccgccaaatcctcaaacaaaggagagggaaagattacaagtcccgctccaagaaggtttgctacaagtgtggtaagcccggtcactttatagctaaatgtccattatcaagtgatagtgacaggggcgacgacaagaaaggaagaagaaaggagaagaagaggtactacaagaagaagggcggcgatgcccatgtttgtcgggagtgggattccgacgaaagctctagcgactcctccgacgacgaggacgccgccaacatcgccgtcaccaagggactcctcttccccaacgtcggccacaagtgccttatggcaaaggacggcaaacggaaaanggtaaatctaactcctccactaaatatgagtcttctagtgatgataatgctagtgat

SEQ ID NO: 75245 - DNA, 366 bp, Zea mays
acaggaagatgtattggttttttaacgttgagcgcttaggtgcgcattgaagcttgcattttgcatcccatttgataatatggttggtaatatactcgattgcaaaatatgatagaatctaaactttcattgtttccctcaccacatatttaattgggaatctaaacgttctttgtatccatcaccacatttattattgggcagggtccaccaagtcacataatgtcttgaccattttctcacatgcttgtcaacctgataaaacttattatgtttaaaattatatggatgtgagcttaaaatatttgtatgtttcaccatgcgtcatgccaccggtacacctcagtatgcattttatgttctgct

SEQ ID NO: 75246 - DNA, 437 bp, Zea mays
agcttcgtcatctgaaagtcagttaccttttagaaaagatataatctcagtcctccaatcttcactatgaacaggagatatattaagcactgctctttcaagaaggtccaccgaaggtgctcttattatctcaaagaatacttccgaaggttgtggcagcccctgtgccgctgacttgcctagcagatcggcgtgctcattttctcctcgtggaatactcttgacagaaaacccttcgaaagaagcctcaagcctttgaactgtatccaggtatttctcaagcttcgggtctcttgccctacaactcttgtcaacatgaccagaaataacttgggaatcggtttaaggaccgcccttcttatccccattgcctttaacttccgaagccccaaaaagaaagcttcgtattcagcaatattatttgtgcagctgaaatc

SEQ ID NO: 75247 - DNA, 437 bp, Zea mays
  unsure (1)..(437): unsure at all n locations
tgccttttgcttctagagaggtgtctctatattctcttcgctagcttaagaaaaaagacgaaaccgacaacttgacctgagtcgcgcgttggagtggcttancatcgttcatctccattttcacaggtggatagatgtcactactttacaaccattggagtggacaatagactatnttttgttattcaatctttaccctcggcgagatggcaatgtcacaatctagcttgactgatttcattgcagctagtgcatccttcctccactagtattgttttgtcaatgtttcctagctactntccctatagattgattaattcttctcttccagctatgtgctcttcattcctgccctttcagagtggtttcacgtctgtcaaatgccaagtttccatatgccatggcnaaaatgaacttagcagaacatattccttgtc

SEQ ID NO: 75248 - DNA, 370 bp, Zea mays
  unsure (1)..(370): unsure at all n locations
agcttgagacaggaacaaccgtggcatgcactaaatcccttgaagaaaatgtcaaggacttgaggattgccaagaggaggaagcaaaagaagaaaatcaatacctcttccaaaagcctcaaccatgcctccataaaaggtaacatccaaggtaataatcaagtcacacttcatacaaatagaaataagaagtgtagtgaatgctttgaaaagggacacttgattagatcatgtccctatattaaaaatggcttgattattaacaaggatgataaactttgttttaaatgctcaaagaagggacactntattaaatcttgtccccatttgaaacaaaaaggcatagggatagaaaagaaaatatntactaa

SEQ ID NO: 75249 - DNA, 451 bp, Zea mays
  unsure (1)..(451): unsure at all n locations
cgcttaaactaagacttgtaggtttgacccgagttaagctttttcactcgctntgntggcgggtatctcaactaggttagacaagtcctagatgcaatacaaggaatttaaatatgcaatgcaagcttgacaacaccatttgacatttcacataaaatntctgagatcaagaatatttagttcattcctcaacatgcaaaagcgggtcttatcaagtggcttagtgaaaatgtctgctaattgatcttccgacctcactccttctaaaatgatatctcctttagcaacatgatctctaaggaagtgatgacggatatcaatgtgcttggtgcgagagtgttgtacaggattattagcaattttaacagcactctcattatcacacaacanaggtaccttttctagaactacgccatagtctagaagaagttgttcatataaaaatctgtgt

SEQ ID NO: 75250 - DNA, 423 bp, Zea mays
  unsure (1)..(423): unsure at all n locations
gcttagagaaatctggtatgaatctgctataatacccagctagtccaagaaaactccggacttggtgaacagttgttgggggtttccactccagaatatctttgaccttgctaggatctaccgcaattcctttagccgataacacgtgccccaaaaattgaatttcttccagccagaacgcgcacttgctgaacttggcaaatagctgatgttccctgaggcgcgtcaatacaatccgtagatgctgagcatggtcttcttcattcttagaatatatcaagatatcatcgatgaagactaccacgaatttgtccaactcgggcatgaacaccgagttcattatgtaggtgaaatgggcanngagcattgtgagcccgaaagacattaccaagtattcaaacaatccataccgcgtagtaaacg

SEQ ID NO: 75251 - DNA, 416 bp, Zea mays
  unsure (1)..(416): unsure at all n locations
tcgcggngccaccaccaccattcacaccatcattctctctatcactggtgaccacctatgccatggccgaccggcggccacacttcttcccccatggcgtgaccgaaacatcgtcatcctccagacccacgttgctctccccgttgatagccatcaactaattaataaggaggaagaagtaggacactgctacaaactaaacgttgcattcacaaattaaatggtaaaaatagtgctccagtaattttgtgaggatctaaagttcaaaaaacttggtgtgctcttgtaatttctaagaataaaaaaagctttagggagaccaaagcacatacctgagataagtaggaagataaaaaagctttctaaacttcacaaattaataagtaggaagaagtacgacacgtctagaattgatc

SEQ ID NO: 75252 - DNA, 422 bp, Zea mays
agcttaggggataattcccgatttgagtataacctttgaactattccacttcttgttaaacgtgcttcgaaaataagaacatgtcaatgatgagaactcttttccccgtcaaaaaaaaaaatggcgagaattttttggtcgccatgcatttaagatgaagacttccatgcgataccatctacaataatgacctgcatggactataggacttcttctgtaagctcaaaacaaccagagagtgtacatggcagattcttgacttcaagagggcatcattatgtatgtgtcaaaaaatcacaaccatggcaacaggtctgaagacacgcattacgcataaatgtattctggagcaaagtaatctcccgaattgctattgatttctgtcacttcaacaatggcagtgtctgtcaaaaaaaagaatg

SEQ ID NO: 75253 - DNA, 429 bp, Zea mays
  unsure (1)..(429): unsure at all n locations
attcggaccttgaatactaccttcgatgaatatgagnggaaaagattaggggacagtatatatacacagagagagagaatggctagtatgctgttgatagctacgaggtctgtgctatcgatgctttaagtcatcggatggtgcaacggacgagcggatgaggcggtgttcagcatgtgtgtggttcctcatccgtatctggacaaagtttatgtcaggctatttaggattgacaccacataaaaataaaagtccaaagcacgatcccctgaaagaaaaaaaagccggacaaacaccgctcaaaatggcagactaaacctagctnttagtttctaggcaccgtatgatctagcctaaaattatttcgtgctgtgctgcttgaaaaggttagcccgatagaactaggcctgattaactttcagctctatg

SEQ ID NO: 75254 - DNA, 425 bp, Zea mays
  unsure (1)..(425): unsure at all n locations
agcttgcacacatagctcatttgtttactcttngatcatatctcttttatatgctatgactaatgtgttttcaagtctatttcaaaccaagtcataggtatattgaaagggaattggagtcttcggcgaagaaaaaggcttccactccgtaactcatacttcgccaccactccgagcaactctctcttctttgggggagaaatgagcatcaaggaaaaggacttcatccttgggggagagagtaaaagctcaaacacaaaaggatcggacttcgtctttggtataatcttaactcatttacttatgaccaaagcggaagaaaatacttcaagggctctaatgattcccgttttggcgattcatgccananagggggagaaatgagcccaagcaaaggaccgcaccacaccaccaattcaaaacta

SEQ ID NO: 75255 - DNA, 417 bp, Zea mays
  unsure (1)..(417): unsure at all n locations
ttaacccctgcgagaccttntcccgtttctttctaaccataatgaatgcgatatcgaatgtcatacttgatgcatactcactttatttgttcccttgtatgatgtactgtttgtttcccaatttgaatggatgaatgtatgtatgcttgcaatcgcataaagaacgatccggtcgaagagcccgaggaactcgcacgagaagcccctgagcagcagtcggttggtggaggcaagtgtcctttgacctatctctgtcctattcattatttaattcacctcccgcattacacatttatacctaaggattgactagcttttgttgcccatgtccttgtttacctatctgggttggattaatattattattaggtagccttatgctattgctcaactctaatcaatgaacatgatgagata

SEQ ID NO: 75256 - DNA, 385 bp, Zea mays
agcttgccagaagtgttttgtatgaacttttaagaggttaaccaccgcaccaatattggtaatgccagacatccacaaaggatttgatgtgtattgcgatgcatcacaccttggacttggatgtgtgctaatgcaagaaggaaaggtgattgcttatgcttcaagacagttgaggaaacatgagaagaattatcctacgcacgatttggaactagctgccgtagtgcatgctttgaagatttggaggaactatatgattggaaacaagtgtaaaatcttcacggatcacaaaagcttgatatatatattcactcagaaggaactcaacctcagacagagaagatggcttgagttgattaaagacctatgattggagatacaatat

SEQ ID NO: 75257 - DNA, 404 bp, Zea mays
  unsure (1)..(404): unsure at all n locations
taaagccatggtgagtagcataggcaagtaatatacgaattgactcgagcctagctacaggtgcataagtttcaccgaaatccaaaccttcgacttgtgaatatcccttggccacaagtcgggctttgttccttgtcaccacaccatgctcatcttacttgttgcggaatacccatttggtacctacaacattttgattaggacgtggaactaaatgacatacctcattcctcgtgaagttgttgagctcctattgcatagccaacacccaatctgaatctcttagtgcatcttctaccctgtatggctcaatagaggagacaaaagagtaatgttcacanaaatgagtgactcgagatcgagtggntacccccttatgaatgtcaccgagaatttgagtcacg

SEQ ID NO: 75258 - DNA, 361 bp, Zea mays
  unsure (1)..(361): unsure at all n locations
agcttccgggagatgttttgtcttttttgatccaanccagngagcctatttcgcgttcgccctctaccctatgggaaggacctgcgcattctcttttatagatacaaggagatgatccagctgtacatatgggggcgtagctatgtgctaacggggcatgcggataaaagcttgagccctatacaagcgtaactggcagatgcggccctaggtcctgctcacgtttctttgccttcgtagagagttcagaacaatcgacgtcttggtcgcatgcagggaaccagtcatacctgtagccagagtcatctagatgggacaccggtcttgttccttcttatcctgcggcaactagctacgggta

SEQ ID NO: 75259 - DNA, 413 bp, Zea mays
  unsure (1)..(413): unsure at all n locations
tctacatcaaagaagagtggaggtacatgttatttaattttaagctcgnacatgctattcttattgtgttgcaacttcaaatgattaattgtccctcatattttttttttgaaatttaggtggtgttcagagagcagcatggaattctgaattatagaagagcctcgttgattcgttgtttgagcacaatgtacatccatatagggctcaaaatggctggagtccagatgcttggaacaaaattgttactgaattcaacaagaagcatcagtatgtcacattccacaagattcaaattcacgagaaggagagggaattgaaaagggattacaagatgttgaaagaggctacaaagcaaagtggtgtttcctggaatgagaaatgatgcatgaatgttgctgatccacccatat

SEQ ID NO: 75260 - DNA, 433 bp, Zea mays
  unsure (1)..(433): unsure at all n locations
agcttgcattgcatatttaaatttctggtattacatctagggcttgtctaacctaantaagataaccgccaacaaagcgagtgaaaaagcttaactcaggctcaaacgtgacaagtcttaattttaagcttttagtacttaaattcttacttactatgcaattgttgattcttgagatatgcatgaggtactgcacttagggggagtattcaaaactcaaaacattcatgaaaacccctaatgcaaggccaaaatgcaaatctcaccatttgcctattttctctaaaaaaattatctagcttatggcaaaatctttttgaaaattatgagaaaatatatgagggtgccaatacctatcccaacagtgtattttgtgtgttataagttggatttgcttgatgaaaacanatataaatttgaaaaaattaaattc

SEQ ID NO: 75261 - DNA, 407 bp, Zea mays
agatatgtatgttcccaagaggaaaagcattatactatgcgagcatgcacaggctatgttcaatctgaaggaccggatgggttactaacatgttctgtgggatgccaaccattatatctgagcgcatctcggatgcagttctgaatccctccggcgctctggttcacagcagtggatcgaaggacgccctccagcgtgtccctccagcttctccagtgcctgtccagcgtttggcgcccaccttgctgggaattggtggcgtgcaccaccgcgctcatctgattctgctcaaggggggagcagggggtaaaatgacaaatctcgtgaaacaagagccatcactgagctatataattcgtcacccaagaagacgagtgacagcattacaggacaccctaacacagaga

SEQ ID NO: 75262 - DNA, 441 bp, Zea mays
  unsure (1)..(441): unsure at all n locations
agcttactaattgaggaaggctctctactttgntcttttcatacacaaccgagtgactngtgttgtctgaatgacaacaacacaacactccatccataaccggccggccgtcttaacaacccgacgttcctgacgacggtgtatgcttttggaaagggatctctttttttttctgagagaaaaccagaaagaaagagattatactagttgtttttttcctcttggctacaacaaactattagtacgtactgattgtaggaacattttggttacgaattgggagtgctgtttattagcgggcggtcagcggcaaaatcatttggccgaactccaatcangagaaacgaaagcccgcggcctccatcgagatcgagcacgattctgaaccttcaacgcactccatggcatggcatgccagcagtctgacctttttttttatct

SEQ ID NO: 75263 - DNA, 349 bp, Zea mays
  unsure (1)..(349): unsure at all n locations
cttcatcccaacatgggctagtcggcgatgcccttccaacccatgttagtcttagcaattaagcaagtgtcgagttcagctctattaaaatcaactaagtatagctgaccctctaacactcccttaaatgctactgaatcatcacttcttctaaagacagtaacacctatatccgtaaaaagacaattgtagaccattttgcataattgagaaacagaaagcaaattgtaatctatagaatctacaattaaaacaatggaaatagaatggtcaggagatatagcaantttaccaagtcctttgaccaaactttgattccatccccgaatgtgaagctctggggatcatg

SEQ ID NO: 75264 - DNA, 439 bp, Zea mays
agcttgaagccatggtaagtagcatatgttcttattatacgatttgactcaagcctagctacgggtgcataggtttcaccaaaatccaaacctttgacttgggagtatcccttggccacaagtcgagctttattccttgtcaccacaccatgctcgtcttgcttgttgcggaagacccatttggttcctacaacattttgattaggacgtggaactaaatgccatacctcattcctcgtgaagttgttgagctcctcttgcatcgccaccacccaatccgagtcttgaagtgcttcctctaccctgtgtggctaaatagaggaaacaaaagagttatgctcacaaaaatgtgcaacccgagatctagtggttacccccttatgaatgtcgccgaggatggtgtcgacggagtgatctcgttggattgcttggtggactc

SEQ ID NO: 75265 - DNA, 343 bp, Zea mays
tggctctcctgccaagactcgaagggaggagagtttatcggcttaagtcagcactagagatctagtgcaagaatacttatcaaatagggtacttccgacctctagtgcttggggaatgaccaagaagaaggatgggggcaaaaagtacaaacttgtccggcttcctaccaatttaagttgagaaagaattaagaagccatgccaataatggtagaaatgattgaaataatgtgcaatgaaatccttggcaactacactaagaagaatgaccagtttatgactgctgccttcggcacccagccaaaacgaaggctgaatcgtgtgatggacgcgtcacattttg

SEQ ID NO: 75266 - DNA, 344 bp, Zea mays
  unsure (1)..(344): unsure at all n locations
agcttgaagctggcctctctgccatgtcttaggatgacctcgcagacagcctcacgtacaacagtctgaaggtatggaagttatggacttaaaaataaattttgtcctttattctcatgctgatcctctatctccttttttgtagggcttaattcttagcaacgctttgagggcgcagaagaatgctgaacatgaaagctgccagatagccctcggcaaccttcggtcagaggtcatcaagctgagaaatgaagccttagaaaaagataaaattcgactttcattggttgatagagtgaaaaaagacgaagcgaaattctatgctcaattngaagctcataaag

SEQ ID NO: 75267 - DNA, 455 bp, Zea mays
  unsure (1)..(455): unsure at all n locations
tctcttactctgctgctnttatcgacgtggcctgtgatgacctatgactcagatttgaggactacccttcttattcccatcgccttaagctttcgaagccccaaaagaagagcttcatactctgtaatgttatttgtgcagctgaactccaatccggctgtgtagtaggttttgatcttggatgatgaaattagaatagtagctgcacctacgtcgaaggtcccccatgacccatcacagaacactgtccaagcttcgttgtctgtttgctttcttcgtcctgagccgctagcgtccaatcagcaatgaagtctgctaacgcttgggattggatcgaagatctaaggacaaaatcaatagtgaactcattcagctctgcaaccacatttccaactctccccgtggctcctctgtttcttataatgtnncttgagaggctgggatgaatatattat

SEQ ID NO: 75268 - DNA, 316 bp, Zea mays
  unsure (1)..(316): unsure at all n locations
gagctcgatgtgcgctgtaaataccatgcttaccggaacatgacaatgagctatgagaggaggcgcggggtgactacaacacttccaaagatggtcatggcaaacatggccgtgctcatanaccgcagccacataaagtcacgcacaacttggcctgtgaccttcccataactacatcaataggcccccacaacaaccgaccgtagcgggtgcccgtacgcggggaccacnaccgctatcgtgagcctagcgtcgcacgcgtgtaaccacaggagcaggcaccatcgcacttctcttacacgtcatcacaccatgg

SEQ ID NO: 75269 - DNA, 416 bp, Zea mays
  unsure (1)..(416): unsure at all n locations
tgggctaccaccatgcaggcggagtgcggaggcgatcttgcatgaacatccatggaagtacaagagggagaccccgctcggacacgcctcggggctgggtcatattttgcactgcccacttgagccggatcatacccggcagcaccctctggggctatgcagaggcttgcacttcccacccgaaccaagtcattcccggcaacatcctctggggcttggtaagtgtcaacaccatccttgggatccaagttctctgcggtagccacctctaaggctgatgggccctcagttactctcatgggaccaggacgatacaagatagtctactgagcctcgagatcgcgctctaaggtcgacgaggcacgggatgaatctaacccancatccagcacatcagcacaaacctgcattacacc

SEQ ID NO: 75270 - DNA, 362 bp, Zea mays
  unsure (1)..(362): unsure at all n locations
agcttaatgcccctcctaaaatattgtcttactttattaagggcaaagctcccatgcctcangataacgaggggtacattttataccatgctggttatctcgagcacaaaattaggagaattcactctaggaagtctcactctggctctaatcatgcttttatgtataagagtgaggcatctagctctaggcaatcaacccatgctaaattgcctaagaagaaaactcctattgcatcaaatgatcataacatttcatttaagacttttgatgcttcctatgtgcttaccaacaaatcaggcaaagtagttgccaaatatgttgggggcaaacacaaggggtcaaagacttgtgtttgggta

SEQ ID NO: 75271 - DNA, 448 bp, Zea mays
  unsure (1)..(448): unsure at all n locations
gagaacacgtgataggattaactaacgtgctattcgaanaagatagaccttgtgcagcatgtcaagcaggtaaacaggtgggaggagcacatcacagcaagaatgtgatgaccacatcaaggcccctggagctgctacatatggacctcttcggacccgtcgcctatctaagcatagggggaagtaagtatggtttagttattgtggatgacttttcccgcttcacttgggtattctttttgcaggataagtctgagacccaaggaaccctcaagcgcttcttaaggagagctcaaaatgagtttgagctcaagataaagaagataaggagcgacaacgggtccgagttcaagaaccttcaagtggaggagttccttgaggaggaanggatcaagcacgagttctccgctccctacacaccacaacaaaatggtgtggtagagaggaa

SEQ ID NO: 75272 - DNA, 377 bp, Zea mays
agctagtcaatctgttaaatcttcctgtatatatagagggaagggaactggatagctttgatctttcaaacaatccatacgtgggccggacaacacaggctgaactactaccatcaaatctgtatctcttgttctaaaaatttgcgagctgaaccgagtatttgcttagcaggttgatgctgattatttggttgacaatttgaagattactaacttctatgatcctgagggcaagaagtaatgatccgcccaggctcaaaggactcgcaaaattatgataacaataatcaaagagtccatcctcaaccaatcgacgagaacatgaatcagaacggggactcaatggacactgtgaacgggaagatattaacaacata

SEQ ID NO: 75273 - DNA, 159 bp, Zea mays
  unsure (1)..(159): unsure at all n locations
tcaacggtcaaaatccaacggcaatggtgacgtgtcttatgcaccggactgtccggtgtgcaccggactgtcctgtgcgccatctaacagaggctgccagcaacggtcacttttggtggtttttnctttgttactccaccattcctcatctttcctatt

SEQ ID NO: 75274 - DNA, 62 bp, Zea mays
catgcctcaaatgcttgccacatatgcgaggaataacacttattcatgcgtaacagccatgc

SEQ ID NO: 75275 - DNA, 465 bp, Zea mays
actaagcttgttatcctataatatggtttgacatttgttgtatggccacgcgggtttgttcgcgggtctggtgcacccgcggggtgtgacgtgggtctattgcgcccgcgggcgcacccgcgggtttataaaacccgcgggtgacgggtacggatgttatacggtacccgacgcgggttgcgggcacgggtacgggtttgctatttgctggcgggtatgggtttataaaaccaatgcccacgggttttgtacccgatgccatccctagtggctccctcgactacggccttctactccgaccatcctcgacgtcagagctcgtggtctataccgacgctgactgtgctggctgtcccgacacgcgccggtccacctccgggtacgccattgttctgggcgccaacctcgtttcttgtgccgcgagcgacacacgtcgctctcgtccactctgatgcgataccgtgt

SEQ ID NO: 75276 - DNA, 476 bp, Zea mays
  unsure (1)..(476): unsure at all n locations
tcctatgaaacaatctatttagactagcatcttacttcctttgataattaaagaagggacaaaaaaatcctgctcatctcatccttaagtttgatgtttgctattagtgttgactcatagttctactatgcaagtaattcacctacattgcactcctttatgcccatttttgggaacactaggatggttattgagaatagtctagaacaaaggacacttcaattttgaatgtatgtgtcaattntgaatctccgtttgcagggaagggtgctcccagcccccgtcgtgcccctcggcccctcccaaccctcgtcgtcgtaacagaggtatattctgccctgaataaaatgatttctgctgtattgtacttacacatgtttntataaggatgtaaggagggccaaaacctcgccccaaatcgacgcatacctaccattgatngcgcattgggtgttcgcttaatcgtcctatttaaa

SEQ ID NO: 75277 - DNA, 492 bp, Zea mays
  unsure (1)..(492): unsure at all n locations
tagaagcactnttgtttcttagtccccccgacatgatctttttctcatgcggttaagcgttagaacgaggattaggctcggataccaattgaaagttgcctagagggggggtgaataggcaagttaaaactctttcaacaaaaactagaagcaaactcggtaaaactgaattgatctcgaaattcacccagttaactntggaaatgagatgttctagttgatccacagggttcanaatagtagatctgagaagggcacttctcanaatccacacaccaaatatatataaacaaatcttccacgcaatggtgagagaacgaagaacacaaacaaacacaatgagcaagaacacatgagacacaagatttatcccgaggttcggtcacaccaccaaggtgccctacttcctcgttgaggcgcccacaaagaagccggtctctttcaacccttaatcctcctttgcaaccacagaggtcaagccacacaataatc

SEQ ID NO: 75278 - DNA, 422 bp, Zea mays
  unsure (1)..(422): unsure at all n locations
ctaagctatatccgaactttgganagcggnggaatgtcaaattccaaactaaataagttactttattgagtgaatttcaattcctctaaaatgaagggatccaaacgtcccgtaaagagaatcagcttgagaaaactatatcacaaggcaaccttgatttttatcatggtcgaagcaatatttttttttcaaaaccgctaaagagaatcagctggagaactacatcacaaggcaaccttgatttttatcatggtcgaaacaaagggtagaaactccctccataaaaaaacagctaatgattagatttaccataatataaataattntaaatttcattattttttctagttttttaagtattagatctctcacaaatatattttcatattttgacctattgatgccacacgtattgatgtaac

SEQ ID NO: 75279 - DNA, 480 bp, Zea mays
ttgacgcccaaaagaatgatgatggtatgaaacatatatgtgagaagataagggctggaaaagccaaatgtttcacagaagatgatcaatgtgttgtatggttcaacaaccgcatagttgtgccgaataatgaagagctccgccaacaaatattagatgaagcacatcttagtcgctattctattcatcccggaagcactaagatgtatcaagatctgaaacaacattattggtggacgaagatgataattgaaatcgcacactatgtggcaaggtgtgacacatgcaaacgtgtcaaggccatacatatgaagactgtcggtccattacaatctttaccaataccaacatggaaatgggaagatattagcatggacttcattgtgggattacccaggactgcacaagggatgattctatctgggtataattgatcggcttacacaaattctcattttctgcagtcaagacagatcaccc

SEQ ID NO: 75280 - DNA, 482 bp, Zea mays
  unsure (1)..(482): unsure at all n locations
aagagtgccttcctcaatggaccaatctacgaggagggctatggtgagcaacctcctggctctgaagatagtgagtatcctaaccatgtctataaactctctaaggcgctttatgggctcaagcaagccccaagagcatggtatgaatgcctaagagattntcttattgctaatggcttcaaagtcggaaaagtcgatcctactctctttactaaaacaattgccaatgatttgtctgtatgccaaatttatgttgatgatatcatatttgggtctactaacaaatctacatgtgaagaagttagtaggatcatggtacaaaaattcgagatgtctatgatgggggagttgaagtatttcttatgattccaagtcaagcaactccaagaaggcaccttcattagccaaacaaagtacattcaagacattctttgcacagttgggatgaaggatgccaagcccatcaagacaaccatgggaac

SEQ ID NO: 75281 - DNA, 450 bp, Zea mays
ttggctgtcttatgcgggtagcaaatataaatttaattcctatatttttcttggtcaaaaagtctaagtgtcatgtgtgtgttgaatcaaaacaaccccgcaagcctcacaaagctgctgatgcgaggagtttggcacctctagaacttgttcattctgatctgtgcgagatgaatggaattttgaccaaaggtggtaaaagatactttctcacttttatagatgactccactcagatttgttatgtgtatctcttagaaacaaaagatgaagcgttcaattattttaaggcctataaagctgaagtagagaaccaacttgagaggaaaataaaacgtttaaggtccgaccgacgtggagaatatttctctaatgtgttcgatgagttctgcgtggaacatggtattattcatgagaggacaccgccattctcaccacaatccaatggga

SEQ ID NO: 75282 - DNA, 448 bp, Zea mays
  unsure (1)..(448): unsure at all n locations
tggatgaggtgtcatcatcatcatcatccgagctatcatccgagtcccattcaactaagtaggctctgccatctttcttcttggtaaagtatttctttntcttcttgacactttcatctttgcccttcttcttcttgcttgggcaattcatggcaatgtgaccgggttccccacactcaaaacactttctatcattgaaagcacttcttctagatgtttgacctcttctaggttgacctctcttcatcttcatgaatatgttgaatttccttacaaatagagccatgtcaccatcactctcactttcattntcttcatcattactctcttccttttcaatagcctttgaggctctaactnttagagcaattgattcgattttcaccttctttgccaaacttaaagcatcggcttgcgacttcttaaatatatcttgagtgagaattct

SEQ ID NO: 75283 - DNA, 458 bp, Zea mays
  unsure (1)..(458): unsure at all n locations
acacttgaatctaagcttattgaagcggcaaaagcacgcgaatntgcgaaagagttatgatatattatgttcgngcatcgattgtgataataagatagcttggagagatacacgagtaatccaatcacatctgctaaatagagggtttaaaaacaattacacgatatggtcagaacatggtgagttggatccgtgtgaagtgcctggtaatgacgagagagttgtcggaaatttagatcttaaagttgatggtgaagtggataatgtggatgctaatcaagattntgaagaatttgattgcgaagagatgttgcgccatatggaaccagaaatgttgagttctgtgggatcgcataaagggctatcttatatggagggactggaaagtgcttcaaaagaacctttatatgatgaatcaaaaggttgtgacaaagagtgtactacactgcgtacagttc

SEQ ID NO: 75284 - DNA, 500 bp, Zea mays
  unsure (1)..(500): unsure at all n locations
cgaagccatggtaagtagcataggccaataatatacgaattgactcaagcctagctacgggtgcataggtttcaccgaaatccaaaccttcgacttgggagtatcccttggccacaagtcgagctttgttccttgtcaccacaccatgctcatcttgcttgttgcggaagacccatttggttcctacaacattttgattaggacgtggaactaaatgccacacctcattcctagtgaagttgttgagctcctcttgcatcgccactacccaatccgaatcttgtagtgcttcctctaccctgtgtggctcaatagaggaaacaaaagagtaatgctcacaaaaatgtgcaacacgagatctagtgtgtacccncttatgaatgtcgccgaggatggtgtcgacggggtgatctcgttggattgcttggtggactcttanngtgtggcggattngctcttcatcctccttgtcttgatcatttgcatctnncccttgatca

SEQ ID NO: 75285 - DNA, 470 bp, Zea mays
  unsure (1)..(470): unsure at all n locations
catttgggactacaaatgttattttataaagaccgatatgagcgcatgcaggcagggaacaagttggtgttcatcatcacaaagaacattatgacgactgacggccactcgagctcctcacatggacctattcggcccgattgcttacataagcatcggcgggagtaagtattggctagntattgtggatgattattctcgcttcacttgggtgttctttttgcaggaaaaatctcatacccaagagaccttaaagggattcttgagacgggctcaaaatgagttcggattaaggatcaagaaaattagaagcgacaacgggatggagttcaagaactctcatatcgaaggcttccttgaggaggagggcagtaagcatgagttctcttcttcctacaccccacaacaaaatggtgtagtggagagaaagaatgaactctatgnacatggaagaaccatcttgatgagta

SEQ ID NO: 75286 - DNA, 391 bp, Zea mays
  unsure (1)..(391): unsure at all n locations
tcctaaatgtacagcatggagtttatggtttggctntgtatctcaggttaatgtgaaaatcccataagcactttcggtatacttgatttcccttctgtgctgtccttttcagtttaggttcttggtttctactaaaaagatggctgttgtcatcaaatgacctgttttcgtttttgaaaatggtnaaattaagtgttcttcatctcatgacatcttcattatcagcatatagagagggtacacaacgacctggctcgagacttacatacaatagcgattgtacaaacaacatttaacttaatacataaaaattcaggtgtcgcaataaacacatgcatattcttcatggnttagatatatggtttctactggttactntatatacccacca

SEQ ID NO: 75287 - DNA, 406 bp, Zea mays
  unsure (1)..(406): unsure at all n locations
gctggngccaatggagaagcagagatccttgaagtcttggctgtcaaattgcttgttattgtcaactgngagttcggacggtactccgaagcgacaaacaatgttttgccagaagaatttctgggcagtcttcgatgttattatggatacagccctcgcctcaatccatttggtaaagtattcgacagcgaacaaggtgaacttgaggttcccctgagctgtgggtaggggcccgacgatgtctaagccccagcgctgaagaggccatgtgtgggcgattagcttcgtgaactgtgaagggcttcctgatcatggagaaaatttctggcaagcttcgcaggaccttgtgaccagatttgcggcgcagatcatggtgggccagtataaaccttgcctgattaccttt

SEQ ID NO: 75288 - DNA, 474 bp, Zea mays
  unsure (1)..(474): unsure at all n locations
tgactgtcgattccttgaagctcgganatggatcgcagtctaatcgcaacgcaacgcanagacaaacatgcacaagcaaacaaacatatatatacgtaagggcattacaccatacaagataaaatattataaaagcgaacaatgtgacggaacctcccaagtaattaggcccacctacagttgtccttgtccaacggacttcagacaaccctgtaggtgcccctgaactacttgacaagttcggtatctttccttaccttaccaggaacgtttcacccatcttgcagacattacagaacatcggagataaagaaatgcggaagcagttacataaacttacatttatttcaaaagcaagcttgagttattntattacagaccagactaaaagtgagtgcagagtagtaatattatacaaaccaagggaggcacanaactcctccgataagttataagcaaaagatcctaagtgga

SEQ ID NO: 75289 - DNA, 464 bp, Zea mays
  unsure (1)..(464): unsure at all n locations
tcgacattactntcaagcataccatataattgttccttcatcacagcccttgaaggatattatgagaaatagagaagctactggaaggattggaaagtgggctgcggaactcaacgaattcagcattgattatgtccatagatcctcgattcagtcccaagcgctagcagacttcatcgctgattggacgccaggggctcangaggaagaagcaagtaaagactccgaagcttggacagtattctgcgacggttcctggggaaccttcgaggcaggtgcagctgctgttttagttgcaccttccaaagttagaacatgttatgcagtgaaacttgattntagctgcacaaataatattgctgaatacgaagctnntgctttggggcttcggaagttgaaggcaatggngataagaagggcggttctcanaactgattcccaagttatttctggtcatgttgaca

SEQ ID NO: 75290 - DNA, 478 bp, Zea mays
  unsure (1)..(478): unsure at all n locations
tcctcaatctttattggtgcttattaaatatacttcaatgtttataattggcccaagccatgattctaagattttcatactctnttccccattntcttgaattttgttcatagggctcaattagggtttttgttgggttttcacattttgcctttttgaaaaacccatttgttttgatcatgatgcttttatgtataagcttagtgggttctttatgatcatgctcaacttttggttcacataagatgatgattcttgggttagcacttgagagaaaccttangtgacactggggtgtcacattntgtatctccatacccaaaaccacataaagcaatatcaagtactacccanaaagtttagtggaatcaaggcataaagataatcaaactagggtaacctaaagggtcccatcaaaattaacctatgcagatgattatgattaanaaagaacatgacttggtaaaaagaagtgatc

SEQ ID NO: 75291 - DNA, 462 bp, Zea mays
  unsure (1)..(462): unsure at all n locations
tcgtcaccatacaatatgggaggaggtccatacccgccggacatcgctactctagcggttaagttaaactaggagcaactaggctctgataccaattgaaaggatcacgatgcccaaaaggtggggtgaattgggcttttctaaacattccacaaatattatcaagaaataaatactactagaaaaacaacaaccctaagtcattacttcacatacttgctaagcaattgaaccaagtgaaatgctaaaattaaatgcggaatgtaaatcaaggttaagaagactcctccaattntttgctgatgtatcgaagagtcggcactcttccctagtccttcgtggagcacccgcgcaagggtatcactatggatggcaatgggtanggttcggatcnggtagagtaaatacctgcccgcgatcatacccgcngngattatccatatnncgccatgactataccca

SEQ ID NO: 75292 - DNA, 372 bp, Zea mays
gatgaatctcatattaacataccttttaaccctagatcttatatagaaacatttaggcatcttacaatacgggtctgagtgttactagcaagctgagtatgacgcgcacgcttccacatgagaagccacttttccctcagaacctgactccttgactttcttgagcactgaatatgtcgtgaagtccgggtgtactcactcatatcaccaatggtttaccgtgcaccccacacgcagagtgtaccacccctcgtgttacgagaactataactgtggcatgacatcatatgcactagcattatattatgtatgatacaccgagaatgcattcactacgctaataattcagcaccaatatgtgatgctctgact

SEQ ID NO: 75293 - DNA, 501 bp, Zea mays
  unsure (1)..(501): unsure at all n locations
tgatcaattgaaggagagattgatgtctccaccagtgttggttatgtcccacttacagaaaggatntgatatctattgtgacgcatgtggccaacgattgtgatgtgtgctcatgcaagaaggacatgtgatcgcttacgcgtctcgttagttgcggaaacacgaattgaactaccccactcatgacttataactggcagcagttgtgcatgcacttaagatatggagacattacattatgggaaccaagtgccaagtgtacacggatcataagagtttgaagtatatattcactaagaaggatctcaaccttagacaacgtcgttggttggagcttattaaagattatgatttggagattcattatcacccgggcaaggcgaatatggttgcagatgccttgagtcagaaagagcacgttcattctgccttcgttgtncagctacccgatgaattgtcaaagactttggagactcaatntgggaattgtactcacactga

SEQ ID NO: 75294 - DNA, 382 bp, Zea mays
  unsure (1)..(382): unsure at all n locations
ccaggccatcttaaggcacctgcatgatctagttagcacagtttggtacccacctatggatgggctcctgacattcaactaaaagtgcctttggttcccaaatagtcattgtgctagttctatgtgatctcgttatatatctagcacaactgtatgatttgggtctcctaagcgaataagattgagacacatttacttgcttatgaacctcacctttattacataccttagatagatgaccctgctcaccatacttgtagcagaaacgtcgcttaacctgacatgacgcttgctgttagcattattcttggngagagtcatcttggaagatgcacattctagattcttcatgaccggacatgaagtgatcatgtgggcctta

SEQ ID NO: 75295 - DNA, 386 bp, Zea mays
  unsure (1)..(386): unsure at all n locations
ttaattactctctataattccagaagntatggatttggctattctaaatgtcccaaaattccctattggaactaaaaaccatgaaactatntttattaaatactataggaaattagaagccaataaaaattggtctggtattattagcagttttctataattctctcggaattctctaagtctagaagaaaaagaaaaatgaaaagatgctacaggattatgctgaatctggcccgagtcggcccattcactggtgaaagtgcgcccgcggtagcggttttacacagaagaccctagcattttgaataagcagcaaataacccagagcactatntgtttgtttcactgacgtttgcactaagaccctcgaagttctaattcttcac

SEQ ID NO: 75296 - DNA, 505 bp, Zea mays
  unsure (1)..(505): unsure at all n locations
tctanaggggagaacacatttgggactaacaaatgttcattttgagaaagacaagggttgtagcgcatgttaagcacggaagcaagttggtacccgtcatccacacaagaacaccatgacgaccgataggctgcttgagctactccacatagatttattcggccctgtcggagagcaaatctccagccgggtggcggagtgcacccaccctaaatcctaatatgaggaggggcctangtgttttgcttgttggttggaaaacaggaagaacacacaaagatttagagtggttcgggccgccggagcgtaacaccctactccactgtgtgatgtattgcttgagagcttgtatggacttgtgagtgtctgaggttgcgtctgaaagatagagcctgtgtgtaacgtcgcatgcctncccttntatagctgaaggggggcatgcacaanagtactgggccccgacatgtgggcccagggacataaagaatatagcgctgggagctac

SEQ ID NO: 75297 - DNA, 292 bp, Zea mays
  unsure (1)..(292): unsure at all n locations
tgtgatggnngttctttctccctccctccttcgttcttcgttctactccgngcctncatatgtagggatgaaaacggtcggaaatgatatcgtctatacgaaaacgattgccgatcggtcaaaaatttacctgatttcataattaatctacttgttggcgactacaataagatggtgatagatatttaaaattcaaaatttcaaaacggtaattttcggaaacgatacggttacgaggccccggttatggattctcggaaatggttttcatccctatgagagcccccccccc

SEQ ID NO: 75298 - DNA, 431 bp, Zea mays
  unsure (1)..(431): unsure at all n locations
gaagtaagaatatcacgatttgaagataaagattgtccgatcagatcgtggcggggagtactatgggtgccataccgagtatggccaggtcccaagacctttcgcgaggttcctaagagaaaatggtattgttgctcagtattcaacacctggcaaaccacaacagaatggggttgccgaaaggtgtaacagaacgctaatggatatgataaggagtatgctaagttactctaacctgccattgggtctatggatggaggctctaaaaaccgctatgcatatactcaacagagttcctagtaaatcagtggctagaacctcatatgagctgtggactgacagaanacccacactcaactactatcatatatgggggtgtccaacagaagctagaatatttaatcctagacagggaaagctagatgagagaa

SEQ ID NO: 75299 - DNA, 509 bp, Zea mays
  unsure (1)..(509): unsure at all n locations
tgtgaagattcttcattccaacgtgggcaagtcggcgatgccagagccagcccatattagtcttagcaattaagcaagtgtctagtttagcttggttatcattaaaatcaactaagtatagctgaccatctagcactcccttaaatgctactgaatcatcacttcttctaaagaaagtaacacctacatcagtaagttgtagcccattgtaacaccctaaagatcaattntgtgaaaataaggaaaaattccccaaaggttntaaaccaaaacacatttccttaaagatatttataatttggaagttacggctcccaaaatgaatatatttccaaaataataataataattaaatatacttagataaactaaattgcccttggattaggttatatagaagaattattattaaactatctatatgtatataatctacaatataaattatatttccctggaattaataaagtgtggactactctctacatatatgaatggaagcatgtcta

SEQ ID NO: 75300 - DNA, 511 bp, Zea mays
  unsure (1)..(511): unsure at all n locations
actcaagcttctaagggagaacatgtgataggtctaactaatgttcatttctaataagatagaccttgtgcagcttgtcaagcagggaaacaagtgggaggctctcatcacaccaaaaatgtgatgacaacatcaagacccctggagctgctacatatggacctcttcggacccgtcgcctatctgagcataggaggaagtaagtatggtctagttattgttgatgacttttcccgcttcacttgggtgttctttttgcaggataagtctgaaacccaagggaccctcaagcgcttcctaaggagagctcanaatgagtttgagctcaaagtgaaaaagataaggagcgacaatgggtccgagttcaagaaccttcaagtggaggaatttcttgaggaggaggggatcaagcacgaattctncgctccctacacacctcagcanaatggtgtggtagagaggaagaacaggacactcatagatatggcgaggactatgcttggagaattca

SEQ ID NO: 75301 - DNA, 506 bp, Zea mays
  unsure (1)..(506): unsure at all n locations
tccttgcgctcaggcttcggctctggttcatccttcgntcctcttgtcctaagagtccgtgtctgaagagtccatgtccgaaggtgcctgctcatgtattatactccagaagcattgttaaatcacgtttttgaggaccttcggaagccgaaggcccccaacagttgtattaactgagtcagagacgaaggctgtttttgatctcttgcacatnttttacagccttcgcatttttggactaattttgctgcatccgaagctgccttcggccaataaaatccttgacaaaaaacttttcccagcaagggcctagatccgatgtgagatccataaaggcctgcgtgtatttccttcatcaattctataccttcagctctggataaacatttgagcaatggagaacagactccatgtttgtataactccccttctattattacatatggtccggctcttgcctctattctcttgtataagcttcgcatctgaaaggtagtgcctgagaa

SEQ ID NO: 75302 - DNA, 485 bp, Zea mays
  unsure (1)..(485): unsure at all n locations
tatgaagattcttcatcccaacatgggctagtcggcgatgccagagccaacccatgttagtcttagcaattaagcaagtgtcgagttcagctctatcaaaatctaccaagtatagctgaccctctaacactcccttaaatgctattgaatcatcacttcttctaaagacagtgacacctacatcagtgaatagacagttgtagcccatttgacataattgagaaacggaaagcanaatgtaatctaaagaatcaacaagaaaaacattggaaatagaatggtcaggagatatagcaattntaccaagtcctttgaccaaaccttgatttccatccccgaatgtgatagctcgttggggatcttggtttttcacatatgaggagaacatccttttctccccggtcatgtggtttgtgcacccgctgtcgagtatccaacttgagcccncggatgcataaacctacaaaacannattagttcttgac

SEQ ID NO: 75303 - DNA, 504 bp, Zea mays
  unsure (1)..(504): unsure at all n locations
ttagaaatatgtagaaaattacagagaaatcctanaattgtgtaaccaattntcctaggcttattattttccctataatttaataaaaatagtttcatgattnttaggttaaataaggaattttagtgcatttaaaatagcttaaagaaatagttatggatttttagaaaataattggtaatcccaaaaatgcccaaactttttatatgaacttaaaacattatttagaagccttgggtagagtttgaattgatttggaccatgtttgataactagaacccaaaacacccccctgccctttgaactcctttaccgactccggaaaccctaagttcccggagttccgtgaaggagagttatattcaagacttagataataaatctttattatcttcacactctcatgagcattacatggcattcattcttatatatatatatggntatgttagaacgcgaagaagaagtggaagtcaccgaagaaaggacaccaccaccctcgga

SEQ ID NO: 75304 - DNA, 407 bp, Zea mays
  unsure (1)..(407): unsure at all n locations
catcatcgnatgtgacattctatgcatatttactgtattcggtctcttgcatggagtactggttgtttcctgatttgaatggatggatgcatgtatgcttgctatcgcatagagaacgatccggttgaagaacccgacgaactcgcacgagaagcccctgatcaccattccgttggtggaggcaagttgtctttgacctatctctgttctattcattctttaatccacctcccgcgttacacatttatactcaaggattgactagcttttgttatccattacctcgtttacctattcgggttggattattatttgttagctgtatgctattgctcaactataatcaatgaacatgatgagagtatctatgatacgctcgtttccttcttcttattatgatgttatac

SEQ ID NO: 75305 - DNA, 463 bp, Zea mays
tcgccctggagtctgacagatgcacacacaacatcttagaatacgtatctgtcatcctcgggctccgcaaggtaagagccctcggcgtcaccacctgcatagtgcgaacagactccacggtagtcgccggccaagtcgaaaaggactatgcagcaaaggaccccgcacttatgcagtacctcgcggccatccgaagcctcgagaaacaattcaagggattcactgtgcagcatgtggaccgggccaagaatgaagaagctgacgcactggccaatgcggccgccaggggtgaagccctcccctccgacgtgttctatcacgtcatcggcacactagccgtccgcagccccgaagggctccaaataaccaacgacagcgagggccagcgcatgatcaaccttatcatgaccgaagactggcgggcgccaataaccctggacctgcaagggttctatcacccagt

SEQ ID NO: 75306 - DNA, 412 bp, Zea mays
  unsure (1)..(412): unsure at all n locations
tgtggagggtcttcatccccacatgtgctaagcggcgatgccacagccgacccatgcaagtcttagcaattaagcatgcatctagaccggccttctcttttgtgaaatcaactaaataaagattgccgtctagtacacccttaaaagctagtgaaccatcacatcttctaaagacagacacatctacatttgttaatagacaattatatcccatattgcataattgactaacagataacaaattatatccgagagactcaactaaaaacacattagatatagagtgctcggatgaaatagcaattttacctaacccttttaccttgccttgattcccatcacccgaaattattgaatcttgtggatccttgttcttgacgcacgaagagaacatnnctctttcccccgtcat

SEQ ID NO: 75307 - DNA, 470 bp, Zea mays
  unsure (1)..(470): unsure at all n locations
tatagccttaccaagtngaaacatagagcacaagaagagattgtaatcttaggtatcattccatattcctaatacagccatatgaatgcccaaacgaaaactgaggttcattcaaattgatcataataggaacaagaaattcccggtggaaggtcactcgccagaattgagtcgaatggacgaatcttcaggccacaaggggccttgctggtgtttccacgcataggatcagtaatccatgtgataatcaatccagcattgcgaacaacacggatgagatgaggcaacttcactctcatgttctcttcccccatccttgtaattatggtgatccttccaggtttgtttgaagggtccagaatctcaatcagcttcaccaagtcacttgggttcatgttgtcgctcatctacattccacaaaatacatgccaattngacacgtaggatcacaggacacgtatagtgcctcg

SEQ ID NO: 75308 - DNA, 400 bp, Zea mays
tcgggtttatcgtcagccaccgaggaattgaggctaatccggataagattgaagctatcatgaagatggaagctcctcgatcacaaaagaaggttcagcgacttactggatgtatggcagctctgagcagatttatatccaggctgggggaaaaaggtttgccattttacaagctactcaagaaggtggataagtttcaatggacttcagaagcacaagaagctctagatgcactgaaaaaattcttgacaacaccaccagtactgaagccaccccggcgagctacgtcaactcaaccagctgaagatttgctacttgatatctcttgcacgactcacgtggtaagcaccgcgttggtagtcgagcgagtagaagaaggacatgcctatccagtacaaca

SEQ ID NO: 75309 - DNA, 465 bp, Zea mays
  unsure (1)..(465): unsure at all n locations
tagatattagtttgctattcccagctcagtggatactgcataccttaattcctttgtagccaagcctttcgccaagccctccggctacaagaacaaatgcagcattgcaggcttcttttatcccagctgtttccagtgaaacaaaattgtcattgccaaaagtcaaaacctcccctgaaggcacctgtaagtaaggtatggcgaagtttattagttgtgtcatcaagaagagaggaaaaataaaggaagtagagaattacccanaataacttanagaacatccatttcaaattattaattcaaactattcatagaacaactcccatgagaaggatagatatttaggccaaactaaggagaggctagctnttatctattagttangagaggctagcttcttggttttaagaaactaaaattaattctataactgagcataactagatgttggaccacctcatttat

SEQ ID NO: 75310 - DNA, 360 bp, Zea mays
  unsure (1)..(360): unsure at all n locations
tagagggtttcatattaatacctctttatctttattctctatagatatcttgactaaagatacttccttagtcaagacatctagcatttcattctttattgtgaagcaattcttgaagctctaggtttctttccttttcaaggataagcaagtcttcttgagcatcaagaagtgcttttcttttatctagattctccattacattggtgataacattgtatccattcaagccaaattctttaatcattttatttttcatggccatttggtcatcatcatcatcatttggaaaatcattactaaataagggtaccttatctncttttgccatgaggcaagttggagtgtaggagtcatctt

SEQ ID NO: 75311 - DNA, 471 bp, Zea mays
  unsure (1)..(471): unsure at all n locations
tattattcaattcatggacttgattgaagagacgagggatctaaccatccaatagtgcaaccttagagatattctcacacaccaacttcaaaacatgctagaacaacagaaggtatattggaaacaaaggtgtaaaatgaaatggtcccaaagtggagatgctagtacacatttttttcataccactgcctctatgagacanaatcataacttcattgctacaatacaagatgacacatgacatatgatatcttatcatgaggccaaagccaatgtattgtttgaggcttacagaagtatacttggcacttcgggggattctgaaatggtttttgaccatgatacgatattacaaaatacacaagattttgagtatttggagtcaccattcatggaagacgaaattaactcagtaattacaaagcctcctaatggcaaaacaccaggtctggatggcttcaatacatattt

SEQ ID NO: 75312 - DNA, 468 bp, Zea mays
  unsure (1)..(468): unsure at all n locations
ggtagaanaagaaaaagaaaaggaatgaatagtaacgggctctaaccattccgagccggcccattaacagagaaacgcgcccgcgatgtctattttgcgcagaggaccttggtcattcaaataaccggtaaagaaccctgcgcactatttatctgtgtctctaacatttgctcagaggcccttcccttttcttttattttcttcgcacaatcaggtccccgaccacggacggcggagcagttgcttcggcgaacttgtaccggccagaatacgcaaaggctaggcttcttacttggtcgacaccgaattctacctcgggcgaacctaatccctctaccaattgcaaagttctagctcanaatcactctgtccacggtgatggcgcanaccgaggacaacccgaggtgttcccggtgatctaacgtggtctagttcaattggctaggccggtaagcatccatagcacac

SEQ ID NO: 75313 - DNA, 499 bp, Zea mays
  unsure (1)..(499): unsure at all n locations
aaagagcacaatctctacttatgaatttcatgaaatagcttaaaagagattgcattagtaacacaagcaatagtttcctatctagcaacctctagtatatgaatgacaagaaggttactaaaataaggaaacctcatgatatgaactaaattacccttacaagcatcatgcataacatcaattgaaaaagatgaaagtagcatgattatttaatcaagtttatagggcaactctaattcataacatggtgagtgattaatggagaagactcaaaaccaatntaaacaagaatgaatacatcacatagtattggttcgatcttcttcgaatgttgaatggcacactccatttgggaacacattctcatgttgtgagactacatanacacttagatagaaacattagtctcacaactctagtcatatagagaattccncattnggtaagtgctataagaaattgaatttcttacttagcactctattcatttaagaacatg

SEQ ID NO: 75314 - DNA, 427 bp, Zea mays
  unsure (1)..(427): unsure at all n locations
tcactagcagcaacactgcagctntattcagagagcgagatttttactgttgtttcctttcttaaagaanaaaaattcttggttagtgtatctgaacttatgtttcctttggaatatttgcttttcagtatgatgtgcccaacttaagtacttttattagcattcgggacatgtttggtgtatgaccctgatgagccttaccaaattttggctcttccgaaccctgtgtgatgcgcagatgttggcaagttctagattttggtttcttgccaatttgccatgccaacttgtcggcaatcacagaagcggtagactcatgtaagtttgccaaaaactgtgaatgtgatatggatccataatcttatcattntttccctggcaaaatatagccaaacttcataattcgagtctagtagggttatcctag

SEQ ID NO: 75315 - DNA, 418 bp, Zea mays
  unsure (1)..(418): unsure at all n locations
ttctcgactaagtcggagacagggcctcatggacgggtgaatgtactcgtaagcggcaaggccgaccgagccgagggactcctacgcctccgggatacggatacctcactcatcaccttccgcgagaagcaactctcgcccgcacaaacatccctgttaccgacggaaagtccagatgctcggaataaggggaaaagagacgcagctttgcaagcgcagcgagggtgtgttttctggcctcagcggccgcagaaggcacacgctacaagacgatctgatcctgcaggctcgggtcttcacgctgaagggggccgtagcaccttcggcatcgacgacgtcttcagcaaggtccgacctagcctcggacggcggcgcggtccagggactnttccgggaatccggcccgagcaggcagctc

SEQ ID NO: 75316 - DNA, 368 bp, Zea mays
tgaagagcgagtcagaaagcaagccccactatactttgtcttctaagtccttaccttatcaaagaaaaagtataccgaactggagaaggtgttgtacgatgttttgatggcctccaggaagcttcggcactactttcaagcatacaacataattgttccttcttcacaaccattgaacgatattatgagaaatagagaagctactggaagggctggaaaatgggctgcggaactcaatgaattttgcattgactatgtgcatagatcttcgatgtcagcccaagcgctagcagacttcattgctgactgaacgccaggggctcatgaagaagaagcgagtaaagatgccgaagtctggatagtattct

SEQ ID NO: 75317 - DNA, 459 bp, Zea mays
  unsure (1)..(459): unsure at all n locations
acttaaaactaagcttttgtnctgctgcaaaagagaaggaactgcgtcctcatctgtcatatcttcctcgcacaccatgaaggcagactattcgtgacatgtataactcatcttacgttgctccggagtatgtcggcttcacaggtatgaaatgggccacctttgttaagcggaccacgaccacccagatggaatcataaccggccagggtacgaggtaggccaactataaaatccatcccaatctcatcccacttacactgaggaatccgcaaaggctgcaacaatccggcgggcctctgatgctctgctttggttctctgacagctatcacagatggcgacatattctgcgatctcccttttcataccataccaccaaaacgctcttttaaatactggacatctttcactcctgngtgatggagaggctgtctatgacttcttgagacagtaccgaa

SEQ ID NO: 75318 - DNA, 426 bp, Zea mays
  unsure (1)..(426): unsure at all n locations
actcagcttgtatcagcatatccttcatcttatgccagatgtgattgtgcctggccgaagagaggagtaccaggtttgagcgacacttttgacggccatgacaaaagactctgccatgactgcagtattgccaccatacgaagatatgattgcctcatagctcatcaagaattgcttcgggtctgtatgaccgtcgtacatggggagctggggtggcttgtaagactggngccatggtgtagcctgcaattctgttgatagaggagaagcatcatcaaaagcaaaatttccatgatggaaatcttcataccagtcgtcctcattgtagaagccttcctgatgaagctctctgcgcggaggccttctgttttggtcatcttgaacaagatgatgaacctcttccgaagcttcatctatttgtctctg

SEQ ID NO: 75319 - DNA, 301 bp, Zea mays
agtctatgataataacgatttgcagctcataacacataataaagcagaatggcattagatagagggacctataatcaatgaacgtgtaatagctgtctcagcttgcttatgatctatgcgggcattaagggatgctttgtcactcttcattattggttatgcgactatctcgcaaccacccttcatgcaaactattgaatataagatatcgcccatcgaagtatcttacgctgacggttccttcgtgtcatctatggagaaaatgacatttgcttggctacacctataacatgatcacatc

SEQ ID NO: 75320 - DNA, 504 bp, Zea mays
  unsure (1)..(504): unsure at all n locations
cttacataaacttacatttatttagaaagtaagatcaagtttcttattacagaccacggctataaacgagtgctgagtagtattattacacataccaagggaggtaaaaactccttccgataactatcaaacaaaaagtcctatatggaggaccacgtcctcccgcatcttcattcttctacttcttcatttgataccaccttggagcaaaagcaacaaaactttgtcgcttcctcacctaaaaacaacgaagggataaaccctgagtatggaattactcagcaagtcttacctgactaaggaaaagactctcaagggtatgctggataaataggagtcaaggagaggctttagcaaaaatcaaattatacttttgcagaaatagcttactaaagtgagtccttactttcaatattntaacgccagaatatatatcaatagactctgtttgatctagctaatttatcatctatcaatgcaacatcttctatcataatgtcacat

SEQ ID NO: 75321 - DNA, 456 bp, Zea mays
  unsure (1)..(456): unsure at all n locations
tcgtcagttctggtgccagcggacttagcttgataggcaattgttcagtcattacctttagaatttcttccacatcggcagcagaatgcgtcgcgggaacttcttcttcatggcccgacgtttttggttccggggccgtagctttccttttctttgaagtaattatcttcggctcaggacttagttntattttctcaaaaatttctttgtcctttntagccagtttagtagtagcttcttcgttaagagcgctggcaactctttttcttttctgcccttcagcaactntgcccagtagcccatagtcaggataatcaaaattcaaagcatccatcacccgattcattcttcgcttcggatgagtaccaaagggccgcggcattaattgatctntctttttagaatagttgccgaggatctcgttgcacataacctcaattgtatccaaccactctt

SEQ ID NO: 75322 - DNA, 477 bp, Zea mays
  unsure (1)..(477): unsure at all n locations
tctaaaggggagaacacatttgngactaaccaatgttcattttgagaaagacagggtttgtagcgcatgtcaagcagggaagcaagttggcggccatcatccacacaagaacatcatgacgaccgacaggccgcttgagctactccacatggatctattcggcccgatcgcttacataagcatcggcgggagtaagtattgtcttgtaattgtggatgattattctcgcttcacttgggtgttctttttgcaggataaatctcaaacccaagagaccttaaagagattcttgagacgggctcaaaatgagttcggctgaatgatcaaaaagattagaagcgacaatgggacggagttcaagaactctcanattgaaggctntcttgaggatgagggcatcaagcatgagttctcttctccctacacaccacaacaaaatggtgtagtagagaggaagaatagaactctacttgacat

SEQ ID NO: 75323 - DNA, 462 bp, Zea mays
  unsure (1)..(462): unsure at all n locations
tgtggaggttcttcatccccacatgtgctaagcggcgatgccacagccagcccatgcaagtcttagccattaagcatgcatctagaccggcctcttcttttgcaaaatcaactaagtaaagcttgccgtctaatacacccttaaaggctagtgaaccatcacttcttctaatgacagacacatctacatttgtaaaaagacaattatatcccatattgcatagttgactaacagatagcaaattgtaaccaagagactcaactaaaaacacattggagattgagtgctcattagaaattgcaattttacctaacccttttaccttgccttgattcccatcaccgaatataattgaatcttgggaatccttagttntgacgtaggaggtgaacatcttcttctcccccgtcatatggtttgtgcatccgctgtcgataatccagcttgaaccccccgatgcat

SEQ ID NO: 75324 - DNA, 439 bp, Zea mays
  unsure (1)..(439): unsure at all n locations
taacgacgacaacacggagccaagcctgacgaccctcgatcgtaagcttatccacatcgatccatcttttcccatctacgtacatcgcgagcaagtttcttaattaatttgcaccgatggatggacggtctccgatccatttcagcatgttcttccatatatatagatcgtcccactactgtataaactgtacgtacgtagcagatggttgtcgtaatggttatggcacatgaggcatgcggctatatgaaacagaagtgttggcgccgatccgggcgccaaacactagaaaggaccgtctggcggtcctctctgtgcaggcgcggacggttcgtgacttatcgcaggagcgactcctcctctgcgtacgtccggacggtccgcgcctgnggctccgatggtccgcgatggcgcagagagtcttcttcttcttcgcagc

SEQ ID NO: 75325 - DNA, 390 bp, Zea mays
gtttaatataggctcaattccgagcaacctttacacttacattatgcaaactaattcaattatgcacttccatatttgctttggtttgtgttggcatcaatcaccaaaaagggggagattgaaacggaattaggcttacatctagtccctaattaattgtggaggatgaattgcccaacacagatctctggactaactagtttgcccaagtgtatagattacacaggtgtaaaatgttcacactctaccgataaaaagaccaagttctggattcaacacaggagcaaagggccaaccgaatgcacctctggtttggcgcaccggactgtcctgtgtgccacctgacagtgtccggtgtgccatcatacatgtccggtgcaccagaagact

SEQ ID NO: 75326 - DNA, 426 bp, Zea mays
agatcgagcgctggcgaccaatatatctatctctttgatgtctacaacattgaacaccctgagcatctgtttgatgaaggcaagtgtcctctgacccattatgacctatctatttataattcactgtcccacactacttaattgaaacctaacgatggactacctctgcatttaccattgccttgattaccttttgggttattatggttagcttcatgctattgctttactataatcaatgaacatgctgtgaatatttatgatacaatgatgttatcctgatgaggatattgtgatactttaaggggttcgggctgaatctcgagtgcctctccgtaaggacctgttcgttgagagaccacctgagataacagtgcaaccatgatgatgacatgggatgcccttagctaattaattagaggaact

SEQ ID NO: 75327 - DNA, 384 bp, Zea mays
actcagcttctcccttttgtcggaatattatggctcaatgttcttttcatctttggaaacctctctaggttaggggggcttcctgcgagaatattggctgtggacctagatgaagcccttgacatggcttcatgacaatctcatttacaccattgggcctgagcttgaatgcaaaccttcaacgttgcctgcaatactctcgggcctgtggcctgaataggctgagagcactggctcgttgaaccctgaactgggatacaatctcactttgcatgatggatgtcggtctaaaaaaatatagttgacacctttgatgcatacaagatatgctgctcaggtacaccttatgaatgtctttagtataaaaacattggtcagtcctat

SEQ ID NO: 75328 - DNA, 411 bp, Zea mays
  unsure (1)..(411): unsure at all n locations
ngccctagatagctattctttctaagagctgtcctgaactcttttgctttttcaacggggttgaaggtgaactacaacaaatcaagtatgtaccccatcaacgtcagtcctgctaaaatggcgatccttgctggaactcttaactgtcagataggttcaatgccctttacctatctgggtgtcccgctgggtctttcaaaacctaaaatatgccactttntaccactcattcagaggattcaaaagcgactttcatgcacttctgccctcctctcccaggctggcaggcttgagcttgttaactcggttttttcagctcttccgactntnttgatgtgtacgctgaanatcccggtgaccacggttaagaaagatngattcctatcggaaacactgtctctggagggggaa

SEQ ID NO: 75329 - DNA, 503 bp, Zea mays
  unsure (1)..(503): unsure at all n locations
tgtcattgagctgggaccaacactacaagaacctgagccatttttggtggccaaaagccacccaaaatagaccatatgtcgccgaaaattagttcttgtcggtggcatatgtctattttcggcgccttctagccacaaaaaatagctgaaaataaacctttattttagcagctccaccttgatcaccgaaaatagctaatttttagcaaccagtgcgtggccgcgaaaaatatgagctaattttggggggcaagcgggtggccgccgaaaataagaattttattntttgtcagctaggagggcggttgccaaaaattattgtgacttattttctgcggcaatccctggccgccgaaattaagtgttttcacggcaaanaatatgaaaaaaaattagttacaccagatntacaatccatatatcaccttaacacanatatatcaccagattgaaatccatgtctcaatcacaaatatgacaacattcatgtctcaataatcaca

SEQ ID NO: 75330 - DNA, 450 bp, Zea mays
  unsure (1)..(450): unsure at all n locations
cgactcaccattgtataattaagtaaaatttctgagatcattttatntagctcattcctcaacatacaaaaatgggttgtctctaaaggctctgtgaaaatatccgctaattgatcttccgatctcactccttctaaaattatatctcctttagcaacatgatctctaaggaagtgatgacatatatcaatgtgcttggtgcgagagtgttgtacaggattattagcaattntaacagcactctcattatcacacaacaaaggtatattttctagaactacaccatagtctagaagagtttgtttcatataaagaatntgtgtgcaacaagcacccgcggcaatgtattccgcttcggcggttgacaaggcaacacttatttgctttttagaggtccatgaaactagtgatctcccaagcaaatggcatccatcggatagtactttccta

SEQ ID NO: 75331 - DNA, 533 bp, Zea mays
  unsure (1)..(533): unsure at all n locations
tatagacactcaagcttcggcgatggttaataaatttggcagcaaaacagtgcaaatattagtatatgctgtggtaacttcacacctactcgtctgtttatatagtgccgcaggtaagaaggcgaagcgccagaagttttacaccaggcggacacccgctcgcactcgctgtacggtggggcgcaaagactgaacagtaattctgcatggtggggccgccacgcgcagggaaattgaatcgtttctcgacaacgagctcaaggaaggtgttttttgagaccttcggcgctccgaagcttaagaaacttttttcacggatcaagctcgttacgaaaaacgatctagcaccgcgaaaggggctactgttgggtccatgcttcgtcgccgaaggtcttatagagagaagcgatcctcggatgaagctgtttgtataagatagccgaaggttcctcttcgtaaagcttctgcattgcaaaccgacttaaagatagaatgaccttttagtccatanatgtctgagtcaatggtgtaag

SEQ ID NO: 75332 - DNA, 508 bp, Zea mays
  unsure (1)..(508): unsure at all n locations
ggttggtgagttgatcattgaggaatatatctctctctctgtttatgtcatctgangattctagtatatgtttcctttctccaggtattgaaaagtcttgctgacgggttgatctcaatcacagtgaagcctcaggatctacaatgtactttcttccggtgtacagcgcgggaacttctcgcttgtgcagttntgagacctgttgtgaacttagcaaatccaaggtaataactcactggacctggttcanataattatttntactgtcatcgtatttaaatgttaaattgacaggtttataaatgaaagaatcgaatcctttgctctttcgcatgccaataagttggagaaaggaactgcagaatccttggatgttgtcacaactgttaagcacagggaaccacatatgcccctctgttgatgaatttcggcactaatagaccactcaagttcaggtgtngagctcgttcaatntcgtcagggtcaatcgaaaactgcatcagatata

SEQ ID NO: 75333 - DNA, 487 bp, Zea mays
  unsure (1)..(487): unsure at all n locations
actaagcttacatctctggactaacttggctgcgtcactctntggcgctggccagtagataccagacctgaagactttcccaaccagaggcctggacgctgcgtgtatcccgcattgcccagcatggacctcatctagcagttgcttcctagtagcggaaagaatgcacttcatgaggactcctgtcgcgccccttctgtatagtgtttcccaatgagagtatagtgagttgactgtcttgcaatgtgctctgctgcattnttgtcatccgactcctcctcattctttatatatctcatgattggttccctccagtcattagaatctgactctggttggctcagaatattgcactcttctgcccgatctaatgaaatgctcgggcgtagtacttcttgaacgaaaactccaggtgggacctgagtccgactggatcctagctttgacaacgcatcagctgccgcgttgcgatctctctccacatgat

SEQ ID NO: 75334 - DNA, 436 bp, Zea mays
  unsure (1)..(436): unsure at all n locations
actaagcttctaagggagaacacgtgatagggttgactaacgtgcatttctaaagtgatagaccttgtgcagcttgtcaagcaggtaaacaagtgggaggagcgcatcacggcaagaacgtgatgaccacttcaagacccctggagctgctgcatatggacctcttcggatgtcgcctatctgagcataggaggaagtaaggatggtttagttattgttgatgattnttcccgcttcacttgggtgttctttntgcaggataagtctgaaacccaagggaccctcaagcgcttcctcaggagagctcanaatgagtttgagctcaaggtgaagaagataaggagcgacaacgggtccgaattcaagaaccttcaagtggaggaatttcttgaggaggaagggatcaagcacgagttctccgctctctacacaccac

SEQ ID NO: 75335 - DNA, 403 bp, Zea mays
  unsure (1)..(403): unsure at all n locations
ctaagcttctcgaagcaagaaaccgagcgcacncttaccggagttggttcttcctctggcgcgcgtggccacgactcaccggtgagccatagttagattactcgcgcccatgtcttccctgacactcagtgaagctcgctgcacggtttaattgtactatacacaccgtggttaggccggaacacttaccagcgacgagctcccgcggctgcgcacgaggaccgactgactctgaccaccgccagcgacgagccgaccatctacgtgaccgtcgtgacctccccgacctccttagacacctcaccaaagctagatcgccaccgataagcctcgccgccctcttttccgctgcggntactgttccagtgaggataggagcgcgagttatatttatgttaacctt

SEQ ID NO: 75336 - DNA, 376 bp, Zea mays
tgacctccgctcatggtaccaccaagtgcggatgtggtccgtcgacatcaccaagacgatgttctgcacccaccatggccactacgagttcttggtcatgcccttcagcctctacaatgcaccggcgatgtttcaggcgcttatgaatgacgtgatgtgcccctacctgaggcggcttgtcctggtattttcttttgatgatatactgatctacagcttggtgtgggcggcgcacctccaccacatcgacatcgtcctcaccgcgctacgggcgcaccgcctacacctgaagcgctcgaagtgctccttctgggcacccttgctggcctacttgggccacatcatctccgcggagggcgtggccatggacggcatc

SEQ ID NO: 75337 - DNA, 501 bp, Zea mays
  unsure (1)..(501): unsure at all n locations
tgttctataatttctttntgttcttgctaggctggtggtgtatctgccttctctggtagagatagagtagagcacttgntgcttgctacgtgcttgctatttgctgcatgttgctgcgtgttgtgtgctgcgtgttgcttcttgctgctgcttgttgcgggttgatgcttgttgcggctacttgttgctgcttgctaggagttatgctatataaaaggtttagttcttgcatagcatttggaatcaacttagagagcaactacatggttaaccaagttactgtagctgtagccactgcagttgtagccctccactcatggtttaccaatttattgtagctntactaattatttngtttgaacacttccaacaggtccgttgtcgttgcgaatatcgtgtcatgatagccatcacttgcatcaatggaggggtacatggtggcccanaaaacttccagtcatttgctagtgtngaagtagttattatctatgttatcacaat

SEQ ID NO: 75338 - DNA, 488 bp, Zea mays
  unsure (1)..(488): unsure at all n locations
attacggacacttaaaactaagcttggaggaacactgnggcctttgctggtggctccctcgattattattttgggtagagnnatgaatggatctaacgtgccttggatagaaccttcctccgaagcccctggtcatttcagaaaacctgaaagcctcctcccttctttggcgaaaatcattatcggcccgaatgtactcgtccatcttttggagcagcttctccaaagtttgaggaggcttcctagcgaagtactgagctgacggtcctggccgaagccccttgatcatggcctcaatgacaatttcattgggcaccgttggtgcctgtgccctcaaacgcaagaaccttcggacgtacgcctgaaggtattcttcgtgatcctgggtgcactggaatagagcttgagcagtgaccggcttcgtctgaaacccttgaaagctagttaacaacaagtccttcagcttcttgcatgaagtaatcgtcctg

SEQ ID NO: 75339 - DNA, 453 bp, Zea mays
  unsure (1)..(453): unsure at all n locations
ttagagacaggtggagatggccatccaagaggtggcacatgattctatgactttcttacttgggagcatcaatagttgtgggaaggcgccttcacctaattccccatgtgagttctcgaggatctggtgtgtcacgttgttattgcactagagggagcacctcttttggagaggtgcatgccggaggttgtgttcgcttatgaatgggcatagcgtattatgaagtgggagctgagttggagacaagacaacaccttctctgtatctaataggagttggagccattcattcgtagttgtaaggtgcgtcggagggtgcccctacgagacactgcatgagatgacacctccaacccacttcatccnncgtgcgggtggatcatggatgtagacaatgcatgtgcctaatcccatntntctctatgggactgcatgtgcgacatttgccacatgt

SEQ ID NO: 75340 - DNA, 348 bp, Zea mays
  unsure (1)..(348): unsure at all n locations
cgcggcgaggagttccacgacttcagtagaacgggcggcggacgtcagtgggtagtggcggggctctggtcgcacgcgcagagcgagagagagggtgagggggttcggctgagggcgcaagtgatcgaggggaggtgggagagcanggcgcggtgctcaaaaggggcacgggcgtggggctcataaggggcgcgggcgcggtgacatggccggagaatgcacggacgtgggcgtgtccatggcggnggatcgtgggcggaggttggggatgactgacaggtgggcttgacgagacatagagagagcgggtgcagagggaaaggaacggcacatatagctcggtcccat

SEQ ID NO: 75341 - DNA, 471 bp, Zea mays
  unsure (1)..(471): unsure at all n locations
actcagctggctgacgacggaccgcgtcctgcctgctgcactttcatactgccgaccattttggccgtaggaccgtcgcgcctggctggcactgctgggtcgtacgcagggttgcctcgagtcgcggtactggttccgcagtcgaggaggcgtggcaatggtgcgagtggcggtgcagntgcttgcacgtagcgaccagcgcaccggttgcatgacgcgtgggcgtgggcttccatgctgggcgctttggaagtcggagaggtgcgcccacttggtgcggttgcatgccgcctgcatggctgcccgccttctcacccactggtctgggcgaaagtggagggacgcttgtaaccgctggacggttgcatgcaccgcgcgcgcgcagttggcttcttttgccctgagccggcttgcatgacgtgtgagacccagcccccgcgccgtagggggaggaccttggagcgtgttgga

SEQ ID NO: 75342 - DNA, 483 bp, Zea mays
  unsure (1)..(483): unsure at all n locations
tatgcgaatggactcaagcctagctacgggtgcatatgtttcaccaaaatccaaaccttcgacttgtgaataccccttggccacgagtcgagctntgttccttgtcaccacaccatgctcatcttgcttggtgcggaagacccacttggttcctacaacattttgattaggacgtggaactaaatgccatacctcgttccttggtgaaatgttgagctcctcttgcattgccatcacccaatccgaatcttggagtgcttcctctaccctgtgtggctcaatagaggaaacaaaagagtaatgctcacaaaaatgtgcaacacgagatctagtggttacccccttatgaatgtcgccgaggatggtgtcgacggggtgatctcgttgtattgcttggtggactctngggtgtggcggccttggttctttatcctncttgtcttcatcattngcatctcccccttgatcattgccgtcatcttg

SEQ ID NO: 75343 - DNA, 489 bp, Zea mays
  unsure (1)..(489): unsure at all n locations
tctgtttctgtcccattagcttatgtggtatttgcccagtctgctntagttattatttntctggaaaagaaacttcttgaaacaagtcagaagacccaatcttttttttcagacagttttgcaatttttacggtaaaaaagtactcgttatcagtttcctcatttatgaagacaatatgataccgnttggttcacgtatttataatgtaatgggtaactaacattaaatcatgtttatttaaatccaaccataattagataccacactacgaattgatactaacttatttaaacttattgccgttggacccgagtgttaatcattgttcgcttcggattaaagccagttgtccggactgctgcaactgcaattcatatagacaaaacaatgtagaaacagtagaaaccggtacgaattatatccaaccggacagacgaatcatttattntacatttcgtgaaccanacaacacctatcanttttttctc

SEQ ID NO: 75344 - DNA, 505 bp, Zea mays
  unsure (1)..(505): unsure at all n locations
tgtagtcacgggtaatggcttgttgtattctaaatgcgtatggttactgtcgcggatgaaaagtattagtgctcatatgatgtctaatntaaaacgcaaatggttgggtgattatcggcgagaatgcgtcgttgattggttgtagtagttttagtgcactaaatgacttgaataaaattggtaagttgacttgttggttctcatttgattaacttaactctaacaaatggtaaagcgttagagtaattcaagtctctcgaacgcggcgattattgaattatataggagctgaaatttattgattgctgttctggactgcacgcgctgttttagttgtgctgtatgtttgatgaactaaatngtgtttcctgtagatatatgctatagaaaagtggtagataaccttattatcttgctggtcgtaaaattngacagccatatgtctgacagtttangagttatgctgttcacaaattcagtaactgaatctgtccatattctggac

SEQ ID NO: 75345 - DNA, 478 bp, Zea mays
  unsure (1)..(478): unsure at all n locations
actcagcttgaccgctccaagcanattgtcaggacgcggccttggtacattcctccagctgggtgcgctaatcgctaaggcgctggtgctcagtctcgagcgcctcccactcccgcaggatcgccgcctcagtctcccagagagcctgatgagcgcgggacagcacccgagggaggggaggtggcgccgtttctagcccggcgccggtctggagccgcccaagaataacctccggctcctccggaactggcggtgggatggaatcgggcgcaccccccgcagcttccaccatcgccgacggcatattcgacgacatcgccgccaccgttgggtctgcagtaaccgttggtgatgctgctgctattggatcccctgctggagcctgtgggcccgacggcactgcctcggcagtggcagttggaacctangggcccgactaccctgccgcggcagcatcagtcataacctgtgggcctga

SEQ ID NO: 75346 - DNA, 388 bp, Zea mays
  unsure (1)..(388): unsure at all n locations
tggtaagatgtggtgccggcaggggagctcggtccgagactattatgatgaggaggcacatcangattgatttatggccacgctgatggtggttgacagtggatctggcagtgaaggatctgctgtaaccgtgcacggaggcggatgcgatgagggcgagtggcgcgtctgattctcgtgttgtgtgcatgcatggatgtgggcggtaatcggtggaacgaggagggaagaagataacgcggagatagagattcaatcttggccttctattatatgtccaagggctgataagatcaagtgatggttgcctttggattactcngttgttgcatagaaagactaaataaaacgttgagggagtgaagtagtgtgtaacgacaccagattg

SEQ ID NO: 75347 - DNA, 444 bp, Zea mays
  unsure (1)..(444): unsure at all n locations
tgtagctcgattgctcgacctagatcgacgagctgatgatgctcatcgtcagtgagctgttaagatcttactacctgatctataacagtaaactcatcaaagtacgcttgtacacagtcagatatatgcatgcatggcgcgtactcccatatacccatcccttccaaattaaaagcccgtttctagcttttctcagtgcaccaatatataagaatcgtttacacgtctcacctatgtacacgtctactaaaaaaacaaattgtgggagtagctagtacgttctggcacttctttctatatatcaacacgatacctagaatacaataatggtatcactgctatgatcagttntactagaagatccactaattatggtggagcatgtgtgtttattctatgtagcttgatttatatgtaagcactggttaattttagccctctctc

SEQ ID NO: 75348 - DNA, 227 bp, Zea mays
ttaaaaagcacctatagataaattcaagcctagctacacccaactattgagctaaattctaataggttaatgaagcaccactatactacttgcagatgtgagcaatattataatctatggctcaaaacactggaattaagaagacaaataagcataggaggatcttagataggaactcaagcccttttaccaatataaattacagtgagaggcgcctaacagacaag

SEQ ID NO: 75349 - DNA, 480 bp, Zea mays
tggtcagcgagaacgctggcctctaaagcgactccctggcctatatgctgggctaccaccatgcaaccggagcgcggagaagatcctgcgtgaacatccatggaagtacaagagggagaccccgctcggacaccctcgggggctaggctatagtttgcgctacccacttgagccggatcatctccggcagtaccctcgggggctgggcagtggcttgcgttatccacccgagccgagtcatccccggcaacatcctcgggggctgggcaagtgtcaacaccatccttgaggaccaagttctctacagtagccgcctctaaggctgagggtccctcaattacttccatgggagcaagacgatccaaatcagtttcccgaccttcaagacgcgctctaaggtcgacgaggcgcgggacgctgccacggatgatcccaactctgcgtcgagcacatcagcacatacctccatcacaccatcat

SEQ ID NO: 75350 - DNA, 406 bp, Zea mays
agaaacagcttcttttatcagccgaagcccatgctattgtgtgaggacatagcagagcacaaggtgctgttgggctcgcaattatctgaagaccacgagaaaaccttgataaggtttttattcaacaacaaagatgtttttgcatggtcagctaatgatctctgtggagtaaatcgggatgttattgaacattcgctcaatgttgacccatccttcagaccccgaaagcagaggcttctgaagatgtcggatgacaaggccgaaggggctcgcaatgaagtaaaaagactcctcagtgcaggagttatcagagaagtaaagtatccagagtggctagctaacactgttatggtgaagaaggccaatggcaagtggagaatgtgtatcgatttcacagatctcaaca

SEQ ID NO: 75351 - DNA, 374 bp, Zea mays
tctggattaagcgccatgacgaaagaagatctttcagtcagtcttgcgtacaacagcctgaaggtatgggaattaaacgctttgaaaacccccttatttgttacgcaactcattcctgttttcttatatgaattctttttcgtatagggcctgatcctaagcaacgcactatgagcccataagagcgccgaagatgaaagctatgaaattgccgttaattatttacgctccgaagttatcaaactgagaaacgaagctctgtgaaaagataaaattctgcttacactggtagataaagtgaataaagacgaagctgcttcagaagcccaggccgaagctcataaatgcgagattaaagatcttcagaaacagct

SEQ ID NO: 75352 - DNA, 480 bp, Zea mays
  unsure (1)..(480): unsure at all n locations
tggctngatcacacgagagcatccncacccttatcacattcttatggttaacaacagcggtcagttcaaggtaacaataacagcaagggtgcatttttctatcggctcttaccatgactgtgctgatttcgatgtggtgactatggatgcttgctctcttttactgngacgtcctttggagttagataccgatgctattcaccatggtagatctaataaatatactgtcatgcataagggaaagagaattgtgttgcttcctatgactcccactataattgtccactgtgaacatgagaaaaagactaatgctaagcaaaaaggtgttttgaactctgaaaatcagcaacctattaagttaaaaactcctactttgctagccactagatctgatcttgatgagttacatgcctctgttggactctgctatcccttagtgtgcaaaaatgtcttctattccattgatgataaggctattac

SEQ ID NO: 75353 - DNA, 508 bp, Zea mays
  unsure (1)..(508): unsure at all n locations
ttggaactacattatatccgaagacgaaggatcgaaccgacttaaagataaactgaccttttagccttcaatggtctgagtcattggtgtaaactnttatgaggggcataattgtaattcttcatgagctgtgtcctgtgcctataaatagtgaacagtattcctttactgttcacgcattcctgtaattgctaacgcatcactcgggaattattgcttgtcaaggcaaaggtataaatgtgcctaatcgttgtgttcaaatatctaaaattcatatagtgatatacgtgaatgatgttatttaatttcgatgtattaatctctaatgtttcatgttttaccttaatttgtattaactctataagtttaattacaaaggtaaaaccttcgtaatattatgcctgtgaccttcgtccgaagctcatttgatccttgtggagataatgcttcgatggacgaaaaggcattgatatttaacatttgtgttgccttgtcttaattcatagca

SEQ ID NO: 75354 - DNA, 509 bp, Zea mays
  unsure (1)..(509): unsure at all n locations
actaagcttgaatatacatctgtcatgttgttctgatggcactcgcttctggtctatctatatagntgactgctcggtgttctgacagttctactatctcactatatgtcgatggctcggctgatgttgatcactgttcttccacaaatgaaccatctgaacgatttgttggcccttcagcaattagggaatatatatgtgattaaattagcaatttagaaactcattngatgcaaggaanagtaagcacttgagatcagaaattttcctcccaagtcaacaagtaccctctgttctacctcacctatcttgataagcaaaggccagaaactgagtaaatagcaacctaattgaccttgccctatagctctcagctaatgcaacttgctatctgtcgaatatgatatatgcacacattatttctgctagatggtgagtcatatgcttctcttnctcggatctgatctattntttctgctacggtcactatcttctgttcggagtggatt

SEQ ID NO: 75355 - DNA, 441 bp, Zea mays
  unsure (1)..(441): unsure at all n locations
actatgaaactcaagcttatacacccttccgcacatactgcttcatcaggatgctttatggactaataaatgctgggtcatccttctcccgcctcacaaagagggtccgcgaaagtcaagtacgccgcaatattntcacctacgtggacgacattgtcgtcgcaagcaaaaacaaagaggatcacctggccgacctcgccgaaacattcgctaatatgcgagacgcatgacttcggctcaaccccgaaaagtgtgtcttcggagtccgctaggggaagatacttggctacctggtgtcgcaccgagggatcgaggccaattcgacaaaaatccaagcgatcatcaacatgacaaccccgcagtcaaccagtgatgtccagcgactgacaggaagatggccgccttgaacaggttcatttncaaatctgcagagcgcagtct

SEQ ID NO: 75356 - DNA, 458 bp, Zea mays
  unsure (1)..(458): unsure at all n locations
ccctatctttgatagttgttctttccccttgagaccaaccaactctccaatattgatgctatgtttcgacacaagaaagaatttgagtcagtgtttatgttagttatactaaaaatgtgctaatcgagcagaaaacttaaacattctagctacattnttaagagtagctatttgttgtgtcaagttcagtgtctaaagtctggttcagtaatgcattatgtaagagtcgatatctaatagaagaatgtcttaactntctttgttcaattctttataatctgtatcactctaatctggctgatttaattctacataaaaattagtggaatggatgccaaacatatataaattgtctactcactctntcaggtacggtggggaattattngcatcgggttggccgatcggatccctgagcttaagagtgcattctgtagacactggtannatcttcagtc

SEQ ID NO: 75357 - DNA, 333 bp, Zea mays
tgattgagagacgaagacgaatgaactcgcccggctgccctatcattgtaagttcaagaatcacttggcagaaccctgccaagaatggttggatgcaggggatgatatgtgctatgagatctcgggcaatcatgcactataagaagagcacataatgactgcagtcttcggcgcccgaccgaatcgataactgaatcgtgtagaggatgctctggattatgcatatgctgactatgagcggatgaacaggggcgcctatcggcaaatcatataaagaattgcgtgagttgtgggctgacaagctgctagaatggtgaatgatgatgaataaat

SEQ ID NO: 75358 - DNA, 459 bp, Zea mays
  unsure (1)..(459): unsure at all n locations
ggaatctggattaagcgccatgacgaaagaagatctcgcagtctgtcttgcgtacaacagcctgaaggttaggaattaaacatttgaaaaacccccttatttttacgcaactcattccttttttcttatatgaattctttttcgtatagggcctgatcctaagcaacgcactaagagcccaaaagagcgccgaagatgaaagctatgaaattgcgtttaataatttacgctccgaagttatcagactgagaaacgaagctttggaaaaagataaaattctgcttacactggtagataaagtgaaaaaagacgaagctgcttcaaaggcccaggccgaagctcaaaaacgcgagattaaagatcttcagaaacagctggctagagctaaagaggagcgcgcgctngaggaaacgaaacgagaacttagtgattntatggtcagcatattggaatcaaagt

SEQ ID NO: 75359 - DNA, 480 bp, Zea mays
ctaccaaaaggacgtgataagagccttcctcaattgaccattctacgaggacgtctatgccgagccaacctctcagctattgaagatagtgagtatactaaccatgtctataaactctctgaggcgctttatgggctcaagcaagccccaagagcatggtatgaaagcctaagagattttcttattgctaatggctctaaagtcagagaaagccgatcctactctctctactaaaagcaatgcaaatgatttggttgtatgccaaatatatgttgatgatatcatttgtgggtctactaacaaatctacatgtgaagagattagtatgataatggtttacataatttgagatgtctatgatcgcggagttgaagtatattctatgatttcaagtcaagcaactcctagagggcacctcatagagcacctagaggtggtgtgaataggtgatactatataacttgaacttaatgccacaaa

SEQ ID NO: 75360 - DNA, 470 bp, Zea mays
  unsure (1)..(470): unsure at all n locations
gctgaagctcacanagccgaagtcaagaacttttaggaaggttggtaaagcaaccgataaatttgaaggtgaagtggtgaagcatgagatatgcgagatcgaaagattaagagcgcaaaagaatgctgatgagcttcgtgctgctaaagaaatatgctagaagtatccttggattgtgctaagagtttaaagaacaactttgctaaggttggagcctattcttctaagcgaagatttatctgtggaccccaatggagttatccagtggatcagcggggatgccgaagcttttaaagaaattcttagtgatcaaggagatatctgtgcctttgctggtgcccggcggcacgtctatcttggagaaggctgttgcaatcatactaagggtgtagcctagcactctgctgctagaggagaagcatcatcatgagcatagatgccatgatganagcatcataccattcatcatc

SEQ ID NO: 75361 - DNA, 318 bp, Zea mays
actcagcttccacttgccttgggaacgatgactgtgttggcttgtctctctaagtgatgaacctcttcgatgaagtcgacgtctatcaacttccggacctcctttcggatgaagtcctgccgctcgatagactgtctgcgatgcttctgattcaccggcttggcgtcatggttgaacttcagatggtgctcaatcacctccctagggatcccaggcatctgtgatgacttccatgcgaagacgacggcattcgcctggaggaaggtgacgagcgcgagttcctatttctcctcttgatcactcgctatgcgagtggct

SEQ ID NO: 75362 - DNA, 431 bp, Zea mays
  unsure (1)..(431): unsure at all n locations
tcagataatcggttctgaacctgttgaggttcagcatacattatcttccaaatgctcatcagtagttgatcaaatggttctactctacactntacagtgagattacctcgatcatcaggattcctgatagatgttccaaagggtgatgttggagtctgtagccactatagttgaagtacattaaggctctagctcggaccttcagcagacaaatggaaggagttgataccaatacaaatgatatgttacagttcagcttgtgcacaaggcaagaataatattntgtttacccccccccaataaaaaaatggtacagacttcgacatagaacaactgaacacgtgtcactagcaccagaaacttcaggtagtagtttttctatctgcgaggatcaaaacacaactagaggtataactggcaatcaaactaac

SEQ ID NO: 75363 - DNA, 169 bp, Zea mays
  unsure (1)..(169): unsure at all n locations
gcttgactctcgaatcagacgaagctccagtattaagcttacttcttacgaaganaagccaccgcagaaggagggtataatctccagtaaatttagagttaattggccagagtgcgttctacccctccggttgagcgtgagggatgcgtaactaaacgatctgatactg

SEQ ID NO: 75364 - DNA, 441 bp, Zea mays
  unsure (1)..(441): unsure at all n locations
agctngaaaaatatttagacacggnccgaatgattgaggcttcctttgaagggttttctgctaaaaatattcctcgtggagaaaataaatatgctgatttattagccaagtcagcagcacaggggctgcccttaccttcggaagtatttttcgagacaataaaagcaccttcggtcgaacttcttgaaagagcagtcctcaacatatcccctgtctatagtgaagactggagaactgagatcatctctttccttcagggtaactttctttcagataacgaagcttataacaggaggatagaggcaagagctcggccatatgttataatagaaggggagttgtacaagcatggagtctgtgctccattactcaagtgtttatccagagccgaaggtatagaattgatgaaggaaatacacgcaggcctgtgtggatctcaca

SEQ ID NO: 75365 - DNA, 330 bp, Zea mays
  unsure (1)..(330): unsure at all n locations
ctatgctcttatgtgaggacataacatagcaaaaagtgttgttaggctcttcattatccgaagagcangagaaaaccttgataagggttttgttcaataacaaggatgtttttgcatggtcagccaatgatctctgcggagttaatagagatgttattgagcactcgctcaatgttgatccatccttcagacccagaaagcaaaggcttcgaaaaatgtcagatgataaggccgaaagagctcgcaacgaagtcaaaagactcctcagtgcaagagttatcagagaagtgaagtacccagaatggctagctaacacttgtatggtaaaaa

SEQ ID NO: 75366 - DNA, 239 bp, Zea mays
  unsure (1)..(239): unsure at all n locations
agcttatgaagattcttcatcccaacatggtctagttggcggtgtcagagccaacccatgttagtcttagcaattaagcaagtgtcgagttcagctctatcaaaatctactaagtatagctaaccctctaacactcccttaaatgctactgaatcatcacttcttctaaatacaagaacacctatatcccgaaaaagatagnttgagcccattttgcataattgagaaacaaaaagaaa

SEQ ID NO: 75367 - DNA, 458 bp, Zea mays
  unsure (1)..(458): unsure at all n locations
tatgaagattcttcatcccaacatgggctantcggcggtgccatagccaacccatgttagtcttagcagtggaggaagtgtctagttcagctctatcaaaatctaccaagtatagctgaccctctagcactcccttaaaagctattgaatcgtcacttcttctaaagacagtgacacctatatcagtaaaaagacaagtgtagcccatttgacataattgggaaacagaaagcaagttgtaatctaatgaatcaacaagaaaaacattggagatggaatggtcacgtgaaatatgcaatttacccaaacctttgaccaaacctttgattccatccncgaatgtgatagctcgtcggagggtcttgttttctcatatgaggagaaacatcctttctccccgtcatgtggttgtgcacccgctgtcgagtatccaacttgagcccccggatgcataaacc

SEQ ID NO: 75368 - DNA, 339 bp, Zea mays
  unsure (1)..(339): unsure at all n locations
agcttatgaagattcttcattccaacatgttctattctgcggtgccagagccaacccaagttagtcttagcaaccaagcaagtgtcgagttcagctctatcaaaatctaccaagtatagctgaccctctaacacttcctttgaatgctatngaatcatcacttcttctaaagacagtaacacctacattaggaaatagacagttatagcccattgacataaatggataccgaaagcaaatggtattctaaagaatctacaaaaaaaccattggaaatagtatggtcaggtgatataccaatttaacccaatccttggaccaaatcttgatttccatccc

SEQ ID NO: 75369 - DNA, 447 bp, Zea mays
  unsure (1)..(447): unsure at all n locations
tgtccatagaaacaagcgaaagggcctctagctgaggtggttatgtggtctgagtagcactcctcgggtgctgaggtcgactccccgtgggagcgaattntcaggctgtggttaaaaaaatcccctcgtctgtcccacgtcaaagcacaggtctaaggctcagccccggtcgtggtcgttctcacatgggcttcgatgccgctgtgtatgggtggggcaagggttctgtggttttcttgacctgtgtgagaaggtcttcttcttaatacaatgcccgggggctgtcttaccccccgcaggtcaagtttttttgtccatagaaacaatatgaatccgatccaaacaggctcaacaaattccatggattgtggaaggcttgatgcactggaaatataggttctaattctatatattacacccatatgccaataaacatgtgccccatat

SEQ ID NO: 75370 - DNA, 99 bp, Zea mays
  unsure (1)..(99): unsure at all n locations
agctngagagcggtcctcatacacacaggtgctatatgtctatgccgctcacatcccacgcatgcccttgtgtgacgacatacaactacaccaggcgct

SEQ ID NO: 75371 - DNA, 408 bp, Zea mays
  unsure (1)..(408): unsure at all n locations
agcttaggaatgaactcaatatcctcgattctcgtaactntgattgaaatcttgcacacattgctcatttatatacctttgatcatgtctctttcatttggtacaaatgaatatttcttatttttcttgtgccaaggcaaagactaatgtacttccaagtgtattactatccttagtcttagattgaaaggaaaatggagtattcgacaaaggcaaggcttccactatgactctgtcagtatcatttatcctttgccctactcatgaactttcattcatatcttttccaaaagggggagagagtaaaaggcctctagttctctttgttnttggcacttaatgccaaagggggagaaaataataggcccanagcaaaaggaccgcaccaccaccctattttctaataac

SEQ ID NO: 75372 - DNA, 437 bp, Zea mays
tatgttgatgatgtggtgatcaaaacagaaaactcagaatacttcattgaagattagcagctggtcttgaacagcctaagtagataccggtggaagttcaatccagaaaaaatgtgtcttcagagtgccagccgaaaagttgctcagattcattgtcagccaccgaggaattgaagccaacccagaaaaaatcgatgctatcatgagaatggaagcatcgcgatcacagtataaagtgcaaaggcttactggatgcatggcagccttgagcaggttcatatcaaggctatgcaaaaaaggcttaccattctacaaattgctcaagaaggttgagaagttccaatggaccgcataagcacacgaagctcttgaaacattgaaaaaattcttaaccacaccaccagtattgaagtcgccacgccgagccacaccgaatc

SEQ ID NO: 75373 - DNA, 433 bp, Zea mays
  unsure (1)..(433): unsure at all n locations
agcttctctttactttgattcatcttgtgtcttatcacgattntctcttttccagaatatgttccaaagattaacattgtatccccttcttgttctagatgcatcatgttgtatgatgctcatgttatgcaaaaatgatgtgatgatgttatgttatgcaaaataatttttatgccgcagatacatatccctgtaataaaacacacactatacatcagcactgacttttcgctgtaagcctcccttaggagcttcttcgccttttactttcagcggaatcagcgtttatttttcgctgtaagcctcccttaggagcttcttcgccttttactttcagcggaatcagcgtttatttttcgctgtaagtttataaaacttacactgcgctcccttatgaacgactttttactgtttcgaacaatttgtactgtgt

SEQ ID NO: 75374 - DNA, 328 bp, Zea mays
tatgacaatgtcattgggcaccgttagtgcctgtgccctcagacgcaaaaaccttcagacatatgcctgaaggacttcgtcgtggtcctgagggcactggaacaaggcttgaacagtgaccgggatggtcttgaatactcgatagctggttaacaacacatccttcagcttctgccatgaagtgatcgatcctggtcaaatggaggaataccaggtttgagcaacacttctgacaaccataacgaaagatttggcatgactgaagcattgccaccatactaagacactgttgcttcgtagactatgacaaactgcttcgggtctgagt

SEQ ID NO: 75375 - DNA, 410 bp, Zea mays
  unsure (1)..(410): unsure at all n locations
agcttatgaagattcttcatcccaacatggtctagtcggcggtgctagagccaacccatgttagtcttagcaattaagcaaatgtcgagttcagctctatcaaaatctactaagtatagctgaccctccaacactctcttaaatgctactgaatcatcacttcttctaaagacgggaacacctatatccgtaaaaagacagttgtagcccattttgcataattgagaaacagaaagcaaattgtaatctaaagagtctacaagaaaaacatttgaaatagaatggtcaggagatataacaaatttacccaatcctttgaccaaacattgatttccatccccgaatgtgatagctctttggggatcttggttnttctcataggaggagaacatcattttctcccctgtcat

SEQ ID NO: 75376 - DNA, 371 bp, Zea mays
actcagcttgtcacttatatctaccttgactttgagactgtgttgatctcatcttgcgtttgaaatattgatcgcgcgtgttgagttccctgccttgttcaatttcttgtgtcccaactgattttgcgtagaagttctctgtccaacttagttcgtccggctgaacctgaccaacgtaactcgcctgacttagcgcgcctgctaaacgattcttccattcgaatctaaaaaattgattccctcgtgctggtgtttgtggccggtctacagtcagcacgtatatacacgcctgctgtctgacggttttcggcaagcaaactataagtcttgcctttcaccgccactcttccctctaaattcttgacctcgat

SEQ ID NO: 75377 - DNA, 415 bp, Zea mays
tcaagctgcaacaatcgagctcgcattgttattctttggcacgttctatatcaaacagggcctgcagataattactaagaagctttattacatatatgtgaattaacttgcaattttctttgattgtatatagctaagaatagtcctaactattcaatggcacctaaaaaattgttcatttatgtggataacataaagaagactcaactgtcacagggtcctacaactggttcttaatctgtattcctggaaacaagctagaccacagaataaatcttcaaaatattctggtgacttttcaagccttccattgaaccaagtaaaacaatattattgtgaccaaatattatttgtttataataaaaacaggatttacttccaaacacaatgagttgttacttgcaaagtcctgaca

SEQ ID NO: 75378 - DNA, 355 bp, Zea mays
gcttcgggtatcccatgttgtccatcatttcatgacaaacatttatctcctcagtgtctggtagacagtagaggaagtcatcctcgtcgctccctccgtaaactaaggatcctcgtgggtatttcagatcccttgcataagttgcacttcgacaacttgctcttcgaatacttgttttcccaaagcatgacgaacaatatattctaaattagcttgggaaggtgcttcaagagtaggaaatgttgacttttccttctctaattctgctggtgtcggtgtttcgagacaggggggtccctaagacgacgagtgagtgtgctgcgtgccccagcccatatgggtctagcgcgtgggc

SEQ ID NO: 75379 - DNA, 435 bp, Zea mays
  unsure (1)..(435): unsure at all n locations
agcttggacccgggacccgcgtcactcggtatagtccaatcgtgctcaccggagttcaagaacccgccggcgcacgtggaccgggtaagcccctgcactgttttccaattcgttgcgcgcatggcctctatatcaccccgtgaagctcctcgtgcaccctaattgaactataccgccgtggtttggccggagcaggagccgccgccgacccccaccgtctgtgctcgtggccagggtagctccgaccaccttcgacgtcgacccgcacaccgacgtgaccgtcgcgacctcccggacgtcactgaccaccccgccggagctctactgccgccggtaagccccaccgccgtaatctatgccgcgggtactgtntaagccggtcagggagcgcgggttatatatcaagttagtccagggggctctgcgcaatgtcag

SEQ ID NO: 75380 - DNA, 400 bp, Zea mays
attgtaatagcgttattcagactctgtttctatttgtagtaatgaatgtcattactagccagcggtgactaataattgtatcacatttgagtcccaaaggatcgggacgcttcagcccactactggtcagaggttctaaggctggcccctcggaaaggttcaacggccgcctcaagccactcaggctccgcgcccactactgatcaggggtttgtaggctggccctcgaagggttcacagccgcctcagacacagagcgagggatgaccctgggtacgttcgatacataaccaaagctcgggctacgctcccgaggtaccctaagacattttcgagaccagcgggaacgatcttgtgactgaatcccatcagaaggaggcatcgagccctctgaccccgt

SEQ ID NO: 75381 - DNA, 417 bp, Zea mays
  unsure (1)..(417): unsure at all n locations
agcatgcaacctcctggctgacttctttattttatagnggagagtgaggaaaggacagttcgttgtaccaactgagtcccaggcatcgcgtacagtatcatgaaatccctccaatttaggccaaaaagcctcaaaatgaaaacgtccactccctaatatattatctcgaagacccataattaatgggcaatgatcagagtcttgggaagcataactctgcagcaacacattatggaaaagaaactcccagtcaactgagcataggactctgtccaatctgaccagaacgggcaccatttgttgatttgacccaagaaaacgccgaccatggagaggaatctcttaaggtctagatcactgataaatcgcctaaacctttccatcatagctctgttgagattggtgtcgctctgtcag

SEQ ID NO: 75382 - DNA, 432 bp, Zea mays
tctaatgttagcatttcacatcgtcagcttgatacggatagccagatcagaagatggaaagaaaaactgaatccttcttggggttgacactaccctaacacaggctataaatacaaccgacattttaatattcatcggcattgcacaagatataaaatgtagatcgaacaatatgcatatattacattccataataggtcctgcagccttcagaaactcctaacacttcacaattcgtccaacaggtgatccaaccacctaaaaatgtataggaaaattgaaattatttttctgaaaaacttgcaaaaaggaaaaaactaagacacaacatgcttgccatacccacctcagctgacctcaatgatacagagccactcaatagctctgaagtacttttcccattaaccacaatcctctgcataggcactaaaa

SEQ ID NO: 75383 - DNA, 248 bp, Zea mays
  unsure (1)..(248): unsure at all n locations
acacccttcacatgctatgcgagtcatcacttcttctaaagacagggacacctacatcaattaaaagacagtatgccccccattcgacataattgggaaacaaaaagcangctgaatgctatggaatcaccattcacagacattggttatataatggacaggagatataacattcagagcttagccatttgaccagaccttgattgccatcccccactgtgatcgctcgcggggatcgttggattttc

SEQ ID NO: 75384 - DNA, 112 bp, Zea mays
tactcccgttgttaatgcacatcaagtttttttttttcatcccaaccggtgggatgcgattcccaccggtaacacatgtagagaatgtggaactattaacgtttacaataca

SEQ ID NO: 75385 - DNA, 203 bp, Zea mays
gaaaatcaactcgagaggagagttagactgttaaagtctgatcgtggccgataatatttttcacgtgattattctgatatttgtgtggaacatggttttattcatgataggacaccgtcatactctccataatccaagggtgttcagcatagagacaaccgtaatccaaatgaattgtgtaatgctttgtagagactttgaga

SEQ ID NO: 75386 - DNA, 307 bp, Zea mays
agcttgtgaagattcttcatcccaacatgggctagtcggcggtgccagagccaacccatgttagtcttagcaattaagcatgtgtcgagttcagctctatcaaagtctactaagtatagctgaccctctaacacacccttaaatgctattgagtcatcacttcttctaaagacagtgacacctacatcagtaaaaagacagttgtagcccatttgacataattgggaaacagaaagcaagttgtaatctaaggaatcaacaagaaaaacattggaaatagaatggtcaggagatatagcaattttac

SEQ ID NO: 75387 - DNA, 416 bp, Zea mays
  unsure (1)..(416): unsure at all n locations
gattgctaagaagatagcagctgctggttatgcagtttatgctatggattatcctgggtttggcatgtcatatggtctccatggctatattgcaagctttgatggaatggtggaccatgtcattgaacagtatgcacgaataagaggttttttttggcttatcttctgtgtataagtgtatattcataattatatagtctttgtatcatggtataataatgacttaatgttcaagcatgaaagaagtgtgtgagctgccacactttctcttggggcagtcaatgggaggtgcagttgccctgaaagtacactttgagcaacaacaagaatgggatggtgtgcttcttgtcgcacctatgtgcaaagtatttctcanactcccaattaccatcagattacgtcatcacacaatcaca

SEQ ID NO: 75388 - DNA, 430 bp, Zea mays
  unsure (1)..(430): unsure at all n locations
agcttcgggaatcccatattgttgccatcttccggttgacggatatttccttattgttgggaagacagtataggaaatcatcttcgtctatgccattgtacaccagggcccccttcaggtatttcagttcccgggcgtagtgtttggcttccatgatttctttttcagatagctnttttcccgaagcatgtcgaataataaagtcagaatctttggacggtgcttcgtgagtaggagatctagctntgttaggcacattttccttctctagagccatggtggtacctggagatttttgctcagctctctcagtagggctcagctttggtttcagcatgagtcgccgcagctttggcaacctttcttgcaggagcaggagttaatgcccttggtgtttccatgatagcgtctagtacgctagccattcttc

SEQ ID NO: 75389 - DNA, 169 bp, Zea mays
gaaaaatatattgcctattctgtggtgaagacaagggccatactaccaggatgtgccatgttaccatccagaagcagaatgaaatagcggaagcagcagtgcaacagagtcagccgaagcaggtcatgcatactgcttcgtatcactcaccttatattccagaatatgt

SEQ ID NO: 75390 - DNA, 282 bp, Zea mays
cgcttctaaagggagagcagcatttacgattaacaaatgttcattatgagaaagacaggatatgtagcggatgccaagcatggaagcaagttggtgcccatcatccacataagaacatcatgacaactgacaggccactggagctcctacacatgggacctatctgcccgattgcttacataaccatcggcgggagtaagtactgtctagttatttgggaatgatattctcgcttcattggggggtctttttgacgaaaaatccatacccagagactctaaa

SEQ ID NO: 75391 - DNA, 352 bp, Zea mays
ctatgaatactaagctcgccagctgacggtgaactgtaccacgaacgactggtgtttgttctagatcatgcataatgtgccagcgcatggtcggggcaagtcgcaaacattggggatcatgccctgcgcctggacgaagaacacgccgatggggctgggcgcgagcttggatgccgagcacatgcactgttcctgggcctggaggaagccacggagctgggagcaacaagacgtgagcgttgccgagccgacgccgaagacctagccgatgcacggtgacaggctgagcggcgccggcgggcaactgggcatggacgggaacgatgctgccgtctgctgggctgaggacagc

SEQ ID NO: 75392 - DNA, 294 bp, Zea mays
  unsure (1)..(294): unsure at all n locations
agcttaagctggtgatgggtggngactccattatattntaatactgtagaatcggtgagacgagcagagggagctgaatgaaagtcaatcagaattttactttcaaacactgaaaatagggctggaaacgagccggtcggcttgatgtggctcggtgcagctgcgaatccagccaagctcggcttgagccagctcgcgagccttacacttaatcacgtttagaaggtaaattatattatttttattatatataagaaaaaaaatttatgtattatatatttttaaactaccata

SEQ ID NO: 75393 - DNA, 446 bp, Zea mays
  unsure (1)..(446): unsure at all n locations
atatcaccgtagactgttgaaaaccaactataaatcttcaatgaaattttccaaattttctgttgtgattaccacatcatccatgtaagcttccacacgcttgccccagtgatcggctaagcatgtttgaatagctctctaataagtcgctccagcgtttttgaggccgaaaggcatggaggtatagcagaaagcactgaatggagtgatgaacgctgttttttcctcatcttctttcgccaggctaatctggtgatacccagagtagcaattcaagaaggacagcaaagaacatccagcggtagaatctaccacctgatctatcctagggagcccgaagggatcctttggacagtgtttgttgagatccgtataatcgacgcacatgcgtcaatccactttattctttntgagtacaagaacagggatggctaaccactcgggat

SEQ ID NO: 75394 - DNA, 267 bp, Zea mays
catgcagcttcgcgcgacgaaacgcatgacggctttctttatttttctgagactaaagaggaacgtgtgcgtgtgtacttgcgcgacgtcacacaatataccacctgtaattaaaatggatctctctgcgatgaaactctccacgcaacacattgatagaatctgatattatattaatttgtatgcgaaaagcgcgcgagaagtacgctaattaaggtgtttgaattatttacaacctaaaaattatcatgtgcgcgtggttgacac

SEQ ID NO: 75395 - DNA, 428 bp, Zea mays
  unsure (1)..(428): unsure at all n locations
tccactacaaatctataagaattcttgggtctcacaagcttgtcattggtcttcaattggtctgcaattgactgtcaattggtatttttgagactacatttggtatcatttacatgtcttctccaatatttgattagactatatttcatatcatatacttccctatacatacataagttgttgaatcatattttgttacctatgcataaggggagttagtctaatcaaatcatgtcttgcacctctatttctcacatgctttttcctaagtagaagatctctgtcagggggagtatttcttcgtcactaaagggagagaaaattctttctaagggaaaacactcgcttaaggggagtaatcctttagtgcttcaattggtataattgacaaatctttaagagggcaagtcttatntatgtcttccttt

SEQ ID NO: 75396 - DNA, 431 bp, Zea mays
agcttgacaatgaggagatggcgctcgttataagagcttctgccacatcctcagacaaaggagggggaaagactacaagtcccgctccaagaaggtttgctataagtgtggtaagcccggtcactctattgctaaatgtccattatcaagtgatagtgacaggggcgatgacaagaaggggagaagaaaggagaagaagagatactacaagaagaagggcggtgatgcccatgtttgtcgggagtgggactccgacgaaagctctagcgactcctccgacgacgaggacgccgccaacatcgccatcaccaagggactcctcttccccaacgtcggccacaagtgccttatggcaaaggacggcaaatagaaggttaaatctaacacctccactaaatatgaatcctctagtgatgacaacgctagtgatg

SEQ ID NO: 75397 - DNA, 367 bp, Zea mays
gcgcaagtatgaaagagaggggtttctcccaacccacttctcataaggggttttctcttctttgcccataggaattctattcagaacatgacatgaagtcaggactgccttcccccaccatgccttagataaaccacaagtgtctaacatggcattcaccaggtcagtcaacgtacgggttttcctttcagcaatcccgtttgactcgggtgaatagggaggagtcctctcatgaataatgccatgttctgcacataaatcatcaaagactttgggaaagaactcgccaccacgatctgatctaagacgtttgatctttctctctagttggttgtcaacctcagccttatagaatttagagtagtct

SEQ ID NO: 75398 - DNA, 454 bp, Zea mays
  unsure (1)..(454): unsure at all n locations
actgacccatgcaagcttacacaagaataagatttanagcacttattttgaattctaagtttatagaatgctccccctaaatatgtgcttacattaaaatcttaactttggccttatatgccaaattgcacatacttaggctaattcgaagcattactacaccttagcacccgtgggatgcattgtgtcaagaattaaactgtgatgcatataacacacaaatgcacaaaataagagttaaacaccaattaaatggatataccataggaatatcaacctaccactattcaccattaagataccaatttaaagcgccagaaccatatgaatatctattgcaggacaaacacaatagataccaattgattcatatcaacggaagcactaattatgcattatcaccatataatacaacaataagcatatgataagtattatcaacaaaactaacaca

SEQ ID NO: 75399 - DNA, 312 bp, Zea mays
  unsure (1)..(312): unsure at all n locations
caacttgtaagtagtgcctgccctatgaactaaaatactgactccacaaaccctagttttctggagtaccgtgaaggaaaatngtattcaagacctaatatgatgtacccttattatcattacattttcctcagcattacatgagcattcatgattatatatggttctatatagaaaacgaagaagaaatagtagttgaagaatgagttgcaccaccaccacctgaagacccacgtgctgggaactgcttttatttcgatatctgtggagcagagcctgattctcctataacacaagacaagccccggtgca

SEQ ID NO: 75400 - DNA, 401 bp, Zea mays
cgcatgcaagctgtttgaaagctggactactatttctcttgagcaactgtgtcgtagaggtgctgaacatatttgaagtctatcttcaccaacttacccccgaagcaatcataaggctgaatatcttcgtgtgggccgtgagaagccaaggtctggaacctgatgcgaaaagtttctgcaacatacacgaattatcatacgagacaaaaccctagggtaaggaacagtatcacaataattttggctgctacagtttcgtttctcggtctgggtcaagttgtcccgtgccaacctttcggaagagatggcccggcgactggatgacagaatggttttatgtgaagaatgacctgacaacacgggaagatattaaaggtataattatgcgcgctatttggcaa

SEQ ID NO: 75401 - DNA, 266 bp, Zea mays
  unsure (1)..(266): unsure at all n locations
cctggtattcgtgctggtgagcatactctctttcaaccaccaaatttgctgtctaaagcatctcgtgtcatagtgaccacacccactcgaactcaccctcaccatggccaacattcgccagaagttgtctcggacatgtggtgccacttccctactcctcgtacgctagtgaagcttacaccatttactacttgaactctaccactgtctgttgctgggaactangtagtaacatcgctcaaagatatgttgtcaagtttctggat

SEQ ID NO: 75402 - DNA, 424 bp, Zea mays
  unsure (1)..(424): unsure at all n locations
agctggcatgacagagacgtgaatgttatattatctgactcatcagaaaaatgagcagaagtgaggaggttattacacacatcatgcagagataagcggaacaagcctgcgcattcatatgctttaccaacaaaaataccatgtgtagacacaacacatttattagactcaagaacaacgtntgtatccatcttgacatagcatagacgcgctaacgagattctttttgatagagggcacatgctgcacgctcttcaatggctccatctttcccgaagtaaacttcagaatgaccgtgccaacaccaagaacatgagcacgcgacccatttcccatcaacacagcgccagaccttccgacctgataggaagtgaacatagaggcattaacacacacatgaatgtttgaccactgtgcatcacca

SEQ ID NO: 75403 - DNA, 373 bp, Zea mays
  unsure (1)..(373): unsure at all n locations
gaccaatntctcatatatagattcttccgcagattctgtttgggttggttgtcaatcttcaagaattccctcttggtaggctctgaaagcccagattcatgttccgcttgactttaggcagcctctgcctcaatttgtgtcgtttggaggtcggcaggtatcttcgaagtaacgcttgaagattgtataagcttcagtacatctagcacgttaaccattctttttctcttgggagttgtagaaggtctttatgtgcccttggcattggagttggcacctcaacttttgctgaaagacttaatatttacgatgtctgtgtttcttcaacccttaattcttatattctcttcatctacggcattatgggcggctc

SEQ ID NO: 75404 - DNA, 438 bp, Zea mays
agcttgtgaagattcttcattccaacatgtgctagtcggcgatgccagagccagcccatgttagtcttagcaattaagcatgtgtcaagttcagctctctcaaaatctactaagtatagctgaccctctaacacacccttaaatgctattgaatcatcacttcttctaaagacagtgacacctacattagtaaatagacagttgtagcccatttgacataattgtgaaacggaaagcaaattgtaatctaaagaatctacaagaaaaacattggaaatagaatggtcaggagatatagcaattttacccaaacctttgaccaaaccttgatttccatccccgaatgtgatcgctctttggggatctttgtttttctcataggaggagaacatccttttctcccctgtcatatggttggtgcacccgctgtcgagtatc

SEQ ID NO: 75405 - DNA, 363 bp, Zea mays
tgtgaaagttcttcatccccacatgtgctaagcggcgatgccacagtcagcccatgctagtcttagctattaagcatgcatctagaccggcctcttcttttgcaaaatcaactaaataaagtttgccgtctaatacacccttaaaagctagtgaaccatcacttcttctaaagacagacacatctacatttgtaaatagacagttatatcccatatgacataattgactaacagatagcaaattgtatccaagactctctactaaaaatacattatagatagaatgctcattagaaattgcaattttacctaacccttttaccttgccttgattcccatcaccgaatataattgaatcttggg

SEQ ID NO: 75406 - DNA, 431 bp, Zea mays
agctttccaaaaagtcttgtatcactctttttggtgatctgaagattaagttatggatgattaaagtgtgaagactgaatctgcccaattttggacagcaaagccttctaatgtattttaccattgatacatattcaatcaacctaagatgtttataaatgatttgtagacaatttcattatctttccagaaagtctaagatcactttgtttggatgtctgaatctttagttgtgaatttttgaagatgcaagtctgaatctgtctgaagctggacagagctgttgtatgtgcacaattcgattctgctaagagtctaatcataatgagatgatcatagcaacgttgtagagcatttcccaagctttccaaaaagtatttgttcactatttttggaataataatcgaagagttatgattaaaacaagtact

SEQ ID NO: 75407 - DNA, 398 bp, Zea mays
gacctttaaactcagcttgggacccgtacctaccagaggattgcccctccatgtgtcgtccaaatatccatgtgtctactgcggaatgcgctcgctaccacctgaagtactaccggaacccgacattagaataaaaccggccttatcttaccaagagtaccctgtccaggggcttaatcagaaggaaagatcaactcgggcaagggcggtcctaatgtataaggttcacgggagtcaccattttgcgaaaaaagctacatgggagactgaggattttctgcgctctcgcttccccgactttctgcccaaaggagtcggtacgtaaccccagaaccccacccccacctgccctttgaattccattataagaaaaacttagataacaaggatagtctaag

SEQ ID NO: 75408 - DNA, 189 bp, Zea mays
  unsure (1)..(189): unsure at all n locations
agctntatagaagatactatgtgagtgcctttgcgttgcaacagagacataatatcatggtatacttatgtacaatctagacagtgttatagtantactctgcaaacaaacgatatatatattaatcttcgaatcttaatatctaataggtttgggcccgggcttggtaccaaaccttaaattttctta

SEQ ID NO: 75409 - DNA, 419 bp, Zea mays
  unsure (1)..(419): unsure at all n locations
gtgacctatagaacactcagcttcatactcggctgcggtgntagaggccgggaatatcaattggagagcgtactttaggtgttcggctgggggtgcantgaanagaattcctgctcctgctccctgcagcttcagcgagccatcaaaatacattcgccatacttctgcggtttctggattatccggcacttgctgttctgtccattctgatacgaagtcgaccagtgcttgagttttgatggcagtgcgaggtcggaactcgatatcatgggatcccaactcgcaagcccacttggctattcggccaatggcttccttgttgtgaagaatgtcccctattggaaaaccagtaactactatgactttgtggtcgtcaaagtagtgacgcaactggcaggcagttagaagtactgcatata

SEQ ID NO: 75410 - DNA, 443 bp, Zea mays
ccgcttcaacagatgcgcgtgaatcgcgagctgttacaactaaccgtgccagccggcctcgcaatccggatgctgctctgatataaagccccgaccattcccttcgctctccgggtcagctagaacttgtgccgcctctgtgcttgactccagtctacgccgtcgtggaggaactcaagccgtcggcgtcgatctgatggtgctcaaccctcctctggcaccgcgggtgttgctgccgcgtctgcgcgcagagagaagcaagtattgtcctgagaactgtcgtgcctcaacaccactctgcgcgctcctgattactcatcggagcaaaactccaccgggaacccacccctacactataagctgaccgcactgcgacatagccactagtaaggcccttcataatacactccttgattctcgccttgcgtagctcggtcgggatc

SEQ ID NO: 75411 - DNA, 69 bp, Zea mays
gaacttcaagtgcaacttggaaatagcaagaacatcaatgcctcatctttaggaatggaatctaagtct

SEQ ID NO: 75412 - DNA, 263 bp, Zea mays
  unsure (1)..(263): unsure at all n locations
agctttngaagagatcctgagcgatcgcggtgatatctgtgctttcactggcgctcgaggtattgcggcaattctggagaaggctggttgcgaccacgttaaagctgcggcccagtctgaagcccgcttcttcactgacaacacgagagacccttccgccgaagctacttttgggggtggaaaagtttactccgatgtttgggtgaacggtggccgaaaattggcccacgaaatcataaagaaaaatgaaaaagaaacccatg

SEQ ID NO: 75413 - DNA, 284 bp, Zea mays
  unsure (1)..(284): unsure at all n locations
agaacacatnttgggactaaccaatgttcattttgagaaagacatgacttgtagcgcatgtcaagcgggaaagcaagttggagcccatcatccacacaagaacatcatgacgaccgacaggccgcttgagctactccacatggatctattcagcccgattgcttacataagcatcggcgggagtaagtattgtcttgtgatagtggatgaatattctcgcttcacttgcgtggttctttttgcaggaaaaatctcaaacccaagagaccttaaagggattcttg

SEQ ID NO: 75414 - DNA, 356 bp, Zea mays
  unsure (1)..(356): unsure at all n locations
agcttaaccncacatacagctagtccactttattcttacggtacatttgctgagtacgttgatgtgtacgcatccttgctttanaacaccaaaaacccaggttgtccccattgcaatcagtgctcaggagaagatgaagacaacgtggaggactttaaggagcttcacaactccgatgagttctatatttgtttagtggcaaacccccagttgctacctgggaaggactaatcgactaatgttccgaattcccccttggatattgatattaactaaggttatggacttattggtgtgctaaaattatggaggtattaaanactcttttccgtttattttgaaccaccgggatgaag

SEQ ID NO: 75415 - DNA, 446 bp, Zea mays
ggtattatgactgtaagcattcgtaaagggcatgaatgttatttctcacatgctacatcctgcgcctataaatagatgagcagtaccccgtactgttcatgcaatcttgtaatcgcttacacgtgacactcggattgttgccttttgtcaagacgaaggtataaatgtgatcaaatgatatgttataatatttaaattggcatgatgaaatatatgaataaatttatgtgttttgatatattattctttcatgatttatattatatatttcatctttcattatttcataactctagtcgcgaaggtatgaccatcgtgactcttgctcatgaccttcgtccgaagttcattatacccttggggagataatgcttcgatggacgaagggcattgacatttaacattttatgttgccttagtcttaattcgaagcatttgagaacaaa

SEQ ID NO: 75416 - DNA, 322 bp, Zea mays
agcttcctgatcctttagctgtacaacctgaagattctaagtggaggtggtttgaagattgccttggagcactagatggtacacacattgatgtttttgtacctttggctgatcaagggaggtataggaataagaagcaacaaataaccaccaatgttttgggtgtttgtgatcaacacatgaagtttgtttatgttctaactggatgggaagggtcaacttcagattcacgtgtgctacgtgatgccatgtctcgggacgatgcatttgctattccaagtggaaaaatatacctagtagatgctggatacaccaatgggac

SEQ ID NO: 75417 - DNA, 451 bp, Zea mays
tgccttcgcctcagtatatcacccgcaatctaacggcgtcgtctagcgcgccaatggcaatattttcactgccatcaagaaaaggcttctcgacgacaggaagggtaaatgggccgaccagctacctgaagtagtctgggcactaaacacgaccgaatgccgagcaactggatttactccttttcgtctactatatggattggaggccatgaccccgaaggaaattaagcatgggtcacctcggacaagtgcatcagtcgtccccgacgtggacaaaccaacttccaaagacctcatcgatggagactgcgtctttgccctgcaagccctcaacaaataccaagcccaaacgaaggtctggcgcgaccacttagttgtcccaagagaattcaacgaaagagacctcgtactcgtccgaaccacccggacagagtcactgtggaagctggag

SEQ ID NO: 75418 - DNA, 436 bp, Zea mays
agcttgtgagcaatacaagtacacaagggataaagctgtctcggctgatcagccgaagcccatgctcttatgtgacgatataacagagcagaaggtgctattgggatctcaattgtctgaggagcaggagaaaacccagataaagtttatgtttaataacaaagatgtctttgcatggtcagctaatgatctctgtggtgtcaataggaatgttattgaacactcgctcattgttgatccatccttcagacctagaaagcagaggcttcggaagatgtctgatgacaaggtcgaaggtgctcggaatgaagtaaaaagactcctcagtgctggagtcatcagagaagtaaaatacccagaatggctagctaacactgttatggtgaagaaagccaatggtaaatggagaatgtgcattgattttactgatctcaac

SEQ ID NO: 75419 - DNA, 379 bp, Zea mays
acagtactctatctagccttcgcctccgtgtaccacccccagtccaacggagtcttggagcgttccaacggcaaaattttcatagccgtcaagaaaatgctcctcgacgacaaaaaaggcaagtggcccgacctgttacctgaagtggtctgggcactgaatacaactgagtgccgggcaactgggtttacccccttccgcctattatacggatcggaggccatgactccgcaagaaataaagcatgggtcgcctcggacagccgcgtcagccgtcccagacgtatacgagccgacttcgaaagatctcatcgacagagaccacgtcttcaccctacaggctctggacaaataccaagcccagacaaaagcatggtgcg

SEQ ID NO: 75420 - DNA, 425 bp, Zea mays
  unsure (1)..(425): unsure at all n locations
agctnctgccatgacgtgattgttctctgttctgatagaagagnaccatgtctgggccacacttctgactgccatgacgaaggattttgccatgacagcggcattgcctccatatgaggatattgttgcctcatagctcatcaagaattgctttgggtccgagtgcccatcgtacatgggcaactgaggtggcttttaggattgtggccatggaatagcctgcaattctgctgccaggggagaagcatcatcaaaagtaaagttaccatgatgaaagtcatcgtaccattcatcttcgttgaatgagccctcttgacgaagctctctgtgctgaggccttcggtcctagtcattttgagtgagatgacgcatttcttcagcggcctcatcgatcttcttctgaagattggcgagaccaagcatct

SEQ ID NO: 75421 - DNA, 374 bp, Zea mays
  unsure (1)..(374): unsure at all n locations
agctntacttagttgattntgcaaaagaagaggccggtctagatgcatgcttaatggctaagacttgcatgggctggctgtggcatcgccgcttagcacatgtggggatgaagaacctccacaagcttctaaagggagaacacgtgataggtctaaccaatgttcatttcgaaaaagatagaccttgtgcagcttgtcaagcanggaaacaggtgggaggctctcatcacaccaaaaatgtgatgacaacatcaagacccctggagctgctacatatggacctcttcggacccttcgcctatctaagcataggaggaaagaagtatgggttaaatatttgtgatgacttttnccgcttcacttgggtggtcttt

SEQ ID NO: 75422 - DNA, 390 bp, Zea mays
caaccgcgatctaatcgcaacgcgaatcgaacataaacacgcgcaagccaacaaacgtatatgcgtaagaacattacatcattcatagaacaacatattacaacatgccaaatgaaatgaagcgcgttgctacagtcacgcgaggaaaaagaaacgcgatagccgaagctacggccgagaagttataacgtttactctacgcaagtagtagtcacgatatttaattcgatattataaaatataaattataactgctatgtagaattgattaaatgtgctacactaacagttgtcaaataaataagttatatgattagcacgagagattctaagcgaggtgaatttactacgcgcaaaacagtacgacaatgtgctgacgacgcgcggaca

SEQ ID NO: 75423 - DNA, 294 bp, Zea mays
agcttgtaaggttcttcattcccacatgtgctaagcggcgatgccacagccagcccatgctagtcttagctattaagcatgcatctagaccggcctcttcttttgcaaaatctactaaataaagtttgccgtctaatacacccttaaaagctagtgaaccatcacttcttctaaagacagacacatctatatttgtaaatagacagttgtaccccatgttgcataactgactaacagatagcaaattataacctagagactctactaaaaacacattagagatagagtgctcat

SEQ ID NO: 75424 - DNA, 432 bp, Zea mays
  unsure (1)..(432): unsure at all n locations
tccacagcaatccaacatacagtggagtagggtattacgctccggtggcccgaaccactctaaactctcgcgtgttcatgtgctcggtgatcgcttaaccagacaggcgaaacacctaagccccttcctcatcttaagattaagggcgagtgcactccgccacccggccggagaattccctctccgatatttggcgcgccaggtagggggctaggcattaggtttttgcttgtttcctcactcagcatgatggtgcaaatcgtggagcaccgcgccgagacatcaatggatttcctggtggaggaagaagttgtttcttccacgccacaggttcccaaccgcccagtgccgggcactgctgctctgcacgcttcacggcagcatacaactgtgcagacgtcccggactncgtcgagggcggctccgggagca

SEQ ID NO: 75425 - DNA, 408 bp, Zea mays
  unsure (1)..(408): unsure at all n locations
agcttctcctgagctcagcattccatccacagacggatggtcagncagaggtggtcaatagggtcattgtcatgtatcttcgctgcttggcaggggacaggccaaagacttggttacaatggcttccttgggccgagttttgatacaattcttcctaccagacggctgctaagtgcactcctttcagaattgtgtatgggcgtgaccctccaacctgctgtcctatcagccgggaacagcttgtgtcgctgcagtagatcaccaactgttggctcgggatgaatttttgaaggagaacaaaaaccgtctgctcaagcccaaggtaacatgatgcaccacaccaacagaaacggaagggagtccaatatgcagtaggggactgggtttggctgcngctacaacaacgtt

SEQ ID NO: 75426 - DNA, 355 bp, Zea mays
tgtgtgtctcaaagacctggccttcgcctcatggaggacctcgctgacatagtagaccgacttctgtgtggtccggacccctacggttggccccaggtcctcaaggtctgtggtggtcggaccaccaccttctcctaggggaacttcctgactccccttgggatgttgcaccatccttttgacaaccagcaccatgctcactgcctctgtagccgctgcaatatataagtacagcggctcccctggctctggaactaccagtattggtagggacacatggtgctgcttcaactcttggaaggctcactctgccttctcggtccaagagaatggtccggacttctataagagcttg

SEQ ID NO: 75427 - DNA, 438 bp, Zea mays
agcttcagcagaatgacagcgaatgttcttcattctcagataggcagaaatgtgctaacttatgttgatgacatcattgtaaaaagcatgaagcaagaaaatcacattgctgatctgcaggagaccttcgctaattttagacaggccggtctaaagctgaacccagaaaagtgtgtcttcggagtaaagaaggggaaattccttggttgcttagtttcaacaaaagggattgaggctaatccaaataaaatcgaagctatccttcgaatggaaccaccaagcacaaagaagggggctcaacgattgacaggaagactagcatctctcaacagattcatatctagatcagcagagagaaatttaccattcttcgaagtgctaaagtcagccaaagtttttcaatggggaccagttcagcagagagccttcgaagagctg

SEQ ID NO: 75428 - DNA, 389 bp, Zea mays
  unsure (1)..(389): unsure at all n locations
tgagcaaaatgaatagcttctggtgaagatgcagtaagcaagattctgctatggtcaaatttttggcagcaaaacagtgcaatagcaatgaatgctgtgtaacttcacacctacccgtctgtttatatagtgccgcaggtgggaaggtaaatcgtcaagtcttccgcaccggacaaacagtcgctcgcacccactgaacggtgggccacagagcccgagaaggtgaatcgccaggacgtgcgtgactgctgcatggtggggccacctcgtgctcggattattttaatcgtttctcggcaacgagcttagagaaggtgtttttcgaatcttcggcattccgaagcctaagagactttntcacgaatcaagctcgttacgaaaaatgatct

SEQ ID NO: 75429 - DNA, 434 bp, Zea mays
  unsure (1)..(434): unsure at all n locations
agcttagaagcaccttcgtttcttagtccctccgacatgatcttttcctcacgcggttaagcattagaacgaggattaggctctgataccaattgaaagttgcctagaaggggggtgaataggcaagttaaaactttttcaacaaaaactagaagcaaactgggtaaaactgaattgatctcgaaattcacccagttaactttggaaatgagatgttctaaatgatccacagggttcaaagtagtagatcagagaagggcacttctcaaaatccacacaccaaaaagatataaacaatcttccacggaatggtgagagaacgaagaacactaacaaacacaatgagcaagaacacaagagacacaagaattatcccgagggtcggtcacaccacagaaggtgccctacttcctcgntgaggcgcccacaaagag

SEQ ID NO: 75430 - DNA, 187 bp, Zea mays
ttatcgatcatcaaccatgcattagactctagagtaatcaattgtggaatccgagttatcacacttgaaaacaaaagtatcatattaaaaacggacataagcctctgcaatagttattgtactggaccataattaggggtacccccaagactcctaaatcttagctggtaaccctcatcagcacaaa

SEQ ID NO: 75431 - DNA, 399 bp, Zea mays
  unsure (1)..(399): unsure at all n locations
agcttctttctgttctcctttgagggcgaatgtactagagcagcttgacgggttttctccttgtttgtctcctttttccttgtgacctgcgtccatttttccgtaggggaggtggacagcagggttcaccgggtagacgaatcttctgcccttggcttgcaggaggtagtcttccctcggagcgctggaggttgcgttttttcctgcttcgctccagctntcccggagatcgtcgaggaaggttttctctccaacggatccacgatgcgatgtagagttccttcttcgtctgccacggatgagatggtcccanagcagaacactgatctagggcagaagacgatcttgtgctgatagtgatgccattgagctagcttgatcggtgaacaccccctacct

SEQ ID NO: 75432 - DNA, 426 bp, Zea mays
  unsure (1)..(426): unsure at all n locations
tctaaagggggaacacatatgaagacttatttattttcattttgagaaagacaggatttgtagcgcagtgtaagcagggaagcaagttggagttcatgatcgacacatgaacattatgacgaccgagaggccgcttgagctactccacatggatcaatttggaccgattgtttacataagcatcggcgggagtaagtattgtcttgttattgtggatgactattctcgcttcacttgggtgttctttttgcagaaaaaatcacaaaacccaagagaccttaaagaaattcttgagacaagctcaaaatgagttcggattgagaatcaaaaagattagaagcgacaatggaacggagttcaagaacactcanattgaatgatttcttgaagaggatggcatcaagcatgagttctcttatccctaca

SEQ ID NO: 75433 - DNA, 395 bp, Zea mays
  unsure (1)..(395): unsure at all n locations
agctntgctactagtctactactactaccaacattccgccatcgtcttctccagccggcgaggccgttccaatccattcccccggttctcattcccatccccgcctcctattctcctcgctcgcgctgacgcgctcccacacgcacccggcaccccccgctgtgccgccacaccaacaccaacaccgcactccaccgtcacagtccccgcccccgcgtcgctgtcgtccgtcatcggtgccgtcgcttccccagcacggtacccctagcgccagcgcacgctataaggcaccgcggcctagccatggcgcccgcaccggcatcgctctccgcgcccaacgccctctccctgcccgcgcccgctagagtcacctncgggaggtggaacaggagcct

SEQ ID NO: 75434 - DNA, 437 bp, Zea mays
  unsure (1)..(437): unsure at all n locations
tggaagtgaggcacaaacacactgcanagagtatatcttttctcttcgcagtgaagtataagagggagccaatcatgctcatgtaatccatctggtccacgggctcgccatcctcatcggcatcaagcgttgttgtggacatgagcgatgaaagaggcttgtcctcgccaatgtcgaacttcttcaagacatccattgtatccttgccttcatgcccaaaggacccatcttgggtctacttgatttacaacccaataaagtagttcagcttgtccatcatgctcatctcaaattccctgctcatagtatctgaacacttggaaacaagagcatgagaagagccaccaaagataataccatccatgtatatctggaccaaaagggtatcgctgccatgctggagaagaaaagagtttatccacttccccatttaataa

SEQ ID NO: 75435 - DNA, 414 bp, Zea mays
  unsure (1)..(414): unsure at all n locations
agcttataacaagagaatggaggcaagaacatgaccatatgtaataatagaaggagaattgtataaacatggagtttgctcaccactccttaagtttttatcaagaaccgaaggtatggaattaatgaaagagatacatgcaggtatgtgtggatcacacattggatctangctcttggtgggaaaagtcttttgacaaggattttattggccgaaggcagcttcggatgcagcagaattagtccaaaaatgcgaaggctgtcaaaaatatgcaagagatcagaagcacccttcatttctcactcaattaatacaacccacttggccgttacaaaggtggggcctcaatttgctaggcccacttccaccagcacagggaaatttaaaatatgtgtgtggaggcggaagagtatt

SEQ ID NO: 75436 - DNA, 447 bp, Zea mays
  unsure (1)..(447): unsure at all n locations
ctctataaagtcttggtcactcttttggtatctgttattttttacggatgnttaaagnctgaagactgaatctgtctaattctggacagcaaagccttctaatatcttttgtcctttgttaaatattgaatcacctagagatgtttataaatgatatgtagacaattttattacctttccagaaagtctaagatcaatttgtttggatgtctgaacctgtagttgtgaatttttaaagtcgcaagtctgaatctggccaacctggacagacctgttatttttgcacagttcgactttgctaagagtctagtcatattgagacgataataccaaagttgtagagcgttttccaagctttccaaaaagtatttgttcactacttttagataaatattngaagagttatgactaanacaagcaactgctgtactggtgtcctaaatgtgt

SEQ ID NO: 75437 - DNA, 436 bp, Zea mays
  unsure (1)..(436): unsure at all n locations
cgtcccggatcttaagtcacctgcagctgcagctttccttgtcgcatcaaccttgacatataatcactccgactttcagcctgctggccatttggtttcgtagctgattacatgaaactttgtgggtttccggatagccaaattatagccaccaaaattgtcatgcaatccatcttttctagccttcgtctgatagtgcagctcgtgaactcgacaaaagctgtccgcaaacggctccaccgcttggcttcggagggcccaaatataaacactaagcctaacgatagcgttaggagtcaactgatgaaagtagataccaaacctgttcagcacctctgcaataatcccatgtagggggaatcttaatcccacccttagaaagctcttgaaatgactatttcatctntctccggctgtgggtagtttcttccccccc

SEQ ID NO: 75438 - DNA, 449 bp, Zea mays
tatcaagttagctttccaatgcaaccagtcccatgtcatttgaatattcctataagaagttattgtcaaaatactgaaggctgcgcataagtcaaacaaccacacggaaatcagctctgcagatctcccgaagaggctccttcacattagcacgtgaaattacttttgtttcatgtttataccttgctaaggctggttgttactagtataaataccccccctatgtctatgatgtaaggcaacttatgataatctaaaacagaacccctttgttcagctgtgtgctaacaaatattgagagtgatctctacccctttgctcttgtgaattccttcgcgggattgcagaagcggcgacttcatccgctcccaagtggtgctcctactcccttcgaggtctcctcgattggatgtaagctgtgttggttggttctttgggagtgtggttgg

SEQ ID NO: 75439 - DNA, 389 bp, Zea mays
agcttcagcaacttaagccttcggagaaaatatatttcccttatgaccaaccacaaaaccattacatgaaaatcgaaatgttctttattatacagaaaatagaactaaatggaaaagactgctatcaaggtaggatacttgtcaataaatgtgctttgactccggcacggtgctgttgactgtacgagcttcggactgctctctgaagtccctttggtgtggagcatattggctcccttctggctgttggccttgttgcagcggtggtggaggtggaggttgttgccaggaagcttgaggttgacttgccgaagcaacagaaactgcagggtggttacctacgtattctgggatgtaaggcacatggtacgaagcagtatgcatgacct

SEQ ID NO: 75440 - DNA, 463 bp, Zea mays
  unsure (1)..(463): unsure at all n locations
agtgaagattcttcatcccaacatgggctagtcggcggtgtcagagccaacccatgttagtcttagcaattaagcaagtgtcgagttcagctctatcaaaatctactaagtatagctgaccctctaacactcccttaaatgctactgaatcatcacttcttctaaagacagtaacacttaaatctgtaaaaagacagttgtagcccattttacataattgagaaacgaaagcaaattgtaatctaaagaatctacaagaaaaacattggaaatggaatggtcaggagatatagcaattntacccaatcctttgaccaaaccttgatttccatccccgaatgtgataactctttggggatcttaggttttctcataagaggagaacatcttcttctcccctgtcatatggtttgtgcacccgctgtcgatgatccaacttgagcctncggatgcataaacctac

SEQ ID NO: 75441 - DNA, 425 bp, Zea mays
  unsure (1)..(425): unsure at all n locations
agcttagaagggagatcaaatctgtttttattattttacacattgggtattacactaagcattttcatccctagaacatgtggcggcaccagacctgtccccgagcgaggagcaagtctcgaggccaatgttccagtcatatgagtccaggcccctaggactggcacactcagttccttagtgcgcaattataggcaaccacgtgggtatctagccttgtcatagtaggagagggtaccctagttatggggtaccgacagtanggaacttactattactcattgcttgtcccttccctttgcattgtgtccttgtcctatcacgaccaatagtggtgttggttcgacactgttcggtgatacagagctatatttgtcattccgaagttagacaagatcttttacacctattggtggagtcgttgg

SEQ ID NO: 75442 - DNA, 330 bp, Zea mays
cagtcagatatacctacacgtgcccgatcgagtgctggttctggctcgggcggattctagcgtaaaacgtgagctaaaacatcataaatgagtacggaatttagcgcaaatcctatatctgttttgtaataacaaacggagcccaaaattacggcgtgaaaatcgcgtgcagccaattcggcgctgggtctggctcgggcggattccagcgtatagcatgatctataacagcgtaaatgagtacacaaggtagcgggcatcctatatctgctctgcacagcacatgtggcccaaaatacggcgtgaaattgcgtgcaccgatcgtactcg

SEQ ID NO: 75443 - DNA, 365 bp, Zea mays
  unsure (1)..(365): unsure at all n locations
agcttgtcaattcccgacattgtggttgcgagttntgtagcttcggcagcagcttcggcttcagcactcgcggcagtcactattttggccggtgaggctgagggcggtgttcgctcgatggcttgcatcacgttgactattcttcatttcttttgcccttcagccttctcctttgcagccgaaggttgttctttcttctgtaaaagttttgtcagttctagacccagaggacttaatagctcgatgggcagggagtcagtcattacctttaaaatttctgccactttggcagcagagggtgttgaaggagcttcgtccgtttcatccaccttcggctcagcagaggatgttgtatcgagccttca

SEQ ID NO: 75444 - DNA, 453 bp, Zea mays
  unsure (1)..(453): unsure at all n locations
tcgtcttgaccatgcttttgtatatccgcaacctgtttcctaagatacctgctcacatacttggaaaacattgtcaaattatgtttttgaggaccttcggaagccgaaggcccccaacagtagcccctcgcaatattaatatgctgtaatgataaattcatattgcgatatggacgaaggccttaagccgaaggtccgaaaaaacaccttctctttgctagaatagcaacagtctttgacaagcgggaccctccagttttcaacgcactgggtgtataaataagagctcatcccgagtttatttggcacgctctcttgccaactgcttttactcacccaactattagcctgcgcgcaacaacacttgcttggctntntggatttttaagcttcggtttcgagagcactttctcaacgtttgcaaagatgtctgaaganntaaaaagttgtagt

SEQ ID NO: 75445 - DNA, 408 bp, Zea mays
agcttgatgaaaagcgcaggctgactcctcttgtgcatcttcataatcaccctgtgaacgtataagaagttatcatgaattgatcgcttttggatgaaggcattttgggcaacagatacaatttcattcatgcgcggtgccagtctgtttgccaaaattttggtgacgatcttcataaagttgtttattagactaataggtctaaacttatcgatgctatccgagacctctttttttgggagtagaacaacacttgcttcattaactacgtggaggttttacatctaaaatgtagaaatcgttattgcagcagtgaggtcttttttaccaaggtccacaacatttatagaaaaggccaatgaaaccatctgggccatgagctttttctaattgtaactcatgacacat

SEQ ID NO: 75446 - DNA, 405 bp, Zea mays
tgcacgactgacaacggagctgaggatggggttagggttcggccggagggagagtcgtcgtccacccctcgccggctcgtcgagcgccgacgggtccaccttcacacctgcacagcgacgccacagagactccagtgctgcatcgtccctacacggctgcacgtgacgactcgaccacgtgtctggcaccttcagccctccaacgcccatcgacaactgcggccaacaatgtcgcctgacgtgttgggtgcctgtctcctctccctgctccgaatctgccactgttccagacttccagataccttgtttgctcgtcctttatctggcattctctggtttaacgtgcggtgcgtggacgcgcggatgctgagtacgcgcgtgggcaccgctgtgcgttggtggata

SEQ ID NO: 75447 - DNA, 426 bp, Zea mays
agcttgacagacgatctgaagatcagatgatcctaagctcaatgatgtcgaagctgaagaccttgctgagaaaattctagagaaaatcttgtaatatcgttgtaaaaaatattgtaattttaagaatctgatactaactctgtaaatttgtgcataccttgtaatatatttttacctcttcgtccatgtatgaactgctttgatgtggacgaaacttgtattttttgagccgaaggcgaaaaacaccttcccttctttccgtacacaacgaagcatgatactgcttctttttctttttcccgaagccttatccttatgaccaaagcatgtgcccgtgtctgtatgatatgatgatgatgatcctatgtatgtctaaatgaatgttttatgaatgcaaatgtatgatgtaatgtgacgtgcaaatga

SEQ ID NO: 75448 - DNA, 448 bp, Zea mays
ttgagttcttctcaaattcagcaagcatggcctcacttcttcctatgcgcgtcatcttttgaaggcgaagaaaaaaatattcaaacttgagtacaagaatacgtatcaaaggcaagtattattactgaaaaaatataccaatataataccatatgccgactgattcaagtattattcaaagtttcctcactgatctattattatgtctatttaagttcacatgaactgctaaacatattcagtatacgcactcagagtaggtgtcaagtaacagtcttggacatccaaataaaagatatgtaggtttggaacagataaaaagatatgcagttttggaacatattcagtatatgcagttttggaagagataaaagtaacagtctgcacatctgaataaaagtatatatatgcagtcagagtacaagcaaaggagaataatctaaacatt

SEQ ID NO: 75449 - DNA, 435 bp, Zea mays
agcttctaaagggagaacatgtgatatgtttaactaacgtgcaattcgaaaaagatagaccttgtgcagcttgtcaagcaggtaaacaagtgggaggagcgcatcacggcaagaatgtgatgaccacttcaagacccctggagttgctgcatatggacctcttcggacctgtcgcctatctgagcataggagggagtaagtatggtttagttattgttgatgacttttcccgcttcacttgggtgttctttttgcaggataagtctgaaacccaagggaccctcaagcgcttcctcaggagagctcaaaatgagtttgagctcaaggtgaagaagataaggagcgacaatgggtccgagttcaagaaccttcaagtggaggagttccttgaggaggaagggatcaagcacgagttcttcgctccctacacaccac

SEQ ID NO: 75450 - DNA, 449 bp, Zea mays
  unsure (1)..(449): unsure at all n locations
agcttatcaatcaatcaaaacaatntgaacaggagaagctagaactgtattcgaagcttaaagccgaagtccagaccagctcataattgaagaaagcattaacaagccttctagacaaatgcttgaactttggcaataattgtattggacgattaaagaagatattttactctgttggagccagcagtgggaaatttaacccttcggcggaaaatttaccccaggccttcgatcatattgaagctgaaatcgaagagcttgacgaagttatagccgggcacggcgacttctgtgcctgggtagcttctcggggtaccgctgctgcatttctgaaggccggctgcgaacatggaaagggtgtcaacaggcccaacttcaccttatcttcatcaatcctggatgatatgcccgacctcgcccgaagtatctccaatagatttataaaaatg

SEQ ID NO: 75451 - DNA, 386 bp, Zea mays
  unsure (1)..(386): unsure at all n locations
agcttgatatattntgctccataaaaacttactttatatcaaaactcgtctcttttattttcaactcttcttgtctgattctttttctatcagaagattctaatgagaagcattgcaagatgatcaagctaggattgcggaacttgaagcgaagtttgccagaagaaaccctctcgaagctatcgacgatgccctattctctatcttatccccactctgcaagaagttttgttatggatcccctagatctattatttgacttcttggctaggttgataggattgttctttagtattgagattttcgcctagatcggtaaagacgacattatattatagtggttttctaatccataatattgctataaaacccttgacttcttatac

SEQ ID NO: 75452 - DNA, 416 bp, Zea mays
  unsure (1)..(416): unsure at all n locations
agctttaggataatagaggagtagctatgtggctaattgagtaagccctataggctactataaggaatgggaattcttccctattccctataagttgatgtgaggtcgtttaagacgagcatgcatgcatcatttaaccaaactacttggtaattagttaagagctttaaaatgatatgaggcataataacaaaagattaagtacacttagtgaccttatcgtgaccttcaataggccaagtcttgatcccctntttacttttataattctttttctttttcacttacgcttaaccgcacacagatgacttctcacggatcctcggacggagggaacacacattcccacacggacggacttgcacgagaggggtttccccttatcttgtgggaggtactgcanggagctggttaca

SEQ ID NO: 75453 - DNA, 444 bp, Zea mays
  unsure (1)..(444): unsure at all n locations
ttacaatctanatgtttttacagcagcatttaatcttcctttaagactacttctgcagcttcatttagaagctgatcaacaactctatccatgatggcttcggccatttgcctaatttcgtcatcccccttcgtgtgggggcctggagatagctcagcaggttctgagggaaaaggagatatggatatattactattacaaaacatgaacaagtttgaaatcaaaaagttacaacgaagagccagttatcactaattaatacctatttgcccttcgggttttgcgcttttctcagcaacctctgctaccttcctagcatcatggatgcctttctcgcttttttgaatgatttcttgtgccatttctcggccgccattgtcccagatgtttggtgaaaaatttccaccgagcacgctagcttcagctgaggaggtctttatatct

SEQ ID NO: 75454 - DNA, 438 bp, Zea mays
agctgaagccatggtaagtagcataggctaataatatgcgaattgactcaagcctagctacgggtgcataggtttcaccaaaatccaaaccttcgacttgtgaatatcctttggccacgagtcgagctttgttccttgtcaccacaccatgctcgtcttgtttgttgcggaagacccacttggtttctacaacattttggttaggacgtggaactaaatgccatacctcgttcctcgtgaaattgttgagctcctcttgcatcgccatcacccaacccgaatcttgtagtgcttcctctaccctgtgtggctcaatagaggaaataaaagagtaatgctcacaaaaatgggcaacacgagatcgagtggttacccccttatgaatgtcgccgaggatggtgtcgacagggtgatctcgttggattgcttggtggactc

SEQ ID NO: 75455 - DNA, 328 bp, Zea mays
ttgaaataagagaatccattaaatatgctactttaacaatttttagcaacaatccttgataagagcgacattattttaacaagttggattgatatgtagtagcatacttcatgagaaacttattctcatacaagagactatatgagattattaggataaggcgatagcctcgataggatcaagatatagcaataggctccctctagagatatgcatcaaagaattgaaatgaaagaaatagatgcattcaacttttagagacaagtagggagaagcaccattcatcttgatcaaggcttacaagaatttcaataaacaatttatgcct

SEQ ID NO: 75456 - DNA, 420 bp, Zea mays
  unsure (1)..(420): unsure at all n locations
agcttcattaaacaaggaaactgaaagtgttatatctgcaattcatatagactagatttttatgatacattgtaactaatgcattggtaagcattaatttgaatgtctgtgtttttccaggggttgagtggtatgttgtggtcagatttggcaatcaatgtatctgccatcatgtgctatatcgataaattatgatacaatgtggtcagattctaggtttagttactgtttttgtgcaacctgtgtgacatctgtttactgacaactggacaaatatgacatatcgcaatcggataaataacttggcactcttggtcaaaaatttgattttccaatatttagaatcgtgtatntttcattgagctaaataggtcccctcattgtattantgttgaaaacctgttgtattatgtttgaaaa

SEQ ID NO: 75457 - DNA, 429 bp, Zea mays
tgaacgggtcgaggcctatcgccttttctgcttggtgtctctgggttgcgtgggtgccccggtatgaaaccaggaacccagcaacttccctgcgaagacccaaagacagcacatgttcggattcagctttgtgcgggatgcccgcagcctgtcaaagaccaaggtcaagtcttccactaaggtcgaccctctcttagtcttgactacgatgtcatcgacgtatacttccaccttgtccctaatcaggtccccgaaagtctaactcatcgcccgcacaaatgttggcaatgcgtgtattagaccgtatggcataacaacatagcagtaaagcccatccactgttacagaagaagagtgcttcctatctttgctagacatctggattcgatggaaaccacaataagcatctaacacagacaaaaggtcaca

SEQ ID NO: 75458 - DNA, 383 bp, Zea mays
gtgggcaaaacgacactttgtacctgacttgatacaatttgtggtgccataccattctcaatttgacaattggggtttacgttggttcgtacataggtcacagtctcgcagagtcgcacactacaattgtaacatagcttcagattcaggctttagttcatgcaccttgcgtgcatgttgtttgcatgattttttttttaaaatctaatcttttttaatatattattaatatctggcccaattttttatggacctatgtttttggtcgcaccagttcgaccagtgcgaaaaaatcacagtggcattgcatgcattacggtagcaaaatatccacatcgaatggtgttctttatgtgagaagatttgtcacaccattattattg

SEQ ID NO: 75459 - DNA, 415 bp, Zea mays
tgaggaggctcttcatcctcacatgtgctaagcggcgatgtttcttccattccatgcaagtcttagccattaagcatgcatctagaccggcctcttcttttgcaaaatcaactaaataaagtttgccgtctagtacacccttaaaagctagtgaaccatcacatcttctaaagacagacacatctacatttgtaaatagacaattatatcccatattacataattgactgacagatagtaaattatatccaagagactcaactaaaaacacattagagatagagtgctcattagatattgcaatcttgcctaaacctttcaccttaccttggttcccatcaccgaatatgattgaatcttgagaatccttattcttgacgtaggaggtgaacatcttcttctcccccgtcatatg

SEQ ID NO: 75460 - DNA, 365 bp, Zea mays
  unsure (1)..(365): unsure at all n locations
acttgaaaagaatcaaacttgggatcttgtcaaactccctaagacagcctgctacgagcccactatttgcactacactactagttatctcacttngaaacccttggaaaggacccacaaatagcaagaaccatagggcggaaaggggcaaaagtaaagtaaagttgtggcagagagtatgaccacacatagtttttttcctgggtggggggttaggtatcccctttcctatctgtcttactttcatgtcctggctttctatttgcaaattcctagtaggccagtgtccctttcaaattggttacgggggcctacctctttcataaagctggagtctttcccaagcacgcttaatggggcagggat

SEQ ID NO: 75461 - DNA, 454 bp, Zea mays
tgctactcgcttaccggatataagaatgaaactcacttatcagtatttgattaagcgtgtccctggtatggagctgtcgtatcagcagtcttagcagtgaattacagatttagagtaacaaataggaattctagtcgtgattctagttttcaagagtattagcaagcattagtcgtatccgaagcagctacaattcttgcaagcagattgaaagtaggaatttcgatttgtagccgtgatatttctttgttgtttatattgtattagctgctcccatataagtaagtaagccagctatcggaatacaagaagttatgccgtaagcttacttatcgtttacatagttttatcaagatagaatagaatagaagaactcaagtccagtaagaagaataaaagctgtgattaagcttctcggctctctgtcttttagtaagcagacgagtaagcaaat

SEQ ID NO: 75462 - DNA, 389 bp, Zea mays
  unsure (1)..(389): unsure at all n locations
agcttngtgctccactgaatatgactgaattatctctttcctggaccaaatactaaccaaactgtgcaatataccaaaaaagtgtggtgtcctttgcatcagaatttctgtggttgaatttggtggacattcaaagacagcatagtgaagaatccatctcacgcagcataaaggaaatgttttccagagcaaaaatttgtcaacaaacatcgccctatagtaagatgagatgaagctacataatgagggaaactgaaaacacacatagaagtacttcacataatttagtagatgctaaagtttcctactccatttgtacaaaatatcctactccaggggtatgatgtataacgggcccttcatagtgatatggatttggatggtctatt

SEQ ID NO: 75463 - DNA, 390 bp, Zea mays
cgccggctagtacacccttaagagctagagaaccatcacatctttatttagacagacacatctatatcgggaagcgaacagttataaatcatatagcataattgactaacagatagcaaattatatccaagagactctactagaaacacattagagatagagagctcattcgagattgcaacctacctaaccctattaactcgccttgattcccatcaccgaatattattgaatctagggaatctttgtttttgacagacgaggagaacatctttttctcccccgacatatgggttgtgcatacactgtcaataatccagcttgaacccccggatgcataaacctgcaaagcaaatgtaggcttgggtcttaagtacccaactacatgtt

SEQ ID NO: 75464 - DNA, 326 bp, Zea mays
agcttgtgatggctgactggctgtttcatgactcctgctatctccctccctcttatcttgcttctacctgccacagcttttgcactcctccctgctataatcaaaatggtgacaaggcggctcacattgttccttgatggctcaactgcaccatcagtccagcgctagccaacagcagtaggctgattcatgctcattcctgactaacttcgaacctcttgcaactcacctttggaaaaaaaaatgcttgggtgttgttctgattacagtaacgtcttgtccttttgtcaggaaggcctgttttttaacatgcaggaggctgtgta

SEQ ID NO: 75465 - DNA, 433 bp, Zea mays
  unsure (1)..(433): unsure at all n locations
agcttcttgggctcagttgccaccaccactaccgctaccacctatcttgngtcacagtcagcagccagaagggcaacgccacgctcagaaacaacgtgacctttgggaggcaaccaaatcctgatctgatgtatgtaggcaactattgggagccttcctctttcgaaggggttactattgggagccttcctctttcgaaggtcctaaaaaacgtgactaatcatatgtttttagtatgacatagactagtacaggaggcttcgactntgggatgaaggttctcttatgataaaggcgtgtgtaatatgaagatacaacccgaagatgacatggatgaacgcctaagctatgactaaaggagcttcggcttggtataatagcaaggatgaaggacggaaccgacctaagggggaaaagactactttgtccttgt

SEQ ID NO: 75466 - DNA, 323 bp, Zea mays
  unsure (1)..(323): unsure at all n locations
tgacacacgcacctcattcggcaaggtcgaagagaccgcagtcactttgcccctttactgttcgttctgacaggaaaacaacactattcaccccgtttcgactactgtgccaaccaccatggtgaaactaacgatagtaagtcaccacctcccccgagtttagcctcgggcgcaacaaggagctctgcctcgcccgacctcaggccttggcctcaggagaaggtctncacctcgcccgacctcaagcctcggactcgggagaaggtctctgactcgcccaacctcaagcctcggcctcagcctcggactctggaggagtcaca

SEQ ID NO: 75467 - DNA, 403 bp, Zea mays
tcaagcttgtccgaggtatataggactgtctattatcttagccgaggtggcagctgggcttatcacttgcaattgtcggaatctatgatcagagtacaccatgtattccatgtatttatgttgaggaagtatttgtggaatccagaccatctaatcgagctagagccgattcccgtgtagcaagaccagactcttgagtgtcgtctgctgcgtatcttagaatcctaggaacttgaggagctgatgcggcagaagtaccccaacttttctgtatgtgtgagatttggtgattcaataatctttctttctgcactccaaaagaagcgtcggaattcgaggtcgaattctttttaaggagggtagagtgtgatacccaattttcaaaaggaagagaaattgaaga

SEQ ID NO: 75468 - DNA, 448 bp, Zea mays
tcgtactcagcaatgttatttgtgcaactgaaatttagttctgttgcataacaagttttaactgtggaaggtgcgaccaacacaacagctgctcctgctccgaaggttccccaagatccatcgcaaaatactgtccaaacttcggcatctttactcgtttcttcttcctgagcccctggcgtccagtcagcaatgaagtctgccaacgcttgggattgaatcgaagatctatgcacataatcaatacaaaattcattgagttccgcagcccattttccaacccttccagtagcttctctatttctcataatatccttcaacagttgtgaagaaggaacaactatattgtatgcttgaaaatagtgccgaagcttcctggaggccatcaaaacagcatacaacactcttctcaattctgtataatctttctttgataaactaagaactt

SEQ ID NO: 75469 - DNA, 428 bp, Zea mays
  unsure (1)..(428): unsure at all n locations
agcttgccttcgcttcagtctatcatccttatttcaacggngtcgnggagcgtgccaatgggaaaatcttcacagctgtcaagaagatgcttctcgatgaaaaaaaaggcagatggaccgatttgttaccggaggcagtctgggcgctaaacacaactgagtgcagggcgaccgggttcactcctttccgccttttatacggatcggaggcaatgaccccgcaagaaataaagcatgggtccccgcgcacagtttcgtcagccgttcctgacgtggacgagccaacttcaaaagatctcattgacggagaccgggtcttcgccctacaggctctaaacaaataccaagcccagaccaaagcatggcgcgaccacgcagtcatcccgagggagttcagcgagggggaccttctactcatccgaacagct

SEQ ID NO: 75470 - DNA, 449 bp, Zea mays
ctcaaccttcatgaagaggaaccttcggtcatctcatacgaatagttttatttctaaaactgcttcttcctacaagagcttcggcgactaagcatagtcccaacaatactgatctcaacaaacactgtccgaaggatcccttcgggctcccgaggatagatcacgtggtggactccaccgctggatgttctgtgctgtctttcctggattgctattccggataccatcagattagtttggcaaaggaagacgaggaaaaaacagcgttcatcactccgtttggtgctttctgttatacctccatgccgttcggcctcaaaaacgctggagcgacttatcaaagagccattcaaacatgcttaaccgaccactggggcaagcgtgtggaggcctacgtagatgatgtggtaataaagacggagaactctgaatacttcatcgaagactta

SEQ ID NO: 75471 - DNA, 281 bp, Zea mays
agcttaaggagcactttgattacaaactgtcctagcttgcggagacgagaccatcacatgaatgtactacgatccactcgagtgacacacgcacttttgtacccacgcacctcgtattactcaaaaacatacgcctcgcctcggtgggagagcgcgcccactgtctcttactataggtacacctctacgccgacgaagagcgaggagcggcattttacctacgcgaggatgaggaggagcatggtcgcgacgccgacggaggacactaccactcggtggac

SEQ ID NO: 75472 - DNA, 381 bp, Zea mays
actcagctttgaacatctctatacgacatgagctaggccgtggttgcaatttccacccgagatagtcatagcgagcaagcaacgtctagacctactctatctaaatcgaccacgtatatctgagcctactacaactccctaaaggctattgagtcgttactgcctctcaagacagagacacctacatctacttatagaccactgtaccgctctgactggttgcgggacgcagggcaaattgtaatctaaggaatctacgagaaaaacatcggctgataaaaggacgcgaaatataaccgatgtactcacatctatgacgaaaccttgtaatccatcctctgaagtgacaactcgatggggatgattgtgattctcgcaaga

SEQ ID NO: 75473 - DNA, 321 bp, Zea mays
  unsure (1)..(321): unsure at all n locations
agctngacattgcttccctgttggaaaccaatgccatccttgatgccagggcgtctttcactatagagcatgcttctagcaaatttaaaattttcattttcaatttcatgctcattgattttactagttaattgagctatatgatcattttgttgtttaattaaagcaaggtgatcatgaatatcatcaatattaacatctctacttccagtacaaatagtaccatgatcaacactaaatgtaaagggttggcaaccttttaattttctattctaaccttgtataatgccatcttcatttttaaaacaaaaattaaaatct

SEQ ID NO: 75474 - DNA, 216 bp, Zea mays
tgaactctagcgggaagcacccattatacctgacccgtgaagactcccttaaacgctatggaatgatcactactgatatagacagagacacctacattagtgacttgacaagaggtgcccattggacataattgggagacggatagtacagtgtcatttggtgaatcttcttgaaagacattgctgatggcctggggacgtgaaatcgctatctta

SEQ ID NO: 75475 - DNA, 418 bp, Zea mays
  unsure (1)..(418): unsure at all n locations
agctgtgaagggtcttcatcctcacatgtgctaagcggcgatgccacagccagcccatgctagtcttagctattaagcatgcatctagacgggcctcttcttttgcaaaatcaactaaataaagttggccgtctaatacacccttaaaagctagtgaaccatcacttcttctaaagacagacacatctacatttgtaaatagacagttataccccatatgacataattgactaacagatagcaaattatatccaagactctctactaaaaatacattagagatagaatgctcattagaaattgcaattntacctaacccttttaccttgccttgattcccatcaccgaatataattgaatcctgagaatccttattcttgacgtaggaagtgaacatcttcttctcccccgtcatatg

SEQ ID NO: 75476 - DNA, 361 bp, Zea mays
  unsure (1)..(361): unsure at all n locations
atagtcataaaatgttactaagtaaggacttacattacattcacacccttgaaatgccaaagaccctaaaaacgactggaaacccctaaatccaaaccctagggggttaagtgcaaaattagtccacttttggactaaagtgcaaaaaactagtaaaatatggggtcttaagtcatctggttcacaatcatgaagatttgcaagctaaaccctgaattttggacctatttgcaaaaaggacccctttgtgttctagtgttaagtctgaaaatcagtgatattgactccactttggagctctatatcttccaaaatagtgagaatttaccctangtcactacatcaaatttgtaaatctatc

SEQ ID NO: 75477 - DNA, 288 bp, Zea mays
  unsure (1)..(288): unsure at all n locations
agcttcagcagagcagcgaacctgcttgcggaccgggcagccggcggccatggtgcagcggtagtacgagcggnggcacggattgcccttggccatcttctgcccgtatttcctccattgacacccatcactgatctgcgtaccatcgagaagaacaaacatttcagcaacagctcgctcagtatgccagtagcagtccacagtcagaagcggagcactgtcagcctaccatgagtacctcggagcgggctcggacggagacgcgggccttccgcatggtggcgggct

SEQ ID NO: 75478 - DNA, 235 bp, Zea mays
  unsure (1)..(235): unsure at all n locations
tatgaagattcttcatcccaacatgggctagtcggcggttctagagccaacccatgttagtcttagcaatgaagcaagtgtcgagttcagctctatcaaaatctaccaagtatagctgaccctctaacactcccttaaatgctattgaatcatcacttcttgtaaagacagagacacctacattagtgaatagacgngtggggcccattggacataattgggatacggaaagcca

SEQ ID NO: 75479 - DNA, 304 bp, Zea mays
  unsure (1)..(304): unsure at all n locations
agcttcagtcttagcgttggtctcggtcttagttagtcttagttagacagggtagtttgctatatcctgtgcatttatgtttgtcatgatgaactatgtttggtttggatctttgtaatgattgtcaccagagtgtgggtatcccctgcattttggtttacatattatgtntaataaagtagttatatagttgggaaaacccttattctactntcctctttatctgagaagctgtgtggtcctgtgtggaaaatcaatgaagatgctcatctgttcagtgctgttggagaattctacacttttt

SEQ ID NO: 75480 - DNA, 325 bp, Zea mays
  unsure (1)..(325): unsure at all n locations
cttgatactaaccctggagtngcagaggattcaacagcaacaacaaagcaatttttctctatctagttgtgaggaaagtggatgattgcaagaggaatacaaagaattatgtgtgtaccctagtttcaatattgacaatctctctaagtagagacaaccaatctgtgaataagaatagaatatcttcagctagaccactggagcttgagaagattttcttggtagcatcataaactaccttctcacctccgagcttagatggcaaagtagatatattagcagctgtacaaaaggacaatgaatcaatacctgctacagacatata

SEQ ID NO: 75481 - DNA, 390 bp, Zea mays
agcttgccgcgctggtgatccaggtcaagggcgatctgcttggcgagtacaaggccgtgtgcgcgctgcagccgcgcttcgacgccttgctcgccttctcttcctccccctcctcctctcgcacctcctcccgcctctcccgcctacagaagcatcgagcgacgttgcacacctcgtacgcctctctgctcgacttcgtcgaggaccgcgcgaaggacgagcgcatggaccgcgagagcggagaggcccatgccaggctgttgggctggatggagggggagagggtcgattgggacagagggaggagggcaacggagctgagtagggtgaaaaatggggcgagggctaccaacctgtcgcgggtcgacgtaaggtctccccattccccca

SEQ ID NO: 75482 - DNA, 455 bp, Zea mays
tgacaacgcggtcgatcttgagcgatgcgtatacctgtgttatctgctggaagaggcgggcgaggacgacgtgcttgagcggtgcgacgtatcgggccgtgtccgggttctgctcgagctgggcgaggatcggctcgatcttccaggtgatggagagcgggtggaagtcaacctcgaggatattgtagagcgagcggagctcgggcgagacgcgcttgaagacgtggcggttgaaggcgtccgtgatgaggccggcgcgggtcggggcggagccgaggccgatgagggatgctaggcggccgatgcggcccttctactctccctcctcgccgtcgatgcgcttggcgctctcgacaccagagcccatcgggactgcgagcgatgataggaggacgagggatgcgagcttctctaggtctgcaccgccctcaccagaaagggcgacgcgggcggcg

SEQ ID NO: 75483 - DNA, 441 bp, Zea mays
agcttattcgaatgaattagcaaagatgttataataactgaaagcgtttggtatggatttgagaaaataatttgatatccaatccttaacttgcacgtctctacactcagtccatagttctttcgatatttatcccgctcacgtgaattctttggatagaagtgatttgccaggttttttcttcttttctattttcaattatctttttttactcctaagcacacacaatgaaacaaaatatcttaggggaccacaacactatatcattggtaggaggacacgtgtcataaatcgataagaagctacagggaaatttttctacaaccgactatatatagagaatatttttcctgaggatggccacaatgcatgcaaacaaattttttcctgaggatggccatgctgcatgcacacaacgacatctaggcacccatggagatc

SEQ ID NO: 75484 - DNA, 442 bp, Zea mays
tgtgaaaccaatcacgagtttattgaagaatgataataaattcttttggtcttcaaaatgtaataaagcttttgaataattgaaagtattattaaccactgctccgatattggctcaaccggatattaataagccctttgatgtgtattgtgacgcatcaagcagtggtctcggctgtgtattaatgcaagaaggccgagtgatagctaatgcttcaaggcagttgcgccggcatgaggaacattatccaactcatgacctggagttagctgcagtggttcatgccctaaagatatggcgtcactatctgctgggcaatgtctgtcatatttatacagatcataagagcttaaagtatatatttacccagtcagagctcaatatgagatagaggagatggcttgagttgatcaaggattatgaactagagatgtaatatcac

SEQ ID NO: 75485 - DNA, 427 bp, Zea mays
  unsure (1)..(427): unsure at all n locations
agctntcataatgagctctctcttaggtaatgatttcttgctttgngaggtcgctctcacgttgccctcgtctttgttgtgctgaccggccaattaagcggcatagccaataagttggaaaccatcagaccacacgcccagtgatgatggtgtatgtgaacaatatgcagtgcagatggaagctagcagcacaaaagctttgccataccaatctgaaaaggaattaactgaagaaataaatgatcactggtatagcactggctacttctgaatcaattgttgaggcaaatgtatgtttaaataactacagagggagtacataattataaaatctgataaagccctacagctacaggagccatagcttgactaggtttgagctgttgggggtattggctatgcctcgggtgcctttctgtgcactggt

SEQ ID NO: 75486 - DNA, 458 bp, Zea mays
cgcgaaggttcttgatccctacatgtgctaagcggcgatgccactgtcagctcatgctagtcttagctattaagcatgcatctagactggcctcctcttttgcataatcaactaaataaagtttgccgtctaatacacctttaaaagctaatgaaccatcacttcttctaaagacagacacgtctacatttgtaaatagacaattatatcccatactacataattgactaacagatagcaaattatatccaagggactcaactaaaaatacatttgagatagagtgctcatttgaaattgcaatcttgcctaagcctttcaccttgccttggttcctatcaccaaatatgattgaatcttgggaatcctctgttttaacgtaagaggagaacatcttcttctcccccatcatatgagttgtgcatgcgctggcgataatacaacttgagccctcggat

SEQ ID NO: 75487 - DNA, 381 bp, Zea mays
  unsure (1)..(381): unsure at all n locations
agcttcggctatggataaattgttcagcatctcaacagtgcaatggcaatgaatgatgtgataacttcacacctacctatctgtttatatagtgctgcaggtgtaaaggtgaatcgtcaagtcgcccgtacccgctcaacagtcacccgcactcactgaacggtggaccacggtgtgtgcgagatgaatcggcagattgtacatacccgctgcatggtgggaccaccccgcgctcagattattttaatcgtttctcggcaacgagctcagggaaggtgtttttcggaccttcggcattccgaagcctaggacaatttttcacggatcaagctcgttacgaaaaacgatctancaccgcgaaggggctactgttgggggtct

SEQ ID NO: 75488 - DNA, 330 bp, Zea mays
gtgtcaagtcaccattttttttactcaggtatacagcagaggagagatgagctgaacgtatggatgctgctgagcagcctaccctgtgtagagttcttccttgagcgccgagtggacagggcggtgaaagaagtcttggaaacagaatagaggctagagatggtcaatacagaatagtgcggcatctgcctcactaagcaccgagagcccgtctcttatctaggtgcttctgctctgactagcattggttgaagaaggttagcagcggataacacattaccagcagttggtgcttagttcgcaggcatatgaatgatcccttgctgtgta

SEQ ID NO: 75489 - DNA, 397 bp, Zea mays
agcttacctcgacctgagaggaaagcttatcttaagtgtgacgtgggtgaagattaatttttgtgtgtgctaaaggactcaaaggggttcccccttgaggtcctataatcttaagtaagaatgtgttagttttgttgataatattgatcatatgcttcttgttgtattatatggtgataatacataattagttcttccgatgatatgaatcaattagtatctattatatttgtcctgtaatagatatccatttggttcaggtgctttaaattggtattttaatggtgaatagcggtaggttgatattcctatggtatatccatttaattggtgtttaactctgattctgtgcatttgtgtgttatacacatcacttgttaattattgacacaatgca

SEQ ID NO: 75490 - DNA, 396 bp, Zea mays
agcttataaccactagactagaagccctttcgcagcattgtttttctatgaataaacaagatccaaatagttcccagtagagtactaaccgataatatttttacaaaaatattcggtgatagtttctgatttaagataaattagctatgatttctatgattttcataaaacagataaccacctttgaaacaagctaggtaccaaatttcaacaattggagggcatacctggcttataattcaagggtgaaaataggactgtcatgtaagatgaacgttaaaagcggactttaaccaaaaataaatcacgattttttatgaaaagaaatcgttagcttagtagaagatgcctctcctattcgcataatggcattaacatgaacactgtaagtaactt

SEQ ID NO: 75491 - DNA, 439 bp, Zea mays
  unsure (1)..(439): unsure at all n locations
agcttggagttggattgattgatgcatgcaacttattntacatccattatcaatacatcaaccacttacattattctacacccatctcacttcctaccataactcctatttaaactccgctctgtaaatagagcagtctaaaatgcattttgtgccgctatatacacgatctgttaagcacgtacggccttagtgcgagtactagatgtaatatatggttgactggtgatgttaagcgtcaaaaaaactgaaagttcgtttggtaaaaacggcaccagataggtaataccagatgcatgtgttgaagattcacatgctggaaacacaaattaggaattccattntttaaaaaagaagaatcagggaaggcggcttgaaaatacacagattacttatattattaaagagaattccnaccataacattgaaagaaatagag

SEQ ID NO: 75492 - DNA, 434 bp, Zea mays
  unsure (1)..(434): unsure at all n locations
tctaaagggagaacacattntaagactaacaaatgttcattttgagaaagacaggatttgtagcgcatgccaagccgggaagcaagttggcactcatcatccacacaagaacatcatgactagtgacaggccactggagctcctacacatggacctattcggcccgatcgcttacataagcatcggcgggagtaagtactgtctagttattgtggatgattattctcgcttcacttgggtgttctttttgcaggaaaaatctcatacccaagagaccctaaagggattcttgagacgggctcaaaatgagttcggcttaaggatcaagaaaattagaagcgacaacgggacggagttcaagaactcacaaatagaaagcttccttgaagaggagggcatcaagcatgaattctcttctccctacaccccacaac

SEQ ID NO: 75493 - DNA, 335 bp, Zea mays
  unsure (1)..(335): unsure at all n locations
agcttgtcaagcatattntggtacccatcgcttgatgggtccatcacggttagccaacaaagatctaggaacccaagagtcctttgtgttagcacttggtaaactcattacctttgtcggcgtttcgaccccggggggtccctagaccgacgagtaaattgtcgccgcgtgtcccagcccagatgggtcggtgcgagacggagcacgaagggggtagaagagagggagaaaaggggaaaacccgcggcctccgtgttgtcctgcgcccaggtcggtgcgcttgcagtagggggttacaaacgtccgtgtggggggagagcgagggactctacgcg

SEQ ID NO: 75494 - DNA, 438 bp, Zea mays
agcttaaccttgtaacgaggataagctacctttgttccaaaggtggatggttcttaagtctctttgaaatccttaaaggaaaaatgcttaaaatgtttgcaacatgctttcataagtgcataaactgtcttgagcatcactcatatactatgacacaatgcacttcactttctctatgatatagacttgttctcattaacctaattatgtgcacttggcatttaaggccaaaatatgtattcctctcaaggcacatatttagggggagaaacctatatagaactatgatcatgcttaattgacatatctcttgatcatatctctttcattttggtacaaatgcatatatcctactattcccgtaccatgactacgactaatatgtttccaagtatattactatgctaagtcgtagattgaaagggaaatggagtcttc

SEQ ID NO: 75495 - DNA, 414 bp, Zea mays
  unsure (1)..(414): unsure at all n locations
ttccttggtattctgccacacttcggcctatggaagtacttgtatcactgttggcctgngatggccgaagggtagcaccaccttgtggggggtgcgagtttggagatgcgccgtcggaggaagaccgactacctcgacatcccactcaaggacaacatcaaaggatggcgcctggaatggtttatcatggagaatcatgggaattcccttcccccacggtcaaggagacaaccagatgttcgcactccgagctggactgaatcccccacagacctggaggtggctgangcaagggctctgcttgctgaggttggatagttgaaagggaggggtctgactacagaagttgtggtcgctgatttcattttcaagaacattcagccaataaaagacatagcatacctcgcttatctg

SEQ ID NO: 75496 - DNA, 431 bp, Zea mays
  unsure (1)..(431): unsure at all n locations
agcttctaaagggagaacacgtgataggtttgactaatgtgcaattcgaaaaagatagaccttgtgcagcttgtcaagcagggaaacaggtgggaggctctcatcacacaaaaaatatgatgacaacatcaagacccttggagatgctgcatatggacctcttcggacccgtcgcctatctgagcataggaggaagtaagtatggtctagttattgttgatgacttttcccgcttcacttgggtgttctttttgcaggataagtctgaaacccaagggaccctcaagcgcttcctaaggagagctcanaatgagtttgagctcagggtgaagaaaataaggagcgacaacgggtccgagttcaagaaccttcaagtggaggagttccttgaggaggaagggatcaagcacgagttctccgctccctacaca

SEQ ID NO: 75497 - DNA, 419 bp, Zea mays
agcataggtcagttaaatgcgaattgactcaagcctagctacgggtgcataggtttcaccgaaatccaaaccttcgacttgtgaatatcccttggccacaagtcgggctttgttccttgtgaccacaccatgctcatcttgcttgttgcggaagacccacttggttcctacaacattttggttaggacgtggaactaaatgccatacctcattccttgtgaagttgttgagctcctcttgcattgccaacacccaatctgaatcccttaatgcatcttctaccttgtatggctcaatagaagacacaaaagagtaatgttcacaaaaatgagcaacacgagatcgagtggttacccccttatgaatatcgtcgaagattgagttcacggggtgatctcgtcgtattgcttggtggactc

SEQ ID NO: 75498 - DNA, 397 bp, Zea mays
  unsure (1)..(397): unsure at all n locations
agctttnngtttgtctaaatactcttagtgtctcttattgacaaaagttggtctcttgtggggagaatgtttgattatgggaaaaagggagagtttttgaatctttgatcaatttctcttggaatacctctctttatgtctcaacaagtgtgtttgacatagagataggaaattgagtttgacttggaaaaacaaaccaagtggtggcaaagaatgatccaaatatgccaaatttgaatcaaaaacaattcttgtccttatttgcattaatgttgcacttctatgtgttgctttgtgttgtgttggcataaatcaccaaaaaggaggagattgaaagggaaatgtgcccttgggccatttctaagtattttggtgattaagtgcccaacacaaatgg

SEQ ID NO: 75499 - DNA, 431 bp, Zea mays
  unsure (1)..(431): unsure at all n locations
taatcttatcaaatggtattcttaattaatagactatagcaacaaggtacaaagaggcggaggctgtacctagaatcagcagtgatggaagcagagctatcaccatcaccagttctatcagctaagtctcccattatctctggtagctgtctggctaagcaatctataaggtgtcctaagttggttacacaacaaacttattaattgtttgaaagcacaagttaccttaccttcatgtgcgacggagtctgctgatgcagacatggatgcagcctgcgcacatgaaatcgatgaaggttgggtaccttatcctttntagaatgcagaagcaattcagtagtcttcaatcatcacttcttgtatgagatgtttttgtctgcacaagtcaatagattaggagaacatagatgtttcttcattttggcatggac

SEQ ID NO: 75500 - DNA, 235 bp, Zea mays
  unsure (1)..(235): unsure at all n locations
tctctcgtcccggatccttaagcaccgcggctgcagcttctaagggagaacacattntgggactaacaaatgttcattttgagaaagacaggatatgtagcgcatgtcaggcagggaagcaagttggtgttcatcatccacacaagaacatcatgacgactgacaggccactcgagcttctacacatggacctattcggcccgatagcttatataagcatcgacgggagtaagta

SEQ ID NO: 75501 - DNA, 334 bp, Zea mays
tattcgtctcagctaccaccgtgatcggcactgcaacctacttattcccgaagccaacagcctgaatggcgccgacactgccaacaacaacgtgacttcatggaggagtccgaagctcgtacagtcaatagtactgtgccagaatgaacgcacatatactaagcaatatcctgcttgtcaaatacttttatttcttacgatattttgctttgagaataaagaacaaaccatgacaacttacttgtaaattcttgtaacgattttgcttctatcagaatgaaatatatcttcttcacagatttactaagctcagaaggcgttcctaacggaatgc

SEQ ID NO: 75502 - DNA, 454 bp, Zea mays
  unsure (1)..(454): unsure at all n locations
tgattaaatagatattagcgcaagttaatcaagtctatgttgctagctcttgcgaacacaaataatcgcagagagagcaatcacaagagacacgcgattttatccagtggttcggccaagtaacacttgcctacttccacgttgtggtgtcccaatggacgagggttgcactcaacccctttcaagtgatccaatgatcaacttgagtaccatggttttcttccttatagtcttcttcccgtttgcgaggaatctccacaagttggagcctctcgcccttacaatattgatcacaaagaacgcacaagagtaaggttgggaagagcaacacacacaagactcaaatacgcagcacaaccacgcacacaagtgatgaattgagctcgaaacacaacacacggagttcacaactcagatggagctcanatcactaacacaaagaatcgaatgtgtg

SEQ ID NO: 75503 - DNA, 442 bp, Zea mays
  unsure (1)..(442): unsure at all n locations
agctngcactgtaagccagtactcttcttctagaagccatagcctagcttcccttgcacgacaaccgcatggcttctatccgaagcgtacttcctctataaataccgagtgagccttccatacttcactcaaccttgcctttacatactcctcaaccatgaatccctacttagaaaacaattttcttgtgcggttgatggaagaaatggaagaggaagaagaagagttgcagttggcgaggcacatggtcaataggaggcgacatgcacgcaatgagcgtcgtcatggtggttcgattccagggcgtgttaggattcatcgtgatcacatgagcggcgatgcaagaatccgagcggactactttggagcgaacccggtgtacacagatgcttaatttcgtaggaggtatttgcaattaccacattcattttaccatgtacat

SEQ ID NO: 75504 - DNA, 456 bp, Zea mays
tgctgcagctacataaatcatcaaggctgggatgaaaatctactgagcatattttttttcataaagaagagtgagatatagatggacaagataaagataagagatggaagaaaaaagaacactaccactgttaatatcataagacaagaggcacgctttgctgcgcctgcctcagtctttttagcttagcataatgcatatccaacctgcaagtggaagaggatgtgacatatattttgtgaacaaatcgtgcacttgtttctaaagaaaatgcataaaatgcagtgataaactattagtattatacatgaaaggtcacagaatttttagaacccaaactgccttatgtaagtatccatgtgccatgttctgagcaaacatctcaccggggcatgcagattgaatcattggaagaatggcttcagcttcttggccactacatgaatgaattttctg

SEQ ID NO: 75505 - DNA, 442 bp, Zea mays
  unsure (1)..(442): unsure at all n locations
acgctttccttgtcgtcatcgaccttgacatatattcactctgagttccagcctgctgcccacttgcttcggtagctaattacagggaacttggtagttttccggtaggcaaagttatagcaaccaaaattatcgtgcaatccatcttttctagcctttgtttgataatgcagctcgtgaacccggcagaagctgtccgcaaatggttccactgcttggcttcggagtgcccagatataaacaataagcctaacgatagcgttaggggtcagctgatgaaaatagataccgaacctcttcagcacctctccaatgatcccatgtagggggaatcttattccagcctttaaaaagctcttgaaaataacaatttcatctttctccggntgtggggtagtctcttctcccccgaagcgcanaagcttcttctgatgttcagtga

SEQ ID NO: 75506 - DNA, 445 bp, Zea mays
tcaagcttcgggaatgatgcccgtatccaatctgcctgagccggatctatattcgcttgccagatgcccccgctgcgatggagcacgaccagcacccaacataatacttccctagttattcagccaagggcgtaccatacagccctcatggtaacactggtttcccgggtggtcactccatagtccaattaatatgcaataatcttgtttaaccatcgggttaacaacaataacgtaaacttaccattaggaacattagtatcataaacaggagtgactgcataaagtttagttgtacaaatagcatagctactaacgtaaagtataatacccaagtttgatcaaagaatatggtagaaaaggttaagtgtatccgaataggtaacacatcaaattatgcatatatatatatatatatcgaataataaactctattaaatgtatt

SEQ ID NO: 75507 - DNA, 436 bp, Zea mays
  unsure (1)..(436): unsure at all n locations
agctntgatcaattaaagaagagattgatgtctccctcagtgttggttatgccagatctacagaaaggatttgatatttattgtgatgcatgtggccaaggcttaggatgtgtgctcatgcaggaatgacatgtgattgcctatgcttctcgtcaggtgcgaaaacatgaattgaactaccccacgcatgacttagaattggcagccgttgtgcatgcactcaagatttggagacactacattatgggaaccaagtgccaagtgtacacggatcataagagtttgaagtatatattcactcagaaagatctcaaccttangcaacgctgttggttggagcttattaacgattatganttggagattcactatcacccgggcaaggcaaatttggttgcagatgccttgagtcgcaaggagcatgttcattcaacta

SEQ ID NO: 75508 - DNA, 446 bp, Zea mays
  unsure (1)..(446): unsure at all n locations
ctgtaagtcaatatttgcatcacttgttcaattacagtctattgttcttttcaatcaagtattctaaagtgaccactttttactaaggtcaattcaccatggatgtggacagtaaggcagtcaaagatgcatgtgttgatatgataaaaggagggcagcgccagatgaggtataggctgaaaaggaagtacttcaccggggttcctgcaaatcaagtgaggactacatcgcctgttccatgtatgactgatgaccaatggaaagatttggtacaaatgtggtctaccccaaaccacaaggtatttgtgatcaagctccatttcatccctcaacataattaactntttcatccttttccaagtgatgtatgtgttgatagtatagtgctttctaaagtcgcatacataaacttagctaggagtgaaagactcaatgatgaattatag

SEQ ID NO: 75509 - DNA, 390 bp, Zea mays
  unsure (1)..(390): unsure at all n locations
agcttataataagagaatggagactagaactttaccatatgtgataatagaaggggagttatacaaacatggagtctgctctccacttctcaagtgtttatccagaaccgaaggtatagagctgatgaaggaaatacatgtaggtttgtgtggatctcacattgggtctaggcctttgctggggaaggtcttcagacaaggattntattggccgaaggcagcttctgatgcagcagatctggttcaaaagtgcgaaaattgtcaaaatgtgcaagagaccagaaacaaccttcgtcgctaacccagttaatacagccaacctggccattgcaaagatggggcctggatttgtaggtccacttccaccagcacaaggcaatttaaaatatg

SEQ ID NO: 75510 - DNA, 356 bp, Zea mays
tctttgcgggactgggaccacagctagctcccgcagatgtcaacacgatgcgcaaggcccaggggatcatcctactccagcataccaaggcggttgccttcctcgtgaccccctaaatcgacttgtgaacattcgcgacttgggccacaaccctcgtcgtcaaagctgtggccatcatcagagcaatctgagaggcagtagtcacatgcggtcatgaagtctcgcatatcactaagatcgcggagcccggagaacatcccaccggagtcgggaccagcctctttctcagaacccagaggccgagatagtgagacggccgtctatcggtcccaagatgaccacatatggtaccccat

SEQ ID NO: 75511 - DNA, 433 bp, Zea mays
  unsure (1)..(433): unsure at all n locations
agctntctttggtggcatgacgaaggtcaatgccttccgaaggtggtcgagaagagttcaccggaggtgggcgccaatgttggggacttgttctcaaatgctatgagttaagaacaaggcaacacaaagaatgttaaacgttaaagtccttcatccttcgaagcattatttcctttaggatataatgactttcggacgaaggttatgaaggacataccttcatcagcataatatataaaaatggggaagaaatcatacgaagtgcaagagatgacataaacaatattattattgttaaatcatttctatcttgttgctatggaaaaatagaaatgatttcgaattacaagtgtaccttcggcttgagggaaagtaaaagtacaagcgtgatgtaaaagcaagtgccaagtcagcgtgaacagtacgtgagtac

SEQ ID NO: 75512 - DNA, 448 bp, Zea mays
agactctagcgtccgaagctccgtcaagtttggtgacgcctctgacgtaaagatcaaaggcgtcggctcaatcgtcttcaccgccgcatctggtgagcacaggctgctcaccagagtctactacatccccgcattgaggaactctattatcagcttgggacagctggacgagaacggttcgcgcgtggaggttgagcacagagtcatgaggatctgggacccctcttgtcgccttcttgccaaggtacgcaggagtccaaatcggctatacatcctcaatgtgaaggtggcacaaccttgctgccttgctgctcgtcgagacgatggggcatggcagtggcacgagcgcttcgggcaccttaactttgaggccctgaagcggctcactgccaaagagatggtacgaggcctgccgtgccttgaccatgtggagcaattctgcgatgtc

SEQ ID NO: 75513 - DNA, 349 bp, Zea mays
  unsure (1)..(349): unsure at all n locations
agcttcttcatggacctatactctaatgatctcaacttagctaatagtttgttgtggcaggcacacctcaagatctcaattatgccaatgttacttcgattagaactactggattttctggtgaccctcttccaacagaccagaaacaacctgcctggaagccctacctgtacaaagggaggcaaaggattctgtttttagcttggagactataaatgctgcactgtatgaccgngatgatgttccaaatttccttttgtttcacgacaggtgacctgtagggctgaactagaaggactacctgatgttctttgccatgactggttaaaactgtcatattgagttatta

SEQ ID NO: 75514 - DNA, 430 bp, Zea mays
gaactatgcccgtatccaatctgcctgagtctgttctataagagcttgccagatgccctcggtgctgtcgaccacgaccagcacccaacataagacttccctagttatttagccaagaccagagccatgatagttctcatggtagcactgttttcccgggtggtcactccatgttccaattaatatgcaataatcttgtttaaccatcgggttaacaacaataatgtaaacttaccattttggaacattaatatcataagcgggagtgactgcataaagttaagttgtagcaatagcatagctacttgattaaatcataatcctaggttaaacaaggagtaaggttggaaaggttatctaaataggtaacccgtcaagttatgcatatatatccaaaagagtaaactttattaaatgtattgttgggatc

SEQ ID NO: 75515 - DNA, 406 bp, Zea mays
  unsure (1)..(406): unsure at all n locations
agctngaattggtccttgctgagtccactttctacactgtcccttaaataaattgaagccttggcaagagatgacatctcatcaaatgaaacatcgcgtttaacaaaataagcattcacatccaggagcagataagcaacagcaggggccttcaaaaccagcctatttatgtggtaatatccactagcaataattgttaaactcttcagcgtgggtgatgtaatcccagaaagctcattgcatccgcaatnttccagaatcaagttcttcagtgtgtgggatgtgacctcttcaaatgtgcacgggcaatctttgagctcgagaacctccanatacgggcaccctgaactgacatgcttcatgaaactggcatccagatatacaccggagaggtgttagtttttga

SEQ ID NO: 75516 - DNA, 450 bp, Zea mays
tctctctcaatcagaaaacttcgaacaagaaaagctgtatcttgatgcataacttgaggccgaagtccaaaagagttcatagctgaaagaatctttgacaagccttcagaataaatgtctggagttcagcaatcgatgcgttcaacggctgaagcaggtgttctattttgttggagccagcagcgagaagtttactccttcggctgaagacctgcctggtgtctttgagcatattgaaggtgaaattaatgatcttgacgaagtcatagctgggcatggtgacttctgtgccctggtagcttctcggggcacagctgttgcctttctgaagtctggctgtgaacacggaaaggttatcaatagacccaacttcagcttgtcaccagcagacttagataacattcccaaccttgcccaaagtattgcgaatagatttataaaactagtatg

SEQ ID NO: 75517 - DNA, 424 bp, Zea mays
agcttgctacaggccttcttctttttctccatagcaggaaccttactggaatactaccccacttaaaaagaatgagggtggaactcttgaatcttggggatttgatctccttgaagtacctcataacaagggtgtcacggggccttcttctgctgttgctgcttgatcaggctacggagaaataactgacacagggttgattttggaagaaccttcttctcatcttctcttcgctatcttcttttaactgaccctttctttctctttgctcttcccactggaggattctatcaaagagtattactatcatacactggaggaaaccgaagactatgaaccatgtgcaacattattatacccaagaatcaccaagcattgtgatcttatgggcgagggagtggaaaatggagttgcttgctatttg

SEQ ID NO: 75518 - DNA, 409 bp, Zea mays
tgctacaagccttctttgtctccatagcaagaactttactgtaacactaccccacttaagaagaatgagtgtagaactcttgaatcttgaggatttgaactccttgaagtacctcataacaagggtgttacggggccttcttctgttgctgctgcttgagcacgctgcggagagatgactgacacagggttgattttgggagaaccttcttctcatcttctcttcactattttcctttctcttctcattgctcttttctttctctttgatcttcccactggaggattctatcaaagagtattaccatcatacattggaggaaaccaaagactatgaaccatgtacaacagtcttcaacccaagaataccaagcattatgatcttatgggcaagggagtggaaaaatgga

SEQ ID NO: 75519 - DNA, 428 bp, Zea mays
  unsure (1)..(428): unsure at all n locations
agcttctaaagggagagcacattttatgattaacaaatgttcattttgagaaagacaggatttgtagcgcatgccaggcggngaagcaagttggagtccatcacccacacaagaacatcatgacgaccgacaggccgcttgagctactccacatggatctattcggcccgattgttacataagcatcggcgggagtaagtattggcttgttattggggatgattattctcgcttcacttgggtattctttttacaggaaaaatctcaaaccccagagaccttaaagggaatcttgagacgagctcaaaatgagttccgcttaaggatcaagaanataagaagcgacaacgggacggagttcaagaactctcaaattgaaggctttcttgaggagganggcatcaagcatgagttctcctcttcctaca

SEQ ID NO: 75520 - DNA, 332 bp, Zea mays
  unsure (1)..(332): unsure at all n locations
attcatttgacggcttgagattatataattacaaataagttttcacattacaaaataagggtgttacatgtcacagtgtgttttccattgaccatataaatagttgttagagatttattttgatttctaacaatatcaaacaacaagtttctttttaagagtgaaatgcaggatatcatggatctgttgtctagaaggatggatcaaataattaagaagatgaacactacagtgagtgtgcgaccatcatgttctattggtactctgacatcattgtcaccattccatttatgtactatagagtgtgaacaacangtgctcagttctcaaat

SEQ ID NO: 75521 - DNA, 318 bp, Zea mays
agcttaaacgtacgagatggctgttcacgtattggagcgttgattgtgggacatcaaataaattgggagcacacattaggagctgacggagatagggttttctgctattctctcaaataaagctttaagagtaatgattgggaactattggtgatgctctaaaagaaaaaaaggattagatacgatacgtatgaaacatatgtaacatgattttctaagtctaaaatactatttcaccgatacaacctatataaatgagtcatgtgttgagagggatgtgaataagatactatgcttaaatacaatagcggacctaac

SEQ ID NO: 75522 - DNA, 385 bp, Zea mays
tctactgtactgattcaagaactacttctacacttcgctctgcgtatggcttacaattgacttcttctgcggctttatatggctatcgtttttagaagctaactgaaggcgccggatggaaactcactcttgactcgccatctacatatcataacttgagctctgccgtgagcaaaagagctctagaaatgcatagagcaatgaagtgactccgcaacaatagattcttaatgaagtgttccccaatagattcgtatttcttctagcgctcgtgatgcgagattcatgatatgagattatatacgctttacccgacgcagatagacccaaagtccagaatgaatgattggagaaagcaatgtctaatcactaagctaagtctagt

SEQ ID NO: 75523 - DNA, 123 bp, Zea mays
agcttacggctccttggggaagctgtccaaaggctcggttgaggctgaaggtctctggaaatggctggccgcggtggccggcactcgggtcgctcaggcgggtgacacagagctcgccggagc

SEQ ID NO: 75524 - DNA, 424 bp, Zea mays
ggatcttggtctcggacagtacctcactgacgaagtagactggcctcaagactggcaatgcatgcccctctgtttgtgtctcaaccacgatcgcggtgctgaccacctggctggtaacggtgacgtacatcaagagggcttcttcagctgctgagggcgccacaatgggcacggtcgtgaggatcgccttcatgttcccgagggcttactcattctcatgggtccaagtgaagcgctccacctttcttaatagacggtacataggtaagcctctttcaccgaggcgcgagatgaagcgactcatagccgcgaggcatgccatgaccctctatacgcctatcaagtcgttgatgggccacatgtacgtgatggccgcgattctctccaggttggcctcgatgccctgctcagagactatgaattc

SEQ ID NO: 75525 - DNA, 437 bp, Zea mays
  unsure (1)..(437): unsure at all n locations
agctnggttggtggaaaattnttcaccgacatctggtaaaatggcggtcgggagatggctcaagaaatcataaggagaagtgaaaaaggtattcacgatgctagaaaagtggtggaggccactgagaaaagtgcggatctcgagaggcgaataggtattgactactaacttttgactntatgttgtaattntatgacttcggacttatttacactttgtaacacagccgcagtatctcctcccccagagcccgccgagccattggcggaccccaaagcaaagggggatgatgaaattagaaaaatggccgaagctattatggataaagttgttgatcaactactaaacgaagctgcagaagtagttttaagaganaaatagctggtatttgaaagacatttgaaatgtaatatntgctggacaatatgtgtaatatt

SEQ ID NO: 75526 - DNA, 443 bp, Zea mays
  unsure (1)..(443): unsure at all n locations
ngagctcggtctatctgcaatgtcaaaggatgatcttgcatatagtcttgcttataatagcttgaaggtatatatacttttgttgtaaaataaattatgtttgtaggttttcttgctatcgctatgttctcacatatatttctttgtgtttagtgattaattctatataaagctttaagggctcaaaaggaagcagatgatgagagctgccagatagctcttggaaatcttcgatcagaggtcatcacattaaggaacgaagctctggaaaaagataagatactgttttgcttagtggacaagtcgaagacttgcaaagccaaacttattgctcaagacgaaacccataaagctgaagttgaagatttgaagaaaaaactttgcagaattgaatgaaaatttcgaagttgcaaaggctaagcaagaaataagtgaaatggaaa

SEQ ID NO: 75527 - DNA, 381 bp, Zea mays
gaccctcagtcacctgaggcatgcatgcctgcccgaaggatgaattcccactactctatgtttatttttagtcgatgcatcagcgtcttcagagctcatgagactgttatactgtaattcaggctatcaccaaatttggatgaagcaggaagatgagccgaagactatcttcataactccaagtggcacatattgctatcttcagatgcctgaggggctcaaaaacgctggaggaagtttcagccgaatgactgcgaaggttcttccatctcaaataggcagaaacgtgctaacttatgttgatgacatcattgtcaatagcacgaagcaggataatcatattgcttatctgcaggagaccttcgccagtttcagacaagc

SEQ ID NO: 75528 - DNA, 472 bp, Zea mays
aaggctctttctcccttctccccccccagaggtttgatactcataacttccttacatattaacttcacccctattgttgatcaaccttacacttcacatgatcttctatctttggtgagtggacgcacaggatgggccaggacttattgagctatgatcttttgtgagctcactctagtgatatataaccccccagatgaaagcaagtggtccaagaggagccgccctacaatgaagaatacgagttgatctagatggcgtctctcagtcacatttgtggcgtccaggaagaatacttagtaagctctattattactattatcatttatatttgaaagactaacggtatgcaattacgatactagagacatttatctctatacactacgaggaatataagcgaagcccttcttaagcgcacatataagacgcacccggctctatccgttatatgcgagggtgacaatcggcg

SEQ ID NO: 75529 - DNA, 438 bp, Zea mays
  unsure (1)..(438): unsure at all n locations
agcttctaaagggagagcacattntaggattaacatttgttcattntgagaaagacaggatttgtagcgcatgccaggcggngaagcaagttggagtccatcatccacacaagaacatcatgacgaccgacaggccgcttgagctactccacatggatctattcggcccgattgcttacataagcatcggcgggagtaagtattgtcttgtaatagtggatgattattctcgcttcacttgggtattctttttacaggaaaaatctcaaacccaagagaccttaaagggattcttgagacgggctcaaaatgagttcgccttaaggatcaagaaaataagaagcgacaacgggacggagttcaagaactctcaaattgaaggcttccttgaggaggagggcatcaagcatgagttctcctctccctacacgccacaac

SEQ ID NO: 75530 - DNA, 460 bp, Zea mays
  unsure (1)..(460): unsure at all n locations
ntatctgcgatagcttcggcactgctttggagaggatctgtctatgtgtttctttctttacgatcttcggcgacgaagcatacccccaacagttgacaagacttaagaatgattacactagtgcacgccaacaacaagatacacacgccaacaacgagatacatgactataatctagtgacacgatatgggcagttggccctatgacaagcagggacggtagaaggcatacacatgtaaaaatactaaatatttggaccaaaaaagaggtggtagaacaacattgagttaaaagtcgaaaacatctaactccccacaagaatattaggtaggaaccgccaaactcaagctaagagacttgaaaacaatcctacaaaggtggtaccagtataagttagtctatcttatcttagtgagtatntagtatggctttgctctacttcagagctgtggtggacaga

SEQ ID NO: 75531 - DNA, 436 bp, Zea mays
  unsure (1)..(436): unsure at all n locations
agcttggatgaggtgtcatcatcatcatcatccgagctatcatccgagtcccattcaactaagtaggctntgccatctttcttcttgttatagtatttctttttcttcttgtcactttcatctttgcccttcttcttcttacttggacaattcatggcaatgtgaccgggttccccacactcaaaacattttctatcattgaaagcatttcttctagatgtttgacctcttctaggttgacctcttttcatcttcatgaatttattgaatttccttacaaataaagccatgtcaccatcactctcactttcattttcttcatcattgctatcttccttttcaattgcctttgaggccttggctttgagagcaatagaattcattttcaccttctttgccaaacttaaagcatcggcttgtgacttcttaaatatat

SEQ ID NO: 75532 - DNA, 394 bp, Zea mays
tcaagcttctcttggacaagtgctgcacttaccgctgagtgcgaatctgccacatatcataaccaaggagcccctggcgtatgtggagttaatgttgttagatctatcaaatactgcttcagctcttcgaaggctttctgctggattggtccccattgaaagacttcggctgacttcagcacttcgaagaatggtaagtttctttctgctgatctggatatgaatctgttgagagatgccaaccttcctgtcaatctttgagcccccttttttgtacttggtggttccattcgaagtatagcttcgattgtgcttgggttagcctcaattccctttggtgaaactaggcaacccagaaattttcccctctttactccgaagacacatttttctg

SEQ ID NO: 75533 - DNA, 270 bp, Zea mays
agcttgatggcccctccacgtccgaagcatctccggtcgcattcaagcgacggaggagaaagatgaatctacatctaggtagaccacccatccacgccttaaagcttgaccattaagagatgacgcttattaataagagctttcggtcaattctcaagcaaaggagggggaaggattaccaaccccgctccaagaaagtttgctacaagtgtggtaagcccggtcatttattgcaaaatgacctatttctaatgacagtgacaggggtga

SEQ ID NO: 75534 - DNA, 332 bp, Zea mays
ccatctcgatacgaccaagataactcttactatgtgagaactccgctgacgggggacattcatcccattcttgaggcgaagtccataacacacgcccacgacatatcttcaagtatttggatgactctctcagtctgtgcactggcttgaagatgatcggtcgaaatgagcagctatatggtacccagggatttatgaagctcttgcgagcaagtggataccattagctgtcctagaacacacactataggcttgcgaacaccatgcaaactgaaaatacaggcaatgaataactggacatatacagtgaccgagtgatctatcttgactgg

SEQ ID NO: 75535 - DNA, 430 bp, Zea mays
  unsure (1)..(430): unsure at all n locations
agctnttctagaatntnttctatcatgatacaaaaggcatggntctttttagcactagtagccataggggccttccctttctccttagcgggaatgggagccttatggcttgttaagttcttggcttccctnttgaagccaagtccaaccttaattgaggggtgtctaccaatcgtgtaggcatcccttgcaaattttagtttatcgaaatcattcttgctagtcttaagttgggcattaagactagccaattcctcagttagtttggaaattgaagctaaatgatcactacaggcatcaacatcgaaatccttacacctagtgcanatctcaacatgttctacacaagatgttgttntaccagaatnttctagttagcatttanatcatcatttatgctctttannactagcaatgaatcatgacatgt

SEQ ID NO: 75536 - DNA, 449 bp, Zea mays
  unsure (1)..(449): unsure at all n locations
ttaacccctcctcgcgagaccttgaccgtctccttctaaccataatgaatgagatctcgaatgtcatacttgatgcatattcactataatggttcccttgtatgatgtactgtttgcttcccaatttgaatggatgaatgtatgtatgctagcaatcgcatagagaacgatccggtcgaagagcccgaggaactcacaggagaagcccctgagcagcagtcagattggtggacgcaagtgtcctttgacctatctctgtcctattcattctttaatacacctcccgctttacacatttatacctaaagattgactagcttttgtagtgcatgtccttgtttacctacctgngttggattattattacctagctatatgctatagctcaactctaatcaatgaacatgatgagaattatctatgatacgctgttgtccatatcttattat

SEQ ID NO: 75537 - DNA, 434 bp, Zea mays
  unsure (1)..(434): unsure at all n locations
agcttgtcagaaaagctatgcagataaactactgatgcccttatactttctggttggagattatgtttacctgaaagtttcaccaataaagggtgtaacacgtttcggagtcaaagggaagcttgcaccacgatatattggtccttttcctatccttgaaagatacggaccagtggcataccgacttcagttacccgaaaccttgtccgccgtacataatgtgttccatgtgtcacaattgaagaagtgtcttcgggttccagatcgaaccattgaagtgacagatgttgtcctagaaccagacttgacatattcagagcatcccattcgagtcttggatcaaaaggacaggattacccgaagaaaaactctcaagttntacaagatacagtggaaccaacattctgaagatgaggctacttgngaaactcaag

SEQ ID NO: 75538 - DNA, 444 bp, Zea mays
tgtgcttgttctcagtaagcttgacatagaaccattctgatttccagcctgccggccatttgcgttggtagctgattacaggaaactttgcggttttccggtaggcaaaattgtagcaaccgaagttttcatgaagcccatcttttctggcctttgtttgataatgcaattcatgaactcgacagaaactgtcagcaaaaggctccactgcttggcttcggagggcccaaatataaacgctaagcctaacgatagcgttaggagttaactgatgaacgtagatgccaaacctcttcaatatctccgcaacaatctcgtgaacagggaatcttagcccagcctttataaagcttttgaagatgacaacctcgtccttctctggcttcagggtggtctcttcttccccgaagcgaagtagcttcttctgatcttcactgaaaaaac

SEQ ID NO: 75539 - DNA, 434 bp, Zea mays
agcttgaaaatatctagatacagtccgttttatcttggcttcctttgaaggattctctggtaaaaatattcctcgtggagaaaatgaatatgctgatctattggccaagtcagcagcacaagggttgcctttaccttcggaagtgtttttcgaaacaataaaagcaccttcggtcgagcttcttgaaagagcggtcctcaatatatcccctgtctatagtgaagattggagaactgaaatcatctctttccttcagggtaattttctttcagacgacgaagcttacaacaggaggatagaagcaagagctcgaccatatgtcatgatagaaggggagctatacaagcgtggggtctgtccccgttgctcaagtgtttatctagatccgaaggatagaattaatgaaggaaatacacgcaggcctgtgtggatct

SEQ ID NO: 75540 - DNA, 421 bp, Zea mays
tacccatgacgaggcatgtgaccagttaaagggtcctctttcattatacctacatcggcatggtgcttaatcgagtcatacggagacactacaccgagactctcttatcgtgcaagtcacccgcctggtctcagcttaatcatttcaaacctaaagtttgggacctggcagaggtacatcttttccgatgttgaacccatcatggccatgatgtatccaccatcaagttttattttcaaaaacatccctcccactttgcaacatcatcttttgtgaaaacaaagcattctgtttttttagactaagcataagaaaaaccttctgtaaaacacgggatcaaaggaatgtcatcaaatccaacgaaggaaatgcaggaattgttttagcacacaactcctatcacctaatgcatcaagcaagt

SEQ ID NO: 75541 - DNA, 383 bp, Zea mays
  unsure (1)..(383): unsure at all n locations
agcttttgaaaggagttttatctcatgatattngaagcattgttagtcctcatgcaaatgcaaccactagatgctctatgaggcactaagttttacacagatcaaagtcattgacccctcttaatagtacgactatctaacctactaatccggtcaagtatcttctctaaactcctgaagaccggtaaaaacaaaacctatgttatacctttgccttcacttgatccacaaccaatgcttatgaatctccaagatttcctgttctatgtggtccagccctgcattcttatttctccaagaacacgtagtccacaaacagttgtcattaattaccaaaacatcactaaggggcctagatgattcacacccggcagcctcaactt

SEQ ID NO: 75542 - DNA, 374 bp, Zea mays
  unsure (1)..(374): unsure at all n locations
ntatcaaatggacgtgaagagagctttcctcaatgaaccaatcaaagaagaggtctatgttgagcaaccttccggctttgaagacagtgagtatcctaaccatgtctataggctctctaaagcgctttatgggctcaagcaagccctaagagcatggtatgaatgcctaagagatttccttattgctaatgacttcaaagtcggcaaggccgatcctactttatttactaagactcttgcaaatgatttgttcgtatgccaaatttatattgatgatattatatttgggtctactaacgaatctacatgtgaggaatttagtaggatcatgacacacaaattctagatgtccatgatgggagagttgaagtatt

SEQ ID NO: 75543 - DNA, 91 bp, Zea mays
cacatcaaagcacacatacaaagctcacctccaaaactatctcgtctataagcccaagaaacccacaatataaacccctgatcagcaatcc

SEQ ID NO: 75544 - DNA, 423 bp, Zea mays
  unsure (1)..(423): unsure at all n locations
agcttactttngcagctgtaactttgatttgatagtacatcaactacacacactaacacatcgtgggtttgtacatcaactacgcacactaacacatcctatatcatcatgcagctttgaggatggactgaagcttgtcaagctaagaggagaagctatgcaggtttgtctacagaaacactatgagataatttgtttgattctgtccattgaattgtaatgttcattatctatggtggatgtagtctacagtaatgctaatagattgttcttttgtttgattttgtagattgatttctaatgttcattatctgtgtaggatgcttcagatgctgccaatagtgcgatggttagtgtgattggtctggattcaaaanaggtgcaagaactatgtgatgctgcttatgacgaagtanatgaaaa

SEQ ID NO: 75545 - DNA, 434 bp, Zea mays
tgccttcgcttcagtttatcatccgcagtccaacggggtcttggagcgcgccaatgggaaaatcttcacagctgtcaagaagatgctcctcgatgaaaaaaggcagatggaccgatttgttacctgaggcagtctgggcgctaaacacaactgagtgcagggcgactgggttcactcctttccgccttctatacggatcggaggccatgaccccgcaagaaataaagcatgggtccccgcgaacagttccgtcagccgtcaccgacgtggacgagccaacttcaaaggatctcattgacggagaccgggtctttgccctacaggccctaaacaaataccaagcccagaccaaagcatggcgcgaccatgcagtcattccgagggagttcagcgaatgtgacctcgtactcgttcgaacagctcggacggagtct

SEQ ID NO: 75546 - DNA, 439 bp, Zea mays
  unsure (1)..(439): unsure at all n locations
tccttgatctcgtanggcccgatgtaacgaggagctatcttgttcttgatcccgaatctctagacacccttggttggtgataccttgagataaacatgatctcccacctcaaactgtagaggcttccgcctcttgtcatgatagctcttttgcctggcctgagcagcttctaagttcttcttgatgatcctgacctttgcctctgcctcaagtaccaagtctgggccaaaaatttccctttctcctgcttgagaccaatttagtggggtcctacaccttctcccatataaggcttcaaatggtgccatcttcacactggactgatagctattattataggaaaactcagccaaggaaagacacttgtcccaatccttcccatagtgtagtgcacatgctcgcaacatgtcttccanaatctgattgaccctttctgtct

SEQ ID NO: 75547 - DNA, 442 bp, Zea mays
  unsure (1)..(442): unsure at all n locations
agggagagcacattntgggactaacaaatgttcactatgagaaagacaggagctgtagcgcatgccaagctggaaagcaagttgggtcacatcatccacacaagaacatcatgacgagtgacaagccactggagctcctacacatggacttatttggcccgattgcttacataagcatcggcgggagtaagtactgtctagttattgtggatgattattctcgcttcacttgggtattctttttacaggaaaaatctcaaacccaagagaccttatagggattcttgagacgggctcaaaatgagttcggcgtaaggatcaagaaaattagaagcgacaatgggacggagttcaagaactctcacattgaacgcttccttgatgaggagggcatcaagcatgagttctcttcttcctacactccacaacanaatggtgtagt

SEQ ID NO: 75548 - DNA, 359 bp, Zea mays
cagcttctagagggagaacacatctccggactaaccagtgtacattcttataaagacaggagtagcaacgcacgccaagcgcgaaaccacgttggcactcgatgtacacacaagagcatcttgacagactgcaggccactggagctcctacacctggagctattctgaccggcgcttacataagcattggtgggagaaagaactgtctatctattgcggatgaatactctcgcttgcctggggatattgtgcgacatgctaaatgccaaacactatatacttgagaaggacgattgacacaagcctatgccgagagatgcttatagaccaagagtgcgatgatctacaatgggacggag

SEQ ID NO: 75549 - DNA, 346 bp, Zea mays
  unsure (1)..(346): unsure at all n locations
gctgcaagaacagatgtgatgtgngagtgttttctgcagatgtcacatattaggcgcagaggaagaaagcgtgctcaacatgagcatgtatcaccgcaggatgatgcaccccaacaactgcaactgtcaccaccgcccccggtgaccattgagcagatgttcctaatgcagactcaggtggtccaagccattgcgttaaagattggcgcaattaaatatgtggaacaggagattaatcacccacctgatgcctatatgccttatatgccttaaaactatttgtttgtaattatgagatgtcaccccccagtgctcgctcactcttctgaccctatggatgctaaag

SEQ ID NO: 75550 - DNA, 482 bp, Zea mays
  unsure (1)..(482): unsure at all n locations
agtattntcatctaggagcttggtgaagatattatctatttggttgcgggtgctaacataggcaattttgatatccccttttgttggtgatatctcaaaaagtgatatcggatgtctatgtgagagcacctagagggaggggtgaataggtgatcctgtgaaacttaaacttatagccacaaaaacttgttaagtgttagcataataatcgccaagtggctagagatgagtctcaacaaaacacaataccacaagagatcaaacacagagatgacacagtggtttatcccgtggttcggccaagaccaacgcttgcctactccacgttgtggcgtcccaacggacgaaggttgcaatcaacccctctcaagcggtccacagaccaacttgaataccacggctgtttgctttgcctttcaatatcccgttggcgaggaatctccacaacttggagcctctcgcccttacacttgagagtcaca

SEQ ID NO: 75551 - DNA, 425 bp, Zea mays
gcttctgccacattcaaatgcgaaacccataatccggcgactcgtcttttgtttctcaacttggcaacgccacaggccagcctccgcagctgatcggtgcatgcatgagtgcggtgtttgatctgcgcacctgttcatctcatcggttaccagacgcccccggctgcttgtgcttgcattgatcggtcgtggatggagatggaagaccctgccggccgcagctgcgtccaaaactccatatgcgagggcacggaccgggtgtgctgccgaaaggccgaaatgcacacaccgtcagtttcaatcaaagaagaagaagaacttgtgctttggctttgattggttgtttggctgcatattggtgaagcacacccagcaggtgttctataggtgtgccttcatgggtgtcccagcaatactactccctt

SEQ ID NO: 75552 - DNA, 208 bp, Zea mays
  unsure (1)..(208): unsure at all n locations
acactngaganataaaatgagaaaggaagaatgctatcttagcgacaagagcaacaaaagaatacaaacgatcctctcataatcccttaagcactagcgttgattttgggaactttgagtgaattgattgctttgattgtgtcttggagtattgcactttgctcttgcaatgaatgagaaactaagaatgcttggatagctttgaatg

SEQ ID NO: 75553 - DNA, 108 bp, Zea mays
gtgtggaggtgtgagaagatctgatctctctggtgtgtcttgaattcaatgctatagctcttgtaaggtgtagaagtgtagaaacttggatgccattgaatgtggggt

SEQ ID NO: 75554 - DNA, 385 bp, Zea mays
  unsure (1)..(385): unsure at all n locations
actcagcttcgggcacagcctccacctncacctncgttgcagcaaggtcagcagccagaagggagccaatatgctccgcatcaaagggacttcagagaacaatccgaagctcgcacggtcaacagcactgtgccagaatcaaagcacatctattgacaaatatcctaccttaatagcaatctttttcattcagttttatttcctgtaataaaggacattgattaggtttcatgtaattagtttcgttgatttctacaagaaaaatatgttttcttcacaagattgtggtaataaaaaggactttcggactatcgaaaattttccgaagcaacaaaaagtcgttctaaggaacgcagagtaagtttgacgaaagtcacaaaaagtc

SEQ ID NO: 75555 - DNA, 326 bp, Zea mays
  unsure (1)..(326): unsure at all n locations
gatcactcttctttagcgtaaaatgtggctgttaatcactgcgacatgctcaagttaatatgatgggacctaataagtatccctagtattggntatcccacaccttgctgacaaaagaactattgggtggtttgctatatctctacctagtgttgggtaattaatgttacattatgatcatgttccagctatgctgttggtttaattattcatgacaagatcattgtgttaattggacatggagcgaccaccccggagaacaatgcaaccacaagggtggtatgggatgcccttgggtgactaaatatganagctactagaggact

SEQ ID NO: 75556 - DNA, 330 bp, Zea mays
tgtacccaggaccacgaagaataccttcattcgtatgtccgaaggtttctgcgtctgagggcacaggcgccaacagtgcccaatgaaattgtcattgaggccatgattaagggacttcgaccgggaccttcagcgcaatactttgccaggaagccaccacaaactttggagaagctactccagaagatggacgagtatatccgagctgacaatgacttccgccaaagaagggaggaggcattcaggttctctgaaatgaccacgggcttcggaggaagatttcatcccacgcacgttaggtcaattcataacttcactcagaatgatgat

SEQ ID NO: 75557 - DNA, 447 bp, Zea mays
  unsure (1)..(447): unsure at all n locations
tgcaagcttctaaagggagaacacantttgngactaacaaatgttcantttgagaaagacagggtttgtagcgcatgtcaagcagggaagcaagttggtgttcatcatccacacaagaacatcatgacgaccgacaggccactcgagctcctacacatggacctattcggcccgatagcttacataagcatcggcgggagtaagtactgtctagttattatggatgattattctcgcttcacttgggtgttctttttgcaggagaaatctcatacccaagaaactntgaaaggattcttgagacgagctcaaaatgagtttggcttgaggatcanaaagataagaagcgacaacgggacggagntcaagaactcacaaatcgaaggcttccttgaggaggagggcatcaagcatgagttcttttctccctacacgccacaacaaaat

SEQ ID NO: 75558 - DNA, 236 bp, Zea mays
actattaaccccgctccaaaagggtgtgctacaaatgtggtaagcccgatcattttattgcaaaatgttctatgtctagtgatagtgacaggggcgacgaccagaggggaaagaagaaggagaagaagaggtactacaagaagggcggcgatgcccacgtgtgtccggaatgggactcccaagagagctccaccgactcttcctctgacgaggacgccgcaaacatcaccatcaac

SEQ ID NO: 75559 - DNA, 350 bp, Zea mays
ccttaatgccaggggggctctcactatagagcatgcctctagcacatttgaatatttcattctcaacttcatgctcattgattctagcagctaaagtagctatgtgatcactttgtttgttaattaaagcaaggtgatcatggatagcatctacaataacatctctacatctagtgcaaatgggaacatgatcaacacataatgtcaaggcgttgctagcatttcattcatccatcttatcattccatatgacactcttctttctaagaatggaaatagaaactattgggggccttctgcttcccgatggtcttaaaaacataacttgacaatggtttccgagtgaatat

SEQ ID NO: 75560 - DNA, 448 bp, Zea mays
  unsure (1)..(448): unsure at all n locations
tgcatgacaaanacgtgaatgccacaaatctgactcatataataaacagaattcaccgttttattacacacatcatgtagtgataagcggaacaaacctncacagtcatatcctttaccaacaaaagtaccatgtttcgacacaacacatttatttgactcaagaacaactttgtacccatctcgacatagcacagaagcaccaacgagattcttcttgatagagggcacaggctgcacgcttttcaatggcaccgtctttctcgaagtaaattttagaattaccgtaccaacaccaagaacatgaggacacgacccattttctattaacaaggcgccagacctcccgacctggtaggaagagaacatagaggcatcagcacacacatgaatgtttgcaccactatccatccagcactcaggtgaattacanantngaagaacaaatg

SEQ ID NO: 75561 - DNA, 428 bp, Zea mays
  unsure (1)..(428): unsure at all n locations
agcttgtaatgtctagccaacatattcctgtttctttccctcccatgtctctttcttatttcacatacttgcataatgtttctgctggttgcattcctgccacgagttccaaaactaatagattcttcacctattgtttctatggctttgtattggcctaatttatgaagttgtgaatcctttttatatttttaatcttcctagtgatttattattttttggttgtcaatatgtaaataggcagtgtcatggcttggattttctatccattttcttgtatctaaccatctgtttaaatacatttacttaaccctccctagggtgccattgaattggaagggttggagaagaaagcaaaaaccagtggtgcatgtcagcttgttgtgaacgaacctcaagaagaanttgtagtgaatatatatacccct

SEQ ID NO: 75562 - DNA, 428 bp, Zea mays
  unsure (1)..(428): unsure at all n locations
tctaccatgacgtgattgttcttggccggagagaagagttccatgtctgggccacacttcggactgccatgatgaaggactttgccatgactgcggtattgcccccatacgaagatatagttgcttcgtagctcatcaaaaactgcttcggatctgagtgcccatcatacatgggaagctgaggtagcttgtatgatgagggccatggggtagcctgcagttctgcagatagaggagaagcatcatcaaaagcaaaatttccctgatggaaatcgtcataccaatcatcatcattgtagaaattgtcctaacgaagctctctntgtggaggtctacgatcctggtcatcttgagtaagatgacgtatttcttcagcagcttcatcgatcttcttctttagatcggagagacgaagcatnntctctctc

SEQ ID NO: 75563 - DNA, 422 bp, Zea mays
agcttctgacttgtgggccctgtttggtgtcctgtgcacaccggacatctactgttccttatccggtgtgccggaatgggcgcgcctgacatctgcgcgcgcagagcgcgcattaaatgcgcggcagagagctgttggcgcggagatggtcattgctccggagtcgcaccggacagtccggtgtacaccggacagtccggtgaattatagcggactagccgttggagttttacaaagctggcgagtttctgaggccgaccacccttggcgcaccggacactgtccggtgtacaccggacagtccggtgaattatagcggagtcgcctcttgaacttaccgaaggtggcgagatggcgttggagttctctggtgcaccggacactgtccggtggtgtaccagacactgtccggagtacacctg

SEQ ID NO: 75564 - DNA, 440 bp, Zea mays
agccccagaaatgactgtcgttttcgttctattcggaatcaaaacaacaaagaaaaacgtgatgcgatgcacatcttttcttttcttttcttttctttgattcgatgggcacgtcttccgttttctcgaatctggaggggagcacgcacatctgaatctcctgatcactagttattttttgttctggtttattattggacacatgaggccggtgtcggagaccaacaatgctgtatcgactcatgtgaataaggaaggtgggcagcatgtcgcgttgcgtgtgtggtttcgtgtacgaagaatcgagtgctagtcctgctccttccaagagcgagagcgagagcgaggcttaccacggaatatatatggggtacggtcagccccagccaccgcaccacgaggatactccatcgccgcagtatataatattagtgcccaat

SEQ ID NO: 75565 - DNA, 159 bp, Zea mays
  unsure (1)..(159): unsure at all n locations
atgcaagcttaatttttaatgcaacggnagngattacgtggcagggggcaccggactgtncggtgtgcaccggactgtacggtgcgccatctaacagacagcctcccaacggtcacatttggtggtctncncctctaggatacagatattgtactattc

SEQ ID NO: 75566 - DNA, 472 bp, Zea mays
  unsure (1)..(472): unsure at all n locations
tatcattaggcacattgagaaacaatntcattacacaattagctatatgaagacatggagggataatcaaaaggtgtttgagatggtacatataagacatctgatgataatttgcctcgtatgttgtcttgtattttcagcttaagaggaggaccaatcatccttcaacgagctttgttttgtgtcggtgcatgtgtcaaacctttccaatcatgtccactaatgttatgcatcgatgaaacttcttcgacagggaaatgcaaatggactatcttgactccaattgggaatgattgcaacaattagctggttcatatggcttttaccttcgttgagagagaaaacttttagctggtattggtttcttggacgggtgaaaattcatgtcattgctgaacaccctatgaatgcatgattttttggcagcaaccaaagatcttcaatatggaattgttccatcatcntccatatg

SEQ ID NO: 75567 - DNA, 381 bp, Zea mays
  unsure (1)..(381): unsure at all n locations
gtgtacaaantgtctctaagattcattttgcatcggacagacatgcggagtcaaatggaccttgtgaaagagctaacgacattataatgatgggaataatgaagtttatcttcaatcagcccataggaaagtggccagatgaattgatcaaagtggtgtggatccataacacaacaatatcaaggtcaacagggtttacaccatataaactattgtgtggtgacgaagcaataacttcagaagaagctaaggcaggatcaataataacagtggcttcggcagaggacgaagctgattattctgtggcaaaatatgctatagaaggtatcatgcttcacgccgtggagaatatcaataaatacctagccgcaacaataaaat

SEQ ID NO: 75568 - DNA, 466 bp, Zea mays
  unsure (1)..(466): unsure at all n locations
tttgccctcggngggggtggacacgagtactaattatgcttattttctacccctggaacatccattcacagatgtgtcagtggctagactgtttcatgatcagatttataaacattatgggctttcaaaatcgatcgtgttggatcgtgataaaattttcctcagtcagctatggaaagaactgtttcggttggctgatgtccgtctgcatatgagtttggcgtatcatccctaatcggacgggcagaccgagcgtgtgaatcagtgtcttgagacctgttttgcgctgttttgttcacgctcgtcctactcagtggagccattggctntcggttgcctcagtttggtacaactcatcgcaacactcttccattggcgtgtgctcttttgaagcttatatgggtgcaagcctcgacaagttgagattgctcttgatactgtcattcagtcctcaaatctcgcttca

SEQ ID NO: 75569 - DNA, 465 bp, Zea mays
  unsure (1)..(465): unsure at all n locations
tgcaagcttntttcccagccaactctgcctctgttcgtgctgacaccgctgcctccggctccggctcatcacagagcggccgatggttcctttaactaagcaagagaagcctcaggcggcaaggccgaccaagccgagggactcctacgcctccgggatacggatacctcactcgtcaccttcgcacgaggcaactcacacttggttaagcggttcagttagccgacaggcgagtcctagtgctcgaaatgaggaaaaaacatggcttcacgccaaaatacataaatgttcaggccccgacagccacgatgaacaaacaccgacactccaggtgccattacaaacggaactccggttccgcccccgcgggtatgaacaacctccacatcggagagcctgcgggacgacaaactcctggtgactcgctagcgacctctgcagtggcagcgatggtcccgggacgga

SEQ ID NO: 75570 - DNA, 484 bp, Zea mays
  unsure (1)..(484): unsure at all n locations
tctcctggacaagtgctgcacttaccgctgagtgcgaagctgccacatataataataaaggagcccctggcacaggtggagttaatgctgttagatctattaaatactgcttcaggtcttcgaaggccttctgctggattggtccccattgaaagacttcggctgacttcagcacttcgaagaatggtaagtttctctctgctgatctggatatgaatctattgagagatgccaaccttcctgtcaatctttgagcccccttttttgtagttggtggctccatccgaagtatagcttcaatcttacttggattggcttcaattccctttgttgaaaccaagcatcctagaaatttccccttctttactccgaagacgcattnttctggattcatctttaaaccagcttgtctgaaactggcgaaggtctnctgcaagtcagcaatatgattctcctgcttcgtgcttttgacaatgatgtcatc

SEQ ID NO: 75571 - DNA, 433 bp, Zea mays
  unsure (1)..(433): unsure at all n locations
agcttagcttaccctacattactgggtgaatattatccaagactttttcttgactagggggtaagaactgtgcaaacagaaggaattagaagcctttcaaaagctcaaagaaagctntatgctcctccagctggctcaggcttcatttctggctttacatccatctcaggccgatcattgatagacaaaatttcatcaacttgtggttccccttttggcccaagctcatatttatcagcacaggcaagagtagtcgatgattataccatgtccgagacaataatgaaagaaattactgatggagatccttcangaatgctcgttgttgtaactggtgcgagtcatgtaatgtatgggccacgaggaattgtagtttttttttataaaaagtaacttcatttgataacatacaagagagggtatgatatttttt

SEQ ID NO: 75572 - DNA, 474 bp, Zea mays
  unsure (1)..(474): unsure at all n locations
ttatcacacacgagtgctacctaaggtacccgcgaactctttctctaaagtgtccccaaattccttgagaaggtcatcaaggctggccagggacatgtcctcggtgtcggactggttcctgtgagggttttcttcctgccgctcagtctgacatcctgagcttttggtcttcttgcggattttccttgcggaggcgagcttcttcagtaccttgtcgtagtccattttgagggtgcggtaggcttcacgggtgttggtctcttcgccttcagctaacgagaggctctcttggagggacgctntttcttctgaaagttccctgactntctgctccaggctttccacctgngaggttanggaggtgcantgganggcgaggtcatcatattggttataagggtatgaaggattccaccatgtagacaatggtgggatcattctcaatanggatctcctctgatagggcctgaagtc

SEQ ID NO: 75573 - DNA, 416 bp, Zea mays
  unsure (1)..(416): unsure at all n locations
acaccaaaaaccattccttagccagaacataaaaatgatgtcaagggacaacacggtgtttaaggaggaaaaatgactaccaaaactcccccttacttatagaacatatgcactatcaacatttaggtaagatacatatatgcaaaaagattaatactttcttttgtacctttaccatgttgtagtgtacttcccatcttgaaagtatttaatctctcgagagcttctccacacttgtgcctcattctttatcctaactttttcttgttgctaagacaccaaccttagaacaagttatagtattgtgcacaagaagaaacttctattctaatgattatcagaagatgtcaattgaagcaaactatcaccgctactaattgaaagataccaantgcaaaagttcatttattatcata

SEQ ID NO: 75574 - DNA, 358 bp, Zea mays
  unsure (1)..(358): unsure at all n locations
gcacctccggtgtaaaggtggcgccttgatctaagttgacaatatgtttggagtctttgatcattagttcaaatctcacaaacttgccaattacttcctcgggagacatcaatttatatctaggatctccatggattagttgcacttgagtgggattacgaaaaatgagagatcttataataaccttgaccatgtgatggtcatcccattttgtgctcccgaggttgcgcacttggttgaccatcgtcttgagataggtggacattgcttgtggctcctctcctttgtganggacaatnaccaagctctccctcgatcgtctcgtgggtggtgaattttgtcacctcgtccnctcatg

SEQ ID NO: 75575 - DNA, 428 bp, Zea mays
  unsure (1)..(428): unsure at all n locations
gctttaatggttagtgagagagatgtgttgtgttcatttgagctcttgcgcttggattgctttcttctttgattctttcttgtgaacaaatcaattgtaaccaaggcaagaggcaccaattgtgtggtggcccttgcggggaagtttgttcccgtttgattgagaagaagaagctcactctgtccaagggaccgtttgagagagggaaagggttgaaagagacccgttctttgtgaccacctcaacagggagtaggtttgcgagaaccgaacctctgtaaaacaaatctgcgtgtcacattctttattcgcttgcgatttgttntgcaccctctctcgcggactcaattatatttctaacgctcacccggctcgtagttgtgattaactttgtaaatatcagtttcgccctattcaccccccccccct

SEQ ID NO: 75576 - DNA, 207 bp, Zea mays
  unsure (1)..(207): unsure at all n locations
attgagntttgatcacaagaacaagtgagaaagaaaagaagccatccaagcgccagagctcaaaagaacaccgcaaatctctctcgctaatcactaaagccttgtgtggaattggagaggatttgatcacttgggtgtgtctagaattgaatgcctagctcttgtaagtggttgagaagtggaaaacttggatgacttgaatgtggg

SEQ ID NO: 75577 - DNA, 420 bp, Zea mays
  unsure (1)..(420): unsure at all n locations
gcaagcttgatgaccnctccacgtncgaagcacataccagtcgtattcaaggcgactgaggagaagaaggagtaatctacatcaagtagaacacccatcgacgcctccaagctcgacaacgaggaaatggcgctcatcatcaagagctttcgccaaatcctcaagcaaaggagggggaaggattacaaaccccgctccaagaaagtatgctacaagtgtggtaagcccggtcatttcattgctaaatgtccattatctagtgatagtaacaggggcgacgacaagaaggggagaagaaaggagaagaagaggtactacaagaagaagggcggcgatggccatgtttgccgggaatgggactccgacgagagctccaccgactccttctccgacgaggacgccgcaaacatcaccggcacc

SEQ ID NO: 75578 - DNA, 475 bp, Zea mays
  unsure (1)..(475): unsure at all n locations
tagggatactcgcctacatgtccaactgccctaaagactttgttcaatgaagntcccctctgatcttgagtccgacctgtgttcatcacttgggggacatagctcttgagttcaagtcggtgtaaacccactccacagccacccaacatgttgtattccgtgcatcgagtgccagtggcgaccatagcagtagttcacaccctcaccatggccaggattcctcaaaggttgtcttggccttgtggtgcccgttccctactcctcgtaggtcagtgaagctcacaccatttactgcttgaactctaccattgtctgttgctgggaactaagtgtaaatttttctcanagataaattgtcagggtttttggaattcagacttactttaattcagcatctgaatttctgtgtttggagccaactttgngctattggagnttgaatccacgaaggttacttaatggcactatatcaact

SEQ ID NO: 75579 - DNA, 451 bp, Zea mays
  unsure (1)..(451): unsure at all n locations
actcagcttcagaatggatggctacactgaaaacctatttttccataaaggcacanagcatgcacaaccaggtaaccaaaagtgcggtttccttcctcccagaaatgtacaaaaggataaggccaggcgtacccaaaaagcaaatactgtggggcaaccccgcttatcgatcatgagttatgaataatgacgaggcattcacaaactgcattttcttatcaccttcaaatgccgcaatttaaacgtttgctgtgaaaacgaggaattaaacgagcatcaatgtatccctgcagaccgagaatcgattaatgacgaatccaggaagaagcgatttcccatagtcgccaacgggcacggcacatgcacggactcaccggaaccgcatcaagcagaatccgacccagattgaacagaacatggcgctggcgcccagaacgggagcatgcacatg

SEQ ID NO: 75580 - DNA, 423 bp, Zea mays
  unsure (1)..(423): unsure at all n locations
agcttgaatcctcttgagaaggagtttctcaatggtgnngatgacaagcggaaggaagtcctctctaaaatagaagaggatgttgctaagcttagcggttctgcagccaagtactttcttccaccttcccctacactatgtttgcaagctactcgattgatttaacattcttattatgtaggcagtgccattgtcaaattacaagtactaactattttgcttctaaaccaggcatggaaagatatatgtgacagctgcaaagaagatcatggacaagggctctgactacactaagaaggagactgagaggcttcaccgcatgctggagaaggtgggcatataagtttccatcctccattcaatctttgagctatattactatntaagaaagctaatttcataagtttcttagtggtgtagcta

SEQ ID NO: 75581 - DNA, 360 bp, Zea mays
  unsure (1)..(360): unsure at all n locations
tactcagctcgaagtgggctctgcgctatgacgaaagatgatcttgttgacagtcttgcatataatagttggaagtataagaattgtatatttggaaatttgcaatttttgaatcattcctttattcttatactaattcttttatcatatagggtttaatactgagcaacgctttgagagcgcataagaatgccgaagacgaaagctataatattgctttcaacaacctacgaacagaggttattaagctgaggaacaaagctttggaaaaagataaaatcctacttacactagtggataaaataaaggaagacgaagctacctctaatgctcaagctgangcccaaaaacgtgaaattc

SEQ ID NO: 75582 - DNA, 447 bp, Zea mays
  unsure (1)..(447): unsure at all n locations
gcttgaggccgacatcagccgctactgactacatcatatcgctggtagtttattctattctaatttcaaagaacaaaatttcttcggcttttcattgttttaccaccaaagtgttttctgacgaaaggtggttttgcgtataacattctattaagtaaagccttgagaatgccacaggaccttgaagataaaaaacatgagggtataattgaaggtttatagagcaaggtaaaaaatcatgaagctgctcttgagaagaaggattntgaacttcaatcaatggagggcttactggcggaagctcaagctagaattgccagattgaatagtgaactcctcgcaaagacagaaaacttcgaacaagaaaagcagaaattngatgcgaagtttgaggctgaagaagttcacatttacagaaatcattgaaagagcttcnagataaatgtc

SEQ ID NO: 75583 - DNA, 374 bp, Zea mays
tatgaagattcttcatcccaacatgggctagtcggtggttccatagccaacccatgttagtcttagcaattaagcaagtgtcgagttcacctctattaaaatctaccaagaatagatgaccctctgaaagggaaatgtgcccttgggccatttctaagtattttggtgattgagtgccaacacaagtgcttttgtgttaatctatgcaaagtggtggacaaagtgcaaatcatgtcaaaaggtatgtttctagacttagtacattgttttatggactaatgtattgtgtctaagtgctggaaacaggaaaaatcgagttggaaaagagatggctaagttcaaccaaggtcagcgcagtctgggtgcaccggact

SEQ ID NO: 75584 - DNA, 443 bp, Zea mays
  unsure (1)..(443): unsure at all n locations
agcttcaactctatgtcttttagctntgggatctccttcatgtgacattctaagaatggtccaaatgtcacgagcatcttctctttcttgaactttccggtattcttccggacagagacttcctttgattatgctcactgcttgagcatttcgatgaacctcttgcatcatttccggagtcatctcttctccttgggcgggcttatacatacctacattaacaatctcccaaagactaggatgcacaccgattaaatgcgacttcatcttgtcggcccactcatcatagttcaactcactaagagttggtaactntccaagtggggcggaagagaagatgggaatataatttctagagtaatcgaattgaactttgctaaagtcattaccttttgctttggtagatgatccttcggtgttgagacttaccttgctcaatacct

SEQ ID NO: 75585 - DNA, 431 bp, Zea mays
  unsure (1)..(431): unsure at all n locations
ctaccaaatggatgtgaagagtgccttcctcaatggacctatcaaggaagaggtctatgttgagcaacctcccggctttgaagatagtgagtaccctaaccatgtgtataaactctctaaggcgctttatgggctcaagcaagccccaagagcatggtatgaatgccttacagattttcttatcactaatggattcaaagtcggaaaagccgatcctacactctttaccaaaacacttgaaaatgatttgtttgtatgccaaatttatgttgatgatattatatttgggtctactaacgaatctacatgtgaagagtttagtaggatcatgacacanaaattcgagatgtctatgatggnggaagtgaagtacttcttgggatttaagtgaagcaactncaagagggcaccttctaagccaacgaatatac

SEQ ID NO: 75586 - DNA, 395 bp, Zea mays
  unsure (1)..(395): unsure at all n locations
agcttataaagccgaagttgattatcttcttaaaaaacttgccgaagccaatgaaaattgtgcgctcgcaaaggctagccaagaaattagtgaatggtggaagactaagctagagaaaaatgttgaggagctttgcaaatccaaggaaagatgctttgaaaaatccttggattgcgtgaataaattgaaaactagcttttccaaagtgggtgcttattcttctgaggaaaattttattcgaggcgaccctgagggcgttattgagtggataagcggngaagccgaagcttttgaggagatcttgagcgatcatggngatatttgttctttctccggcgctcggngaattgcggctattctagagaaggctggatgcgatcatgttaaagctacag

SEQ ID NO: 75587 - DNA, 459 bp, Zea mays
  unsure (1)..(459): unsure at all n locations
ngaagccatggtaagtagcataggctaataatatacgaattgactcaagcctagctacacgtctatttggtaaagcttgaagccatggtaagtagcataggctaataatatacgaattgactcaagcctagctacgggtgcataggtttcaccaaaatccaaaccttcgacttgggagtatcccttggccacaagtcgggcttttttccttgtcaccacaccatgctcgtcttgcttgttgcggaaaacccacttggttcctacaacattttgattaggacgtggaaccaaatgccatacctcgttcctagtgaagttgttgagctcctcttgcattgccaccacccaatccgaatcttgtagtgcttcctctaccctgtgtggctcaatagaggaaacaaaggagtaatgttcacaaaaatgagcaacacgagatctaagtggtacccccttatgaat

SEQ ID NO: 75588 - DNA, 440 bp, Zea mays
  unsure (1)..(440): unsure at all n locations
agcttactcttggtccactcatagggngcataaatgtctgaccatagtgcatatgtgtatttatgattttgcactcggttgatcacatcctttcaaatacctatatagcaggtgttttagcatttccattccatttttcgtagtgtatctcatcaccacttaaattagtgggatccttacgttttgggaggtgttgagtggcgtctatacaaacttcaatgtccatttacccaagacatgtatccatatggtttttctaatatgaaaagctgcctaccttgaacatataagggggtccatccccatggaatatctttactctagcggtgaagcctaatctaatgaggatgatgctatgataccaatcgaaaggatcaagatgcctaagagggggtgaattangcttctctaaaatatcttgcacaaataaaagcctatca

SEQ ID NO: 75589 - DNA, 478 bp, Zea mays
  unsure (1)..(478): unsure at all n locations
tgccaatacctgtcaaagcaacagcacatgccatagcatcagctacaaaccataccagtaacttggcctttcgcatgctggggattggatatgattggacctttcaggaaggctcaaggaggatacacccatgtattggtggcaattgacaaattcactaagtggatagagttccagcccattgcctctttgacctctgctaaagccgtggaattcatacaaagcataatattcagatttgggataccgaacagtatcatcactgacttaggatccaacttcaccagctcagaattctttgacttctgcgagcaaaagagcattcagatcaaatacgcatctgtggcgcatccaagagccaacgggcaggttgagcgagccaacggaatgatattggaggcactcangaaaaagggtcttcgacaaaatgaaaaattcgcaggaaaatggataagagaactaccttatgtcgttggag

SEQ ID NO: 75590 - DNA, 376 bp, Zea mays
  unsure (1)..(376): unsure at all n locations
agcttctaaaagaagagcacattntangattaacaaatgttcatattgagaaagacagggtttgtagcgcatgccaagcaagaaagcaagttggtgttcatcatccacagaagaacatcatgacgaccgacaggccgcttgagctactccacatggatctatttggcccgatagcttacattagcatcagcgggagtaagtactgtctagttattgtggatgattattctcgcttcacttgggtgttctttttgcaggataaatctcaaacccaagataccttaaagggattcttgagacgggctcaaaatgagttcgacttaaggatcaaaaagattagaagcgacaacgggacggagttcaagaactcacaaat

SEQ ID NO: 75591 - DNA, 403 bp, Zea mays
  unsure (1)..(403): unsure at all n locations
tggtgccaatggagaagcanaaatccttgaagtcttggctgtcgaactgcttgccgttgtcgactgttagttcggacggtactccgaagcggcaaacaatgttttgccaaaagaattnttgtgcagtctttgatgttattgtggaaacggcccttgcctcgatccatttggtaaagtattcgacagcgacgaaggcgaacttaaggttcccctgagccgtgggcaagggcccgacaatgtccaggccccagcgctggagaggccatgtgtgggcgatcagttttgggaattgcgaggggctgcctgatcgaggagaaaacttctggcaggcttcgcaggaccttgcaacccgatttgcagcgcagatcattgcgggccagtagaagccttggtggatcacttt

SEQ ID NO: 75592 - DNA, 462 bp, Zea mays
  unsure (1)..(462): unsure at all n locations
gcttctaaagagagaacacattntaggactaacaaatgtcaaacccaagagaccttaaagagattcttgagacgggcccaaaatgagttcggattaagaataaaaaagataagaagcgacaatggaacggagttcaagaactctcaaattgaaggatttcttgaggaggaaggcatcaagcatgagttctcttctccttacacacctcaacaaaatggtatagtggagaggaagaatagaactctactggacatggaaaggaccatgcttgatgagtacaagacaccggatcggttgtgggcggaggcgattaacaccgcttgctactccatcaaccaactatatcttcaccgattcctcaagaaanacatcgttgaactcttcaccggtaaaaatcccaatgtttcttaatttagaatttttgggagcaaatgctttattcttattaagagatttcgaaat

SEQ ID NO: 75593 - DNA, 432 bp, Zea mays
tggtgccaatggagaagcagaaatccttgaagtcttggctgtctaattgcttgccgttgtcaactgtgagttcggacagaactccgaagcggcaaacgatgttttgccagaagaatttctgggcagtcttcgatgttattgtggatacagccctcgcctcgatccatttggtaaaatactcgacagcgacgaaggtgaacttgaggttcccctgcgccgtgggtaggggcccgacaatgtccaggccccagcgttgaagaggccatgtgtgggcgattagcttcgtgaattgcgaagggcttcccgagcgtggagaaaatttctggcaggcttcgcaggaccttgtgacccgatttgcggcgcagatcatggcgggccagtagaaaccttgacagattacctttgcggctagtgccctaggccctgcgtgag

SEQ ID NO: 75594 - DNA, 440 bp, Zea mays
ttcacaaacagtgctggacatcctcaaggcgaagtgcttgggcgaataaatcccttatccagcaactcttgcaattgcttcttcaattctgccaactcagcgggtggcattcggtagggcctcttggaaattggggtcggtcccggttgcaactcgatggcgaattcaatatcccggtttggtggcattcctggaaattcatcagggaagacatctgcatactcacagaccactgggattttcttcagaggtaactccgtcatagagaaagcacatgactgagtagaaccttgactgggcagaattaaagtgaaatttccgcagaacggagaattaacttccacggtacggctggctacatcaagcacaacttggtgcaaggtcatccaattagcttctagaataatgtccacattttccaatcccaacacaagaagagt

SEQ ID NO: 75595 - DNA, 448 bp, Zea mays
  unsure (1)..(448): unsure at all n locations
ctcagcttctcagggagaacacgtgataggtctaactaatgtaactttataaaaagatagaccttgtccagcttgtcaagcaggtaaacaggtgggaagctctcatcatgccaagaatgtgatgacaacatcaagacccctggagttacttcatatggacctcttcggacccgtcccttatctaagcataggaggaagtaagtatggtcttgttatagttgatgatttttcccgcttcacttgggtattctttntgcaggataaatctgaaacccaagggaccctcaagcgcttcctaaggagagcccaaaacgagtttgagctcacagtgaagaagataaggagcgataatgggtctgagttcaagaaccttcaagtggaggagtatcttgaggaggaaggaatcaagcacgaattctccgctctctacatcaccacagcaaatggt

SEQ ID NO: 75596 - DNA, 440 bp, Zea mays
  unsure (1)..(440): unsure at all n locations
gcttatgaagattcttcatcccaacatgttctttctgcgatgccagatccaacccatgttagtcttagcaattaagcatgtgtcgagttcagctttattaaaatccactaagtatagctgaccctctaacacacncttaaatgctattgaatcatcacttcttctaaagacagtgacacctatatcagtaaaaagacagttgtagcccatttgacataattgggaaacagaaagcaagttgtaatctaatgaatcaacaagaaaaacattggatatggaatggtcaggtgaaataactaatttacccaaacctttgaccaacccttgatttccatccccgaatgtgatagctcgttggggatctttcgttttctcatatgaggagaacatccttttctccccgtcatgtggtttgtgccccgctgctagtatcaacttga

SEQ ID NO: 75597 - DNA, 358 bp, Zea mays
ttctcccgagtcagactcttagtgattgcttgccaatggtagaaagagctacgctcggtgaggaggaggcaatgtggcctgtgaacgtggtattggtgagaaccatacatactggatctgctattgacgattggcggtgtgtgggagaacaaatggatcgaatgctctgattaccacagtgaacaatgcaatatgactaatataattggtggcacaccacctcggtgcttgctttgcttgtttatatatatagcatgtgcgcaggatagatacaaaactatgaccgtctatgagctaatttaggagtttatctttcattcatgctgaccaccttggctacgctatacatcagaatgct

SEQ ID NO: 75598 - DNA, 424 bp, Zea mays
  unsure (1)..(424): unsure at all n locations
gctcgcgcgtgcccctgctcggactgcgtntctctcatcctctccctgcggccctgctcgggtcctgcgctcgccggccggaaacttccttctgcgcgtggagcccctccagccgcgtcttctcagttcatctgcccagctcggccgcccagctcatattcctcctctctgcacgcacgaagttttccctgcgtcggcctcctgcgcgcaaagatcttcggtggccgcgcgcacgaatacatgctcgccgcgcgccccagctcacctncctagctcggtctttgtttctctgcagcgtcgtacatggcaagtcgtcgctgctccccatcgcgccatcgattccgcttgagccccttcgcgtttttcgatgccccctggctcgactctgcccagttcgtattctgctcgtctttgcgtcgcgcgc

SEQ ID NO: 75599 - DNA, 407 bp, Zea mays
  unsure (1)..(407): unsure at all n locations
ctatattgnggaatgcttttgagtctgttcaattttcttcagcctttctagcagcttcctggctcccatgaatagcaataggcccttgatccgaaggtatattcatgcctagatatgctggatgaagaattgcttcgaatgcgttgagtgttctgcgaccaacgattgcattgtaagggtattccatgtcaacaatatcaaacacaacctgttcagttcttgtattgtggacaaatccgaaggtcactgacatcgcgatcttgccaagtgatacaatctgccttcctccaaaaccacaaagagggtgtgtagcatcatggatcttatcctctagctcttgcatttgtctaaaggccttagcaaatatgatatccgttgcactgatgtataaccagaacattgggact

SEQ ID NO: 75600 - DNA, 464 bp, Zea mays
  unsure (1)..(464): unsure at all n locations
agctttcttaggattagagtgaaatctagcacacatgcagacactaaacataatatcgggcctagatgcggtaaggtataataaactaccaatcatagaacggtagagagtttgattaaccgggttacctccctcatctatatcgagatgtacatatgtaggcatgggggtcttgattggtttgcacttctccatgttgaaccttttcaacaagtctttggtatacttctcttgtgagagaaagataccatctttcatttgcttgacttgaaagccgaggaagtacgttagctcaccaatcattgacatctcgaactctttcgacatcaactcaccaaattccttgcaatgatagtcatttgtcgagccaaagattatatcatcaacatatacttgacanatganaatatcatcgttatgtttctttgtgaagagagttgtatcgacggtcccgatcttgaagc

SEQ ID NO: 75601 - DNA, 344 bp, Zea mays
tgtggcgccctcgggcatcttgtcgtagccgaagcaccaaatctcccacctggaagcctcggggccgaatcctttgggcgttgtagcatcgcagagactgctgataccgcgctgagtgtagcaaagctacgtcccgagcctcttccagctggtccaatgaatcctctcggctggtctggttgttttggttgtcgtacgcctttgccctcagggagccatattctaagtccgtgggtaggatggcctcgaccccatagactaggaaaaacggcgagaaacccgtggcccggctcggcgttgtccttatactccaaaccaccgagggtagctcttttatccatcgc

SEQ ID NO: 75602 - DNA, 406 bp, Zea mays
  unsure (1)..(406): unsure at all n locations
cttataattncgaattgactcaagcctaactacaggtgcataaatttcatcgaaatccaaaccttcgacttgngagtattctctggccacaagtcgagctttgtttcttgtcaccacaccatgctcatcctgcttgttgcggaagacccatttggttcctacaacattntgattaggacgtggaactaaatgccataccttattcctagtgaagttgttgagctcctcttgcattgccaccacccaatccgaatcttgaagtgcttcctctatcctgtgcgtctcaatagaggaaacaaaagagttatgctcacaataatgtgcaacccgagatctagtggttactctcttatgaatgtcgccgaggatggtgtcgaccgtgtgatctcattagattgcttggtgg

SEQ ID NO: 75603 - DNA, 445 bp, Zea mays
  unsure (1)..(445): unsure at all n locations
ntaactgatttagagtcccttgttggatgatccccatgtttagctnttccatttcttgacacaaagtgttctcgaaggtcttcgccataagacagtggcaggcaaccttacggctcagtgcatctgccaccacattggccttgcccgggtgataatggatctccagttcgtagtctttaatgagctcaagccatcgtctttgtctcatattcaactctgactgggtgaagatgtacttcaaacttttatgatctgtatatatgtgacagatattacccagcagatagtgacgccagatctttagggcatgaaccacagcagctagctccagatcatgagttggatagtgctcctcatgccggcgcaactgccttgaagcatacgcaatcactcggccctcttgatcagtacatagccgagcccactgccagatgcatcacaatat

SEQ ID NO: 75604 - DNA, 366 bp, Zea mays
  unsure (1)..(366): unsure at all n locations
ggtgcaagcctgatatttgcacgtacaatacaatgatttatcatctgtgcaacaatgacctgatggaggaggcagaacatattttcagaaacttaattgaagagggtgttgttgccaatggaataacttataatactctcattcatgcacttctgcgcaacggaaggtggcaggagggcctaaggcttgcaagtgaaatgctacttcatggttgccagctagatgttattagctacaatggcctgattaaagccctctgcanagaggggaatgttgatcggagtatggcgttgcttgaggaaatggtgacanagggaattaanccaaataatttctcgtataacatgctgatcaatgaactcttgc

SEQ ID NO: 75605 - DNA, 479 bp, Zea mays
  unsure (1)..(479): unsure at all n locations
ntaatgcacaacttctcccnctgtgacatcaaacaccatataccatactcaagcaaaaacataggatgatgtcaagggacagcagggtgttaaggaggaaaaacgactatcaaaactcccccttacttattgaacatatgcactatcaacatttaggtaagatacatatatgcaaaaagattaatacttcctttggtacctttaccatgttgtagtgtacttcccatcttgaaagtatttaatctctcgagagcttctccacccttgtgcctgattctttatcctaaccttttcttgttgctaagacaccaaacttagaacaagttatagtatttggcacaagaagaaacttctattctaatgattattaanagatgtcaattgaagcaaactatcacggctaccaattgaaagataccaattgcaaagntcatttattatcatagctccatgatatntaagaatagcatctattatca

SEQ ID NO: 75606 - DNA, 382 bp, Zea mays
  unsure (1)..(382): unsure at all n locations
ggatatgcttcatgtagcataacatatagatttttagtaggtaaatctgaagctcctgatgtgtatgttgatactattatggaatcacgtgacgctactttctttgaacatatatttccaatgaaagacattcatagcaattctagatactcttctgagataactcctgaacataatacacctattgagagttttgaacagccacatgaaattgtcctagaggaggatgacaatgatgctcctaaaaggagcaagagacaaagggttgaaaaatcctttggtgatgatttcattgtgtaccttgtggacgatactcctactaccattgcagaagcanttgcatctccagatgcagatgattggaagaagcagttcataatga

SEQ ID NO: 75607 - DNA, 394 bp, Zea mays
  unsure (1)..(394): unsure at all n locations
tcagctcgaaatggtgactgggcggatgagctntggattggttgggtggactactctggccacccggtggaggcatgaacagcttgctggtgactggtgagcatttggacaacctaactaacaacccatggacggcgggtcttagtattatatgggtttagcgtatttaaaatatttaataattataaagtctatgttaaataagtattgtctcgtatatatagtagggtatatatagtaggggtgtttagagtagctccgggttccatctccaaggtggagctataatttatactataaatttaaatagttttataaagaattttttcaatgtaaataataaataaaatgactcatctaaatgtcttatgaatgttcataatttagcttcata

SEQ ID NO: 75608 - DNA, 428 bp, Zea mays
  unsure (1)..(428): unsure at all n locations
agaagcagaagtcttttttgtcctggctgtcaaattgtntgtcgttgtcaactgtgagctcggatgggactccgaatcggcaaacaatgttttgctagaaaaatttttgggtagtcttcgatgttatcgaggataatgccctcgcctcgatccacttggtaaaatactcgacagcgacgaaggtgaacttgaggttcccttgggccgtgggtagcggtccgacaatgtccaggccccatcgctgaaggggccacgtgtgggcaatcagctttgtgaattgcgaagggtttcccgaccgtggagaatacttctggcaggtttcgcacgaccttgtgacccgattcgcggcgcagatcatagcacgccagtagaagccttggcggatcaccttggcagctagggccctaagccccgcatgagagcccaag

SEQ ID NO: 75609 - DNA, 420 bp, Zea mays
tcgtcgtcggcgacaagaggcatcgctgggctcccaacttcaactatacagactgggcggaccgtcaccagttccacgtcggcgactggctcggtatcattctcctcccctatatctatctacctttacatactcatcaacatcaaacagcccgtgtgatggagatctagctttcggcaaaagaattgatctaagggtgggaagacgcgttaatttgcacgcatgcagaattcatgtacgagagggacaggttcgatgtggtgcatgtgaacgagacagcatacgcggcgtgcgacgccagcagccccatcctcagctacagccgcggccacaacttcgtcttccggctcaaccacacgggccggttctacttcatctgcagccgcggctactgctggagtggcatgaaggtgtccgtgc

SEQ ID NO: 75610 - DNA, 455 bp, Zea mays
agcttcgtgagaatattatcttaagctgctcttccgaagatcaatagtgtatttccttgcaacttagcatgattttcccctttttcaaaatattcttctgaagatcgatattgtggcccccccttgtgccatatgcagcatgatgtatgatgcttatgctatgcgaaatgatgcgatgatgttatgttatgtaaaatgatgtttactccgaaggtacagatacatcctgcgataaatcacataatctttttgaatcagtattgactttttgctataagcctcccttaggagcttcttcgccttttacttcagcggaatcagcgtttatttttcgctgtaagcctcccttatgagcttcttcgccttttactttcagcggtattcgcgttgacttttcgcgcttcgccttttacttaggcgggatcagcgttgactttttcgtgatgctctgcatc

SEQ ID NO: 75611 - DNA, 412 bp, Zea mays
  unsure (1)..(412): unsure at all n locations
tctcctggacaagtgctgcacttaccgttgagtgcgaatctgccacatataataacaaaggagcccctggcgttggtggacttaatgttgttagatctatcaaatattgcttcagctcttcgaaggctttctgctggattggtccccattgaaagacttcggctgacttcagcacttcgaagaatggtaagtttctctctgctgatctagatatgaatctgttgagagatgacagccttcctgtcaatctttgagcccccttttttatacttggtggttccattcaaagtatagcttcgattntgcttggattagcctcaattccctttgttgaaactaggcaaccaagaaatttccccttctttactccgaagacacanttttctggatttagctntaaaccagcctgtct

SEQ ID NO: 75612 - DNA, 382 bp, Zea mays
  unsure (1)..(382): unsure at all n locations
agcttgaatgttcaattaagaggcangccttattatattttgtatccgaggttcttagtttatcaaagaaaaattatacagacatggagaaggtactgtatgctgttntgatggcctccangaagcttcggcactattttcaagcttacaacataattgttccttcttcacaacctctgaaggatattatgagaaaccgagaagctactggaaggattggaaaatgggctgcacagctcaatgaattttgtattgattatgttcatagatcttcgattcagtcccaggcgttagcagacttcattgctgactggacgccacgggctcaggaggaagaaacacataaagatgtcgaagcatggacacgtgtttgcgatgggtc

SEQ ID NO: 75613 - DNA, 478 bp, Zea mays
  unsure (1)..(478): unsure at all n locations
tctaaagggagaacacgtgataggtttgactaacgttcaattcgaaaaagatagaccttgtgcagcttgtcaagcaggtaaacaagtgggaggagcacatcacagcaagaatgtgatgaccacttcaagacctctggagctgctgcatatggaactcttcggacccgtcgcctatctgagcataggaggaagtaagtatggtctagttattgttgatgatttttcccgcttcacttgggtgttctttttgcaggataagtctgaaacccaagggaccctcaagcgcttcctcaggagagctcaaaatgagtttgagctcaaagtgaaaaagataaggagcggcaacgggtccgagttcaagaaccttcaagtggaggagttccttgaagaagaagggatcaagcacgagttctccgctccctacacaccacaacanaatggtgtggtagagaggaagaacatgacgctcattgacatg

SEQ ID NO: 75614 - DNA, 436 bp, Zea mays
  unsure (1)..(436): unsure at all n locations
agcctgtgagctatacaagttcagaagggataaggctgcttcngctgatcagccgaagcccatgctcttatgtgaatatatagcacagcagaaggtgctggtgggatctcaattgactgaggagcaggagaaaaccctaacaaggtttctgttcaacaacaaagatgtcttcgcatggtcagccaatgatctctgtggtgtgaacagggatgtcattgagcactcgctcaatgttgatccatccttcaaacctaaaaagcagaggcttctgaagatgtctgatgacaaagccgaaggtgctcggaacgaagtgaaaagacttcttagtgctggcgtcattagagaagtaaagtacccagaatggttagccaacactgttatggtgaagaacgccaatggtaaatggagaatgtgcattgatcttactgaatctcat

SEQ ID NO: 75615 - DNA, 454 bp, Zea mays
  unsure (1)..(454): unsure at all n locations
tctctcccagtcagaaagcttcgaacaagagatacagattcttaatgcanaattcgaggtcgaggtccagaaaagttcagatttgcaaaaaatcattgacagggcttcaaaacaaatgtctggagttcagtaatcgatgtatacaacgactgaagcaggtcttttatttggttggagccagcagcgagaaatttaatccttcgactgaagacttgccaggggccttcgaacatatcgaaggtgaaattgatgaccttgatgaagttatagctggacatggtgacttttgtgccctggtagcttctcggggcacagctgtcgccttcctgaaatctggctgcgaacatggaaaggttgtcaatagacccaattttagtttatcaccagcagatctgaataatattcccaaccttgcccgaagtatagccaatagaattataaaactggtatggac

SEQ ID NO: 75616 - DNA, 371 bp, Zea mays
agcttctaaagggagaacacgtgataggttttactaacgtgcaattcgaaaaagatagaccttgtgcagcttgtcaagcaggtaaacatgtgggaggagcacatcacagcaagaatgtgatgaccacttcaagacctctggagctgctgcatatggacctcttctgacccgtcgcctatctgagcataggaggaagtaagtatggtctacttattgttgatgacttttcccgcttcacttgggtgttctttctgcacgataaagttgaaacccaagggaccctcaagcgcttcctaatgagagcttaaaatgagtttgagctcaaggtgaagaagataaggagcgacatccgctccgaattcaaaatcttt

SEQ ID NO: 75617 - DNA, 478 bp, Zea mays
ggacctataaaactaagcttataactcctgggggtacctattattaccttcagatgcctgatgggctcaagaatgctagaggaagcttcagcagaatgactgccaaggttctccactcccaaattggcaggaatgtgctgacatatgtcgatgacatcatagtgaaaagcacaaagcaagaaaatcatgttgctgatttgcaagagacgtttgccaatttcagacaagctggtctcaagttaaatccagaaaaatgtgtcttcggggtgaagaagggcaagtttcttggttgtctggtatcagcaaaaggcatcgaagctaatccaagcaagatcgaagctatccttctgatggagccatcaaattcaaagaaggaggctcaacggttggcaggaaggttgtcatcattaaacagactcatttccagatcagcagagaggaatctacctttctttggaatactgaaatcagctgaagt

SEQ ID NO: 75618 - DNA, 337 bp, Zea mays
  unsure (1)..(337): unsure at all n locations
gcttgggtgaataaatcccttgtccagcaactcttgcaactgcttcttcaactctgccaactcagcgggtggcattcggtagggcctcttggaaattggggccgttcccggctgcaactcgatggcgaattcaatatcccgcgccggtggcatccctggcaattcatcaggaaagacatctgcatactcacagaccactgggatcttcttcaggggtaactccgtcatagagaaagcacatgactcanaagaaccctgactaggcagaatcaaagtgaaattcccgcagaaaggagaattaacttccactgtacgactggctacatcaagcacaact

SEQ ID NO: 75619 - DNA, 462 bp, Zea mays
  unsure (1)..(462): unsure at all n locations
cgagacattggtacttaatggncatgtgttgtgctaatgacactcttangtcatcatatagatgcaccaaataaccatataaagccttcaatgcctataccatctatgtaatggaccacactcgttcctttgaaacaattcaaagaacttaaccaattcatatcagattttaagataagagggacttaaaatctcaatcccaatgatactcatcaagtatccatcgtacgggaaaaatgaccaatagaattgtccataacttttcatttcatcccaacaatggaatgaccaattcagtcttacctagcatggtaagtattatcacctgaaaagttataacaagtgcaacacattgtacgagaggatgtatgtagaatacaatccataagacatgtttccgagaaacacatgcaatattgatcactatcactctgtgttncacatgatagacatttatggata

SEQ ID NO: 75620 - DNA, 271 bp, Zea mays
gcttgcttttgaaataaatggtagtttatgtaatttgcttccgcatttctttatctccgatgttctgtaatgtctgcaagacgggtgagacgttcctgcgtaggtaaggaaagatacccaacttgtcaagtgacttaagaacatctacagggcgtctgatgtctgttggacaaagacaactgtacgtgggcctatttacttgggaggtttcgtcccagacaggataaatgcggcacgccacctttgcattaaatgccccttccattttgtc

SEQ ID NO: 75621 - DNA, 417 bp, Zea mays
ttggctattctaaatactctataatttcctatttggacttataatcatgaaactcattttattaaatactatggaaaattaggaacttagcaaaattggtcttgtattcttagcatttttctacaattctctaaaaattctctaagctcacgagaaaaagaaaaagagaaactatgaacagtactgggctgaatctggtccaagtcggcccacaaatagacgaaagcgcgcctacgctgtccattttacgcacgggaccctgacggtttgaaatacctataaagagccctccccactggtcctctgtctcgctaacatttgcacatagaaccccaacgttttaattcttcacaagggagagtccatgaccgtggacggtggagcatgaactccggcgagcttgcactatccaggata

SEQ ID NO: 75622 - DNA, 454 bp, Zea mays
  unsure (1)..(454): unsure at all n locations
gcttaaccctcgcgagacctttccccgtctctttctattcatggtaaattcattatcgtatgtgatattctatgcatatttactttatttgttctcttgtatgggggactgtttgtttcctaatttgaatggatggatgtatgtatgcttgcaatcgcatagagaacgattcggtcgaggagcccgaaaaattcgcaggagaagcccctgagcaacagtcggttggtggaggcaagtgtcccttgacctatctctgtcctattcattctttagttcacctcccgcattacacatttatgcctaaggattgactagttttgttatccatgtccttgtttacctatttgggttggattatntattgttagctntatgctattgctcaactataatcaatgaacatgatgagattatctatgatacgcttgtctcccctcctttattatgatgttat

SEQ ID NO: 75623 - DNA, 437 bp, Zea mays
taataccctgtgacataggggattcgtcctttggtgtggccctgttgaggtctctgaaatccacgcataccctccaccggccatcctccttttgaacaggcactacactagaaatccattcggcataccggcacaacctgatgaaccctgcctccaacatcttctctacctctttcttgacttcatgcagtacttcatccttcaacaatcatgctcattgctgaaaaggccgaaaccccttcttcagcgggagtaggtactctacaatgctcctatcaagcctcagtatcttcgtgtaatcccaaataaagcaacccaaatattcctttagcaggcttatcatcggctctcataactctgggtctaacctcttgctgaagaatgtgggtcgtggcttaatccccaggccaatgtcgacttcttctagctcgtcagta

SEQ ID NO: 75624 - DNA, 412 bp, Zea mays
  unsure (1)..(412): unsure at all n locations
tggccatgtcgaaggatgatcttgctgatagtcttacgtacaacagtataaaggtatagaagttaactctaaagttggaaatgaagtatttcattgtcatgtttaattctttctttttctttcagggcttaattcttagcaacgctttgagggctcaaaagagcgccgaagacgaaagctgcacaatagttctcagtaaccttcactcagaggtaattgagctgagaaacgaaggtttggagaaagacaaattntaatttcattggtgagtaaaatgaaagaagacgaagctaaattcaatgctcaggccgaagcccaaaaacccgaggttgaaaaccttcggaaacaacttgccgaaaccaaagaaaattgtgaagtcgcgaaggccaaccaagaaatatgtgaatggtgg

SEQ ID NO: 75625 - DNA, 130 bp, Zea mays
ttttttctgcggcccgccgttcacggaaacgctgcctctatgaggcagcaacctgggcgcgcgcacattttgtgagtattcaattgattatcgttatacctatagcgaaccactaaggactacgcttaaa

SEQ ID NO: 75626 - DNA, 449 bp, Zea mays
  unsure (1)..(449): unsure at all n locations
agcttcaccaattggctagttattnttagttggcatctatgtatcatgtggnatgtcagtcctttaccttggcattgtaagactatacatgtggtatgtcagtcctttaccttggcattgtaagactataggcctacgactggcaaaacagtagccccgtctgctaagctgctttgatgaatccagtgcccaagggaatggtatgtcaaggatgcagcttgaaatatttcatctggtattcagtatatgtgataccatgcaacacaatacctaaaattcaagagagaaatctgttttcaacacaagccacccccacaaggttntgcaaatctagatacaagtacatgttaaataataatatcaccaaataaaaggagcatagaatagaccaagaggctggatgaagatcatgcangctagcatccaaattcaaagatagggtatcagtc

SEQ ID NO: 75627 - DNA, 445 bp, Zea mays
  unsure (1)..(445): unsure at all n locations
cttgcttttgngtcttcgaaagtggaaggcaatggtgattataatggcggntctcaaaaatgattcccaagttatttctggtcatgttgacaaaagttgcaaagcaagagatccaaagcttgagaaatatttggatatagttcgaagacttgaagcttccttcgaagggttttctatcaagaatattccacgaggagaaaatgaacacgctgatctattagccaagtcagcggcacaggggctaccattaccttcggaagtattctttgaaataataaaagcaccttcggttgaccttcttgaaagagcagtgctcaatatatctcctgtttatagcgaagattggagaactgagatcatgtcttttcttcagggcaatttcctttcagatgatgaagcttatcataagagaatagcggcaagagcccgtccatatgtaataata

SEQ ID NO: 75628 - DNA, 350 bp, Zea mays
cagcttgccgtctaatacacctctttaggctattgaaccatcacttcttctaaagacagacacatctacatttgtaaaaagacaattatatcccatattggataggtgactaacagatagcaaattgttaccaagagactcaactaaaaacacattggagatagagtgctcattagaaattgcaattttacctaacccttttaccttgccttgattcccatcaccgaatataattgaatcttgggaatccttattcttgacgtaggaggtgaacatcttcttctcccccgtcatatgggttgtgcatccgctggcgataatccagcttgaaccctcggatgcataaacct

SEQ ID NO: 75629 - DNA, 476 bp, Zea mays
  unsure (1)..(476): unsure at all n locations
tctatagggagagcacattntaggactaacagatgtttattntgagaaagacagggattgcagcgcatgtcaagcaggaaagcaagttggtgttcatcatccacacaagaacatcatgacgactgataggccgctcgagctactccacatggatctattcggcccgatcgcatacataagcatcggcgggagtaagtactgtctagttattgtggatgattattctcgcttcagttgggtgttctttttgcaggataaatctcaaacccaagagaccttanagggattcttgagacgagctcaaaatgagttcagcttaaggatcaaaaagattagaagcgacaacgggacggagttcaagaactctcaaattgaaggcttcttgaggatgagggcatcaagcatgagttctcttctcctacacaccacaacanaatggtgtagtagagaggaagaatagaactctacttgacatg

SEQ ID NO: 75630 - DNA, 402 bp, Zea mays
  unsure (1)..(402): unsure at all n locations
agcttcaaaatcccactagcgaaaggagaacttgttgtaactangaagccgcagccgcggcatttcttccttgagcgttcgccttcggctgctcaacgcgtgcttcgtttcacgagagccttggtggcatctctgtttcatggccgagatctgctgtgaggcggcggcggcggggtccgaccacaagggggagtgcgccggcagccgcgcggcgcggtggcggaggatggagattccgcggctcacggtggtggccgatgacgcgtccgccaagaagcggatgctggaggcggatgacgaagactcggntggggggcgagcgcctacgtactgcgtgacttctgtctgcgggcggcggagagacatggatgacgcggtgaccgcccgtccggagttcattaa

SEQ ID NO: 75631 - DNA, 481 bp, Zea mays
  unsure (1)..(481): unsure at all n locations
nggaggcgtcaatnggaatcctacttggtgtagattccttcttttcttcctccatcgccttgaatgcgacgggttgcacctcgggtgtggaggtaccgccttgctctaagttgataatttgtttggagcctttgatcatcaattcaaatctcacaaactttcctatcacttcttcgggagacattagcttatatctaggatcaccacgaattaattgaacttgtgtaggattgcgaanaacgagtgatcttagaataaccttgaccatctcatggtcatcccattttgtgctgccgaggttgcgcacttggttcaccaaggtcttgagccggttgtacatggcttgtggctcttctccttggttgaggacgaatcgaccgagctccccctcgatcgtctcccgcttggtgatcttggtcacctcgtctccttcgtgcacggtcttgagcacgtcccaaaatctcttgcacttttaatcctt

SEQ ID NO: 75632 - DNA, 466 bp, Zea mays
acctgcggcatgcaagcttccctttaaccacaaaacgcgatactttcttattggtgagaccttcaagtagacgtagtctccttccacgaaatataagggcattcgccgtttgtctgcataactcttctgacgagcttgtgccttcttcatattataaataattttttgaatcttatcctcggcctctttcaccatatcaggcctaaagaagcacctttcaccaggttcagatcaatttaacggagtacgacatcgtcgtccatataaagcttcgaagggtaccatcttcatgctgtcttgatagctattattatatgaaaactccaccaaaggcaaacattcatcccatttctatgagaagttcagaacacatgcccgcagcatatcttcaaagatctggttcactctctcagtttgtccactagtttgaggatggtaggccgaactgtggagcaactcggtaccc

SEQ ID NO: 75633 - DNA, 481 bp, Zea mays
  unsure (1)..(481): unsure at all n locations
cagcttagcgcctgtcttagcctcaatcggccggtgcagtggctcgccggtgctcagccgcacttgaacgccgtcggggaccgggaaacgtaaagggatagaattcgagggaccttcttgcaaagtgtcagtgaccttgttaaacagtaagaaaacccgttcgcagatagtaaaaacctcgagtccctttgtgcaaaacagccagggcgcggatgcgcgcgggcgcttttccttcctggacctgngccgctgggctgaatccggcccagttctattcaatccttttctttntctttttccagcagagctttagaaatatgtagaaaattatagaaaaatgataaaattgtgaaactaattttcctaggtttgttattttccatagtatttaacaaaaataagttggtgattnttagtagaagtaagacactntagagtatctaaaggtagtaaaaatggtggttatgggattttagaaaac

SEQ ID NO: 75634 - DNA, 364 bp, Zea mays
  unsure (1)..(364): unsure at all n locations
agcttaccgtatttgaaggatganncctttctcttggncgtagtcttgcgtggctgacccttgcgaccctttagtgccgtcttgaatctttcgatgatgagggccatctcttcatcattaagaccgtccgcctcaatatgcgccaccttgctgggtagcgcctacttgctccttggtgccttgagagcaatgggttgaggctcatggattgtgccattcagcgcgtggtccacgtacctcgccttcttgatcatcattcgcccgcttacaagatttccaagaatgttttcgggcgacatcttgatgtacctatgaatttcacggatatcgttcaccaagtgaggatcaagaacagtaaatgacc

SEQ ID NO: 75635 - DNA, 469 bp, Zea mays
tcgacctcgaccgaagagaagataaagcttggacaaagatgaaatcaccttcggacatagaaagtctacaaaggacgactaggagacgtacaggacatagaaagttcactttgttagatgacgacgaaaacagactaaagcctaatttcatgattaggccaaacattgaatattaaccaacaaatacttctcagatcactagattgctctagactggttttggacggcaggtaaaatagaaaaaaatggaatttttaaataaaagtaacgctgtcaatcaaacgccaaatacaaccgatgcgcttccatttatcaggtttcttcataatccattgcctgcaattcacattacagtacaatgatgatgagcaaagcgaatcatataaccacagctatgcaggcacactacttcaggtcagtaagttcaatacagaggagagattccatgctgacagagttaacaataaac

SEQ ID NO: 75636 - DNA, 198 bp, Zea mays
acctctatattagtcaaggacctatccaccctcaggtgcactgttttccggcggctgtttatcccaaaagatgtcgaccagaagataatctctagcgcgtggatgaagcaatgggtcgcgcgccatctgatgcatatatataaatcatctgatgcgtttgttttttctaccacataaacactaggtggccaccacttt

SEQ ID NO: 75637 - DNA, 264 bp, Zea mays
gaaaggagctggggggatacttattggacatttttaagaaaccttttaaaaaagaagactactaaccatgtagccaacaacaatgttgatagggaaataagttttcaagacaactatagactgggctactactctattgtcggtctgatgaaacatgcaaagcatatgacctacgtaagatactatgctctagggaaaactcaaaaatcattgatgccagggacaattagttcacacgactagaacttatagcagttacaagga

SEQ ID NO: 75638 - DNA, 437 bp, Zea mays
  unsure (1)..(437): unsure at all n locations
agcttctaaagggagaacacattntaggactatcaaatgttcattttgagaaagacaggatttgtagcgcatgccaagccgggaagcaagttggcgctcatcatccacacaagaacatcatgacaagtgacagaccactggagctcctacacatggatttattcggcccgatcgcttgcataagcatcggcgggagtaagtactgtctagttattgtggatgattattctcgcttcacttgggtgttctttttgcaggaaaaatcccatacccaagagaccttaaagggattcttgagatgggctcaaaatgagttcggcttaaggatcaagaaaattagaagcgacaacgggacggagttcaagaactctcaaattgaaggcttccttgaggaggagggcatcaagcatgagttctcttctccctacactcacaac

SEQ ID NO: 75639 - DNA, 427 bp, Zea mays
  unsure (1)..(427): unsure at all n locations
ngacaaccaccattgacatcttaaatgaaatgtctaagatcaagtatatttaattcattcctcaacatgcaaaagcgggttttatcaagaggcttagtgaaaatatctgctaattgatcttccgacctcactccttctaaaatgatatctcctttagcaacatgatctctaatgaagtgatgacggatatcaatgtgcttggtgcgagagtgttgtacatggttattagcaattttaacagcactctcattgtcacacaacaaaggtaccttttctagaactacgccatagtctacaagagtttgtttcatatataaagtttgtgtgcaacaagcacccacggcaatgtattccgcttctgcggttgacaaggcaacactatttttgcttttggatgtccatgatactagtgatctcccaagcaaat

SEQ ID NO: 75640 - DNA, 454 bp, Zea mays
  unsure (1)..(454): unsure at all n locations
gcaagcttatctcaacctgagaggaaagcttatcttaangngttatgtgttagnnttaagctttgctagtggggtattcatatgcttcctacagtattatatgtgttgcatcatatggactagtgtttctgctgtgatgaattaactggcttctatagtgtaatagatagtcatgtggttaatggtgctttaagattgctttaaattggtatcttagtttaaattggtatcttaatggtgaatagtagtaggttgatattcctgtgatatatccacaaatttgaatgatgtttaactctgattatgtgcatttgtgtattatagcatcaaggtttgattcttgacacaatgcatcctaaaaagtgctaaggtgtagaaatgtttcgaattgcctaagtatgtgcaaattggcgtctgacgccaagacttatgttttgaagtaagcacataatta

SEQ ID NO: 75641 - DNA, 439 bp, Zea mays
  unsure (1)..(439): unsure at all n locations
ctaagcntgagaataaacatttctcttgctagtcttagagatgttaatgtttaatcgcttgctaaggctaaagaatttgatatttgcaatgctaccatttccgaccttagaagtaaaaatgatatattgcatgctaaggttgtagaattaaaatcttgcaaaccctctacatcttctgttgagcacacgtctatttgcactagatgtagagatgttaacattgatgctattcatgatcacatggctttaattaaacaacaaaatgatcatatagaanaattggatgctaaaattgccgagcatgacttagagaacgaaaaatttaaatntgctagaagtatgctctatagagggagacaccctggcatcaaggatggcattggcttncaaaagggggacaatgtcaagcttaatggcccctctaagaaatagccaactt

SEQ ID NO: 75642 - DNA, 422 bp, Zea mays
  unsure (1)..(422): unsure at all n locations
ctaaactaaggcatctgatcggagtcatattcaataccccaaaactttttgaagtgctcggctaagtcctagtctggactaaggttgtcttcaccaaggggtggtgaggacaagtctgagggttcgtagttgctgtcaggctggtgggtaacgttgttgaccttgtccaaatactcttggaacaccagagaatcttgctccatcatgcaagcaatgtcctccaatgctacacgaagtttggtagcgtcaaatgaggtcaacccgcgtccaggacagattgtttctcgagctatggaaaatatcttgtccgcaatctcttgcatccttccaattgccttgtcggctatggagtctgctgaatccatctgatgtggatttatgtgggtagtgtactacacaangngacaatctactaactttca

SEQ ID NO: 75643 - DNA, 463 bp, Zea mays
tttagactggactggttgatgcattcaatataatacttatggttggtttggtggacatagaaatagaggggatgtatggtgaggaatcctctcactattcgtgggcgtaacaattgatgatgcatgtaataagcatgtaactatatatatgcatatacatagagaaaaacgtacagttcgtagctatgtctagtgcatctcatcgaagacagttattatttgtaagtatatgtggtctggcctggtctgctcatgcatggttaacttaaacaaacagtcttatgacttaattaatctcatggtgcagtgtgcaagttttggaaggccttgggacgagtacttgaaagatctcactccaatgcctttgatggatcgatcgacatggtcagatccaaagtactcaccctccagagcggccgtgaaacatcttctcactccaatgccttgatcgacatggtcagat

SEQ ID NO: 75644 - DNA, 337 bp, Zea mays
cctgtgaaaaagattactttcctcgtggcaaacgacaaaaccattacatgaagtttaaaaagtgttctttatttcatgaaaaatgaaacttgaatagagaagacttctatcagagtaggatacttggcaatagatgtgctttgactctggcacagtgctattaactgtgcgagcttcggactgttctctgaaatcccgttgattttgagtatattggcccccttctggctgctggccttgttgtaacgggggtggaggcggaggttgttgccacgaagcctgaggctgactcgccgaagcaacagaagctgagggtgattgctacatattctggatg

SEQ ID NO: 75645 - DNA, 438 bp, Zea mays
cttgactagaatatcaactaggtctgatggtgaaaggctgaaatttatcctgttaacgactcttaaatgattacatctggctttcatgaaagcagtagtagtgccacgagaagccactagcgcacagaaatcaccatggctagttatgacttcgttgaggacgtcaacttctttttcaacacattcaagagctccgggaatatcttcggtagaaagggtaacttcttcagatacgggtccaacagaattgaagatccccttcagtcgagcaatacattgagtagcgaaactgaagcatttatctcgaagaattttgattgtttcgctcagtttaacattcttttcaacttctgcttcaattctcgcgttcagcgtcttggactcgcgatggaagcgatctgagttcttttccaaaagtgttcgagcttcttctagctc

SEQ ID NO: 75646 - DNA, 416 bp, Zea mays
  unsure (1)..(416): unsure at all n locations
aaaatcttgaccacagttcacggcgaggggcaacttgagcaagtcttgttgtcgcgctctattgatgatgctctgaagcagatccgccgcgagaacataaaggagaggcgagagggggtctccctgtctaaccccacgcttgcaatggaaagttttccctgagataccattaaggaggaccgaggacgtaccagactgaagaatatccctaattcagctcatccacctgggcccaaaacctctatgcgacagcacctgaagaatcagctcatgctcaagtgaatcaaaggccttttcaaaatccaatttgagcacaatgatctctttctntgagatatggcaaagatgaatatattcatatgcccagaccaagcagtcctgaatggttcttcctttgatgaaccatattgattttg

SEQ ID NO: 75647 - DNA, 460 bp, Zea mays
  unsure (1)..(460): unsure at all n locations
actatacaactagttgtctagttcttttatatttaatcaaacatattttatgtacttattgagaatgcaactgtacagatattggtggccttaccatttcgaaggaggggactactattgaatcttgataatggtatgggaatatatttcacatagatggatggtgtataagtgtattgatattgccatattgttaagcaggactgcaggagattgcangctgccaggcgtgtgctctcaaagtgtcaaggactcagctgactgcaaagtgcaaactcaaactgaaattgttgtctactggtctactgcagtgctgccgtgttggtgctgtactgctgtttatctactgactacttgtgttgccgctgtgtgtataatctaggtcgggtcctgccttctgagtgctcgcggtgatggtgtgtactgactaccctgttatctgtggcaacatcactgggcc

SEQ ID NO: 75648 - DNA, 430 bp, Zea mays
  unsure (1)..(430): unsure at all n locations
tgcangcttgatgagtacaagacttctgatctgtttttggccgaggcggacaacaccgtctgctacgccatcaaccgattgtatctacaccgaatcctcaagaagacatcatacgaactcctaaccggtaaaaagcccaatatttcatattttagagtctttggtagcaaatgcttcattcttgttaaaagaggtagaaaatctaatattgctcctaagactgtagaaggctttttactaggatatgattcaaacacaagggcatatagagtctttaacaagtctcttggacaagttgaagttccatgtgacgttgtgtttgatgagactaacggctctcaagtagagcaagttgatctcgatgagatatgtgatgaagaggttccgtgcatcgcgctaaagaacatgttcattggggatgtgtgcccta

SEQ ID NO: 75649 - DNA, 474 bp, Zea mays
  unsure (1)..(474): unsure at all n locations
tgtgtctacaagaaggagagtgggagcgctgctgttttctgatcttatatgnggatgacatattattgattgggaatgacattcctatgctggagtccgtcaaggcttcactgaaaaagagttcttctatgaaggacttaagggaagcagcatatattctgggcataaggatctatagagatatgtcgaagaggcttataggattaagtcaagatacgtacattgacaaggttttgaaacggttcaacatggaacagtccaagaaagggttcatacctatgtcacatggtaaacaccttagccagatgcaatgttctgcaacggctaatgagcgggagcgcatgtgtaagggaccatactcctcagcaattggttcaatcatgtatgccatgataagtacacgcgcagatgtttcatacgctataagtgctacaagtagataccatgctgatccaagtgaggatcactggacag

SEQ ID NO: 75650 - DNA, 405 bp, Zea mays
  unsure (1)..(405): unsure at all n locations
agcttaccagtagctatattattaacctttctctgagtcatcaccgncgntcggcgaagcgaactcgatcgaggagcttaaggggtatttggtttaatctaactaaagtttagtccatgtcacaacgattgtttgaatgataattacattcattaaatatattaattacatagataaaaaactaaaattaagacgagacgaaattacaacacctaattaaacatatatttaatactcataattgatatctaaacatttgatgtaacatgaactacactcaagcaactaaggtcatctatgtcggatcttttatttcatcatttaattntaaattttactctgcaaacaaacagtgtagttcccgatcaaactaaacccgctaaatcgcccacgtaggtcatacat

SEQ ID NO: 75651 - DNA, 470 bp, Zea mays
  unsure (1)..(470): unsure at all n locations
tctaaagggagagcacattntaagattaacaaatgttctatttgagaaagacaggatttgtagcatgccaagccgggaagcaagttggcactcatcatcaacacaagaacatcatgacgactgacaggccactggagctcctacacatggatttattcggcccgatcgcttacataagcatcggcgggagtaagtactgtctagttattgtggatgattattctcgcttcacttgggtgttctttttgcaggaaaaatcccatacccaagagaccttaaatagattcttgagacgggctcaaaatgagttcggcttaaggattaagaaaattagaagcgacaacgggacggagttcaagaactctcanattgaaggctctcttgaggaggagggaatcaagcatgagttctcttctccctacacgccacaacacaaatggtgtagtggagaggaagaatcgaactctatt

SEQ ID NO: 75652 - DNA, 410 bp, Zea mays
  unsure (1)..(410): unsure at all n locations
agcttaatgcccctaaaagattgttcaatttttgtaagggcaaggctcccatggtacaggataacgaaggttacattntatatcatgctggttatcctcagcacaaaattaagagaattcattctaggaagtctcattctggttatcatcatgcttttatgtataagaatgagacatctagctctaggcataccactcatattaaaatgcctaaaaagaaatctcctgttgcatcaaatgagcctaatgtttcatttaagacttttgatgcatcttatgtgcttactaacaaatcagacaaagtagttgccaaatatgttgggggcaaacacaagggctccaagccttgtgtttgggtacccaaggtgcttgtttctaatgtgaaaggacccaagaccgtttgggtacct

SEQ ID NO: 75653 - DNA, 433 bp, Zea mays
  unsure (1)..(433): unsure at all n locations
tgtgaacagtacanattcagaagggagaaagcagcttctgtatatcagccgaagcccatgctcttatgtgaggacatagcagagcagagggtgttgttgggctctcaattatccgaagaacaggagaaaaccttgataaggtttttgttcaacaacaaagatgtttttgcatggtcagccaatgatctttgcggagttaacagggatgttattgaacactcgctcaatgttgacccatccttcagacccagaaagcagaggcctcgaaaaatgtctgatgacaaggccgaaggtgctcgtaatgaagtcaaaagactcctcagtgcaggagtgatcagagaagtaaagtacccagaatggctagctaacactgttatggtaaaaaaggccaatggcaaatggcggatgtgtattgattttacagatctcaaca

SEQ ID NO: 75654 - DNA, 443 bp, Zea mays
  unsure (1)..(443): unsure at all n locations
ctgcaagcttgcaaacactcctgcttcatgttattatgggnngactcaaacaacccagctgcacattccaagcgggctctaatagggtcacgaggccttgcttcttctgatgagctagctcctcagcctgcgctttacgagacctcatatcgcgcttgtcgtgcctcatgtccgatggactgttatggtagatgtggtggtcagggccggggaaggtgtcaaggtcatggcctatatatgcgcctggctaaggggatcaccgaggtcttcgcaatgtgccgcacgcttgctattgaggaggatgtgcaccaactcgagactgtggcgctccatgatgacatgcgaagcttcccaacctccatgggcccattcctgctttagcgctctctttcaccttccaacccttgctatccccagaacctttatggatgacaccaacatga

SEQ ID NO: 75655 - DNA, 462 bp, Zea mays
  unsure (1)..(462): unsure at all n locations
tcagctgaagtgggaaggaccttgtttggtagtatcttttttatgacccggntcttacagattaaaggatatggatgtcaacgacattcttagatcttggaatgcggatgagcttcgatgatactacgtgtaacttgatgtaaacttntttattttttcctatggcacccttttcctttctaaagggggagaaaggtttttaatggggccatagcatgtaattttccttttcttcttcagctctacgagagcaaaatcccccaaaatatgtaaaatgtaaaatctaagcatgcaccatcgagtgcagagaaaaaaagagaacagggagaagctcgaaagtcgtccctaaggggatgcagagcacgacgaagctacaaaaagccgctcctaagggagcgcagcttaagtttttactcaaaagtcgttcctaatggaatgcagagccaaataccgtcgaaatat

SEQ ID NO: 75656 - DNA, 445 bp, Zea mays
  unsure (1)..(445): unsure at all n locations
agctntaaacgctggcagattaagactcgtatgtggctcactgacctaaaattattttgggtagtgacatcggctgttccccaagctgcatcagatgattctgatgatgcagcgaaggccgccgcactagcggagaaggccaagtgggactaacccaatgaggcatgtttgtctcgtctgctgaacgtcttgtcgaaccgcttatttgacgtgtactctcgttttacctccgccaagggtctatggactgaacttgagaacgagttctctgaagttgacaatggcaatgagtcattcacaacggaaaactacctcaactataaaatggttgagggaaggtctgttatggagcagctacaggagattcaactccttgttagggacttggtccaatatgggtgcgtcctaccagacagttttcaggtgaatgcaatactggcaaagc

SEQ ID NO: 75657 - DNA, 413 bp, Zea mays
  unsure (1)..(413): unsure at all n locations
tgtgaaggttcttcattcccacatgtgctaagcggcgatgccacagccagcccatgctagtcttagcaattaagcatgcatctagaccggcctcctcttttgcaaaatcaactaaataaagtttgccgtctaatacacccttaaaagctagtgaaccatcacttcttctaaagacagacacatctacatttgtaaatagacaattatatcccatatagcataattgactaacagatagcaagttatatccaagagactcaactaaaaacacattagagatagagtgctcatttgaaatagcaattttacctaatccttttaccttgccttgattcccatcatcgaaattattgaatcttgggaatcctctgttttgacgtaggaggtgaacatcttcttctcccncgtcatat

SEQ ID NO: 75658 - DNA, 423 bp, Zea mays
  unsure (1)..(423): unsure at all n locations
agcttgctggaatgttaccactcaangaattgtggcttangtccatataacttaaatttgcacagtttacaaattgtggaatagacccgctaaggttattgttttgtaaaatgactcgcttcaaacttgggcagtccacaacactggatgggatgctaccgttgagatgattaaaccctaagtccaaaattctcaatgcttttcttgaacagatgtttggtgggatactaccaacaaaactgttgtttgtgaaatctatctggaccaaggggctattaacacctagctcctgtggtatgactccagtgaagaaattatcaaacagtgtgatgttctttaggaacttcagctcagctaacactgaaggtagcttccctgtgaatctgttgctataaaagacgacactctcgaggggttggatac

SEQ ID NO: 75659 - DNA, 479 bp, Zea mays
  unsure (1)..(479): unsure at all n locations
tctaaagggagaacatgtgttaggtctaacaaatgtaatattcgaaaaagatataccttgtgcagcttgtcaagcaggtaaacaggtgggaagctctcatcatatcaaaaatgtgatgaccacttcaagacctttggagttacttcatatggacctcttcggacccgtcgcctacctaagcataggaggaagtaagtatggtcttgttatagttgatgatttttcccgcttcacttgggtattctttttgcaggataaatctgaaacccaagggaccctcaagcgcttcctaaggagagctcaaaatgagtttgagctcaaggtgaagaagataaggagcgacaacgggtccgagttcaagaaccttcaagtggaggagtatcttgaggaggaaggaatcaagcatgagttctccgctccttacacaccacagcanaacggtgtggtagagaggaagaacangatgctcatagacatgg

SEQ ID NO: 75660 - DNA, 435 bp, Zea mays
  unsure (1)..(435): unsure at all n locations
agctntagctgattcagggttccttgntggactatccccaggtttagcttctccatctcttgacataaagtgttgtcagaggttttcaccataagatagtggcaggaaaccttacggctcagtgcatctgccacaacattggctttgcctgggtgataatgaatntctagttcatagtccttaataagctcaagccatcgcctttgcctcatattcaattctgactgggtgaagatatacttcaagcttttatgatctgtataaatatgacagatatttcccagcagataatgacgccaaattgttagggcatgaaccacagcagctagctccagatcatgagttgggtaatgctcctcatgtcggcgcaactgcctttgagcatatgcaattactcggccctcttgcattaatacacagccgagtccactgact

SEQ ID NO: 75661 - DNA, 448 bp, Zea mays
  unsure (1)..(448): unsure at all n locations
gcttgacaacgaggagatgactcttatgatgaagagctttccacaaatcctcaagcaaaggaaggggaagaactacaaaccccgctccaagagggtttgctataggtgtggtaagtctggtcattttatagctaaatgtccatatacaagtgatagtgacagggacgacgacaagaatgggaagaaaaagatggagaagaaaagatacttcaacaagaagaagggtggtgaggcacacataggacgggaatgagactctgacgagagctccaccgactcctcctccgatgaggatgccgccgacattgtcgtcaacaaaggtcttttctttcccaacgttggccacaaatgtctcatggcccangatagcanaaagaaggtacattntatatatacctccaatacactacttccgatgatgagggtagctctagtgaaaatgatgatg

SEQ ID NO: 75662 - DNA, 451 bp, Zea mays
tagcagatcacagtgcacaagagctaaaaaatgactgatcatgagcggttggccagaaagcgtgcaaaataagtttgcggtatggccgtatttatacgcttgatgcgttcaaagttgaaagaccccacttgtcattgaatgttgctattctagcaaagggaaggtgttttttcggaccttcggcataaagccttcgttcatatcgcaatctgaatttattatttcaaacaaattaatattgcgaggggctactgttggggaccttcggcgtccgaaggtcctcaaaaacaggatttaacagtatttctgtagtacaatatgtgaacaggtaccctcagactaaaatcggcattgcggcagaccggaataatacgaagcttgatacagagccgaaggtgttgagcaagaaagcttcgacgtaacagcagagagtggaaccgacttaaagatg

SEQ ID NO: 75663 - DNA, 459 bp, Zea mays
catgccagcttgggctaccaccatgcaaccggagctttgaaaaatttttcgtgaacatccatggaaggacaagagggagaccccgctcggacacccttgaaggctgggccatagtttgcgctacccacttgagccggattatctccggcagtaccctctggggctgggcagtggcttgcgtttcccacccgagacgagtcatccccggcaacatcctcgggggctgggcaagtgtcaacaccatccttgagaaccaagttcttcgaagtagcctgctctaaggctgagggtccctcaattactttcatgggagcaagatgatacaagtcagttttctgaccctctagaccgcactctaatgtcgacgaggcgcgggacgcttgccgggatgatcccaaccccgcgtcgagcacgtcagcacaaatcttcatcacacaatcatccgctgactctgatagc

SEQ ID NO: 75664 - DNA, 415 bp, Zea mays
  unsure (1)..(415): unsure at all n locations
ggacctataaaactcagcttctcctgtcgncatcaacttgatgtagaaccattccgatttctagcctgtcggccacttgcttcgatagctgatctcaaaannatttgtagttttccgatatgcaaagttgtaacaaccaaaattttcatgtagcccatcctttctggccttagtttggtagtgtagctcgtgtactcggcagaaacctttggcaaatggctccactgcttggctntggagagcccaaatataaacactaagcctaacaatagcgttaggagttagttggtgaaaatagatcccacattttttcagcacatcggcaatcatcctattcaaaggaaatctcanaccagctntgaggaaactcttaanaatcactatntcatctttttgtggcttcggggtaatctct

SEQ ID NO: 75665 - DNA, 435 bp, Zea mays
  unsure (1)..(435): unsure at all n locations
acatgaaaagtgcctttttatatggtccaatcaatgaggagatctatgttgagcaacctcccgactttgaatatagtgagtatcctaaccacatatataaactctctaaggcgctttatgggctcaagcaagccccaagagcatggtatgaatgcctaaaagattttcttatcactaatggcttcaaagacggaaaagctgatcctacactctttactaaaacacttgacaatgatttgtttgtatgccaaatttatgttgatgatatcatatttgggtctactaacgaatctacatgtgaagagtttagtatgatcatgacacataaattcgagatgtctatgatggnggagttgaagtacttcttgggatttcaagtgaagcaactccaagagggcacctttattagccaaacaaagatattcaagacattct

SEQ ID NO: 75666 - DNA, 419 bp, Zea mays
gaccttgatactcagctatgagattcttatcccacatgggctagtcggcggtgccagagcccacccatgttagtcttagcaattaagcaagtgtccagttcagctctatcaaaatctaccaagtatagctgaccctctaacactcccttaaatgctattgaatcatcacttcttctaaagacagtgacacctacatcagtgaatagacagatgtagcccatttgacatcattgagaaacggaaagcaaattgtaatctaaagaatctacaagaaaaacattggaaatggtatggtcaggtgatatatcaattttacccaaccctttgccaaaccttgatttccatccccgaatgtgatagctcgttggggatcttggtttttctcatatgaggagaacatacttttctccccggtcatg

SEQ ID NO: 75667 - DNA, 367 bp, Zea mays
cactcggcgagcgagtgaaatggaacatgccaaggggaataagaatcgctactaacctagtatggtcttaagaccaccttacattagttacaagataccaacttgtcaaggactataccgagtcaattcagtgactataagtatttacaattccgagagatgtatgccacacaagcatagaggttctagataaaacgagtaaagtggttcaacgggaacacactatggatatcacacaaacattgtgaaaaacttctcagaattacctttctatgtactcgcaactgtcttgttgctcatggactagaacatttatcttatagtccgctccatgtcattcaacaacaaatagcattatgccaacatc

SEQ ID NO: 75668 - DNA, 382 bp, Zea mays
actaagtgaagatcatatcatgctcgatattgctcatgaggtagtattactaggtaaactcatatgaacctcattcttgcactagtaatcaattgggcaaaatattatcatgtgctgaccttcaccggcccaagaaaggccaatctttgtttgagaaacaagtcgcaggatcaaaaaagaaattgcttgggtacaaaaaacaaagacaattaaggagaagatgccttgctcgacttccgcaagatatctacaaacacgtggtgaagaagctcgaggaatgagaaaccgccgcaagggtcaaactccataagaaggatgttcccaaagcaattaatgaagaaatcaacatgaacaatgaaaaaggtaagagtcattaatcatg

SEQ ID NO: 75669 - DNA, 247 bp, Zea mays
gcttcacagtggcctagagagcacaagagttctactctcttttcctattacccccggcagactcaccggagatctttcccggcgcgggcgcccaccacctcgttgtggaccggccatttcaagcgccctccggccaaattggccctaccaatgtgataccctacccccgcccatgccttgtcaccacttcatacgtacaaaaacgggatcccggcggagaatcgtcgtggatctcaccggcggtcgg

SEQ ID NO: 75670 - DNA, 457 bp, Zea mays
  unsure (1)..(457): unsure at all n locations
tactaagcttgtttatgctcngcctcctccttcatacagagttgatgatattctgaatagcagcccaataaactcatgagctctgaagtggctgctgcatccacaagggagtctattcttatcacggggaactcatccttctggcatgcgcttgatgagatttgtgaaatcaatacacattctccactttccattggcattatttaccatcagagtattggctagccattctggatatgtcacctctctgattactccggcactcacgagtcttttgactatgtttcttgcaccttcggttttgtcatcggacattgtcggggaccataattaggggtacccccaagactcctaatctcagctggtaacccccatcagcacaaagctgcaaaggcatgatgggtgcgaataaggtcaaggctcgatccactcaagggacacgatctcgcctcgcccg

SEQ ID NO: 75671 - DNA, 253 bp, Zea mays
agtgccctataaattgctaagtaatattcatgctaggctagaccactggcaattaagacgtacatcgtatgcatcatggaagatcaaatcaatattctctcatataccacgataagaaaattattttgcttcccatgtcccctgaggctattgagcgtgatgatgctgctaaagctaccaaagctaaaactgagaacaacaacaaaattaaagctgctggtattaacaaacacgggataaaattgaaaggaca

SEQ ID NO: 75672 - DNA, 445 bp, Zea mays
  unsure (1)..(445): unsure at all n locations
taagctttgtggcacgagtgggcgtgaaggtttatcgtggcaagtggaattcctcatcgacgactgggaatcgccatcgtccacagccaaccatggatgggagtccatgttgcaaggatactggtaaggatatattcaatcgtttcacgatcgtctacacatttattcgtacctagttatgatagagaccaggtaccaaggcactgactggccattcgtcggcatcagcaccgtcgcgagccgtgcagatgccgctcgggtgcatcgtcggggaaggaagaagcaagcatgtccgttatatcgagaacgaacgaccgaagtttgatctaatgcatagctggttgatcatttaaatccgagacgaagattttgaggcggacgactgagaatcgattggaggcgtactgcttcgctgatctgatctangtcgtctgatcgtgatcgg

SEQ ID NO: 75673 - DNA, 462 bp, Zea mays
  unsure (1)..(462): unsure at all n locations
tagaaatcgaaaggatccgcaaccttcaacctagaaatttcgttggatcttatgagggagatctgttacattttcagcggagtactctactccaatagacctgaatctatgttgtagaaaatatgaacaggatttagaacatggttccatgatctatatttaccgctgaagctttctagtacacctcgcctttttgatctggcatttgttaggtttgcatggtatcgtacgtctagatctcaagctagaaagaagaaagaagggtgcattgtgcctctatcggctccttattttggattagggttcacccactacaaggtcctaggaaatttccaggaaattaccaggaaacttccatgaatcanaatctatgatgaggattgatgatcctcatccccactngagaaagtgatgacaaaggtaacgatcgcaaagntntgcatctgttctcgtgacaagaat

SEQ ID NO: 75674 - DNA, 369 bp, Zea mays
cgcctgcaagcttgaaggactgcttctgtttgagagcttcctaacgtgaagacttgttcgggccacggagtctctttatccgagcgcaagttacttatcgcagaaggtgatgagtgaggtatccgtatcccggaggcgtaggagtccctcggctcggtcagccttggctgcttacgtgtactccgtcatttccaggatccgctttccgaagtagtcaagaagcacgaaagaaatcctactaaaaagagatcctttttcgaggaaaaattcgacgcagagggggtctccccccttttagcccccgagggagggtcgggctcttccaacgctatgcctaccctttcttgtgactaaactttgcgacgcgcg

SEQ ID NO: 75675 - DNA, 363 bp, Zea mays
taccttgctggaacactaccccacttataatgaatgatgggttaactcttgaatcctggggatttgaactccttgaagcacctcataacaagggtgttacggggcctacttctgctgttgatgcttgagcaaactgcggagagatgactgataccaagttgattatgggataaccttcttcttatcttctcttcactattttcttttctcttctcacttcacctctcactgtctctttctttctctctgctcttcccactggaggattctatcaaagagtattaccaacatacactggaggaaaccaaagactatgaaccatgtgcaacacgtctcaacccaagaatcaccaacattgcgatc

SEQ ID NO: 75676 - DNA, 421 bp, Zea mays
agcttataacaaaagaatggtggcaagaattataccatatgtcataatagaaggggaattgtataaacatggagtttgttcaccactcctcaaatgtttatcaagaatcgaaggtatcgaattgatgaaggagatacacgcatgtctgtgtggatctcacatcggatctaggcccttgctaggaaaaaaatttcgtcaaggattttattggccgaaggcagcttctgatgcagcagagttagttcaaaaatgtgaaggctgtcaaaaatgtgcaagagatcagaaacaaccttcatctcttacttagttaatacagcccacttggccgttgcaaaggtggggccttgatttctaggcccacttccaccagctcaaggaaatctaaaatatgttgtagtggcggtagaatatttttctaagt

SEQ ID NO: 75677 - DNA, 448 bp, Zea mays
  unsure (1)..(448): unsure at all n locations
tcttctcattatgcataaaagagcattgattggttttaccatgttgcacattgnccttatcaaattgccatggtctaccaaataacatagagcaagctcgcatgggtaccacatcacaatcaatataatcatggtatggaccaactgtaaattccacatggaccatacatgttaccttaagctaaccactatcgttgaatcattggatgtagtangggtgtggatgtggaagcgtttttagcccaagcctctctagcatggtggtgcttgctaagttgttgcagcttcctccatcaattataatacgacaagatcatttcaaaactacacatttaatttggaatatgttgtgtcagtggttttgctcagctttaataatttgggcactcaaggcacgtcttacaatgaggctctcatagtgttcaacatgttcaaccacaatgtgctc

SEQ ID NO: 75678 - DNA, 477 bp, Zea mays
  unsure (1)..(477): unsure at all n locations
tctaaagggagaacacattntaggactaacaaatgttcattttgagaaagacaggatttgtagcgcatgccaagcaggaaagcaagttggttctcatcatccgcataagaacataatgacgaccgacaggccactggagctcctacacatggatctattcggcctgatcgcttacttaagcatcggcgggagtaagtactgtctagttattgtggatgattattctcgcttcacttgggtattctttttacaggaaaaatctcaaacccaagagaccttanagggattcttgagacgggctcaaaatgagttcggcttaaggatcaagaaaataagaagcgacaacgggacggagttcaagaactctcaaatngaaggcttccttgaggaggagggcatcaagcatgagttctcttcttcctacacgcctcaacaaaatggtgtagtggagaggaagaatcgaactctattggacat

SEQ ID NO: 75679 - DNA, 432 bp, Zea mays
  unsure (1)..(432): unsure at all n locations
agcttgcacactccaccattctgtgacgggtaccctagtattcgaaactatagtcctgtgggtctgtcaaccggnggtccggttctagagaacggacacccatcctctggggtggtgcagagctgtgtggtcacttagcctggtcccataccctaagcctacgcgctccactgctctgcgacgcgtgtcctagtatttggaactgtgatccagggggtctggacacacggattggcttcccggtctaaatcctgcaggtcttgttgcgtgaatcaaaggataaaagatactanttagtgggggtcctatgggtgcactactaaagcttcctagccaaggctgtgtgcaggtctgggtcccagtcaagactacctcctaggggccaggtcacgaatttttcttaagtatactggcatccagcctcttctaggg

SEQ ID NO: 75680 - DNA, 439 bp, Zea mays
  unsure (1)..(439): unsure at all n locations
tcagtctacactggtgttccaagcaaacattntagtcgctttttaaaatatggtgattatcactacttcatgtacaaagtctaccatactttttacccagctaaaagtatggtggacgctgcaaaaacgacacttctttagttcttgtgttatgaaattataacaatgtgttagattattagcctactcatataccttattcgacaaacactttaactgacttagtacctgcttgtcgtaatcaaagggaaagagaaaatagacatatagtatgttactgtttctatcatttcaaataatgttctttcttatataatcctgatattgcattaaaatctttagtattgtctatactaacatactactctcatttatatacaggtatgaggttctatcactnttggtcctgagacttttatgtacatattagtctggtgtt

SEQ ID NO: 75681 - DNA, 436 bp, Zea mays
  unsure (1)..(436): unsure at all n locations
agcttcgcatctctgaactatctcggctgtttcactcttcgctggtggccaatagaatcctgacctgaagaccttcccgactagtgtcttgtacgctgcgtgtattccacattgcccagcatggacctcgttcagaagtcgcttcccagtagatgagagaatgcacttcatgaggacgcctgatgcaccccgtctgtataatgtctccccaatgagtgtgtagtgagctgactgtctggcgatacgctcggctggcgttttgtcatccggttcctcttcattctttatatacctgatgattggccttctccagtcatcagagtctgactctggttgattcacaatattactctcttctgcttgatccattgagatgctcggctgtagtatttcttgtacaaagactccangtgggacctaagttcgactggatcct

SEQ ID NO: 75682 - DNA, 478 bp, Zea mays
  unsure (1)..(478): unsure at all n locations
tttccaaaatccaatttaacaatcaccacttatttttttattatttacaccaatgaatatattcaaatgcccaaatgatataatcttgaatagttctaccattcaaagaaacattattgattttggtgaattaactttagcatcacaagctaaagtctgtctaccaaaatcttcgtaatcagcttgacagaggagttaagtaatgatatgggtctgaaatcattaactgaaactgggttatctttttaagggatcaaggtaatatatgatccattaatgcttcgcaaacaaatgttttggtgaaagaaaccattgcagaaatcatagaagtccttgcgaatgatagtccaaattntntaaagaagtctgaattaaagccatatggactangtgaattgcccacaggtaagactttaataatgttatcattctgatcagaagcaaattcagattcaagcatttgaatcacatgaacctg

SEQ ID NO: 75683 - DNA, 404 bp, Zea mays
gcttaataggcttgagtcgagtgcttcttttttatttgcaagactaactatagaggttttagcaatggcaatctctttattattatcctctatagttatttttactaaggacattttcttagtcaaaacttcgagcatttcattcttattggatagcaacccttgaagctctaggtttatttcaaggatgagtaagtcttcttgagcatcaagagttgcttttcttttatatagcttctccattaattgggtgattacattatatctgtttaaaccaaattctttaatcattttatttttcattgcaagttggtcatcatcatcatctggaaaatcaacattaaataaatgtaccttatctccttttgccatgaggcaagtaggagtgtaggagtagtcgtgga

SEQ ID NO: 75684 - DNA, 484 bp, Zea mays
  unsure (1)..(484): unsure at all n locations
ttaaggttaatcttcacctacaagaaagattaggaatgctcaaggcaaaggtatggaactaattgcttcaattggtagttaatcaatagtagttcctttcaagtggcatactttcaattagtaataatctattttatgaaaagaaatgtcaatatgaaggttaaattccttttggattaaatttgtaaattggtgcatattgttaattcactcatccatgtgcattaacttaaaaggaatttaatttatgcctttatgcctcataaatgatgatttatttgacattcatatataaatatcatcattcattaaatacttcattgtactactaatacctcttttcanagtgctntttttactagttntaaaaggaaaagagataacaagctaatgaaggaagtcttcacaattgatgaaaagaagaatacttagatgacaccatctcatatagtaagatctttcaatngatataacaaatggtaca

SEQ ID NO: 75685 - DNA, 454 bp, Zea mays
gcttggcttgaccacacggcaatggccatattcataccatattcattggatcaatgattcaggcaaggttaaggtaacacacatggtacgagtgcatttcttcattggtatgtactctgattatgcggattgcgatgtagtacctatggaagcttgttctcttttgttgggtagaccttgggaatatgatactgatgcacgtcaccatggtaggagtaatacatacacttttaggcataaagataaaaacattactttgctacctttgactcttgctgaaattgtacaagctgataaagatagtgaaagtcgcctagaggggggttgaatacggcgaatctgaaatttataaacttaagcataactacaagccgggttagcgttagaaatataaacgagtccgagagagagggcacaaaacaaatcgtgagcaaataaagagcgagacacgatg

SEQ ID NO: 75686 - DNA, 429 bp, Zea mays
tactaagcttcgcttcacgcgagctgtagcagcttctgaaccttcttttgttggacaggagttaatgcccttggtgactccatgatagcgtctaacacgcttgccatcctcctcctcttgggagttattgcaggagcttttgacaccttcagcaattttggctccggtggcggacttaagatttatggtggtcctaccgattcctctcggtgtagctcttcaactgcctttcctttagcttcggtagtatgtttcagtgcttctgccgatccggttgcaggaacctttggcacttcagtcgattcttcggcgcttcgaccgacaggagcagactgtcctagctccacgatggaagatgtcccttcaccaagcttcggcaccgtggccatttcaatatacctaggtcggtgtgttaaaaccataaacttt

SEQ ID NO: 75687 - DNA, 384 bp, Zea mays
  unsure (1)..(384): unsure at all n locations
atttctcccagcctcgctataaacaagagatatgttgacgactgctctttcaagaaggtctaccgaacgaacttttattgtttcaaagaatacatccgaaggtaagggcagcccctgtgctgctgacttaactagcaaatcagcatgttcattntgtcctctacggatatttttgacagaaaacccttcgaaggaagcttcaactcttcgaaccatatccaaatatttatcaagcttcggatccttagccttgcaactcttgtcaacatgacccgaaacaatctgggaatcagttttaagtatggcccttcttattctcattgcttttaacttccgaagacctaaaagcaaggcttcgtactctgcaatgttatttggcaacta

SEQ ID NO: 75688 - DNA, 441 bp, Zea mays
  unsure (1)..(441): unsure at all n locations
cagcttctnccctgcngactgggtcagatgattctgtggcttcaaagcccaaggacgcggcctttgctcgaggcaagccgtatgctgagccagcaacccataaacacggtgctaataccagctatgaaagaaaaaccggcatggagagatcgcctctgcatcctcaccaccaagcaaggctcgtaaacagaggaggtgtttcgtcttcttcatgggaacgcaggggttcgtccgaaggaaaccgtggagctgcgcccaccacacctgggaggtcgtccaagatgaggccaggcggccgtggagacgagacggtaatgttagctgcggctttaatccggctgcggtcctacagtatttttgtttcatggattacaccagctgtgactgcanggtaatgcgcttatgatagatagcagatataccgatgcttgagtcatgagt

SEQ ID NO: 75689 - DNA, 486 bp, Zea mays
  unsure (1)..(486): unsure at all n locations
tttagctcagtccgaagctaccttacgctccgaagatatcaaggacccctcggccgaagcaagtgtggttgctggcaaattttttactgatatctggaacgacggcggtcggggaatggcacaagaaattatcgaaaggagcgaaaaaggcatccatgaagctaggaaagtggcagagactgctgaaaagagtaaggagcccgaaagacaattatgtaccaactagtcgctcttgttgcgctgtaattntcattttaaactttgctcgcgatttgtaaaagtactgaagaagtgttctctacgctcagaagctgttggacgatctccccacacaaaaggggatgaagaaattaatcagatggccgaaactatcatggacaagggtcgtgaccaacttctgaataaagcttgccgagcaatattgatggaagaataggtgcttactttggaaaaacattnnaagtgtatctatgaacactttgagat

SEQ ID NO: 75690 - DNA, 439 bp, Zea mays
  unsure (1)..(439): unsure at all n locations
agcttcctatccagagtcctatgtgctaattactacaacagtacaacttgcttgaaatttttacctagagaatgcactctatgtgtgtcaaacatatgcaatgccaatgcttatgatgccatgctcaagttttagttatagtaacaccaggggtgttacatccttccccccataaaagaatctcgtcccgagattaaaagtcctagggtaagtaatggaaaaggaaacgcggaatacttttatttccttacttctggtacaaggcaggggtgatgtgggggtcacttctttattacacagttatacaggctttacaatttacatgaggctanaaagcctgtgaaattcttttaatcaatagccttagcaatacattgttcattctcaattntaaggctagagagagatgcattcaatntgtcaatcttagtaatcaaac

SEQ ID NO: 75691 - DNA, 484 bp, Zea mays
  unsure (1)..(484): unsure at all n locations
tctaataacagaatggaagcaaggacaagaccgttgtgatgattgtacaccccgggatccacaaataccccagaatgctactaaactacacatctaacattcatatataaaatttcgacagcatctcctttgaaaattgcataaacgaggaagcaacaaaatataaaaagatatcatgataagaaaacataatagacattaataatctgctagtaatgggaagacaaccataacgacatgaactgaattaaccagtgcgcatgactagttagaaacaaacatcctttgacaagaagtttctaattaaatcatggctgcgcctcggcaacattattatgagagtgaaggtggatgtgctgctacttcccactccccttgatgagcaacaagcacctgcattgagtaatgcangagtgagatgaaacatctcagcaagctaattgtttngacgagatatttaaaccacanatttgattaatcaaca

SEQ ID NO: 75692 - DNA, 447 bp, Zea mays
agctttaccacagagtaaattataatttttatatttgaatttcaaactcggaaggaaaaccaaaaccgaaaataaaaattgagaaaagaaattgtgaacagaaaaaaagagaaaaagaaaaatcgtcgtctgggccgaatctcccctgcgctggcccattgccgcacggcccaacacccccatccgcacactctctggctggaaaatgcattgagtcgctgactggtgggcccctttcgtcaggatattcttctccacaacatctgacgcagcggattcctctgcggtccgtgtcgtcgggatcctccgaagagttcggatctcgccagctctcccgttttcctcgcgtggtcaacgttcccgtcgggctcgcaacgtgacccgcgccgcactatttctcttcctcttctcaaccggagctaactcaatggatctttcgtgcgggcg

SEQ ID NO: 75693 - DNA, 479 bp, Zea mays
ttgtgggctttcaatgaagctgaggaggttacctctggacatctattgtgccatgcttcatggttgaaatttcttgtttatctatctataatgacaacttttttccttttttgtgcttggtggacagaaatgctgcatagatattatgcatttattttcgattttgtgaagtccactgcattttcaaataatgtatcatcttcttgagtggtgttggttattatgctttggaaaataaagatgatctttacatgtttttagtagttgtatattggtgagttatttggttcattcaaagtacttagtcaagcagtttgtgctgctcaagctattcgtgcaattaaacctctccatttggtagacactgaaattttctcattcggtcattcctcgactggaattcattattccactcaattgttggttggttgagaggactctctattggatccaatccgtgtgctaattgtgaactcaac

SEQ ID NO: 75694 - DNA, 446 bp, Zea mays
  unsure (1)..(446): unsure at all n locations
agcttgagaagattctttattctaacgtggtctagtcggcgatgccagagccaacccatattagtcttagcaattaagcaagtatcgagttcagctctattaaaatcaaccaagtatagctgaccctctaatactcccttaaatgctactgaatcatcacttcttctaaagacagtaacacctgtatccgtaaaaagacagttgtaacccattttgcataattgagaaacagaaagcaaattgtaatctaaagaatctacaagaaaaacattggaaatagaatggtcaggtgatatagcaattttaccaagtcctttgaccaaaccttgatttccatcctcgaatgtgatagctctttggggatctttgtttttctcgtaggaggagaacattcttttctccctagtcatgtggnttgtgcacccgctatcgatgatccaacttga

SEQ ID NO: 75695 - DNA, 482 bp, Zea mays
  unsure (1)..(482): unsure at all n locations
tgtgacagtatagccctattgatgagtgacatacggtgtttattgcttcgtcccaataagaatctgacacattatattcggctaacatagacctagccatatcaatgagaatcctattctttctttcaacaataccattttgttccggtgtatatttggcagaaaattcatgtttaatacccttgtcatcacaatattcatcaattctagcatttttgaattccgacccattatcacttctaactttcttgatatcaaaatcaaattggttttgagccaatatagcaaatgactttaatatttcaaacacattagatttatcctgaagaaagtaaacccaagtgaatctagaaaaatcatccacaatcataaggcaataggaattaccgccgatactcacaaacgatgttggcccaaataagtccatgtgaagtaattccaaaggtcgatgagtagacattcgactnctatttggatgagta

SEQ ID NO: 75696 - DNA, 443 bp, Zea mays
  unsure (1)..(443): unsure at all n locations
gcttctagagggagaacacantttgggactaaccaatgttcattttgagaaagataggatttgtagcgcatgtcaagcagggaagcaagttggtgttcataatccacacaagaacatcatgacgaccgacaggccgcttgagctactccacatggatctattcggcccgatagcttacataagcatcggcgggagtaagtactgtctagttattgtggatgattattcttgcttcacttgggtgttctttttgcaggaaaaatcacaaacccaagagaccttaaagggattcttgagacgggctcaaaatgagttcggcttaaggatcaaaaagattagaagcgacaacgaaatggagttcaagaactcacaaatagaaggctttcttgaggatgagggcatcaagcatgagttctcttctccttacacgccacaacaaaatg

SEQ ID NO: 75697 - DNA, 475 bp, Zea mays
  unsure (1)..(475): unsure at all n locations
tctaaagagagaacacattataggactaacaaatgttcatnttgagaaagacagggtttgtagcgcatgccaagcaagaaagcaagttgatgcccatcatccacacaagaacatcatgacgaccgacaggccacttgagctactccacatggatttattcagcccgatagcttacataagtatcggcgggagtaagtattgtcttgtaattgtggatgactattctcgcttcacttgggtgttctttntgcaggaaaaatcacaaacccaagagactntaaagggattcttgagacgagctcaaaatgagttcggattgaggataaaaaaatattagaagcgacaatgggacggagttcaagaactctcaaattgaaggctntcttgaggaggtggagggcatcaagcatgagttctcttctccctacacgccacaacanaatggtgtagtggagaggaagaatagaactctact

SEQ ID NO: 75698 - DNA, 448 bp, Zea mays
  unsure (1)..(448): unsure at all n locations
agcttgtgcactcggcagaagccttcggtttatggntccacccctggcttcggagggccgagatataaacactaagcctaacgatagcgttaggagtaagctgatgaaggtagatcccaaacttcttcaaaacatcagcaatcatctcatttaaaggaaatcttaatccagctttaaagaagcttttgaagaacactacttcatcctttcctggcttcggggtaatctccaccccaccgaaacgaactagctccttctttgcttcactaaaatatcccaaattcatcagcttagacatatcaccttcggaaatggtggatttcccaaactccaggtggctgggtttagttggcacggcgctgtaatcatcttcagaatcaatntcctcagcatcagcctgctcggcttcagcggcaggtgcatcttccgatactactagccctgaacg

SEQ ID NO: 75699 - DNA, 276 bp, Zea mays
ttagctgcgatagtgctctctacacatcatttttacaaaaccatgaaacataacaggacggactctatccattattatgtggtaggcatgactcttcaacccggaaaacttgcgcgccttccaattcacagaccttctaaagcccgcggcgtaaccatctgggaactttaagtttttcaaccatttcatcaagtgtttctatcttataggccaatacatagaggagcacatagcttcttctagttctctcctatctccatagatggacctctacag

SEQ ID NO: 75700 - DNA, 443 bp, Zea mays
  unsure (1)..(443): unsure at all n locations
agcttctaaagggagaacacattntgggactaacaaatgttcattttgagaaagacaggatttgtagcgcatgtcaggcagggaagcaagttggtattcatcatccacacaagaacattatgacgactgacagaccactcgagctcctacacatggacctattcgacccgattgcttatataagcattagcgggagtaagtactgtctagttattgtggatgattattctcgcttcacttgggtattctttttgcaggaaaaatctcatacccaagagactttaaagggattcttgagacgggctcaaaacgagttcggcttaaagatcaagaaaattagaagcgacaatgggatggagttcaagaactctcaaattgaaggcttccttgaggaggagggcatcaagcatgagttctcttctccctacacgccacaacaaaat

SEQ ID NO: 75701 - DNA, 402 bp, Zea mays
  unsure (1)..(402): unsure at all n locations
tnctggaacagcctccgcctccacctncgttgcaacaaggccagcagccagaagggagccagtatgctccacaccagagggacttcagagagcagtccgaagctcgtacagtcaatagcactgtgccagagtcaaagcacatctattgacaaatatcctaccttaatagcaatctttttcattcagttttattttctataataaaggacattgtttaggtttcatgtaattagtttcgttgattcctacaaggaaaatatattttcttcacaggcttatattgattaaagttcaaagacttgtgataacaaagaggaccttcgaactatcgaaaattcttcgaagcaacaaanagtcgttctaaggaacgcagagtaagtttgccgaagtcacaaaaaagtc

SEQ ID NO: 75702 - DNA, 440 bp, Zea mays
agcttctaaatggagaacacattttaggattaacaaatgttcattttgagaaagacaggatttgtagtgcatgccaagcagggaagcaagttggcactcatcatccgcataagaacataatgacgaccgacaggccactggagctcctacacatggatctattcggcccgatcgcttacataagcatcgacgggagtaagtactgtctagttattgtggatgattattctcgcttcacttgggtattctttttacaggaaaaatctcaaacccaagagaccttaaagggattcttgagacgggctcaaaatgagttcggcttaaggatcaagaaaataagaagcgacaacgggacggagttcaagaactctcaaattgaaggcttccttgaggaggagggcatcaagcatgagttctcttctccctacacagccacaaca

SEQ ID NO: 75703 - DNA, 477 bp, Zea mays
  unsure (1)..(477): unsure at all n locations
tgtggtgccctcgggcgtcttgccacagccgaagcaccaagtctcccacttggaggtctcagagctgaacccctcgggcgtggtagcatcgcagagactgctgatatcgcgtcgagtgtagcaaagccacgccctgagcttctttcagctggtccagcgagtcttctcggctggtctggttgctttggtcgtcgtacgcccttgtcctcggggaatcgtattctaagtctgtgggaaagacagcctcggccccatagactagaaagaacagtgagaaacccgtggctcggcttggcgtcgtcctcaaactctagaccaccgagggtagttccttcatccaccgcctgccgaacttgttgaggtcgttgtagatcctcagcttaagtccctgcagaatcatgtcgttggcacgctccacctgcccatntgtcatggggtgagccacggcgggccagtccacccggatgtggtggcctc

SEQ ID NO: 75704 - DNA, 410 bp, Zea mays
  unsure (1)..(410): unsure at all n locations
agctttctctcccacttttgtgtangatctaaccaaagtcacttaaggagacttattcaccatcatatggtatttaattcctttatatactctacagcccaaaaccctatgtattatgcacaaatgagtttcaaaatcagccaaaacactgcaatttcagacttagtgtactgttctgaatctgaaaatgcaaagatctgttaacccctctttggactaccttttctgctagtagcatatagttttagtgctatcacactgaataaggattgttctccaacagttactctaaaagttntatatagtgagccatagccaaatactcctggattccaaactacaaaggtccaaagtttgaccaaattactgaaattcagaatctgaatttcactaaatctgaaatctacaaa

SEQ ID NO: 75705 - DNA, 481 bp, Zea mays
  unsure (1)..(481): unsure at all n locations
ntctttggtggcatgacgaaggtcgatgcttgccgaatgtggtcgaaaaagggttcaccggaggtgggcgccaatgttggggacttgttctcaaatgctatgagttaagaacaaggcaacacaaaaaatgttaaacgttaaagtccttcgtccttcgaagcattatctcccttaggatataacgactttcggacgaaggttacgaagagcataccttcgtaaatacaacatataaaaatgaagaaggggtcatatgaaacatgaacaatacaaaccatcaaatatgttattgctattgcattatttttattntattcctatgaatagataaaaataacaatttttacaagtgtaccttcggcttgaaggcagataaaaagtacaagcgtgacgcanaagcaaaatgccaagtcagcgtgaatagtacgggagcactgttcatctatttatangcatgnggacgcagcccatgtaaaataca

SEQ ID NO: 75706 - DNA, 419 bp, Zea mays
atctctcagtcacctgcggcatgcaagcttcagttctgaacacgtgcttgattcttttagtcaagcttggggtgttcagaagtctgtggtgttttttttgtatatatagaaaattgttagcaggcaagagcatttcagttgattttgttggtcccagacttatcatttgattgcggtcctagtacttgaatttttgctgcgtgcctaaagtcgtatgcctatttcatctgtactatcagagaaatgctagttcttttaatcaacaacagttttttttgtctcaagtaaattgggggaggctagagttctaatggaagttcttttaatactacatatttattaatctttctccacgccatacaagcttgttattctggtgtggtgcctcaacatttgtatggattctggattctccatgg

SEQ ID NO: 75707 - DNA, 405 bp, Zea mays
  unsure (1)..(405): unsure at all n locations
ntggttcagcaaggtatcacaccggtgcaatcgtttgtgtctagtgttacaagaccaatctcttgcattcttccccatccgcccccacagaagagaaagtctgcgcagctgcctctggattntgttcctcgtcgtagcagccgcctggcaagcaagggttttaaatccagcaaagatgcgcctatcagacatatccagcaggatctcattagaaggttgggtattgctagtggaaatgaggctgttaccactgaagctcttgataagtatggacgtttcttctccaatccactatcggagtcccacatcaaggctctggtagctttatttggttggactgttcctgacaacgtggagaacttggagaccattcagctcctcgcatgagatgccccgaccgattct

SEQ ID NO: 75708 - DNA, 446 bp, Zea mays
tgcagcttataagattttcattccacatggtctattccgtggcgccaaaaccaacccatgttagtcttatcaattaagcaagtgtcgagttcagctctatcaaaatctactacgtataggtgaccctctaacactcccttaaatgctactaaatcatcacttcttctaaagacagtgacacctatatcaataaaaagacagttgtagcccatcttacataattgcgaaactaaaagcaagttataatccaaagaatctacaagaaaaacattggaaatggaatggtcaggtgatatagcaattctacccaatcctttgaccaaaccttgatttccatcctcgaatgtgatagctcgttggggatcttggtttatttcgtaagaggagaacatcttcttctcccctggcatatgggttgcgcacccgctatcgatgatccaacttga

SEQ ID NO: 75709 - DNA, 292 bp, Zea mays
tttgaatagacgactgcagaaaagctctaaacacttttgaataacttctgtaacggaatcaaactttacctgatgaaccttgtccttaccttgcgacgtacagcacaccaaaagatagagccaggacatgacttgcaacgtgacagaggaaaatggaacgaacaacagtgggatgggtaacacatcactcctgaaatgaaatgggagaggaggctttacaatgcacgtgcaacatcagcatcatgggtaagatcgcgggatgacaaagcgcaaggcgataactagcaatcac

SEQ ID NO: 75710 - DNA, 429 bp, Zea mays
  unsure (1)..(429): unsure at all n locations
catgcaagcttctttaaagcaggattaaggtttcctttgaatgggatgattgctgatgttntgaagaagtttgggatttatcttcatcaactaactcctaacgccatcgttaggcttagtgtctatatctgggccctccggagccagggggtagaaccatttgccgaaggcttctgccgaatacacgagcttcattatcaaacanaagctagagaagatgggctgcatgaaaacttcggctgctataactntgcttaccacaaaaatacaaagtttccagttatcagctatcgaaccaagtggccagctggctagaagactgaatggttttacgttaaagttgatgaagagaaggagaagctggttcaaagtccactataattaatcttcggagaaaccaggccccagtgcaacatgacaccgaatagt

SEQ ID NO: 75711 - DNA, 384 bp, Zea mays
aactgtacaactacatgaaaaaactcgtgctcctcttgctgttagtcatcgaatccctgtttgagcttttcttccacttcaacaataaatctctgctttttctcctttttctgcaatattcatttaacagaaaagaaaatatttactgctgcagttgtacatacatgaaaacaaatggggtactcaccataactatcaggggctcgatggtatgccaatttttggcagattctatggatacccatggattactttgtgacgagcattctaataaaaacttcacgtattctgctacaaggccctccgtaaacaatctgcacttgatactatgtgtggtataccttaccttcgaatcaccaacttacacatttggccacaaattaa

SEQ ID NO: 75712 - DNA, 436 bp, Zea mays
  unsure (1)..(436): unsure at all n locations
ctgcagcttacngnctctcggagaagctatccgttggctctgatctagcggaggtggacgggattggtttcgtcacggtggtcgccctcgggcggctctggcgggtcgcggggaggtcgccggagctgcgggcgagctcgggaaagccaagcgcggtgcggagggggcgacaaggaaggtggccatgcatgggggtgggctttatagccactcgcaagcacgacatgggcgtgggcaccgnggcggccganggcgcgcgggggtgcgcgtgcgggcgtgctctgggcgtgttcccgagtgtctgcccacgtcgaacacgtggtggtttacgtgtgccagtgttcaacggcctgtttggtcgccttagcgtgcagatctcncaaaaatcccgtgtacggtctcttctctgcaccatatnctatctttttcatgtgag

SEQ ID NO: 75713 - DNA, 206 bp, Zea mays
  unsure (1)..(206): unsure at all n locations
tatcccatcgacagcaaaatctagtttctacattcaaaattacatatggtgtaatatcccaaanaaaatgttgaccaaaagttaatctttggtgcgtggatgaagtaaagggttgtgggccattggatgcaaagatagaagtcatctgaggcgtcgtttctttctcccacaaaaaaccctaggtggccacccctttntttcccttc

SEQ ID NO: 75714 - DNA, 433 bp, Zea mays
  unsure (1)..(433): unsure at all n locations
taactggcgantcctagaagctgagaaacgaattgttatctaatcgcaacgcgaagcgaagatgaacagacactagcaaacaaacatatacatatgcctaagaacattacaccatacaatatataacgtaatagaatatgaaaacaaaatagagtgtggtactacagtcacatgaggaaaaagaaatgcgatagtcgaagctacggtcgagaagttaacgggtttaggctaaacaaatactatataaaacatctgattcgacctgattatattaaccgttatttattaggtaagcctaagtggaacgctacacatttaatctaataaatactagtcgagtgaccctcctaagataattatccaaaacatatgacttgacgaattaatcttattaacatgagtgatttaggccaaaacaattattataaccaca

SEQ ID NO: 75715 - DNA, 352 bp, Zea mays
caagcaggaaagcaagctggggcccatcatccacacaagaacatcatgacgaccgacaggccgcttgagctactccacatggatctattcggcccgagagcttacataaagcatcggcgggaagaaggagcggcttgcaatagtggatgagtattctcgcttcacttgggtgttctttttgcaggagaaatctccaaccccagaaaccttaaagggagtctggagacgggctcaaaatgaaggctgcttaaggatcaagacacatagaacgacaacgggaccgaggcaagaactctatatcgaagctttctgagaggaggcacaacatgagtctctctcctacaccacacca

SEQ ID NO: 75716 - DNA, 483 bp, Zea mays
tcgcatctctgaactaactcggctgcatcgttcttcaccgtcggccaatagaatcctgacctgaaaaccttcccgactagtgttctggatgctgcatgtatcccacattgccctgcatggacttcctccagaagttgtttcccagtggacgggagaacgcacttcatgaggatgcctgacgcgccccttctgtacaattcctccctaatgagtgtatagtgagccgactgcctggcaatgcgctctgccgagttcttgtcgtctggttcttcttcattctttatatacttaataatcggtcttctccagtcgttagaatctgactcgagttgatttatgatgttgcactcttctgtttgatccattgagatacttggctgtagaatttcttgcacgaagactccgggtgggacctgagttcgaccggatccgagcttggacagtacatcggccgccgtggtccgatctctttctatatgatga

SEQ ID NO: 75717 - DNA, 310 bp, Zea mays
gatactctcggcgatagtcatcttcacataaaacatcctgtcatccatccccggccatctcttccatagtggtcgggacatctagcccccaccataaactaacctgttcacccaagttatatggactgtcttgccccacgccttgttatatataatttgcgttatacatagcttcttcataagctcaaccctgtttttcctgtcaacaaatattaccctatactccccggagtagttgttaaaatactttaatattttacacctcacaccaactactctggaaaacgacccacctccaaaagctctgatc

SEQ ID NO: 75718 - DNA, 351 bp, Zea mays
  unsure (1)..(351): unsure at all n locations
ctgggagaaagagcgacaacattttcatgcaaagtctgttctatagcctcttcctctactgccttctcttcaatttccgaagggtttttctcagcaggctctgaaggcccagcttcngcactagcctggctcactgcaacttcaacttccgctagttttgtttcagcttcgatttgcatttttgaagcctcaacaactctccctcgaagagtagagcttgaagcctctactgattctagcacatgtagtacatctgccatccttcttcttttgtgagttgccgcaagaccctcttgtatcttcgacattgttgcttccccccaagggcttaacatttctaacatttttgtt

SEQ ID NO: 75719 - DNA, 372 bp, Zea mays
  unsure (1)..(372): unsure at all n locations
tgcaagcttctgaagggagaacacttgatttgttttctaacgtgcattncgaaatagatagaccttgagcagcttgtcaagcacgtaaacaagtgggaggagcgcatcacaacaagaatgtgatgaccactttaagacccctggagctgctgcatatggacctcttcggacccggcccctatctgagcataagagggagtaagtttggtctagttattgttgatgacttttcccgcttcacttgggtgttctttttgcaggataagtctgaaacccaagggacctctaagcgcttgcttaggagagctcaaaatgagttagagctcccagtgaagaagataaagagctacaacgcgtccgatgtcaagaacc

SEQ ID NO: 75720 - DNA, 449 bp, Zea mays
  unsure (1)..(449): unsure at all n locations
gacctataaaactcagcttctaagggagagcacattntatgactaaccaatgttcattttgagaaagacagggtttgtagcgcatgccaagcaggaaagcaagttggtgcccatcatccacacaacaacatcatgacgaccgacaggccactggagctcctacacatggatctattcggcccgatcgcttacataagcatcggcgggagtaagtacttctagttattgtggatgattattctcgcttcacttgggtattctttttgcaggaaaaatctcatacccaagagactttaaagggattcttgagacgggctcaaaacgagttcggcttaaggatcaagaaaattagaagcgacaacgggacggagttcaagaactctncaaatgaaggcttccttgaggaggagggcatcaagcatgagttctcttcttcctacacgccacaa

SEQ ID NO: 75721 - DNA, 406 bp, Zea mays
agcttctcaagtgagggttctatggggatttctaaaattcagaattctgaatttcaggccttgagctaaagaccgagcgtgttcaccttgatccctagctcatatgctaatgacccccattgacaaaattgtgcctaactaatccctctgtcacatgccacaagatggcattgggacgagagccgtaaacacgacaaaacccaggatttgcctcgggctcgggtagggagacagaccaggtttcagggctccaaatctttgaaaccagtatgcaaaatcctatgacccccacacaagatcagtatcttatatggaggagaagaggttttatgcactgaccaaggcaagagcacgctcggatgaatgaccacacgtgccataacttgggcagaatgaacgtgcacac

SEQ ID NO: 75722 - DNA, 380 bp, Zea mays
  unsure (1)..(380): unsure at all n locations
ctggtgggctntataggcgcgggcgcgagcaggagacacatgcacggcttggcgcggcgcggggcatgcggagtcnggctctgggcgcgctcagagcgcgtcgaacacgtggaagtgttcttctgcccttgttcaacagctcgccaagattgcaagcgtgcaaatcttggcaaaaatacagcgcaggcctcctcctagcacctagggctgtctcttgtatgtgagttcccatggcagatatgccctatgcagggagatttgtggacgccaaatctggcttgtccctctgtgcacctcgcgacaaaaaccatgccaaatcttgtcaaacgtcttgggctcggcttcaaacttttccagtgggtgccttatgtggtatgaca

SEQ ID NO: 75723 - DNA, 341 bp, Zea mays
agcttcttctggacaagcgccgcactcactttagagtgcgaagctgccacatacagcagcagaggagcccctggcgctggtggggttagcgtcgttaaatcgatcagatactgcttcaactcttcgaaggctttctgctgaactgatccccattgaaagacttcggccgacttcagcacttcaaagaatggcaaatttctctctgctgatctggatatgaatcgattcaaagatgcctatctttctgtcagccgctagcccccttctttgtacttggcggctccatccgaagaatggcttcaattttgcttggattagcttcgattccttttgttgaaact

SEQ ID NO: 75724 - DNA, 480 bp, Zea mays
  unsure (1)..(480): unsure at all n locations
taagtggtcttcccattctcctaacatgtttaattctaactcatctaaccctaagtggcagaggcaacactagccccacgtgtagggggtactccagagtangctgtatccaaactggaagctggctcaatctcctcgggatcctcctcctcttcactgtctgcctccatagcgtacatgtcttgatgatgcatttctatgtgagcgttggcctcctcaagttcctcttgcacatcatggagttgattttccaggacctcaatggtgttgtcctggatttccacctgctactccaacgctntgatgttgttgctcatctatttaacctgtagatcattttccaccaattctgaagacaggtcgaccatgaagttctccctatcatcgagggtaatatttgtagtttgagtgagcccagtgaggtgcgtcaaggcatcgctttgcagggcctgcangcagtacagtgcactcatgcactgg

SEQ ID NO: 75725 - DNA, 370 bp, Zea mays
  unsure (1)..(370): unsure at all n locations
agcttctaaagggagagcacattttaggactaacgaatgttcattntgagaaagacagaatttgtagcgcatgccaagcagggaagcaagttggtgttcatcatccgcataagaacatcatgacgactgacaggccactcgagctcctacacatggatttattcggcccgatcgcttacataagcatcggcgggagtaagtactgtctagttattgtggatgattattctcgcttcacttgggtgttctttntgcaggaaaaatctcatacccaggaaaccttaaagggattcttgagacgtgctcaaaatgagttcggcttaaggatcaagaaaaattaaagcgacaacgggacggagttcaagaactc

SEQ ID NO: 75726 - DNA, 468 bp, Zea mays
  unsure (1)..(468): unsure at all n locations
ctatactcngctgcgttgttagaggccggtaatatcatctggagagcatacttgaggtgctcgcctccaagtgcagtgaagagaattcctgctcctgctctctgcagcttcagcgagccatcaaaatacattcgccatacttctgccgtttctggattatacggtacttgctgttctgtccactctgatacgaaatcaaccagtgcttgagttttgatggctgtgcgaggtcggaactcgatatcatgggatcccaactcgcaagcccacttggctattcggccaatggcttccttgttgtgaagaatgtcccctattggaaaaccagtaactactatgactntgtggtcgtcaaagtagtggcgcaacttgcgggcagttagaagtactgcatataatagcttctgaacttgaggatactntttcttcgatggacccagaacctcactgatgaagtagacangatgt

SEQ ID NO: 75727 - DNA, 376 bp, Zea mays
tctaccacgcgcggacaggccatgcctttgatctaaatgggctgcccctctaagaacaataagtcggcacccattggtggtgaactgatatctgaaacaaacggacatctatggcgccatgtaagcgagacacgcccacgcccgtggctagactggattctcctttttcttcgaatggactgtagttcatttcattaattcgacacaatttctgcctataatggttttatggcacctcataccagccacaacaagggtctggacggtctgcgatatgctaagtagagaaatcgatcctcttgaattatttcatgatgcacattgttggggacttgtcctcacatgctatgaatcaagaacaacgcaacacagaaag

SEQ ID NO: 75728 - DNA, 350 bp, Zea mays
ggagccattgggttattgacagtggatgcacacaacatatgacaggccacccacagatgttcacctcacttgatgagaatggtgatggacaaaataaaatcacatttggagaccattcaaaaagaaaagtgcaaggacttggcaaggtggccatttcaaatgatctatcaatatcaaatgttctcttagttgcacctttgagcttcaatatattatcagtgggtcaactctgtgatcttggacttcaatgcttattcactccaatagaggttattgtcacaaagatggatgatgaatcaatggtgttcaacggaattatatacaacaacctctacttagtggatttcact

SEQ ID NO: 75729 - DNA, 366 bp, Zea mays
acgtaaattatccttctcatcactagcattatcatcactagaagactcatatttagtggaggagttagatttaaccttctttccgttgccggtctttggcatgaggcacttgtggccgacgttggggaagagaagtcccttggtgacggcgatgttggcggcgttctcatcgtccgaggagtcgcttgagctttcgtcggaatcccattcccgacaaacatgggcatcgccgcccttcttcttagaataccttttcttctcctttcttctccccttcttgtcgccgcctcggtcactgtcacttgatataagacatttagcaataaaatgaccgggcttaccacatttgtagcaaaccttcttgga

SEQ ID NO: 75730 - DNA, 374 bp, Zea mays
ccatgctcttatgtgaggacataacagagcagaaggtgctgttgggctcccaattatccgaagagcaagagaaaaccttgataaggtttttgttcaacaacaaagatgtttttgcatggtcagctaatgatctttgcggagttaacagggatgttattgaacactcgctcaatgttgacccatccttcaaacccaaaaagcagaggcttccgaaaatgtctgatgacaacgccgaatgagctcggaatgaagtcaaaagactcctcagtgcaggagttatcagagaagtaaagtacccagaatggctagctaacactgctatggtaaaaaaggccaatggcaaatggcgaatgtgtatcgattttacggatctc

SEQ ID NO: 75731 - DNA, 282 bp, Zea mays
  unsure (1)..(282): unsure at all n locations
atgcaagcttgngaacaggacaaaatcagaaaggataaatctttttttacggatcaacccaaacctatgctcttatgtgaggacataacacaacagaaggtgcttgtttgctctcaattatcccaagaacaagaaaaaaccctgataaaggttttgttcaataaccaaaatgtttntgcttggtcagcccatgatctatgcggaagtaatagggatggtattgagcactcacttcatgtctatccatccttcagaaccagaaaacaaaagcttccgaaaatg

SEQ ID NO: 75732 - DNA, 306 bp, Zea mays
tcggcgaccacgggggcgcgagcgccccctggacttcaaccgaaattatatatacggggggcctcgccaaagggagcgcccccccaaagagaaaggtcattccagtagtcaaaaggggcggccctggcaacgcccaggcggggcgccggccccttccttcggaacgggcgcgggtaatcggccatactgtggacatgtcttttcttttccccgaccacacactatgaaaatgaaaaaagctaaatggaaactattctaggtgtatttcaaaaataaaaaaaaggtggatttaagaagcaaatttag

SEQ ID NO: 75733 - DNA, 190 bp, Zea mays
aatctctctctaaagaggccccaaattccttgagaagggcatcaaggctggccagagacatgttctttgcggccgactgggtcctgggagggttttctttctgctgctcaaaccgacacccttggcttttgggcttcttgcaggttttccctgcgggggcgaacctcttcaataccttggcgtaatccat

SEQ ID NO: 75734 - DNA, 430 bp, Zea mays
  unsure (1)..(430): unsure at all n locations
agcttgttcatttcctttgatagttaccatttaatccatgacaagtcagtaatgaattctacaattcaaaggccaatttgaggagggctcacgaccgctctatcaaaaaatagagcaagggatagtcgatgatgggcacagtatcagccaagacttagacgcgagaaccattaagggcatcatcagcttgtgttccactcctaggaaggtctgactcatagtttatcatgaagagaattagtgagtcattggttccggtcaaatggaatcgacaactatatgagtctgtgtctgggtgaaagtgcattcatcccttctatgagttttggtgatntggataacaacacatttaaaggtctaacaagtttgctaagtgttgaacatgaaattcagtatgatgaacatactcgaatagtgtataatgatcagt

SEQ ID NO: 75735 - DNA, 388 bp, Zea mays
agcttctaaaaggagaacatgtgatatgtcttaataatgttactttccaaaaagatagaccttgtgcagcttggcaagcaagtaaacaggtgttaagctctcatcatgccacaaatgtgatgacaacatcaagacccctggagttacttcatatggacctcttccgacccgtcgcctatctaagtataagaggaagtaagtatggtcttgttatagttgatgatttttcccgcttcacttgggtattcttcttgcaggataaatctgaaacccaagggaccctccagcgctttctaaggagagcccaaaacgagtttgagctcaatgtgaagaagataaagaaccacaatgggtctgagttcaacaatcctccagtggaagagtatct

SEQ ID NO: 75736 - DNA, 411 bp, Zea mays
tctacggtatttcatacagtcgatttagtatagtttgtagatgaacctttggcatctgtagaatatataatctagagcaaactagttagtccaattctttgtgttgggcaattcaaccaccaaaatcatttaagaaaaagatgtaagcctatttccctttcaaatatcaacttgctccacttgggagccattagtctcatcaaacataatgtcacaagaaacttcaactaattcagtggatttgttgaagactctatatgcccttatgtttgagtcataaccaagtaaaaagccttctactgctttaagatcaaatttagaacttctacctctcttaataagaataaaacatttgctcccaaagactctaaaataagaaacattgggcttttaccagtgaggagttcatac

SEQ ID NO: 75737 - DNA, 402 bp, Zea mays
  unsure (1)..(402): unsure at all n locations
ataataggagaggcttgaagaactttgaaatataccttcatcaactaacacctaatgcaattggtaggcttagtgtctacatttgggccctccgaagccaggggatgaatcctaatgccgaaactttctggctggtgcacgaactgcattaccagacgaagggccaggcagatggccttcatgagaagtttggctgctacaattttgcgtattcaaaggatacgaaagcacaggttcttagctaccgtactaagtggccaactgactggaaaagtgaatggtcttacatgaaagcagacgagaaaaggagggagaagctgatgactatggctatgagtccactgaaatngagcttctgaatacaaggcccctgagcatatgcaacttggctccccatgctag

SEQ ID NO: 75738 - DNA, 382 bp, Zea mays
  unsure (1)..(382): unsure at all n locations
aaagatagaccctgtgcagcttgtccagcatgtnatcaagagggacgagtgcatcacaactagaatgtgaagaccacaataagacccctggagctgctacatatggacctcttcggacccgccgtctatattaagataggaggaagtcagtatgggcttggtataagtgaagactcttcccgcttcacttgggtattctttttgcacgataaatctgaaacccaaaggaccctccagccctttctaaagagagctcaaaacgagtttgagctcaaggtgaaaaagataatgagcgaccatgggtccgaattctagaacctcccagtggacgtgtaccttgaggaagaaggatcaacacgaattcttcgctccctcacaccac

SEQ ID NO: 75739 - DNA, 214 bp, Zea mays
gagaagcccataagaaggcatacttggccgggccaaagaacactaaagcccccttacgatattttaactccctaacctagcgaatagcttcataaatctcttcttcaaatagcttctccccgaagcatgtcccacaatgtaatcccttatagtggaaagggccttcggggcaacaaggtcaagtcctctcaccgaaagtggccctgacactttt

SEQ ID NO: 75740 - DNA, 431 bp, Zea mays
agcttctaaagggagaacacgtgatatgttttactatcgtgcatttcgaaaaagatagaccttgtgtcatttgtctagcaggtaaacaagtgggaggagcgcatcacaacaagaacgtgatgaccacttcaagacccctagagctgctgcatatggacctttttcgacccgtcttctatctgagcataagagggagtaagtatggtctaggtattgttgatgacttttcccgcttcacttgggtgttctttttgcaggataagtctgaaacccaagggaccctcaagcgcttcctcaagagagctcataatgagtttgagctcgaagtgaagaagataaggagcgactacggttccgagttcaagaacctgcaagtggatgagtttcttgaagaggaagggatcaagcacgagttctccgctctctacaca

SEQ ID NO: 75741 - DNA, 357 bp, Zea mays
gggttcaccgtccaacgataaaacttgctatgcagcaagactggacttcagctgcacaaataatattgctgagtaccaagccttgctcctgggtcttcggaaactaaaggcgatggggatcaagaaggcgatctctaaaactgaatctcagattgtttcgggtcatattgacaaaagttgcaaggctaaagaccccaagcttgaaaaatacctagacacagtccgaaagatcgaagcttccttcgaaggattttctgttaagaatatccctcgagggcaaaatgaacatgctgatttgttagccaagtctgcaacacaagggctgcccgtaccttctgatgtattcttcgaaacaat

SEQ ID NO: 75742 - DNA, 280 bp, Zea mays
taccgatcacgttttgattggtctactacatgcacatatctctctctcttccttctgtgcttcttgaaaagcacctatattttaaaccacttggtattaaaaagagccgagtggtacaatggccacttatattataatttgtcactggaatacacgcgacttttatttataatgcatattaggctcatcccatatttatcaaatacagaataaatatgagttccattcggataaaaaaccggatccccacaaaacgaacggaataaccttctttcgtttc

SEQ ID NO: 75743 - DNA, 415 bp, Zea mays
agcttagcaaaagaaatttctataatttatttattgagctcatgcctaagtctggtaaaagattgttcatcaagtggcttggtaaagatatcggctaattgatctttaatattaatgtaagaaatctcgatatcccccttttgttggtgatccctaagaaagtgataccgaatggctatgtgcttagtgcggctatgctcgacgggattgtcggccattttaattgcactctcattatcacatagcaaagggactttgattaatttgtaaccgtagtcccgcagggtttgcctcatccaaagcaattgcgcgcaacaatgtcctgcggcaatgtactcggcttcggcggtggaaagagcagaccgaattttgttctttgaagcctaagacaccaaagatcttctcaagaactggc

SEQ ID NO: 75744 - DNA, 446 bp, Zea mays
  unsure (1)..(446): unsure at all n locations
ggatcttaagtcacctgcagcatgcagcttaagaaatccggattttatgctgtttatccagccagtccaaggaaacttcgaacttgacgtacagnggttggtggcttccactctataatatccttgaccttgctgggatcaaccgcaatccccttggcagacaatacgtgtcccaaaaattggatttcctccagccaaaacgcgcacttgctaaatttagcatataattgatgttcccttaagcgcattaatacaatccgtagatgctgagcatgctcctctttattcttggaataaatcaagatatcatcaatgaagaccaccacaaatttgtccaacttcggcatgaataccgagttcatcatttatgtgaagtgggcaggagcattctntaatccgaaacacataacccaatattcgaataatctgtaccgcgtagtaaatgc

SEQ ID NO: 75745 - DNA, 429 bp, Zea mays
  unsure (1)..(429): unsure at all n locations
tacaacactgtgcctgtatcttactcatttactaaaaggactacaatggctcggccaaggaatatgtcgatttgatgtatcttaactctttctgccctttatattttctcgaaagaaaaaacaatacaagagggataattctcaacttgatgtaataatattgtcgctacaccatcgagtgtgacagaattaagttccgaagctacaaagccgttcctaagggagcacagataggactgggcgttcggttcttcggttcggttcctcggttcttgtagaaattcggttcttcaaaaactagaaccgaaatagcaaggtaaagaaaccagaaccgactagttcgggtctcggntcttcggttcggntcctcggntctaaccgaactgtaacagccactctaatattctgaaaaacgacaacttttgtgag

SEQ ID NO: 75746 - DNA, 311 bp, Zea mays
gaaaaacagagtggacgcagccacagaaacaagtggtgccacatcacacaaacatagacgaccgacggccgctgagctactcacaaggatcaatcggccgatgcttacaaacatcggcagaaaaagatgcctgaatagggagacacttcgctcactggggatctttgcagaaaacccaacccagaacctaaaaggatctgagacagccaaaagagtcggttaggatcaaaaatagaacgacagggaggagtcagaacctcaatgaaactcctgagagagcacaacagagtctctctccaccccaaacaaag

SEQ ID NO: 75747 - DNA, 278 bp, Zea mays
aaccccggacctggcgaacaggcgttggggggctccactccacaatatcttggaccctgcgaagaaccaccgcaatacctctagcccgaaacacgcgcccccaaaaatgaatatcttccaaccacaacgcccacctgctgaactcaacataagacgatgttccctaggcgcgcaatacaaatcagaaatgctgaacacggtcctctccattcttcgaatatatcacaacatcgtcaatgaagaccaacacgaactcgatcaactcgggcatgaacacc

SEQ ID NO: 75748 - DNA, 385 bp, Zea mays
  unsure (1)..(385): unsure at all n locations
tattttatgggggggtgggaatccctataattccctatgtgtgggcggtaatcacctctgtaagtgggaacacttcagctttgatacgacgaaggtggaggagggaggtcctgctgtggtgcaaagagttgttgcgtgttgtgcacattattccaatctaaatatggtatgtcggattatccgcggtaggtcattggatggtccaacggaacgtcgaacggttcgttgtgggttactagatggtctggtatgggtttggataatccaagattatacttatatagtccggccacaggtagaggcgttgttgtgtcaattagtagatgatgtggaggcaacgactgtcctgngtatgaagtcatcagcataccatataatggttggg

SEQ ID NO: 75749 - DNA, 420 bp, Zea mays
agcttctcctggacaagtgctgcacttactgttgtatgttatactgccacatataataacaaaggagcccctagtgttggcggagttaatgctcgcaaaactatcaaatatcgcttcagctcctcgaaagctttttgttggcttgcgccccattgaaagacttcggctgatttcagcacttccaaaaatgagagatttctctctgctgatctggaaatgaatctattgagagaagccagtccccctgacaggctttgggcccccttttttgtatttggcggctccaatcgaaagataacttcaattttacctggattagcttcaattccctttgtggaaaccaagcattcaagaaaattccccttcttcactccgaagacacatttttctggattcaactttaaaccggcttgtctaaaa

SEQ ID NO: 75750 - DNA, 405 bp, Zea mays
  unsure (1)..(405): unsure at all n locations
gcttcctctcagcttctccaaagtagccctattttatcatcatgggcacgtcggcttcagacacagtagacttctcaaaatctaggtggctgggttttgatgggatcaaaatgctataatcctcctcttctccatcagctttttcttcctcaatatcagcctgttcagcttcggcagcaggtgtatcttcataaatggttccctctgtcacaactaaacccgactgtctcatgaatttggaaatcagagctgtctcggtggcctcggtctcctctccttcacgagtcacccttgcagtcgagcgtactctggccatctgatggattntntgcggtttttacgaagttgatgtctttcacagttttgacgaagttctcttttttgacgaagctaactcaaaatgat

SEQ ID NO: 75751 - DNA, 373 bp, Zea mays
  unsure (1)..(373): unsure at all n locations
atttgtagcgcatgccacgcacggaagcaagttggagctcatcatccacacaagaacatcatgacgaccgacaggccactggagctcctacacatggatctatttggaccgattgcttacataagcatcggcgggagtaagtactgtctagttattgaggatgattattctcgcttcacttgggtattctttttacaggaaaaatctcaaacccaagagaccttaaagggattcttgagacgggctcaaaatgagttctgcttaaggatcaagaaaataagaagcgacaacgggacggagttcaagaactctcaaattgaaggctctcttgaagagganggcatcaagcatgagttctcttctccctacaccc

SEQ ID NO: 75752 - DNA, 419 bp, Zea mays
gcttgaatagctagctgtggaagaatcttttatatttctgtattaacacttgtaaagaatattgtaacttaagaattagattctactctgtacattttgtccataccttgtaatatattttttacctttccatcaatgtgtggagtgcttcgatgtgaacgaaacttgtactttttgagccgaaggcaaaaaacacctttccttcttttcgtacacaacgaagcattattctgctttcgaagctgctttcttagagcaaagcaattgtttatatctgtatgatatgatgatgatggtcctatgtatgtctaaatgaatgtttatgtatgcaatgtatgatgtaatgtatcgtgcaaatgagtgcccaaacacacacattcgaagcttattcacaaccttcattccctaaagaatgactg

SEQ ID NO: 75753 - DNA, 377 bp, Zea mays
  unsure (1)..(377): unsure at all n locations
agctnttaaaggagaacacattttaagactatcttatgttcattntgagaaagacaggatttgtagtgcgtgtcaagcagggaagcaagttggagctcatcatccacacaagaacatcatgacgaccgataggccgcttgagctgctccacatggatctattcggcccgatcgcttatataagcatcgatgggagtaagtattatcttgtgattgtggatgattattctcgcttcacttgggtattctttttacaggaaaaacctcaaatccaagagaccttgaaggtattcttaagtcgggctcaaaatgagttcggattgggactcaagaagattagaagcgacaatggaacgggagtcaagaactctcaaactg

SEQ ID NO: 75754 - DNA, 427 bp, Zea mays
  unsure (1)..(427): unsure at all n locations
atcttaagcactgagctgcagctatgaaatcttatccgatatgttctttacggcgangcccaagccagcccatgttggtctttgcgggtaaacatgcatctagatcgacattctctttaataaaaatctactaaataaagcttgccatcagaaacacctttaaatgctaatgaaccatcactgactaacggaaagcagattataaccaagtggttccactaagaaaacataagaaattgaatgcttggtagtgatggctattttacctaaaccttttactttgccttggttcccatctctaaagataatcgtatcatgggaatccttgttcttgacataagaagagaacatcttcttctnctctgtcatgtgggttgtgcatacgctatcaataatccaacttgagcctcccgatgcataaacctac

SEQ ID NO: 75755 - DNA, 411 bp, Zea mays
  unsure (1)..(411): unsure at all n locations
gcagcttaacgcccctaagaaattgttttatttttgttttggcnccgcccccatgcaacaagatagtgaaagctatatnttatatccctgcaaatatcctgagcacaagattaggtaaattcatgctatgaaacctcacactgtttctcattatgcattcatgtataagaatgaggcttctagatctaggcattccactcatgttaaaatgcctaaaagaaaatccctaatgcatcaaatgagcatagcatttcatttaaaacttttgatgcttcctatgtgctaacaaacaaaataagcaaaatagttgccaaatatgttgggggcaaacacaagaatccaaaaacttgtgtttggatacttaaagtgcttgtttctaatgtgaaaagacacaagaccggtnggatacct

SEQ ID NO: 75756 - DNA, 374 bp, Zea mays
  unsure (1)..(374): unsure at all n locations
attggagtctcgatcagaaataatggacttaagtaccccgtgaagcctgactactttcttcatatacgagggaaccaattctgaagctgaatttgtggtcttcatgggaataaatggcagattagtcaagcgatccactaccacccatataacatccctgccccgaggagaacgaggtaaacccaccacgaaatcattgtgatatgctcccatttccactccggaatttccaatggcttcagtaaacctgcaggccgcttatgctctgctntcacgcgctgacatacttcacaggcggccacatacttagaaacgtcaaccttcatccgcttccacaagaagatttgcttcanatcttggtacattttggtttc

SEQ ID NO: 75757 - DNA, 371 bp, Zea mays
  unsure (1)..(371): unsure at all n locations
agccatgggagcgcggcttgccccaagacaatgggtaactatgcattcatcacgtcctcggacagttccacagctcgagcagcggtggagtaaacggccacccagccccctggatcctgcttaagtcatatttgccgacattggatacctcgaagggagggggccattgaacggccctaacgcgtggagtgagggcaaacactccacatgtgtcttcctgtcggtggagaagaagcctgccccggagaggggagtagctgttgtggctcctcgaaccgccccgggtagtaccagcagncgaagccgccgctgactcggttctaggggcctgactccgagatggatgccatgatccctgtcgtacctccccc

SEQ ID NO: 75758 - DNA, 384 bp, Zea mays
  unsure (1)..(384): unsure at all n locations
gattccacgggaatggaaaaatcgtgaaaggttctgacttatttgggattgaaacccatccaatcccactcaatccacatggattgagagaaaaacgaacaggccctaatattgctcacagtccagaaaaatggaaaatcacagaaaatgatttataaaatgaatttcttatataaaaacagctccagaatcttatttaatctttagaaaattcacattttgtccaaattgacccattccagttcctataattntgttttaatattggttatcatttagtaccactattgtaacatgaaacctatattaaattggatcaccaaattaattttgtatcaagcacatacagacttcagaanatcataactaatttatcttagccct

SEQ ID NO: 75759 - DNA, 374 bp, Zea mays
catgctgctcgaactcctaacgccgacattcctgtttctcgtgtaggcggtggtgcaacctcttcaagtggctggactggccagtcacaaagtgacgaagccgacgctctgcaaggcgagagggcaagaaagggattactgactttcctactgtgtatctaaggcgagccctctacaaatgacaccgttagcataagagtaagaacagaactaatatgaacaacaattaaaccataaaaagaatggaaaacaaagtaaaataaaacaaacttttagaaagggatgatatatatagtagaacatagagttggtcgaggtgatcgactttgaagtgacaccaaaggtcaaggtgagaatagtggtatataatcctt

SEQ ID NO: 75760 - DNA, 329 bp, Zea mays
  unsure (1)..(329): unsure at all n locations
agaccggggcggccaaccacaccgggggaagaacccctccgaagaagccagcgcccaacagcttccggacctcccgtcagaagaaggcccgccgcacaacggaccgaccccgaggcttctgacccaccggcttggcattagggcggaacttcagatggagctcgaacacctccctagggatccccagcatctacgaaggcgcccacgcgaacacgtcgacatttgcctacaggaaagcgacgagcgtgcagtcctattttcccccacaccactcgcaaagcgagcggcgcggnggaaaccgccgacagccagatggccttgacggggac

SEQ ID NO: 75761 - DNA, 398 bp, Zea mays
aaccaatcaaagaagaggtgtacgtggagcaacccatggcttcaaggacaacaagtatctcgaccatgtgtataagctctctaaggcgcactatgggcttaagcaagcaccaagagcatggtatgaatgccttaaagatttctttatttctaatgctttgaaggtcgggaaagatgattctactcttttcactaagacatgtgatggtgatttgtttatatgccaaatatatgtcgatgacatagtatttggttctactaaccaaaagtcttgtgaggagtttagcagggtgacaatgcaaaaaaaattgaaatgtatatgatgggcgagctgacatactttctaagatttcaagaaaaacatctcaaggacggaatcttcattctctcaaaaaagta

SEQ ID NO: 75762 - DNA, 427 bp, Zea mays
  unsure (1)..(427): unsure at all n locations
atatgtcaaagcgctcctaattattttgtcgcaccatcatctagaatctgaaatgttgagaacaagaaaacggtcacgtaaaatatacaagtaattagatgcatgggttaatggtaacggaaggggaaaaacagttacagtgatacatgcaacgtatttgaagaaatgccaccacccctcatagcggcatagaaactacaggcgagaggcaatgaccgatgccttcctaaggtgtctctcacctgttgaagagggctgacttgccgacattggggcagacgacgaggaagactgcnataaagcattggtactctacaggcaacatcttatgcttatgacacatggtacaaaaaatattaacagcccagtgctgcactatgtagtgattactgaagatcttattaaactaaaccgcaccacatttaca

SEQ ID NO: 75763 - DNA, 436 bp, Zea mays
  unsure (1)..(436): unsure at all n locations
agctaattggagttgccattaatctattttatttactcctcgaagntctggaactcctgaaaattcttcgtgttgtcgtcatcttctcctgagcagtggttgcaatgtgatcagcctggtgttttgtgtttaagcaagggtgagtacacatcaacatactcaacaaatgtcccgtttgggtgaggtgaactatctntatgtggagttaagttgaaagcagttacttttggttcgtcatgtatttattattagtagaaggcgacttttatcaccgaacccaagttgttattctaaaaggcaccttctcagagaggaaaatactataaaccataagtatagccatcaacattaaaccattattatgaagttatctagagtagctctaatcaaagaggatcccaaggctgatcataaccttgagcatgtgtgatataca

SEQ ID NO: 75764 - DNA, 373 bp, Zea mays
agctaggagtctgtgataatccatgctggttgtttaataacgcgcacgacaaagctgccaagaatctctatcttgtctgtcgcagcagcagcagcagaagaaaggctagtgattgcgatgctgaggtgcgaaggctgatcgtcactccaaccaaggaatactgtatgccgcctcaagtggagcgctccaaccgcgtcatccggcattaccacgagctgtcagatcgcttcttgagggttacttttacggacgagggtatgctgccgctgaaccctaacgcgctgaccctccgtgcggtgccctcgacgtcgacgcccagcacgttccggcagatgacaagcgtctacaagcgtgtccagactgccctgacgga

SEQ ID NO: 75765 - DNA, 390 bp, Zea mays
ccacaaccagcccatgcaagtcttagccattaagcatgcatctaaaccggccttctcttttgcaaaatcaactaaataaagtttgccgtctaatacacccttaaaagctagtgaaccatcacatcttctaaagacagacacatctacattagtaaatagacaattatatcccatattacataattgactgacagatagtaaattatatccaagagactcaactaaaaacacattagagatagagtgctcatttgatattgcaatcttgcctaaacctttcaccttgccttggttcccatcaccgaatatgattgaatcttgggaatcctttttcttgacgtaggaggagaacatcttctctctccccgtcatatgaattgtgcatccgct

SEQ ID NO: 75766 - DNA, 382 bp, Zea mays
  unsure (1)..(382): unsure at all n locations
gaaaatttactcctttcaatacctcacaaaataacgtcttctcagacgcactcattgtatatgatgctggtggtaaatataacttgtcacccactggaataagatgaaactcagttcgaatgcctagggactgaagatccaaacgatatttcaagttatccttggactttcgttgaatgcctaagagggtgttgacaatgttatcacacacattcttctcgatatgcatgacatctaaattatgtcgtaacattaaatccttccaatatggaagcctanaaaaaatagacctccttttccatatgataagaagctccccttccttcttctttgctttctttttatgttggcaacctttctcatgcactgtgtgcatattctc

SEQ ID NO: 75767 - DNA, 396 bp, Zea mays
ggcataaatgcgctaacatatgttgatgacatcatagtaaagagcacaaagcaagaaaaccatgttgctgatttgcaagaaacatttgccaactttagacgagccggtcttaaactaaatccagagaaatgcgtcttcggagtgaagaagaggcaaattcttggttgcttggtatcaacaaagggcatcgaagctattccaagtaagatagaagccatacttcgaatggagccactgaagtcaagaaagggtgcccaaagattgacaggaaggctgacattgttgaacagaatcatttcatggtcagtagagaggaacttgccattcttcaaagtgctaaagtcagcagaagtctttcaatggagaccaaatcagcaaaaagtcttcgaagaactg

SEQ ID NO: 75768 - DNA, 438 bp, Zea mays
cagcttttcttggaccagcgctgcacttacctttgtttgttatactgccacatataataacaaaggagcccctggcattggtggagtcaatgttggtagatctattaaatactggtttagctcttcaaaagccttctgttggattggtccccattgaaagacttcggctgacttcagcacttcgaagaatggtaagtttctctctgctgatctggatatgaatctattgagagatgccaatcttcctgtcaatctttgagcccccttctttgtagttggtggctccatccgaagtatggcttcaattttacttggattagcttcaatcccctttgttgaaaccaagcattcaagaaatttccccttcttcactccgaagacgcatttttcttgatttaacttcaagccagcttgcctgaaactggcgaaggtcttctg

SEQ ID NO: 75769 - DNA, 418 bp, Zea mays
ttacaaacagcgtctttttcttctcaaagcgaagtacttgggcgaataaatcccttatccagcaactcttgccattgcttcttcaattctgccaactcagcgggtggcattcggtagggcctcttggaaattggtgtcgttcccggttgcaactcgatggcaaattcaatatcccgggctggtggcattcctggcaattcatcaagaaagacatctgcatattcgcagaccactgggatcttcttcacaggtaactttgtcataaaaaaagcacatgacagagtagaaccttgactaggcagaattaaagtaaagttcccgcagaacggagaattgacttccacggtacgactggctacatcaagcacaacttggtgcgaggtcatcccattagcttctagaataatgtccacatttt

SEQ ID NO: 75770 - DNA, 324 bp, Zea mays
gacggggagcctacttgatgtagactcttctttcctctcctctgatgcttcgaaggcgacgggttgctcctcaggtgtggaagcggcccctcgctccatgatttgtatggagtctttgatcatcaattgaaagctcacagactttcctatcactttctcaagagacattagtgtatatctatgatcaccacggattaattgaacttgagtagggttaagaaaaatgagtgatctaagaataaccttgaccatttcatggtcgtcccatttggtgctcccgacgttgcccacttggttcaccaagtgaaacgtccctagaggggc

SEQ ID NO: 75771 - DNA, 389 bp, Zea mays
gattgagagagttaattcaattcttatcaactcaagctatcaatcttcaataatctatatatccaagattgacccaaagttattttgaattattatgtctaaaactcatatcatctcgagggagatattgatgttgtaggaaataaagaattatcatgtgcggaaaatcaaggcctacaacatggaggaatgccaaaggatggtaacacttatgcttttaagtgcaagtatcttaaattatcatttcttatgtgtctggtgtagtcacatagaaaaaggaagcgcttaaaatgtttttaaattatgtcaccattctttgaagaaattcctcttatatgggagaatgtgtattcatcatttctatattatgacaatctgcatgctttaaa

SEQ ID NO: 75772 - DNA, 389 bp, Zea mays
  unsure (1)..(389): unsure at all n locations
gcttctaaaaggagaacacgtgatttgtttttcttacgtgcaattcgaaaaagatagaccttgtgcagcttgtcaagcaggtaaacaagtgggaggagcacatcacagcaagaatgtgatgaccacttcaagacctctggagctgctacatatggacctcttcggatccgtcgcctatctaagcataggaggaagtaagtatggtctagttattgttgatgacttttcccgcttcacttgggtattctttttgcaggataagactgaaacccaagggaccctcaagcgctttctaaagagagctcaaaatgagtttgagctcaaagtgaanaagataagaagcgacaacgggtccgaattcaagaacctttaagtggaggagtttcttg

SEQ ID NO: 75773 - DNA, 424 bp, Zea mays
tgcactgggccagctacagtcttttttttatttatttggtgcctgaatcgaacggagggggactggaaaggagttggccaccgcggtggctgctcggcggcactggcggatcgcggggaaggtcccagaagccaccgctggctcgggcgatgttggcgtaatacggaggaggtaacgggggaagcaacccagcgctggggtgggttttatatgcgcggacgcggccggggcgcccgcttcaccgtttggcgcgacgccggcactccgggcgcgcgcgccggcctgctcttgcgagctcatagcgcgtctaacacgtggcgcggtgcttctgcccctgttcctcgctctgctgagcggacaagcgtactaatcttgccctaccggctgtggagatttcttcctgccctaaggctacctatttatg

SEQ ID NO: 75774 - DNA, 403 bp, Zea mays
  unsure (1)..(403): unsure at all n locations
gctttctggcaacagccttcggcttcacctttgttgcttcaaggccagcagccagaaaggagccagtatgctccacaccagagggacttcagagagcagttcgaagctcgtacagtcaacagcactgtaccagagtcaaagcacatctactgacaaatatcctaccttaataacaatctttttcattcagttttattttctgcaagaaaggacattgtttaagtttcatgtaaatagtttcgttgattcccacaaggaaaatatatttttcacaggcttaaattgttgaagtttaaagacttgtgataacaaagaggaccttctaactatctaaaattcttcgaagcaacaaanagtcgttctaaagaacgcaaagtaagtttgccgaagtcacaaaaaagtc

SEQ ID NO: 75775 - DNA, 325 bp, Zea mays
  unsure (1)..(325): unsure at all n locations
cataaaccggatntctaagagccgaaagcctccaaacaaacctcaaaccatcctgcatgcttttttacatcgcacgtacactcgcaaacgggtcgaatagagtataatgccatcagagacaaagcccaaaagaatagaagagagaatgaactaaactaacccacatgtgatatgtcagcgcggcttttaacgggtgacgggcataaaataagaaaatatatccgggcccataccaatatataaatatatatatataacaaatgacccaatataacactcataggaaattgccatatctatactataacggaatattatccatcag

SEQ ID NO: 75776 - DNA, 412 bp, Zea mays
cagcaatccaacagatagaggatgttggtattatgcttcgacggcccgaaccaccctaaaccctcgcgtgttcttgtggtcgcccatccatctcgcaaacaggcgaaatgctcaaaccctcctcatcttatgatttaaggcgggcgcactcccgcacctggccggagatttcctctccgacaacaaggataccactatggatgatgataatgttgaacaccaaaagtggcagacaggccggctcttgggaccggacaattcgcatgccccgcgattaaaataacccgagcgattatcctatctcatgcggggttatccatctaatcacggaatatttggtgggtatcgcttaagaacaagtccaaacctccttcgctataaatataaaggggcacgaccgatcgagaacccc

SEQ ID NO: 75777 - DNA, 334 bp, Zea mays
acggaccccggccacggaaccacgaacccgcgaaaccctaatactccccccctccgaagcaagctccaagcaggagcttcgttcgacaccgacagacaagctgcggtgacggataacaaccgtggcagcacaacagcgcaaacagcaacgaacgctgcggaaccccacacttactccgctgccatacagggctgcaagaaaaaggcgaaacgccagaatgctacaccaagcggacacccgctcgcactcgctgcggggtggaccgcagacaccgaacagcaaccctgcaaggaggggccgctacccccagggagaaagaactgtttctccgaca

SEQ ID NO: 75778 - DNA, 385 bp, Zea mays
tttctaagtcattcctaaggggatgcagagcttaaatgccacctaaggtaaaggcgaagaaactacaaagtcggtcctaataagatgcaaagcttaaatgccacctaagtaaaaggtgaagagactccaaagtcgctcctaacgggatgcggagtccgggtatgtattcgatgagtttttaccttccgcatacatttgcatacttcatcgcatcatccttggcattcatacaaacatgcattaggcatctgtacacaaagcataaagcactaacgggaaaagcgagggtttctgccttcactaagaaaacgcttcgtatttacagagatacttcgtttcacatgaactttcgttctatatgtgaatcgatctttgctttcgctca

SEQ ID NO: 75779 - DNA, 286 bp, Zea mays
gcgcacacaaagcacgtctgcagagtcgcgcaaagctaggcaaacgggcggagtcatgcatatgcccttgttggcacaactgctgctggttgaaaaagcagcttatctgataagctggtgaaaaacagcttctgtttggcggctgcttttagtgtattctgagaagcagctgaactgataaactgctgcagaagctagctgtttggcaaaacttctgcttatatttgtgaagaaactgaaaataagctgtgccaaacaaggccatagtctgtcctggcgccctaac

SEQ ID NO: 75780 - DNA, 347 bp, Zea mays
tttgacctggccatcttgcttctcctgtacaagcgccgcactgactgcagagtgatatgctgctacatataagagtaatggagcccctggcaaaggtggagtaagagttgtcaagtctatcaagtattgctttaattcttcgaaagccctttgctgagccggatcccattggaaaacttcggctgacttcaatatttcaaagaatggtagattcctttctgctgatctggatataaatctatttaacgatgctagccttcctgccaaccgttgggcccccttctttgaatttggcggctccatctgaaagatagccttaatcttatttgggttagcttcgattccct

SEQ ID NO: 75781 - DNA, 361 bp, Zea mays
catgcaaagtttaaccattaagcatgcatctagaccgggctcttcttttgtaaaaatcactaagtacaggttgccggctagtacacccttaaaagctagtgaaccatcacatcttctaaagacagacacatctgtgtgtgtgaataaacagttatatcccattttgcacaattggctaacagatagtaaattatattcaagagactctactaaaaacacattagagataaagtgctcattggagattgcaatttacctaacccttttaccttgccttgattcccatcaccgaatattattgaatcttgggaatctttgtttttgacgtaggaggtgaacatcttcttctcccccgtcatat

SEQ ID NO: 75782 - DNA, 318 bp, Zea mays
gatgtgataaaaatccaagatgccaccgaaaaaaagacatattggaaggccgacgccgccaacaaagaaaggagtgtaaaccactgactccggggtatcttccagggggacagtaatcccgtggcaagcacgccaacaacagagctcccgtggagggagaaccccgatggaaacaaagcggagaagctccacttcagaaatcacagacatatggttacctgcgaaaggtaactgactgttggtgtcgatggcggagatcactgcagaagacgagttcgcgagcttcctcttgggcgccatcttgcttctcgctggcga

SEQ ID NO: 75783 - DNA, 428 bp, Zea mays
cagcctcggcgtttaaaacagattggtagtgttttctaatatgtctgaagctgctaagaaagctgctgctgagatgaagctgagtcctgatgaaaaaaaaaacctatggtttcttatagccatggccaagaccaacacagaaaagatcaccagtggaattctgggagggcttgctgaagatactggtgacaatgaaagttatgatgtggacagcggtggcgaaaactccgaagatcggccctggcgaccaagccattcagtttatggtaaatcaactatcaaagagaatcatcttggttatatgagaggaaagtatttcccggatcttgccattgtgagggcggacgaaggggaaaagacttgccacactctgagaaaatgaagttgtgtgtaccgaactttttgaaagccgattgcgatccccttga

SEQ ID NO: 75784 - DNA, 302 bp, Zea mays
aacaaggcgacgacgctcggcaaaagcttacgccatcaacacagaagaaccctaaccagtacgctatagaaaaagagcgcaatacacaggacaggaccgccgcagaggtgaggcaaacgagctatacgaaacgctacgaggaaaccaagaacgctactcccgaagaaaccacgaacaccacctccagagaacaccagaactctcgctccaaaaccgccgcacgagcgcgggaacggccacaaccgaagagagaacgaaccaactcccgagtgaggtgagcaatcctcccgaacggcggagga

SEQ ID NO: 75785 - DNA, 103 bp, Zea mays
ggagcagccactgcacaaacaaaggagccttttgcacaccgcaccgaccgcaccaggatagtcccaccggggagaaccgagaacattccggtggggcagccaa

SEQ ID NO: 75786 - DNA, 377 bp, Zea mays
cgcttttatttatcagcgccaccggggtcttccagttcagcatgcgaagtggcgaggaactgcaaaagctcatctatcaactaagggcgagtgctccaacgggagaatgaaagaagagggaggcgaggtcgcaaattcatctttataagctgggacacagggagtctagaggacgctgggaagaagaagagcaccccccacgactaattaatggtggcagcggtagttattggaaaccggcgttcgcgaatggtgggaaaggaacccggcgacacaattagtggagaagtagggaagaaaaaaggcctccaaaactgacgccattgatggccattgtaagcgcccacattgaccacagaaacggaactatcatcaac

SEQ ID NO: 75787 - DNA, 362 bp, Zea mays
cgcctcctagcgcggtgaagagaatccctgctcctgctccctgcagcttcaacgagccattaaaagacattcgccatacctctgcaatttctggattatacggtacttgctgttctggccactctgatacgaaatcaacccctgcttgagtcttgatggccaggcgaggtcggaactccatgtcgtgggatcccagctccaagcccacttggctattcggtcaatggcttctttgctgaaaagatatcccccatttggaaaccagtgactactatgactgtgtggcgtcaaagtactgccgcagcttgccggcagttagaaatactgctacaatagcttccgaacttgaagatacttttctt

SEQ ID NO: 75788 - DNA, 287 bp, Zea mays
atcttaagtcacctgcggcatgcagcttacaaatgacagtgcacatttattttttttgagtgagcgggagtggttggccacaaagcgtgtcaaatgagtttgcggtatgcccgtatttatacgccaagagcgttgaaaattcagagaccccgcttgtcagtgattgttgctattctagcaaagggaaggtgtgtttttagacctttcgcgtaaagccttcgtccaggccgcaatctgaattcgttattataaacaaattaatattgcgaggggctaggtggtttttt

SEQ ID NO: 75789 - DNA, 366 bp, Zea mays
gcgatgctagagccaacccatggttatcatagcaattaaacaagtgtccagttcatctctattaaaatcaactaagtatagctgaccctctaacactcccttaaatgctactaaatcatcacttcttctaaagacagtaatacctatatccgtaaaaagacagtggtaacccatattacataattgagaaactgaaagcaagttataatctaaagagtctacaagaaaaacattggaaatagaatggtcatgagatatatcaattttaccaagtcctttgaccaaaccttgatttccatccccaaatgtgatagctctgtggggatcattgtttttctcgtaagaagaggaacatctcttctcccc

SEQ ID NO: 75790 - DNA, 351 bp, Zea mays
actggcccacaacccgattccaagagctcagcccaaccagacaagagacaactatatatttcttgttcaacaacaggccacagataattagatttttgccactcacaatgttatcttcttattataattaccactgtgtttatgaattataggtccaactacgtctatgaaatgttggtttgatggtaattttacaaacatatttcttgctgatgacaaatgtcagaatctctcatcaggccaaggtcttgaatgtacgaaatacgccttctttcggtgaaggcgtactttattagaatttgctttcgctccaccaccgggcggagaacggacgaacactgtgcggatctg

SEQ ID NO: 75791 - DNA, 362 bp, Zea mays
  unsure (1)..(362): unsure at all n locations
agcttgtgaaggttcttcattcccacatgatcnttttctgcgatgccacaaccagcccatgctagtcttagcaattaagcatgcatctagaccgacctcctcttttgcaaaatcaactaaataaagtgtgtcgtctagtacacccttaaaagctaatgaaccatcacttcttctaaagacagacacattacatttgtgaataaacagttatatcccatattacaaagttgattcacagacaacaagttatacccaagcgactcaactaagaacacattaaaaatagagtgctcggatgagaatagcaattttcctaaccctttcaccttgccttgtgtcccatcaccgaacatgattgaatc

SEQ ID NO: 75792 - DNA, 396 bp, Zea mays
  unsure (1)..(396): unsure at all n locations
agctngtcaagcatattttggtacccatctcttgattgtgtccatcacggntagntaacaaagatctaggaacccaaaagtcctttgtgttagcactatgtaaactcattacctttctagcacaagttgcaatgttgggttgcctagttacatgagaattaattgacaagctaggagtggaattgttaccaatgggacaatccttgcattgatgtcccttctttcggcatgtgtagcataggcgttttgcaagttttgaagatatcttctttccttgcttgtngcatgctacatggttagtaagaactttcttttctaaccctatgccttttttgtttaaatggggacaagatctaagcaagcgttccttcttggagcatttaaaacaaagtctat

SEQ ID NO: 75793 - DNA, 420 bp, Zea mays
  unsure (1)..(420): unsure at all n locations
agcttcataacccctagaggaacctactgctaccttctgatgcctgaaggggtcaagaatgctggagaaagtttcagtagaatgactgctaaagtcctttgctcacaaattggtaggaatgctctaacatatgttgatgatatcataggtaaaagtactatacaagaaaatcacatagctgatatacaagaaacactcaccatatttagaaaggcaggtctcaagctcaatccacaaaaatgtgttttcggngtaaagaaagggaagtttcttgggtgtctcgtgtcaacaaagggaattgaggcatatccaagcaagatataagcaatactttggatggagccacaaaagtcaagaaaagggcgcccaaggctgacaggaagattggcttattgaacagatttatttcagatcagcgga

SEQ ID NO: 75794 - DNA, 395 bp, Zea mays
  unsure (1)..(395): unsure at all n locations
agcttggatcgtgcctctaatntctttcttttgttccanatgtacatgtataaccaggaaggggaaaagctactacttgtgaattattgtacccgttcataattcttattgccgagagaaacggatggagtacacgttggagtttatagtgtgtttggtttgacaaatgaagtgatccatcttcttcttattcctcacttttttatttnggttgtgtaatataatgagttgatccatcaccatttcattcctcgtgagctaataattaatatatacatgaggagtgggttgattccactaacattaatgtaatgaacttatgatgcatcaccttataaattatagagtgactcaacanatcaaacataacagtagtggatgaggcagcacaacag

SEQ ID NO: 75795 - DNA, 360 bp, Zea mays
  unsure (1)..(360): unsure at all n locations
gcttcggaactacaacatatcccgttgactattggtcgtaccgacttatagataaaatgaccttttagccttcaaaggtctgagtcattgttgtaaacttttatgaggggtataattgtaattcctcatgagatgtgtcctgtgcctataaatagtgaacagtattcctttactattcacgcattcctgtaattgctaacgcatcactcgggaattattgctngtcaaggcaaaggtataaatgtacctaaacgtcgtattcaatatatcttaaattcatataataagatatgtgaatgatgccatttattcttaatatatctatctttaatgttccatggttaacattactttgtatta

SEQ ID NO: 75796 - DNA, 366 bp, Zea mays
  unsure (1)..(366): unsure at all n locations
agcttgtgaagattcttcatcccaacattgtcttgttgacggngccaaagccaacccatgttagtcttatcaatcaagcatgtgttgagctcagctttatcaaaatctactaagtatagctgaccctctaacacaccttctaatgctattgaatcatcacttcttctaaagacagtgacaccaatatcaataagaagacagttgtagcccatttgacataattgagaaacagaaagcatgttgttgtctaaagaatcaacaagaaaaacattggatatagtatggtcaggtgatatatcaattttacccaagcctttgaccaaaccgttgatttcatccccgaatgtgatatctcgttggggatct

SEQ ID NO: 75797 - DNA, 451 bp, Zea mays
  unsure (1)..(451): unsure at all n locations
agcttataaggagaaaaatgatggtgctgtaatttctgaatatatcgatataaataaagagcttcaagaggtgaggtaatttcttattttatcttgtaatgcgatccctcatgctcgtgtaggtacacgttagatacgttggattaatgatactcacaaatgatataaataaagagcttcaagtatcaatctgtatttccatagtcaattagagttactaaatcttctatataattgccttgtatatttgttatgttttgtttgtgcagatttggcgcatgagtgattttaaatataccctggtgtcactgactctatttaagtgcctttagctttcgtagcatgatgcacctttaccttctgctcttttagccaatagcagctaatagagaaaggnggcgatccttttttttcttttagctcatgtatttctgtgttcaatgcactttca

SEQ ID NO: 75798 - DNA, 290 bp, Zea mays
  unsure (1)..(290): unsure at all n locations
agcttgcctaactatgttatgtgttattgttaattcnatttaagctcttgactgcttgtgtaattctttatgttctgggaaattacatagtaatggtgttaggaaaagcatggaattattatttacgagtataatacatttccggtccttaaacttgcctacctgtcgatccacacacttttaaagtttgtatcctctaatcgtgnttgggtctaagttagatccaaatggaccgtggntcaccttgtattttacgagtgacataaatatctttattcttataattgaat

SEQ ID NO: 75799 - DNA, 375 bp, Zea mays
  unsure (1)..(375): unsure at all n locations
agcttaccacaatacaatccaatgtggtgcatctacacccacaacaacgaanaatgaagcggtacattcaagccagtatgtatgatgaaattgaagctcaaatatttaataggttgggtccaatacccaaacacatattctggatcatggggagaccaagctttggacctcataacaaaggcaaaaggaagatctctagagagaagtctatcacatagacgttcaagggccttatgtaagaacagaatagtcccatatcctaataacttttacccaggaacatctttaacttaaggactacccacacaacgatgtcatggtaaccagctacaacataaaaggcttcaccattcatgatgtattggttgatataac

SEQ ID NO: 75800 - DNA, 405 bp, Zea mays
  unsure (1)..(405): unsure at all n locations
tagggcgcataattatacttttgatatcttctcgcgctgncagatcattcttcacataaaaccattctgtcatccagtcgccgggccatctcttccgaaaggtcggcacgggacagcttgacccggaccgagaaacgaaattgtagcagccaaaattattgtgatactgttccttaccccaaggttntgtttcgtatgataattcgtgtatattgcagaaactttttgcatcaggcttcagaccttggcttctcacggcccacacgaagatatttagccttataattgcctcgggggtaagttgatggagataaacttcgaatattttcagtacctccacaacgaagctgctcaagggaaatcgcagtccagctttcaaaaagcttcngtacactacgacttcat

SEQ ID NO: 75801 - DNA, 439 bp, Zea mays
  unsure (1)..(439): unsure at all n locations
agcttgccacttgatatcatataagagaatgtattctcatgatatgttcactgagaaaaaggttcttcagagatttaccagacattgcaaaaaatggaattgcaacttgcataaatatcattcgaattcccaagcttactcagttatgttggttccgtaaagcaacctttttccatgtgacttgtaggtgtcaagtggaaaaggcaggcactttgtaaagcgaaaagttagactgatgtttacttgtacatgaactatccctctctgcgtcaattctccgttattcattgctagcaagatgtgtttttttctacaagagcaaccaactaagcttggatgtaacgttaccatggccacctccattcatgaaacgccatcattttataactgccaccaagattaatgcatccctatgggggtgaganatacatgatgatca

SEQ ID NO: 75802 - DNA, 433 bp, Zea mays
  unsure (1)..(433): unsure at all n locations
agctttagaataccttgtattgcgctaacatttattattcccatggcacccgtaccattccatgtctctaatgcactgagggtatgacgccacgcttctgtatgtgcctaccgccaagacaccttgagctacacatgtgggttgttattatcttgaaagcgtaattgtgtcaatacaatgaccttaatatgcttgcttgatctatatttttctgccatcaagaatgaggcaattagataaggatatatgttagctctgtcagtattgtctgagtctttaagcgtagcagtaaaagttttagcacaccattattttagttattatgatctgaacaacctgttntatatagggagcttgtggcaaatgcatcctcacaacaggacgatggagctcattgcgtcaagtggtggtcgctcgactccctcctctacac

SEQ ID NO: 75803 - DNA, 461 bp, Zea mays
ggatcttaagtgacctgagctgcagctggccaatcttatcttccaagcttttctatttataatggagacatcttagagatcatggagggaggaaaaacatcccatgaccaagttatttatttattatttttttgttataggatgtgagtacccctaacaacctgcaaataatgaagccatatcacccataacaataaaatgttgccaagtaacgagaaacgaagttgaaactcttacctgaagtgttcttatgggaaccatatctagagcatggctaggatacgcaacacctacacaagtagttcaaatattatatgtagtagtcgctaactcgctacattaactatgaagattaaaacgaaatagtagtattatcacaataaaacttggtaccatagcacagtcaagcattcatatcgatctgcttatacaaaggaaattcatgaaaagtgttatataat

SEQ ID NO: 75804 - DNA, 398 bp, Zea mays
  unsure (1)..(398): unsure at all n locations
agcttctcttttaccccgaaacgttatactttcttatcggtaaaactnttaggtagacataatctccaactagaaagtacaagggttgtcgtcgcttgtctgcataactcttctgacgagcttgagctttcttcaaattatgaattattcgttgaactttctcttctgtctcctttaccatatcaggcttgaagaaatttctttcaccaggttcagaccagtttaacggagtacgacatcgtcgtccatataaggcttcgaagggtgccatcttaatactctggtgatagctattattatatgagaactcggctaatggtaaacaatcatcccatttttgtgggaattccaagcacaagcctgtaacatatcttcaagtatttgatttaccctctcag

SEQ ID NO: 75805 - DNA, 305 bp, Zea mays
atcttactcatcatgcaaccatcggacctagcaagccgagaccagagcagctccacctcggccttagcagccctcggcgctgcacaaaggaccctatggctctctcgagaggccaaggagggagggggccactgctccgaccatcatgaaccaacagacaacccctcgacaaacctcatatgaagatgcgattgagaaacaaaaacccgcatgggatgatgggcaaatacctaccaacccacactaaatagaagcaggatgtgttcaaagacggcgcacctcgcgaagaggcagccaccacgact

SEQ ID NO: 75806 - DNA, 418 bp, Zea mays
  unsure (1)..(418): unsure at all n locations
agcttcttcttcattctgatgaattctcttttctntgatcacttcatcaaaacgaatgttccaactccgagatgcttgcttcaacccataaatggatttctgaagtttgcatatctttccagcattgatcggatcgacaaaaccctcgggctgtatcatatacacgtcctcatctaggtttccattaaggaaagctgttttgacatccatctgccaaatctcataatcgaaatatgcggcaatagctagaatgatccgaatagatttaagcatcgctactggcgagaatgtctcgtcatagtcaactccttgaacttgtcgaaaaccctttgcaacaagtcgagccttatagatgtgaacatttccatccatgtctttcttcttcttatagatccanttgcattctataggtctaaca

SEQ ID NO: 75807 - DNA, 351 bp, Zea mays
agcttctaaagggagaacacgtgatatgttttactaacgtgcaattcgaaaaagatagaccttgtgcagcttgtcaagtaggtaaacaagtgggaggagcacatcacagcaagaatgtgatgaccacttcaagacccctggagctgctgcatatggacctcttcggacccgtcgcctatttgagtataggaggaaagaagtatggtctagttattggtgatgacttttcccgcttcacttgggtattctttttgcaggataagtctgaaacccaagggaccctcaagcgcttcctcaggagagctcaaaatgagtttgagctcaaggtgaagaagataaggagcgacaacg

SEQ ID NO: 75808 - DNA, 460 bp, Zea mays
  unsure (1)..(460): unsure at all n locations
agctttcgagcgaaaatgtgcagttattctttcgttttcttatcgctcaccattattcttttagacattcatcctatgaaactgccgcaaagttggtggtgggaactgaagttgcgtagagaagggttcaataattgagtcaaaaaaggaacgcggccgtcagattaaagccgcgggacaaagtccataatttccaagagttgttgaatttcgcagcttttttgaaagcctttgtatcatactaacaagtaaaaaaggtttaaataccaaaattaacctgtatttttgataagtcttaccattgtacgatttacacagtttctgctcctccttgttgatagtggaaagggtgcattgtgcacttgcgtaaacatttatgacgcgttgatgtccatggttcacatttccttgaaggggatcgacttattngcggcgaggcatcattcgtaacagagtatta

SEQ ID NO: 75809 - DNA, 318 bp, Zea mays
  unsure (1)..(318): unsure at all n locations
agcttgtgaagatatttcatcccaacatgggctagtcggcgatgccagagccaacccatattagtcttagcaatcaagcaagtgtcgagttcagctcttttgaaatcaactaagtatagctgaccctctaacactcccttaaatgctattgaatcatcacttcttctaaagacagtaacacctacatcagtaaatagacagttgtagcccatattgcataattgagaaacagaaagcaaattgtaatctaatgaatctacaagaaaaacattggaaatagaatggtcaggtgatatancaattttaccaagtcctttg

SEQ ID NO: 75810 - DNA, 339 bp, Zea mays
  unsure (1)..(339): unsure at all n locations
catgtgctagtcggcgatgccagagccagcccatgttagtcttatcaattaagcaagtgtcgagttcagctctatcaaaattactaagtatagctaaccctctaacactcccttaaatgctactgaatcatcacttcttctaaagacagtaacacctatatccgtaaaaagacagttgtaacccattttacataattgagaaactgaaagcaagttatagtctaaagaatctacaagaaaaacattggaaatggaatgctcangtgatataacaattttacccaatccattgaccaaaccttgatttccatccccgaatgtgatagctcggtggggatc

SEQ ID NO: 75811 - DNA, 192 bp, Zea mays
tcggccgatgagaacgacgaccgggcgggaatggggatgacacaacggcgcccacgcgggaccgaaatgagcgacgcgcgtgagagaaaagctaacgacggctgactgcggggaccactaccccagtgaggcgacccaggcgtaccgagggcgcgagcagacaaagtcaagcgggccccacgggcaagcgca

SEQ ID NO: 75812 - DNA, 386 bp, Zea mays
taagtcatgcatgttaggtactagtactccatgcatgaattttattttatcttctgatatgcactttatgtgtttactttgtaggtgattccacattggtgcgccgcacatcctctgtgttgggagcaaatggtggataagtggtgttcggctgagtgggacgaggcgcacatagctagccgggaacggcgtttgatgatgcaaggcccctcccaccaccaaggcagccggagcctgtgccaatatgccgaagcatgggtacgccaccatttttatttagatatatagcactaagttagatattatttctaactatctcgttggttttcattgcagtcggcgtcacatggtggcaggccttgctacaccttctcggcctatgctat

SEQ ID NO: 75813 - DNA, 458 bp, Zea mays
  unsure (1)..(458): unsure at all n locations
agctttcctgctcactccttcggcgctgtatatttcttcgtattctttgagcttctcccactatggtaccgattcgggtccaaagatacctgttcacacattatactccaaaaacactgttaaatccttgtttttgaagaccttcngagccgaaggcccccaacagtagcccctcgcaatgttaatttgttaaatcgataaattcagattgcgacatggacgaaggctttaagccgaaggtccgcaaaaacaccttccctttgctagaatagcaacattcactgacaggcggnggctttcaatctttcacgcactgggtgtataaataagagcataccgcgagcttcattggcacgctctcttgccatctgttctcgctcactcaacttttagctcttgcgcaccaaaatntgcttagctttttaagttctaagcttcgcggtgaaaacagttttagt

SEQ ID NO: 75814 - DNA, 467 bp, Zea mays
  unsure (1)..(467): unsure at all n locations
ttagagtnacctgcggcatgcaagcttctggtaccaaattcgactgctatactctccttattccatgtttcccagttaaaagaacacataccagatcatactgcagtggtctttgattcgccacctgtagccttttcagagaattctaatccagatcctaaaagcattttttatcgccgtttggtgagaaaaggttcttcggttgttacacaagtcctgatcaagtgggctggtcttccgacagagatgtctacttgtgaggactacactgtgttgcaatccatgtttccaaattctaccatctaggggccagctgattcttcaggaggggcgctgtcatgactttttctcgaacatgcaggagagttgcgtatcatttcattagcagaaggaagagaacaaaacacactatatatagggacctaacanaacactcatgcacacacataccaacaagaggcacaacc

SEQ ID NO: 75815 - DNA, 422 bp, Zea mays
  unsure (1)..(422): unsure at all n locations
agctttgattggtgagggatcctttgtgtatttatacttgggtgttctaagaaatggtaggagtgccgcggtcaaaaagttggattctaacaagcagccagaccaagagttcttggcccaggtctgtctttccctgtttatgaaatgcagtgcatctattatatcccgtggtttgaagtcaacatgaaattcgtctacaggtgtctatggtgtcaaggctgaagcatgaaaatgttgtcgagttgcttggttactgtgctgatgggacactccgcgtccttgcttatgagttcgctacaatgggttcccttcatgatatgcttcatggtattggcttgtgctatcttgtttctcttatactttgcacaagctgtactgtctcatgatccatccaagganagaaccaaacctttgggaatatg

SEQ ID NO: 75816 - DNA, 399 bp, Zea mays
ttaagtcacctgcggcatgcaagcttgccaagccctcggacccgatcggtctttatctgatgcccgagatcgacctcaccggacttcggtcttccgtcgccgcgcgtggaccgagctatccagtgagtctccgaccaattccttgcgctcatagcttctctggcatcccgtggacctctctgacccatttgattgaactatctcgccgtgaccaggccggtctcctcgccgacgacgagcatccccgcctgcgcgcgtggaccgaccaactccggccatcttcgtcgacgttccgcacaccgttgtgatccccgcgacctccccttcaccctcgaccacttcaccggaacagtctcgccgccggtaagcccctccgcccttttcttcgccgcggctact

SEQ ID NO: 75817 - DNA, 387 bp, Zea mays
atgatgattacttttgcaaaactccgatgatgatgatggtggtgtaataatttaacattatgacatgtatgggtttatgctttattgtatttgctctgtgactcaccttcgagtgagatcgtggtacttgatcctgtcagtggccgtgtcggactatatccgagggattgacgggttattcccatttaagtgtggtctagcctttaaggcgggacttggacacttatgttggaataattcgggcagctccgccacagcttgtatcggagctttgtccaccacagaggaatcaattaaatggtaataccatcaattttctaaataaaacttgatagacaccagtttgatagatagtatgacgagcatgatagacctatgacgtgaagc

SEQ ID NO: 75818 - DNA, 424 bp, Zea mays
  unsure (1)..(424): unsure at all n locations
agcttcanctccatctatgtgatggattgtttttgagtcaanccaaatgccttcggcccttctggcagctttctgacttccatggatagcgatgggtccttgatccgaaggtatcttcatgcaaagataggcaggatgaagaattgcttcgaaagcattgagggtgccacgaccaataattgcattgtaagggtattccatgtcaacaatgtcaaacacaacttgctcagttctagtgttgttgatgaacccgaaggtcactgacatggtgatcttgcccagtgctacaatctgtcttcctccgaagccacagagaggatgtgtagcatcatgaatcttatcttctggctcttgcatttgtctgaaggccttagcanatatgatgtcagctgcactgcctatgtcaaccatgacattgtggacc

SEQ ID NO: 75819 - DNA, 449 bp, Zea mays
  unsure (1)..(449): unsure at all n locations
agcttgtggaggaccaagtcatcaaagcanataatgttttggatgagaagtgatcacccaagttttgttgatgaagcaccacgagaccaatcaaggaaggaatccatgtgggagttcgcaagagaaaggtttgcgtgttggcatcgatgcttcttcaataagctagctgccaagcaaaagctagaagcctaaatatgatctttgagtagccagaatcagcgtttgcaatcagcaaccggatgctcctgaaaagccagattttgttgaagttccatctcctcgaagagtctgcaaagtgaagatatgtagctgaagtaaagctatacccataacccttctaagccgaatctcgaggacgagattccttttaagtggggtagaattgtagcatcccacaaattcatatcttggaattttctcacacttgctctannnattcaaatgaattc

SEQ ID NO: 75820 - DNA, 355 bp, Zea mays
  unsure (1)..(355): unsure at all n locations
agcttctaaagggagattatcgtgatangtttaactaatgttacattcaaaaaagatagaccttgtgtagcttgtcaagcagggaaacaagtgggaagctctcatcatgccaaaaatgtgatgacaacatcaagacccctggagttacttcttatggacctcttcggacccgtcgcctatctaagcataggaggaagtaagtatggtcttgttatagttgatgatttttcccgcttcacttgggtattctttntgcaggataaatctgaaacccaagggaccctcaagtgcttcctaaggagagctcaaaacgagtttgagctcaaggtgaagaagataaggagcgacaatgggt

SEQ ID NO: 75821 - DNA, 396 bp, Zea mays
  unsure (1)..(396): unsure at all n locations
agctttgcctcaggcagactaataccagattaattattttcacaatgggagtggagagatggcgagagtagcgtgtaccctccgtggcaagaggctggatggtggtgtatctgtgctctcggttggcgtgaacctgatctggtcttaagaaccccggtggcgagttgacatatgcaagggttaagtgctacatatgttgtgtgattggagatcctcagctgagtattaatcgattcggatcaccgttacttctcggacatgaagacttggtcactgacctacacgtagcattccagtaaataagaagggttgataagaagttgactagtataggtcaagtgcttgaactanggtagaaataactctagaactcaagtaatgacttagtgttgggga

SEQ ID NO: 75822 - DNA, 410 bp, Zea mays
  unsure (1)..(410): unsure at all n locations
agcttcatcagcaatttccttccctttctcttactctgttgtcgcggcctcttcggcggcgggggtagcttcttctgcagccatgtctagtagtattttgtcaatgtgtgcgattgtgctctccaggttcaaatcttcagctgcggcagcttcggcagctgcgacctccgaaggtacaatttcaatatttgtcccttccgcagccgctggtgttttctgagctgaagctcttggcggtgtcttgtcaattacttctgtcacagtgataattctttgtcttttcgctatgattactttcttcgattnttcgggctccttgtccttctgaaaaaactttgtcagtcggggcctcagtggacttagcttcgcaggtaagggatcagtcattaccttcagaatttcctcaatgt

SEQ ID NO: 75823 - DNA, 436 bp, Zea mays
  unsure (1)..(436): unsure at all n locations
gcttgtggttgactagactaagaaacagtttctacttgatgattacccatatactctggtatgtagggtgagtgacacgaagtagtatgtaagacctgcttcggttgacttcgccaggcttcggcttctgcgatatccttctgcttttggatggtgatttggcacattcttgtagtatggcacttgtcttcaccacaaaatagacagtaaatcttcctgggttggtccccatatcttcctctgaagcccctagcgcctctgcctcttggagctggcggccgaaaagagctttgttgctgccccgaagattgtgaagaatactggggcctctgcagctaacttcctctgtcatcattctgagtgttgtgaattgacctgacatgcctcgggtgtattcttcctccanagcccctggtcatctcggagaacctgtaag

SEQ ID NO: 75824 - DNA, 454 bp, Zea mays
  unsure (1)..(454): unsure at all n locations
gcttcacatttatcaaaattccttgctgttctatttcttatattcaacttctccatttcttgacatatagtggtgttaggtgctcttactgtaagacaatgacaaaatatcttccgacttaaagcatctgccaccacattggcttttcctgggtgataatggatttccaagtcataatgtttgattagctcaagccatcttctctgcctcatgtttagttccgactgggtaaagatatatttcaaacttttatgatccgtgtacaaatggcaggtatttcccagcagataatgacgccaaatcttgagggcatgaacgactgtaantagttccaagtcatgagatgggtagtgttcttcatgccggcgtatcttgcttgaagcatatgctataactcgcccttcttgcatcaagacacatncgagtccattgtctgacgcgtcacaatacacat

SEQ ID NO: 75825 - DNA, 445 bp, Zea mays
  unsure (1)..(445): unsure at all n locations
agcttcatgcaactgctgccagaaaagagatgngttctgcgttcctctgtctgacactatcttctttggcacaccatgaagacaaacgatccgagacatatacaattctgccaatactgcactgctatagttggtcttgacaggtatgaagtgggttgacttggtcaagcggtccactactacccaaatggaatcgtagccggctcgagtgcgaggcaatccgactatgaaatccataccaatttcatcccatttccactgagggatctgcaacggttgcaacaatccagctggtctctggtgctctgccttaattcttcgacaactatcgcacttagccacatgctctgcgatttccctcttcattccgtaccaccagaatttcttcttcagatcctgatacatcttctcactaccagggtgaatcgaataagctgtctcatga

SEQ ID NO: 75826 - DNA, 407 bp, Zea mays
agcttgagtcaatcattttgcaaatgtattatttatgctcaaaaggataatctgggtatgaagcacatacgagagaagataaaggctggagtagccaagtgtttcaaggaagacgatcaaggtgtgatatggtttaaaaaccgcatagttgtgccaaagaacgaagagctccgccagcaaattcttgatgaagcacatcttagtcgttattcttttcatcccggaagcactaagatgtatcaagacttaaagcaacattactggtggacaaagatgaagattgaaattgcacgctatgtggctagatgcgacacttgcagacgtgtcaaggccatacacatgaaaactgctggtccattactaatcttgccaatcccaacatggaaatgggaagacatcagtatgga

SEQ ID NO: 75827 - DNA, 450 bp, Zea mays
  unsure (1)..(450): unsure at all n locations
gatgagttgactaaagaaatgattatctattttctctcatgangagtnggtccaaaggtattgttggggccttcgttctccgaaggtcctcaaaaacgtaatttaacagtgttttccaagcatgtgttatagacaggtaccttcggattcaggattaaaggcatatacgatgagaaggacatgatcgtgacgaaggttgtcgttacttcgaagctatgcagaaaggagcttctgttcaatcgcgggaaaaggaaccgacttaaaggggaaaaggctattcagtcctcatagattnttatataagccaatagtgtggcggaactgcccgaattattccaacttaagtgcctaagtcccgccttagaggctagaccacacttaaatgggaataacncggtcattcctctgatctagtccgacgaggccactgacatgatcaagtaccacagt

SEQ ID NO: 75828 - DNA, 416 bp, Zea mays
  unsure (1)..(416): unsure at all n locations
caactccaaaatatcaatcacatcggagtcagaggggcccaaagaaacttcaagtttacaagctaaatctatcaaatcatcattattagaatcaagcaaagaaaaggaattagaacacatacctttattgaggaaagcatccttggcttctgctctgtatatcgctttatcaaccaccttcacctcatcattcttctccaacctagagctnttcctggcgccttcagccgtgttggtaggcaagtccagaggctttttgttcttcccttcaataaccatctcatcatgggggggaatcgagatcatagcaccaatttttgagtgataatcagttggatcttcctccatatccttagcgaattcttccaattcttgcgagctaagcagatcatcnttcattggaacaaaatccacct

SEQ ID NO: 75829 - DNA, 366 bp, Zea mays
atgcaactaaccctgaaagagggcttctgtttgttctttgcatgctcctagggatcatcgtctccgagcgaggcatcgtaaccaacccggagaagatcgcggccatcaccagcatgggacccatcaaggacttaaaaggggtacagagggtcatgggatgcctcgcggccctgagccgcttcatctcacgcctcggcgaaagaggtctgcctctgtaccgcctcttaaggaaggccgagtgtttcgcttggacccctgaggccgaggaagccctctgcatcctgaaggcgctccttacaaaggcgcatgtcttggtgcccccggcggacggagaagccctcttggtctacgtcgccgcgaccactc

SEQ ID NO: 75830 - DNA, 450 bp, Zea mays
  unsure (1)..(450): unsure at all n locations
agctntatcaattggacgtgaaaagtgcctttctcaatggatcaatcaaggaagaggtctatgttgagcaacctcccggctttgaagatagtgagtaccctaactatgtatataaactctctaaggcgctttatgggctcaagcaagccccaagagcatggtatgaatgcctaagagatttccttatcactaatggcttcaaagtcggaaaagccgatcctacactctttactaaaacacttgaaaatgatttgtttgtatgccaaatttatgttgatgatatcatatttgggtctactaacgaatctacatatgaagagtttattaggatcatgacacanaaattcgagatgtctatgatgggggagttgaagtacttcttatgatttcagtgaagcaactcgagagggcccttcttagacaacgaagtatataagacatctaaacagt

SEQ ID NO: 75831 - DNA, 286 bp, Zea mays
  unsure (1)..(286): unsure at all n locations
tgaaaaagttgaggttgcctcgacttcatcttttgttgcagatgtcgatcctagggcaatagatcttgccatgagaatcgccgaaaggatgttcctcaaaatgaaggaagatgaggcgaagaacaaaattgaagaagaaaatgatcgatggagaccaaatgatgaatccacctcttcacaaggttcgtctttcaaatccacttctcatatgtgctntatggctaatgggagtgacagtgaaagcgaaagtgaggatgaggaggagcacgaaagtgatagtgaagat

SEQ ID NO: 75832 - DNA, 426 bp, Zea mays
agcttcatgtgccacttgattgttcaatttcttcgtgagcaggccggagcgcacactgtcgacgagcccgaccgcctgcgcacacggtcaaaccgattccggccatcaccgtcgacgagccgcacctcgacgtgaccgccaagacctcccggatctaaccccgcccttcaccggacctccctcggcgccggtaagccacgccaccctatatcctctccgtggatactgatacaagggggagggagctcggttggaaacaagaaaaagccggtgggtttttgcgtagtcacgtgactcagaggaataagttctgcacgtgtaccgtttaaaggattagttaaaggataccccacgggcctcggggcgagctggttttaataaacctttaaacattattctttaaatgcgacatacatacaaaatgat

SEQ ID NO: 75833 - DNA, 447 bp, Zea mays
  unsure (1)..(447): unsure at all n locations
agcttctaaaaggagaacacattntaggattttatgttcatttgagaaagacaggatttgtaacgcttgtcaagctgggaagcaagttggagttcatcatccacacaagaacatcatgacgaccgacatgccgcttgagctactccacatggacctattcggttcgatcgcttatataagcatcagtgggaagtagtattgtcttgtaattgtggatgattattcttgcttcacttgggtattctttttacaggaaaaatctcaaacccaagagaccttaaagagattcttaagatgggctcaaaatgagttcggattgagaatcaagaagattagaagtgacaatggaacggagttcaagaactctcaaattgaaggatttcttgaggagggcatcaagcatgagttctcttcttcctacacacctcaacanagtagtgtagtgga

SEQ ID NO: 75834 - DNA, 415 bp, Zea mays
  unsure (1)..(415): unsure at all n locations
ttaagcactgagcatgcagcttggtaaaaaaaaataagccatgtttttttatagagaaagcctacttcaatcgctggtgtcagcaccccttttggtgcctgcggccttctataactgttgaatacaaaagacatncatggcttgattgccgggtgccatcgattgggcttcataaataaaaactacaaaatctccaatattataatcagacaacttgcatgcttataaatgttgtctggtctctcttttcttaaggactgtctggttctcggtcccaaccatgaccgttcctaaattggtcagcaacatatcaacataaaagaatttgaaagcaaattaggtgtggattgaatttgggtccttaattaatcacacactaattatatcgtttactactgcgccttctaacacacaa

SEQ ID NO: 75835 - DNA, 487 bp, Zea mays
  unsure (1)..(487): unsure at all n locations
cttaagncacctgcggcatgcaacttccttntaccccgaaacgnganacatccttcattggtgagactntcaggtagacataatcttcaacttgaaagtacaagggtttgcgtcgtttgtctgcttaactcttttgtcgagcttgtgcttctttcaaattatatataattcgttgaactttttcctccatgtctttaaccatatcaggcctgaaaaaccatctttctcctggttcagaccaattcaatggagtacgacaccgtcgtccttataaggcttcaaaaggtgccatcctgatgctttcttgataactattggtgtatgagaattatgccagtggtaaacagtcatctcatttctgtgggtattccaaaacacatgctcgtaacatgtcttcaagtatttggtttactctctcagtctgcccactggtttgaggatgacatgccgaactgtggagcaacttantacccaatgatttgtgaag

SEQ ID NO: 75836 - DNA, 474 bp, Zea mays
  unsure (1)..(474): unsure at all n locations
catgcaagcttgagaaaatctttccacctgccttctttgagttattgtgcacttgagtgtccatcttcccgatgaggcaatgcttagaggacctgttcagtatggatggatgtacccaatagaaaggcgactatgcactttgaaaaattttgtaaggaacaaggctaggccggaaggatcaattgctgaggcatatatggcaagtgataccttatacatttgttctaggtacatgaaggatgttgacactatatttaaccaggatgatgatagtggtacagagatgccattgcctaatgacatgtctgtttttaagcatggtgctactctttgtggagctactaagactgagtacattgatgatgctatcatgaataagttagtttggtatgtgctacataatgctgatgaagtacaggaatatttgacgtaagttagttgggtatgtgctacataatctatgttatgtntatt

SEQ ID NO: 75837 - DNA, 452 bp, Zea mays
  unsure (1)..(452): unsure at all n locations
agcttcacctcatgtcctctcagctgcatgacgatttattctcactgaaatacgtttacactccactgcaatagaccgcatgattactttgtttcattggaatgtcaattgaaaaggaaagaaaattgagtttactttattttcaacagttttttttctctcgaatacgcaagagaatagcgtattttttatattaatagaagaagcaaaaacacaaaagtcatatccaagaggccacacaagaattataggggattactagaggagagaaacatagactaacataacagccccaaacacacaatcacacatgaaacacaatatcacttatgtagcaacatctggcaacgacagacctttggcaccagccagctttcaaagcataatattatttccaaccatggctaaggcagcagatagatctggactcattccattganacacaatcatt

SEQ ID NO: 75838 - DNA, 458 bp, Zea mays
  unsure (1)..(458): unsure at all n locations
acctgaggcatgcaagcntttgcatgttcgcagaaaatggtttcttttatatatgaanaggccatttatacctcggtagagtgctatagaattatcaccaaatgtaaagggcatgtatgtaattttgtatgaatcgtaccctgtgcctataaataggtgaacagtacccccgtactgtacacactgatttggcattcgctttttgcgtcacgcttgtactgtcatttccttccgattgaaggtacacttgtagttcgataatatttttgtttatgctcaataataataaatgatgggtcatattttcttttatattctttatatttcatccttcatcattgtttgatgaattgatgaaggtgtgaccttcatcaccttcgtncgcaagtcattatatcctaagggaaatatcgcttccgaggacgaaggatattaacgattaacattntctatgttgg

SEQ ID NO: 75839 - DNA, 431 bp, Zea mays
agcttgtgaagattcttcatcccattatgttgctttcggcgatgccagagccagcccatgttagtcttaacaattaagcatgtgtcgagttcagctctatcaaaatctactaagtatagctgaccctctaacacacccttaaatgctattgaatcatcacttcttctaaagacagcgacacctacatcagtgaatagacagtggtagcctattttgcataattgagatacagaaagcaaattgttatctaaagaatctacaagaaaaacattggaaatggaatggtcaggagatatagtgtatttaccaagacctttgaccaaagcttgatttccatccccgaatgtgataactcgttggggatctttggttttctcgtatgaggagaacatcttctttctccctgtcataatggttgtgcacccgctgtc

SEQ ID NO: 75840 - DNA, 448 bp, Zea mays
  unsure (1)..(448): unsure at all n locations
agcaccgcagctgcagcttaagccttacttataattaccttctttgtatacaaagnttgccgcaaaatctgaaagtttgaaagttaaaagattcaaagggacatgcataagagtttgtaccttaaaaattgagtagaataaacttccaataatgtgttgtcttctataattactaaggtcccgctcaagcttcagaaatccaatagttcttgataaagtgttgacaatctttgccccagcccggtcagggatacatcccaaatttcttcgtctacaccaccaaatagtacagaaccaggtttgtatccactagcaagggcgaattctttcaactcagaaacgtcttcatcggacagttcctgaccaccaaggtatccaaatttgtgtcctccgaagctttattagtcaatacatcatctatatcaagagtcatatcagatataagctt

SEQ ID NO: 75841 - DNA, 452 bp, Zea mays
  unsure (1)..(452): unsure at all n locations
agcttggacagagttctgagatgggtcatttctaaccttctacatangtgcagctcctatcctaatttcaccatctaagatcagaacctgttacgcagcaaggctggagttcaattgcacatataacattgcagaatacaaagcccttctcttggggcttcgaaaactcaggccataacttttaaatggtaactctgattttagtacttttcggacctatgatctcgtagcggcgcttataatattttatgaatctgacggtgatggggacttgttctcaaatgctatgagttaagaacaaggcaacacaaaagatgtttaatgttaatgcccttcgtccttcgagacattatttcccttatgatataatgatcttcggacgaaggacatgaaggacataccttcatcattgcagcatgcgataatgaatagagaatcatatgacatgtaaa

SEQ ID NO: 75842 - DNA, 281 bp, Zea mays
gacagcattcagacatatgttcaaatgtaatgaattatatgctcaaaataacaccatgttgaactgcaattcacccacaagatgcacatatagaaaggtaaagaaagcgaatggaaccacgaatattgactactaaccttatttaatagtaatgaataattatgacataatataaaacgggatatgtataaaataaagtaccattaccacaccggctgtctaaaattaacttgggggtcttgaaaaactagaacgcccttatattgagagggacaacaact

SEQ ID NO: 75843 - DNA, 396 bp, Zea mays
  unsure (1)..(396): unsure at all n locations
acatacaacagatggtntggttatgaaggattctattatagcatgcatacataacaggaaccactaaaccagtgatgtctagacatatcaaagatnttgcacagtcagcagcacaaggcacctacttattggaggagaatagaataattgcattaaccaatacatgtgggatacatgtagtagcacccctaatggactgtatacaaggactaggcccaaaagcgaaaaacatactctaacacccccagaatcgaaactctagcaacaacagatgttgagacttggagtgaaactctgagaacaccgacataggtaggcccttattgaagatgtcaacgaactgagtagtcggtcgaacatgaaggacgcagacatcaccgatggtgacgcgctcat

SEQ ID NO: 75844 - DNA, 458 bp, Zea mays
  unsure (1)..(458): unsure at all n locations
agctggcatgacaaaaacgtgaatgccatatattttactcatcagaaaaatgaacagaattcacgagtttattacacacatcatgcagtgataagcggaacaagcctccgcagtcatatcctttaccaacaaaaataccatgtttagacacaacacatttattagactcaagaacaactttgtatccatctcgacatagcatagacgcgctaacgagattcttcttgatagagggcacatgctgcacgctcttcaatggcaccgtctttcccgaagtaaacttcagaatgaccgtaccaacaccaaaaacatgagcacgcgacccatttcccattaacaaggcgccagacctcccgacctggtaggaggagaacatagaggcatcaacacacacatgaatgtttgaccactgtccaccaccactcaggtgaatacanactgagagacaaatggtaaga

SEQ ID NO: 75845 - DNA, 442 bp, Zea mays
  unsure (1)..(442): unsure at all n locations
agctttctttatcanaaaatctaacggagttatattangttcgcctnctttcactgccatcggcacccttgccctctcctcacatgcctttccacctcctcctccctatccttcacctagagccacctagactaagaatacaataattcatgatacagtgaatatagattcttgaatagagatttagaatacatgtgttactataaatcatgattgtgtttaccatattatgttattaaataatttatgagatgttgtagtaaatctcacatttcattattggaatcctcatatcaatattatcactaaccatatcataacacatgttaagagaactaacctacccttttagtgtgcagttgttntttcanttatttgaaagaaaagaacagtggaacacatagattcctatgggcattgaagggctcatcaaatacacttg

SEQ ID NO: 75846 - DNA, 331 bp, Zea mays
  unsure (1)..(331): unsure at all n locations
ctttatcccaaaactccgcaaagaaccgcttcgtagcattcagcacctncttctaaggcttctttatatatttgatatacatgccaaaggcggctttgttgattgttctaatgtgattgaagcctaccttctctagtgtatatgtcatgcctcgggaacctatcatcgtgcaataattgcctcacgcattgatgaccccctcgagctctcctaattctttntctgcccaagatagtgcccctccgacatcctcgctggcatatgatctccctcccgaagtagcaccaacagaggagaaaattntctttaaataatcacagcaccgggaggc

SEQ ID NO: 75847 - DNA, 466 bp, Zea mays
  unsure (1)..(466): unsure at all n locations
agctccggcataccccactatttcagcgttgttttttttctgttagctagatattcctggactaagtccctagacccaatgtgntcagacacaattctaaactcatacacagcatcttagcatggataccgtgttgtcatgttgcattgaagtctactcagcccgaagattatcttcagcgggctttgaactaacttctccttttcttcatcatatttaacataaaaccattcagatttccaaccggtcggccatttagtgtgatagctgaccaccggtgtcttcatatcctttcgataagcaaaattataacaaccgaagttctcatgcaatccgtcttctctagccttcggctgataatgaagttcatgtactcggcagaatgcatcgacgagcggctctaccccttgactgctgagagcccagatgtacacgctgagcctacaatggcgttggggtagctgat

SEQ ID NO: 75848 - DNA, 430 bp, Zea mays
  unsure (1)..(430): unsure at all n locations
agctagttggggaaaggctnactgacnttttgnaaaaggcggccgagggatggctcacgagataataaagaagagcgaacaatatactcacgatgctacggaagcaacgaatgcagctgaaaaagatgcagaactcgaaagacggataggtattgcttaatagcttataactttattttctatttttgggacttcgaacttatttatgttttctaccacaggcgaactatctcctcctccgaagccctttgagccactggctgaagcagaggcaaaagaatcatcagaaaatattagcatggttgaaaccattatggacgaagttcgcactcaactgctgaccgaagctgcagacaaagntttgagaaaagaggaatagatattgtaaaaatagtgccaaaatattaatgtaacatgtgctggactatgc

SEQ ID NO: 75849 - DNA, 337 bp, Zea mays
  unsure (1)..(337): unsure at all n locations
catgcaagcttgtacacctgaccccacatatgtnnccttgtcttatatcacattcttggatttctgggggagaccatttcttgctcaaaaatccatacgtgttatccttcggtattattgaaaatggccgttcatggctattttcgacaaaaatgggggttgtgtggccattgatcatcgaccagaggctcatacacctcaccccacatatgtttcctgccctaaaacacattcttgaatttctgggggagaccatttcttgctgaaaaatccgaatgtgttagccctccgtattattgaaaatgggcgttcatggctattttccacaaaaatgggg

SEQ ID NO: 75850 - DNA, 367 bp, Zea mays
agcttctaaagggagaacacgtgatattgttttatctttcgtacaattcgaaaaagacagaccttgtgcagcttgtcaggcaggtaaacaggtgggaggctctcatcacaccaaaaatgtgatgacaacatcaagacccctggagctgctacatatggacctcttcggacccgtcgcctatctaagcataggaggaaagaagtatggtttagttattgttgatgacttttcccgcttcacttgggtgttctttttgcaggataagtctgaaacccaatggaccctcaagcgcttcctcaggagagctcaaaatgagtttgagctcaaggtgaagaagataaagagcgacaaccggtccgagttcaat

SEQ ID NO: 75851 - DNA, 283 bp, Zea mays
  unsure (1)..(283): unsure at all n locations
aaatgtgatgacaacatctagacccctagagttacttcatatggatctcttcggaccaatcgcctatcttaacataagaggaagtaagtatggtcttgttatagttgatgaattttcccgcttcacttgngtattctttttgcaggataaatctaaaacccaagggacccttcagcgctttctaaggagagcccaaaacgagttttagctccatgtgaagaagataaggagcgacaatgggtccgagttcaagaaccttcaagtggaggagtatcttgaggag

SEQ ID NO: 75852 - DNA, 286 bp, Zea mays
tgccacatataataacaaaagagcccctggcattggtggagttaatgttgttagatctatcaaatattgcttcagctcttcgaaggctttctgctggattgggccccattgaaagacttcggctaacttcagtacttcgaagaataggaaatttctctctactgatctggatatgaatttgttgagagatgccaaccttcctgtcaatcttcgagccccctggttttgacttggtggttccattcaaaggataacttcgattttgctttgattaacctcaattcct

SEQ ID NO: 75853 - DNA, 458 bp, Zea mays
agcttattggcattaagtattatgttgtattaaaggagagagtacatgatcaaattgaccttgagcatatacgtatagactaaataccagatccactcattatagggcttccacctaaaatgttcacaaaacatgtagccaacatgggtttaatagagcatctatgatgctggattaatgggttataaaatataatcatctctctcaagtttttaagttttctgctttaagatagaaaaatgcactagtcattgagttgagtagtatctaacaagttgatgttacaccttggtcttggtatacgaatatattgagaattaaaataagaaataaggaattaaaaaagtaagttctaaatatgagcaattaagtataatcaagcatgaaatcaatgaaaagaaatttacgggtgatctctatcgactcgatcacgagactgagtcatacctatcccaaca

SEQ ID NO: 75854 - DNA, 464 bp, Zea mays
  unsure (1)..(464): unsure at all n locations
gcttgcacctcggtacattggtctgttccttattcttgaatagtgtggaccggnggcataccgacttcaactacccaaaacattgtctttagtgcacaacgtgttccatgtgtccctattgaaggagtgtcttcaagttctagatcgaacagttgaagtgacgaatgttgccctagaaccagacttgacataatcagaacatcctatttgagtcctggatcaaaaggatagggttacccgaaggagaactctcaaattttataagatacaatggaaccaacacgtagaagatgaagctacttgggaaacccaagactttntagaaaagaatttcctaggcttgttagcttcatgtaaattatgagatatgtacaattattgtaaaagaggagtacaccctatgccaccccctaccttgtaccagaataaagaanaaaaatatgacgcgtttcctctccattact

SEQ ID NO: 75855 - DNA, 310 bp, Zea mays
gagcagcacaggaagactaaccacagtaattgtaacccaccaccgcagggtagcaaacagcacagaccgcctttttgaaaaacaagaagctgccgcaaaacctaaagaggaccacacacactaaacaacaattaattgagacaacagttaccatatgatattgcaacagatacaatattcagaacttactaaaacacataaaagaggccatgaaggcaataccaaccttacctgctgatcctaccaaatatgaactggaaccatctgctagaggacactctccccccaaggtggatcgtacaaacactga

SEQ ID NO: 75856 - DNA, 477 bp, Zea mays
  unsure (1)..(477): unsure at all n locations
catgcaagctggggaaggtncttcatccctacatgtgctattctgagatgtcacagccagcccatgctagtcatagctattaagcatgcatctagaccggcctcttcttttgcagaatcaactaaataaagtctgccgtctaatacacccttaaaagctagtgaaccatcacttcttctaaagacagacacatctacatttggaaatagacagtgatatcccatattgcataaatgactaaccgatagcaaattgtatccaagagactctacttaaaacacattagagatagagtgctcattcgaaagtgcaattgtacctaacccttttaccttgccttgattcccatcaccgaatataaatgaatcttgcgaatccttattcttgaccgacgaggagaacatcttcttctcccccgtcatatggtttgtgcatccgctgtcgataatccagcttgaacccgcggatgcataaacg

SEQ ID NO: 75857 - DNA, 416 bp, Zea mays
  unsure (1)..(416): unsure at all n locations
gcaagctngaggaaggagaaaccgcagcaagggtcatttttcttgagaaagatgttcctaaagcaataagtgaagcaatcaacaagagacaagagaaagggtatgattcaattagtcatgttatttgcactaataatctctctatgtcatccaaaagcaaaaagagaaaaggaaaaaggaggtgcttcaagtgcaagagattaggtcacctcattgcttcttgtccatacaaagacaaggacgaagggataaggagatgttttggttgcaatgaaaaggaccacatgatcacctcatgtccggtcataaagaatcaaggacatgcactctccaagatgaccctcaccaaggaaaatgataaacagcaagtgtcatgttcggttgagcgacgtttctgctacatgtgtggtgagcat

SEQ ID NO: 75858 - DNA, 349 bp, Zea mays
  unsure (1)..(349): unsure at all n locations
tctgagtctgatggcacaggcgccaacagtgcccaatgaaattgtcattgaggccatgattaagggacatcggccgggaccttcagcgcaatactttgccaggaagccaccacaaactttggagaagctgctccagaagatggacgagtatattcgagctgacaatgacttcggccaaagaagggaggaagcattcatgttctctgaaatgaccagcggcttcggaggaagatttcatccgaggcacgtcaggtcaattcataactctactcaaagtgatgatagagggagccaacagcanaggccacaatactcctcgcaagcttcggggcagcagcaaaactctttc

SEQ ID NO: 75859 - DNA, 282 bp, Zea mays
ttgtgtatcgcagagacacagccaccccaggtctagcataccgaacgaagtgccatggggactggacaaagtaatggttctaggtggagggggattctaacaaccacaaagaatttataagcgcgccgacgattcctttgaagagtatcttcagtctaaagaggtcgaaatgtgaaatgagcgaagctgctgagaagtgctataaatattttaacacggtcgctgagagaattggctcttacgacttgattcaagaagtgcttgcctacaatatttttccca

SEQ ID NO: 75860 - DNA, 385 bp, Zea mays
catgcagcttctatggggagtgtagcattattcatatgtggtatcataaatttataaactcaaaaaatactattgtcggtctaaaaaattatgtcaatattataaaaaaaaatatatgtatttatctgtcttttgtcctccggctttggtcaattctttcgccattggaattgagtaacaccaagtaagggcttgttcggttaactctcaatccatgtggattgagtgggattggatgagtttgaatcccacacaagacaaactttttctcatttttttccaatctcatccaatccatgtgtgttgggaataaccgaacaagccctaagtggattggtcaacgctacatcgatgtggctgcttgggtaagatttttattgccaga

SEQ ID NO: 75861 - DNA, 433 bp, Zea mays
cggatccttaagtcacctgcggcatgaagctactcctactggaagggtttttatctttacaagaatttgaacccggacatcaatctggccaacgatcaagcgaggtctacagcaacacttggaacatccaacagctacgtcgcttctacccttaagatgtttcaagtcgttcatattcctcggtctctttacatacacaaataaagtctaaccgtcaaggaaggatcagccttgcctcggcaaagcctgaccctccctctggggctagaagggggaacccccactgtgtcaataatttcctcggaaaagtcttttgccagagcgatttccacgcctttctactgcttcgatagcggggtcctataaaacgacaagagtacacgtaagcgtgcaggccgaccaagccgagggacttctacaccttcgggatacg

SEQ ID NO: 75862 - DNA, 224 bp, Zea mays
cgacgaatttaaggggcgacgggcaacaccccacaaaaataagggcaccgcggacgcggggcaaacaaccggaaacagcaagaacagtcaggcagcacatgctataaaagagaagatgtttgagcgcccctaaaaacagagggacaacacgaagcaacatacatacacccagttctaggacggagggaaaacagcacagcaagcacacacaaactggagcaggg

SEQ ID NO: 75863 - DNA, 443 bp, Zea mays
  unsure (1)..(443): unsure at all n locations
agcttggtgccaatggaaaaacataaattcttgaaatcttgattgtcaaactgcttgccggtgtcaactgttagctcggacggtactccgaagcggcaaacaatgttctgccaaaagaatttttgggcagtctttgatgtgattgtggacacagccctcgcttcaatccacttggtgaagtattctacggctacgaaggcgaacttgaggttcccctgagcggtgggcaagggcccgacgatgtccatgccccagcgctgaagaggccatgtatgggcgaccagctntgtgtattgcgaggggttgcctgaccgaagagagaacttctggcaggcttcgcaggaccttgcgactcgatttgcggcgcagatcattgcaggccaataaaacccttgtcggatcaccttaacagccaagggcctttgccccgcgtgcgagccgca

SEQ ID NO: 75864 - DNA, 455 bp, Zea mays
  unsure (1)..(455): unsure at all n locations
agctggcattgcatgtttaaatttcttgtattgcatctagggcttgtctaacctagttgagataaccgccaacaaagcgagtgaaaaaacttaactcggatcaaacttgacaagttttagttttaagcttttagcacttgaattcttattttttatgcaattgttggttcttgaaatatgcatgaggtactgcacttagggggagtattcaaaactcaaatcactcatgaaaacccatagtgcaaggccaaaatgcaaatttcaccatttgcctattttctctaaaaattatctagcttatggcaaaatattttgaaaattatgagaaaatatatgagggtgccaatacttgtcccaacaagtgttattttgtgtgattgtaagttgggaattggtttggttgaaaatagatagaanaattcanaaattcaaaacttcctctgtctggctcaccg

SEQ ID NO: 75865 - DNA, 369 bp, Zea mays
aagcttggtcacatacttgaagttcagctcttcttatcacacgcagatagatggtcaaacagagagaaccaatcagattctagaggatatgttgagggcttgtgctttgcaagataagataggttgggacaagagattaccatatgcagaattctcttacaacaacagctatcatgccagtctgaagatgtcaccattcgaagcgctttatgggaggaattgcataacttcattgcattgggaccaacctggtgaaagacaggtgtttggtctagatattttgctcgaagccgaagagaacatcagaatggtccgagagaatttgaaggcagcgcagtccatacaacgaagctatgctgacaccagaag

SEQ ID NO: 75866 - DNA, 418 bp, Zea mays
gcttgtcaccatctcacgacttgcaagattatggtctctccctccatcaatgattacttttactactttgtcttgcactttggctcgcgtttgaaaaagattatgtcgctgtccaatttcagcttctttcatttgaacactcaagatttgtgtaaccacaagagtagtaccatgctcaaattcacatcctgtatgttcttcagatttatcaatgtcatcttcatttcctgcttcagcttcctcttcactagctgatgtatattctccatcatcagtcacaaggatcacacgattatttggacactcctttatgacatgaccacgacctccacacttgaagcactgaataccactactcttggctgttgaacccactgatggtgaagtggatgctgctggtttataactcgtgttggag

SEQ ID NO: 75867 - DNA, 462 bp, Zea mays
  unsure (1)..(462): unsure at all n locations
gcttaccatttatcttgcaatggtccgtcattgatttttaattggtaactttgagactacatttggcataatttacatgtcttctccaatacttggttagactatattttaaatcttatacttcccatgttgctacatatgcataagtggttaaatcattntcccgtacctatgcatacgtgaagttagtctaatcaaatcatgtcttgcacctctgctcttcacatgctttntcctaaaagagaagatcctaatcggggagaaaattgtttctaaaggagaacactcatttagggggagttataatgtcaagttcttcaattggttttaattgataaatcttgtatgagggcaaagcctatttgcttcctacatgcctttaatgtcttcattttcggtggttgattccaaagggggagaagttanggaccacagctatgaaaattgatcatacaccaacac

SEQ ID NO: 75868 - DNA, 400 bp, Zea mays
agctcgccaatacttgtattttatcaacttctgccagcacagcaactgcagaccataccagtgacttggcctttcgcatgctggggactggatatgattggacctttcaagaaagctcaagggggatacactcatgtattggtagcgatcgacaaattcactaaatggatagagttcaagcccattgcttctttaacctctgctaaggccgtggaattcatacaagacataatattcagattcgggataccaaacaacatcataactgacttaggatccaacttcacaagttcagaattcttcgacttctgcgagcaaaagagcattcagatcaagtatgcatctgtagcacatccaaaggccaacgggcatggtgagcgagcccacgggatgatactgg

SEQ ID NO: 75869 - DNA, 391 bp, Zea mays
  unsure (1)..(391): unsure at all n locations
agctttcatttttaggagccgatttctttttctccgacattgttntcatattcttcaaagattcttggtcttccttgacagaccggacaacttgcctactcaaaatgctgacaatcctttttcttttggctcctatgcccccttcgtcaagcctttcatagataggatactcaaagttaagagcattcataacacagctcaaccttcgtttcggcctggtgccgaaggcagcggncatcagctgatcttccttctgcgtatagttcccaagaatctcattgcacattgtttctatcaattctaaccatccagtgcatggctctttagatgtcttctgaaaattgaatcgagtaggaaggcgaactagttcatactttttccctctttcttt

SEQ ID NO: 75870 - DNA, 266 bp, Zea mays
gttcttaccccaaaaaaaaagttatgaataaacaaacatgctcaacgccagagctgttgattaagctacagcatgcacagctgctcggaccacattataccgatcgctcaagacgagaacgaaattgcgaagcaagtatatagtagtagtatctacctacagctacaggtcaagaaaacaaaaagaagagtccaagatattgaattgatgatgacaatgccgcccaaatcacagcggcagtacggcattttgggatcccctgctct

SEQ ID NO: 75871 - DNA, 365 bp, Zea mays
ttaagcgaccgagcagcaacttagaagtctgatccctctgtctatgcgcgagcccaccagccagctagtttacaataagctgcattagaccgacctcttttgcaaataactaaataaagttgctgctaatcacccttaaagctaatggccatcacttttctaagacgaccattacattggaataacatatatccaattgatatgacaacaaaacaattatcagaactaactaaacacataaataagtgctcgagaaaaaattacctaccctttactgcctgatccatatggatatgaaatggaatctgtttgacgagaggactcttttctcccgatatgttggctcctgcatatcacttgccccg

SEQ ID NO: 75872 - DNA, 425 bp, Zea mays
  unsure (1)..(425): unsure at all n locations
gagaacacacgatttgtcttcctatgtttatttcgaaaaagatagaccgtgtgcagcttgtcaagcaaggaaacaagtgggaggctctcattacaccaaaaatgtgatgacaacatcaagacccctggagctgctacatatagacctcttcggacccgtctcctatctgagcataggaggaagtaagtatggtctagttattgtctatgacttttctctcttcacttggaggttctttttgcaggataaagttgaaacccaagggaccctcaagcgcttgctgaggagagctcanaatgagnttgagctcaacgtgaagaagataatgagcgacaaccggtcctaattcaaaaacctctaagtggaagagtttctttaggangaanggatcaaacacgagttcttctcttcctacacaccacaac

SEQ ID NO: 75873 - DNA, 355 bp, Zea mays
agcttcggcggtggtcaatattttctgcattacaacagtacaatagcattaaatgttgtggtaacttcacaactacccgtctgtttatatagtgctgcaggtgggaaggtgaatcgtcaagtcgctcgcacccactgaacagtcacccgcactcgctgaacggtggaccatagtgcctaagaagctgaatcaccagatcgcgtcgttgtatggtgggaccacccttcactcggaatatttaaatcgtttctcgacaacgagctaagggaagatgtttttcggaccttcggcattccgaagcctgagagagtttttcatgggtcgagctcgttacgaaaaacgatctggcaccatg

SEQ ID NO: 75874 - DNA, 324 bp, Zea mays
  unsure (1)..(324): unsure at all n locations
agcttntatccttcttcttcacaaacaatgttggtgttggggacttgttctcaaatgctatgaattaagaacaaggcaacacaaaaaatgtcaaacgttaaaatccttcgtccttcgaagcattattttccttgaggatataatgattttcggacgaaggttatgaatgacataccttcataaacacaacatataataatgaagaagaagacatatgaaatgtaaaggataacgtaaacaattatatattattattaactcctttctatattattactatggaaaaataaaaatgatatcaaaatacaaatgtaccttcgactt

SEQ ID NO: 75875 - DNA, 352 bp, Zea mays
agcttgtgaagattcttcatcctcacatgtgctaaacggcgatgccacagccagcccatgctagtcttatcaattaagcatgcatctagaccggcctcctcttttgcaaaatcaactaaataaagtttgtcgtctagtacacccttaaaagctaatgaaccatcacttcttctaaagacagacacatctacatttgtgaataaacagttatatcccatattacaaagttgactcaaagacaacaagttatatccaagcgactcaactaaaaacacattagaaatagagtgctcggatgaaatagcaatttttcctaaccctttcaccttgtcttggttccatcaccgaatat

SEQ ID NO: 75876 - DNA, 487 bp, Zea mays
  unsure (1)..(487): unsure at all n locations
ctgccgcatgcaagcttntaaagggagaagcacatttgggactaacatatgttcattttgagaaagacagggttggtagtgcatgccaagcaggaaagcaagttggaacccatcatccacacaaaaacatcatgacaacgaacaggccactggagttactccacatggatttattcggcccgatagcttacataagcatcggcgggagtaagtactgtcttgtaattatggatgattattctcacttcacttgggtgttcttttggcaggaaaaatcacacacccaagagactttaaagggattcttgagatgggctcaaaatgagtttggattaagaatcaagaagataagaagcgacaatgggacggangtcaagaactcacaaatagaaggctttcttgaggatganggcataagcatgagttctcttttcctacacacctcaacaaatggtgagtggagaggaagatatactctactggacat

SEQ ID NO: 75877 - DNA, 468 bp, Zea mays
actgacgcatgcaagctaaaaaaaccacgatgaatatgcgagcatacctctctagtccataaaaactccggactcggtgaacaagtggtggtggtttccactacacaatatctttgaccttgctaggatccaccacaatatctttaatcgataacacgtgccccaagaaatgaatttcctccaaccagaacgcgcacttgctgaatatggcatacaaactgatggttcctcaggcgcggcaatacaaaccgtagatgctgagcatggtcctctccattcttagaatatatcaagatatcgtcgatgaagaccaccacgaacttgtccaactcgggcatgaacaccgaggtcatcaaataggtgaagtgggcatgagcatttgtgacccgaaagacttaccacgtatcaaacatccataccgctagtaaacgcggcttcggatatctcgggccaaaccgattggtgata

SEQ ID NO: 75878 - DNA, 491 bp, Zea mays
  unsure (1)..(491): unsure at all n locations
tgcaagcttctgttcggtgatgaagcaataacaccggaaaaagaaagatctgtttcaataanaaccttancttcgataaaagatgaaagtgactgccaagtaacaaaagataccataaaagggaccagacttcaagccatagagcacatcaacaaatatcaggctgaaacaataaaatggtgtgacagaaaagttagattgaanaacatcaagccacgtcatttattgcttcgaaggtggctaaccccgatacagtagggaagctttatcttaaaagggaaggccctttcttggtagtatctttgtcaagacccggttcttacaggctgaaggatatgaacgacaacgacatacccagtgtaacacccctggtgtactgtcactaaaacttgagcataacatcatgtgcatgggcatatcatgtgttntgtacacctagagtgcattcactatgtaaaaaattcaaacaacgtgtactgatatgacttgat

SEQ ID NO: 75879 - DNA, 183 bp, Zea mays
acaagcctaggaaacttatttagggaataactgttgctgctattgatcatgaacatggacttggataatgaggtggatgactgggtattgtatatgcaaattgctggggagacaaacgcagctagctatcaggactctcaccacaaggggaccatcgtcattactctcacaacaaaaaactgt

SEQ ID NO: 75880 - DNA, 349 bp, Zea mays
  unsure (1)..(349): unsure at all n locations
gatctctaagcgactgngctgcagcttatcatatcagtctgcgcatatctgcagaaacaagttcacatgggaaaataacaattgaataaataaaaaaaattaacaacaattgttcagcacatatttctgttccaggaagcttaggctagcttacctttctttcatctttcgaagacgacggccccctctcttctttttaggctcagagtcccgaactgggagtggctttggaagcttcgcaggaggccggtcttgcacttctcaatctcttacaaattcttctacaagtccgtcagcttttcagtggatcaccttaatgaatcaatctgctgcagagtgatttgcacat

SEQ ID NO: 75881 - DNA, 449 bp, Zea mays
  unsure (1)..(449): unsure at all n locations
acctgccgcatgcaagcttctaaagggtggactgcgagtttccttgatcattttgtcgnggaagtactgaagatatttgaaatctgccttcatcaacttactcccgaagccatcataaggatgggcatcttcgtctgggccatgaagagccaaggtttagaaccaaatgcaaaaagtttctgcaatatacatgagttattgtatgagacaaaaccctgnggtaaagagcagtatcacaacaattttggctgctacagcttcggtgcccggtctgggtcaagctgtcccgtgccaacctttctaaagaggtggcccggcgactggatgatggaatggttttatgtgaagaatgatttaaaactcgggaagatgtaaagatatcatatgcctctatctgcaacgcttccgcctccgaggccgaaggtggaatggatgaacaaccgaaaatg

SEQ ID NO: 75882 - DNA, 395 bp, Zea mays
atcttcttactctttagcttccgcctcggcttcgtcatcctgtacgtattcatgtattgtaagcaaaattcaagttcgaaagaagaggtaagcacacagtattgatttgttaccagcttaagacgactccgagtttcatcactagctttgctttcgccaccctttgtcatactagttttataaatctatttgctatgcttccggcaaggttcagaatattatccacgtctgctggtgataaactgaaactgggtctattgacaacctttccatgttcgcagccagatatcaggaaggcaacagcttgtgcttgataactaccagggcacaaaatcaccatgtccacaataacttcataaggtcttaaattcaccttcgatatgatcaacgcctct

SEQ ID NO: 75883 - DNA, 83 bp, Zea mays
tggcacaccggacatgtccggtgtgcaccggactgtccggtgcaccattcgacagacagcctccaccaacggtcatgtttggt

SEQ ID NO: 75884 - DNA, 344 bp, Zea mays
  unsure (1)..(344): unsure at all n locations
ggacagaaaaggcgagagatatgtgaatctattatcacaccaatccggcgctagccttcaacattagaagnnctaaaactgtgcgcagcgaagcaaactctgtgtcacaaccctgtgactcatcatataaaggatcggttgaagcactttccacgccctccattatagatagccctttatgcgatcccaccgaactcaacattgctgagtccatatggcgcaacatcatcttcacaaacagattcttcaaaatcatgatgagcatccacatgatcctctctaccactcaccactaagatctaaagattccgagcacgtttctcgtcatgaccaggcacctcaca

SEQ ID NO: 75885 - DNA, 277 bp, Zea mays
tctattactctgccaacaaaaagttgataacactcgcattagtacatagaaaatgaaaagcctaaaaaacttaaccaataaccaaaagagcatataaccgaaatgacgaccttcaggaatctttcaaattccatgatgtcattcttctggtacgctgcaatcaggtttggcattgcaaggatttcacgatcattctttgacctgcaaacattactaatttcagggtgggaaggaaatcaagctaccgtatttatgcggcgatcataaattgtcttac

SEQ ID NO: 75886 - DNA, 365 bp, Zea mays
  unsure (1)..(365): unsure at all n locations
gcccatgctagtcttagctattaagcatgcatctagaccgacctcttcttttgcaaaatcgactaaataaagtttgccgtctaatacacccttaaaagctagtgaaccatcacttcttctaaagacagacacatctacatttgtaaatagacagttataccccatgttgcataattgactaacagatagcanattatatccaagagactctactaaaaacacattagagatagagtgctcattagaaattgcaattttacctaacccttttaccttgccttgattcccatcaccgaatataattgaatcttgggaatctttattcttgacgtaggaggtgaacatcnttcttctccccgtcatat

SEQ ID NO: 75887 - DNA, 323 bp, Zea mays
  unsure (1)..(323): unsure at all n locations
agcttagatgcacttccatacttactatcatggcagtcgaaggctctctatgggcctccagcctcaccctaatggtcgggtcgtggagccctgagtgttcataaagacaaaattcatactaaacaactaagtatgtgtcggtgttttgggtccgaccgcgcacccggtgttgcccctcaaggttgcttttggagtangacggtgttatcgactgtagctcgatggttcacgctggatgcacgagaaacaatggacagttgcgtacaggttcggaccgctttgagatgcgtaacaccctacgtcctggtgtgagtactttatgt

SEQ ID NO: 75888 - DNA, 306 bp, Zea mays
  unsure (1)..(306): unsure at all n locations
agcgagtgaaaaagcttaactcgggtcaaacttgacaagtcttagttttaagcttttagcacttaaattcttactttttatgcaattggtggttcttgaaatatgtatgaggtactgcacttagggggagtattcaaaactcanatcactcatgaaaacccctagtgcaagccaaaatgcaaatatcaccatttgcctattttctctaaaaattatctagcctatggcaaaatattttgaaaagtatatgagggtgccaatacctgtcccaacaagtgttattttgtgtgatcataagttgggatt

SEQ ID NO: 75889 - DNA, 293 bp, Zea mays
ttgcaattaaacatgcatcaagttcaacattatcgatcgaaaaatatacaatatgaagttttccctttaatacacctttaaatacaattgaaccatcactccttctaaagactgtcacatcgacatcggtaaataagtcgttataaccaataaagcataattgactaacggagagcacattatagtctaatgaatcaaccaattatatattagagatagaatgttctatggtgattgagatattatctaaccctttaacttgacttgattcccatctccaaatatgattacat

SEQ ID NO: 75890 - DNA, 370 bp, Zea mays
  unsure (1)..(370): unsure at all n locations
agcttctanagggagaacacgatttaggactaacctatgnntcatttgagaaagacaggagttgtagcgcatgccaagcacggaagcaaaatggcactcaacatccacacaaaaatgtcatgactaccgacaggccggtggagctactacacatggacttattcggcccgatcgcttacataagcatcggcggtagtaagtattgccttgtaattgtggatgattattctcgcttcacttggcgtattcttttacaggaaaaatctcaaacccaagagaccttaaagggattnttgagacgagctcaaaatgagttcggcttaatgatcaagaaaattataagcgacaatgtgacggagttcaagaactc

SEQ ID NO: 75891 - DNA, 373 bp, Zea mays
  unsure (1)..(373): unsure at all n locations
tacccttaagatgttttcaagncgttcatatgcctcgttccctttacatacacaaatagagtctatccgtcaaggaagggtcagccttgcctcggcaaagcccaaccctccctcgggggctagagggggggaaccccctctgcgtcaaaattttcctcggagaaagtcttctaccaaaacgactttcgtgtttcccggctatatcagtaacagaaccccacanaacgaataagagcgcatgtaagcggcaaggccgaccgagccgagggactcctacgcctccgggatacggatacctcactcgtcacctttcacgaaaaataactcttactctgataagcgattctgctactgacgaacaagtctggttact

SEQ ID NO: 75892 - DNA, 376 bp, Zea mays
  unsure (1)..(376): unsure at all n locations
gcttctaaagggagagcacattttgggacttacctatgttcattntgagaaagaacaggattgtagcgcatgccaagcacggaagcaaattggtgttcctcatccacaagaacatcatgacgactgacaggccactggagctacttcacatggatttattcggcccgatagcttacataagcatcggcgggagtaagtactgtctagttattgtggatgattattcttgcttcacttgggtattncttttacaggaaaaatctcaaacccaagagactntgaaaggattcttgagacgggctcanaatgagttcggcttgaggatcaagaaaataagacgcgaccacaggacggagttcaagaactcttcaattga

SEQ ID NO: 75893 - DNA, 427 bp, Zea mays
  unsure (1)..(427): unsure at all n locations
gcttcatattcggctgcattggtggaggctggaaatatcaaatggagggcatatttgaggtgctcgcctccaggtgcggagaagaggattcccgctcctgctccctgcaacttcagcgagccatcaaaatacattcgccacacttctgcagtctctgggttatctggtacttgctgttcagtccactctgatacgaagtcaaccagtgcttgagtcttgatggcagtgcgaggtcgaaactcgatgtcatgagatcccagctcacaagcccatttggctattcggccaatggcttccttgttgtgaagaatatcccctatcagaaaactagtgactactatgactntgtggtcatcaaagtagtgacgtagcttgccggcagttagaagcactgcatataatagcttctgaacttganggatacttt

SEQ ID NO: 75894 - DNA, 472 bp, Zea mays
  unsure (1)..(472): unsure at all n locations
gcaagctnatcagaagcggccccagtggacttagcgtgttatgcatgtttcattcactacctcttaaaggtcttccacatcagcaacagaaggtgttgaaggagactcttcttctcgttcaagtggatntggctttggaagcccatctttcctcttctttggagcaactatcttctgctcagggctcgagtttcttctcttcagagtatcctcatcttctttcaccatactagcagcatgtctgctcagaacgctaacaatcctttctcttttttgcccttccacaccctngtttaatcgctcaaaatcatgatacttcaagttcagggcattcatcacccgattcaaccttcgcttcggtcgggtgtcgaaggctgtattcataactgatccttctttagtgaactccccaaaatgtgtccacatcgctctgcatttcaaccatcctgcgcggccttgactgatctaaatc

SEQ ID NO: 75895 - DNA, 377 bp, Zea mays
  unsure (1)..(377): unsure at all n locations
ccttggcttctcacggcccactctattatattcagctttataattgcctcgggggtagttgatggagatagaattcgaatattttcagcacctccacaacgaagctgctcaagggaaatcgcagtccagctttcaaaaagcttcggtacattacgacttcattctcttcgggatgtgggcaagttttttccccttcgtccgccctcacaatggacaaatcccggaaataccttcctctcatattgacaagatgattntctttgatagttgatataccataaactgaatggcttggtcgccagggacgatcttcggagtcttcaccaccactgtccacatcatagctgtcactgtcaccagtatcctcagacaaacct

SEQ ID NO: 75896 - DNA, 442 bp, Zea mays
agcttcacctagagagattcacttgaaagccgctaatataattctaagatatttgaagtatactcccaatattggtctatggtatcccaaaggtgctcactttgaattaattggatattcggattcggactatgcggtgtgcaaagttgatagaaaaagcacctccggttgttgtcaatatcttggtagatctcttgtgtcatggtcttctaagaaacaaaattcggttgctctatctaccgccgaggcggaatatatatcggccggaaattgttgtgctcaattattatggatgaaacaaaccttattggattatggaattattttcaagaatgtgcctctcatgtgtgataatgagagtgcggtaaaattggctaccaatccggtccaacactcaagaaccaagcatattgatatacgacatcacttcttaacggatcat

SEQ ID NO: 75897 - DNA, 414 bp, Zea mays
  unsure (1)..(414): unsure at all n locations
acttgatgaatagnggtcgagggtttccactccaaaatgtccttgactttgttgggatccaccgcaatccccttggcagatagtacatgtcccagaaattggatttcttctagccaaaacgcgcacttacttgaactggcatataaatgatgttctctcaagcgcgttaacacgatccgtaagtgttgggcatgctcctcttcattcttggaatatattaaaatatcatctatgaagaccaccacaaacttgtccaactcgagcatgaataccgagttcatcagataagtgaagtgggcaggagaatttgtcagtccgaaagacattaccaggtattcatataattcataccgcgtagtgaatgcgggtttttggtatatcctcgcccgatacggatctatgatagccgatctg

SEQ ID NO: 75898 - DNA, 328 bp, Zea mays
  unsure (1)..(328): unsure at all n locations
gcagctggaaaatcttatcccacatgttctantttgttatgccacagccagcccatggtagtcttagcaattaagcatgtgtcgagttcagctctatcanaatctactaagtatagctgaccctctaacacacccttatatgctattgagtcatcacttcttctaaagacagtgacacctacatcaagtaaaagacagttgtagcccatctgacataattgagatacagagagcaacgtgtaatctatagaatcaacgagaaaaacattagaaatggaatggtcaggagatatagcaattntacccagacctttgaccaaaccttgat

SEQ ID NO: 75899 - DNA, 304 bp, Zea mays
acagaatcagacttgcgacttcagaaattcacaactaccggttcaaatatccaaacaaattgatcctaaactttctggaaagggaactaaagttggctacatattctttataaacctatcaacgtgattctatatttatctaacgacaaaagacactagaaggctctgctgccacaattgacagatacagcctagactttaacacctatcactacatttcacatcccaaaagagcgaccaagacttttggaaagcgtggagaagcactactactttaaaacaccagaattactcctgctgaccg

SEQ ID NO: 75900 - DNA, 356 bp, Zea mays
  unsure (1)..(356): unsure at all n locations
tgcccgatccttcgttntcggcccgtgcgccatggcgaacccctcgttttcagcccatacgcaaggccgaacagccctgccgcccgtcgccgcgtgcctccgtgtcgttttccctccgttccaccgtgcccttcaccaaagacatacactttaagttcggtggttccacatgcttggacttagtttattttcgggttcgtgccacagacaccattttcggcctgcgcgccatggcgaaccacctggtttcagcccagacgcatggccgaacagccctgccgcccgtcgccgcgggcctncgtgtcgtttttcctccgttccaccgtgctcttcacccaagacatacacattagctt

SEQ ID NO: 75901 - DNA, 353 bp, Zea mays
gacataatctccaactggaaagtacaagggtatccggtgtgtgtctgcgtaactcttctgacgagcttgagctttcttcaaattatgaatcatttgttgaactttctcttttgtctcctttaccatatcaggcctgaagaaatttctttcactaggttcagaccagtttaacggagtatgacatcgtcgtccatataaggcttcgaagggtgccatcttaatactctcttgatagctattattatatgagaactccgctaatggtaaacaatcatcccatttatgtgggaattccaaaccacaagcacgtaacatatcttcaagtatttgatttaccctctcagtctgcccac

SEQ ID NO: 75902 - DNA, 290 bp, Zea mays
  unsure (1)..(290): unsure at all n locations
cccatgttagtcttagcaattaagcatgtgtcgagttcagctctattaaaatccactaagtatagctgaccctctaacacacccttaaatgctattgaatcatcacttcttctaaagacagtgacacctatatcagtaaaaagacagttgtagcccatttgacataattgggaaacagaaaagcaagtgtaatctaatgaatcaacaaaaaaaaacattggaaatggaatggtcaggtgaaatancaatnttacccaaacctttgaccaacccttgattccatccccgat

SEQ ID NO: 75903 - DNA, 321 bp, Zea mays
  unsure (1)..(321): unsure at all n locations
ggagggcatacttgaggtgctcgcctccaggtgcggagaagagaatccctgctcctgctccctgcagcttcagcgagccatcaaaatacattcgccatatttctgccgtttctggattgtctggaacttgctgttctgtccattctgataccaaatcaaccagtgcttgagtcttgatggcagtgcgaggtcggaactcgatatcatgggatcccaactcgcaagcccacttggctattcggccaatggctttcttgttgtgaagaatgtcccctattggaaaaccagtaactactatgactttgtgatcgtcanagtagt

SEQ ID NO: 75904 - DNA, 439 bp, Zea mays
  unsure (1)..(439): unsure at all n locations
agtcacctgccgcatgcaagcttaccgcattngaagcatgatcgcttccncttggtcttagtcttgctcggctgtccattgcgaccctntagcaccgtcttgaagcgcttaatgatgagagccatttcttcatcattaagcccggccgcctcaatttgcgccaccttgcttggtagtgcctccttgctcctcgatgccttgagagcaatgggttgaggctcgtggattggaccgttcaacgcgtcatcgacgtaccttgcctccttgatcatcatccgcccgcttacaaatattacaagaatttcttcgggcgacattttggtgtacctgggattctcacgaatattattcaccaaatgaggatcaagaacagtaaaggaccttatcattaggcggacgacgtcgtggtccgtccatcgcgtggcttcatatgctctta

SEQ ID NO: 75905 - DNA, 315 bp, Zea mays
  unsure (1)..(315): unsure at all n locations
agcttctaagggagagcacattntaggagtaacanatgttcattttgttatttacagnngattgagcgcatgccaggcggggaagcaagttggagtccatcatccgcacaaaaacatcatgacgaccgacaggccggttgagctactccacatggatctattcggcccgattgcttacataagccatcgggggagtaagtattggtctggtaatagggatgatcattctcgcttcacttgggtattctttttacaggaaaaatctcacacccaagagaacttaagggattcttgagacgggctcaaaatgagttc

SEQ ID NO: 75906 - DNA, 373 bp, Zea mays
aacaggagaaccactaggttagggtctccactattcttctcatccctggcctaacaatatttccatttttccctttattaatggactttgggcagctttcttatttaattcaaaactctgtaaaacattataggaactggggggcttatgattctttcctgatagcttataatttacaaagtctagcacaattggtttgacaaatcttggatgattattcttcaagctatgcatttattaagttctctacaatatttacagaaaaataaattcaataaggaaaagaattacaggtttgcgctaacgcccctgtgttttctctctttttcctctcacagaacaggtctgggtctactatttgcatgagtcactg

SEQ ID NO: 75907 - DNA, 315 bp, Zea mays
  unsure (1)..(315): unsure at all n locations
gcaagcttctaaagggagagcacatgttgggactaacatatgtgcatnttgagaaagaaaggatgtgtagcgcatgccaagcagggaagcaagttggtgttcatcaaccacataagaacatcttgacgactgacaggccactcgagctcctccacatggacctattcggcccgatcgcttacataagcatcgacaggagtaagtactgtctagttattggggatgattattctcgcttcacttgggtgattttttacaggaaaaatctcanacccaagagaccttatagggattcttgagacaggctcaaaatga

SEQ ID NO: 75908 - DNA, 466 bp, Zea mays
  unsure (1)..(466): unsure at all n locations
ctgccgctgcagcttaggggatgtgattaacacctgtcttttctcttgacatgcactgcttggcttggtcttatcaaataccacattctttaatcctctaaccatatctttctttaataccttcttgagtgggctcatcccaacatgtgcgagccttctatgccaaagccatccaagagaagctttggtgaagaggcaagctcttaagtctgcatcttctgaagtgaaatccactaagtagaggttggttgatctaaaacccttgaataccattgattcatcatccatatttgtaccataacctctgatggagtgaataagccttgtagtcccagatcacagaattgtcccactgataatatattgaagctaaaggtgctactaaaaaacatttgatttgataagcatntgagatgccccttgccaggccttgacttttcttttgagtgcttccatgggatttatc

SEQ ID NO: 75909 - DNA, 274 bp, Zea mays
  unsure (1)..(274): unsure at all n locations
gcttgtggagggtcttcatctctacatgtgctaatctgcgatgccacagccagcccatgcaagtcttagccattaagcatgcatctagaccggcctcttcttttgcaaaatcaactaagtaaagctcgccgtctagaatacccttanaagctagtgaaccatcacatcttctaaagacagacacatctatattngtaaacaaacagttatatcccatattgcataattgactaacaagatagcaaatatatccaagagactctactaaaaacac

SEQ ID NO: 75910 - DNA, 157 bp, Zea mays
  unsure (1)..(157): unsure at all n locations
gagaagtgggaaatgccacaagatatcgttaaaacgcccacgaaggtggcctcgtcaggttaagtacacttttaaatntgaagataaatttattgagccacacgatgagtggttgaaaagcttgacaatttaagtgatgagctgcttgtgacatact

SEQ ID NO: 75911 - DNA, 380 bp, Zea mays
  unsure (1)..(380): unsure at all n locations
acctganngcatgcaagcttggcccaatcattcactcccaacgttaaagtattatcgcgcgaatatggaatctctcggactacccaactaatagattcgaataactatgtcaatgtttttgtagagcgtgcgcgctgcatacagatgatggaatgaaccacagcaactatggcaacgttgaatcatttttttgcagctagaatattntgaaatcaacaattcttcaactgatgatgagagccgaccgttaccttcttggcaatgaactcggngtagttgtcctggagcagcgtgacagcctggcgggtgacggcgcggtgcttgccgagcatgggcggcgagttcttgaggtcggtaacctgaaccatggagcaaatgcc

SEQ ID NO: 75912 - DNA, 410 bp, Zea mays
  unsure (1)..(410): unsure at all n locations
atataactataagcgccgagtaatattattacacaccaagggaggcaaacactccttccgataagtnttaaacaaaagttcttatggaggagactcttctctcgcagctntactcttgtatttcttcttttgggaccaccttggaacagaagcaacaaaaataggttgcttcctcacctaaaaacaatagggaataaaaccctgagtatggaactactcagctagtcttacccaaccaaggaaaagactctcacgggtatgctagaggtgggaatcaacgagaggccttaaaatttaacttatataccttcgcagaatagctcactgagagagttttacttcaatatttaagcagattaaattaaagctctgtggcttgactactttacattcatcatacacatctttta

SEQ ID NO: 75913 - DNA, 289 bp, Zea mays
  unsure (1)..(289): unsure at all n locations
ccacacccagccctttgccggctagcacaaaagcacatccaagtaatttcacccaccctccaaggcgctttcattaacccggaacgcaggaggctgcggcccggactttaaacaaacaaatcctccacatttccgcaataaccactgcaggaaggattcagcggcacgcccaacctttagcatccttcagacataagaccagcaccacaaaaccatcgtntactgaacaacgaatggcatcaacaaaagtccttgccaaggacctcaaaaaacggaggttatcctggaa

SEQ ID NO: 75914 - DNA, 292 bp, Zea mays
attataaaagaataaggacaaaaatgcctattgggctcgagtcacccaaaccggcccagttacccttcattcgcgcggcctaaccagttgccaccgagcccaactcaaattcgtcgatcctgccacatcggtgtgccgaacgggtggagcccgcccgtcaatcatgtggcgcgcgctcttctccacccgggttcgtgacaccttggaccacttcatcagaccttctttttcctataacaagatcgatcgggttgcttgacccaaccgactcagtcattggccctcacctgca

SEQ ID NO: 75915 - DNA, 263 bp, Zea mays
gccaagggtcttctcgttgtctgtgagcgacgccaacgcgagcacctcgtgctatggggtgttggtcgggtgtttcaagaaagacacctgagatcatcctcggcaatgcgttatgaaaatgactcatcacgtcattcatggacctattttccagacaacaaatgtcgctcatgctaaaaattattaagatgacatcttattctaccaaagaatagcctgccaactcttctttaatacactccctcatccaaaaataattaata

SEQ ID NO: 75916 - DNA, 417 bp, Zea mays
  unsure (1)..(417): unsure at all n locations
ctatcaagaacaaatatcctttgcctcgtattgatgttctttttgaccaattggtcggggccaaagtgttttccaagatagaccttcgctctggctaccatcagatcaaaatacgagcaagtgatattccgaagacggcattctcaaccagatatgggctatatgaattcttggtgatgtcattcgggctgacaaatgcaccagcatatttcatgtatctaatgaattctgttntcatgccggaattggacaagttcgtggtggttttcatcgatgatattctggtgtattcgaagaacgaagaagaacatgccgggcatntgcatgtagtgcttcaacgtctgcgagagcaccacctttatgccaagctatccaagtgtgatttttgctaaaggaatcaaatcttggtacactatc

SEQ ID NO: 75917 - DNA, 395 bp, Zea mays
  unsure (1)..(395): unsure at all n locations
catcttatttgcttcttcttcttgagtttctgtcttcagtcaacgangaancggctacccttggactggaatgaggactatcccataaccatgccggaatcgtggagtctgtaccctactttccaccctgcagggcttctcttgtcctagattcctttgagctgggagaggaccatatttgaatgctgaaaataagccgaacctcctggagcataagactcatacacccttcccatccgatagtttcttgaaactaaacttcgaacaacgaactgggcttgatttaaattgcctttaagttctctgacagcgcccatcactgctagtggaaccgcccatcaatataaggacccctggctggtgagtaacgactacacatcccttttcacctctcc

SEQ ID NO: 75918 - DNA, 418 bp, Zea mays
  unsure (1)..(418): unsure at all n locations
gagaaagacaaaatttgtagtgcatgtcaagcagggaagcaagttggagctcatcatccacacaagaacatcatgacaaccgacatgccgctttatttggcccgaccgcttatataagcatcatcgggagtaagtattgtcttatcattggggatgattattctcgcttcacctgggtattctttttgcagganaaatctcaaacccaagagaccttaaaaagatccttaagacgagctcaaaatgagttcggattgggaatcaagaagattagaagcgacaatggaatggagttcaagaattcacaaattgaaggatttcttgaggaagagggcatcaagcatgagttctcttctcctacacacctncacaaaatggtgtagtggagagaaagaatanaactctattggacatgaca

SEQ ID NO: 75919 - DNA, 352 bp, Zea mays
  unsure (1)..(352): unsure at all n locations
tcaatggactattatatgaagaagnnctacgtgagcaacctctcggctttgaagatagtgagtaccctaatcatgtgtataaactctctaaggcgctttatgggctcaagcaagccccaagagcatggnatgaatgcctaagagattttcttatcactaatggcttcaaagtcgggaaagccgacactctnntactaaaccattgcaaattatttgtttgtatgccaaatttacgttgatgataccatatttgggtctactaacaaatctacttgtgaagagtttagtaggataatgattcaaaaattcnagatgtcaatgatgggggagttgaagtacttcttatgatttc

SEQ ID NO: 75920 - DNA, 351 bp, Zea mays
  unsure (1)..(351): unsure at all n locations
gatggatgtggggagatgttctacaatgaccccaaaggattaagttatgctcaaggtttaataactgcacttgaaaattttgagtttttatgtgggatggttattcggcatgatattctattttctataaatatggngagtaagaaacaacattctaagactgtgtgcatggatgctgcactcgaacaaattaaaggggtcattttatattttaagaagtatagagctgaaggcttcagtcgcatcatcgatattgcaaaagaaattgcagaagagatggatgtagagtcagtattttctagaaaccgtcagctaaaagaaagaacattttgacaacaaatgatcgaatga

SEQ ID NO: 75921 - DNA, 488 bp, Zea mays
  unsure (1)..(488): unsure at all n locations
tgcaagnctaatggcagtcctctagatgctattttatattaatactccatctctcagncctatgaagaaacaaaatatattgacagaagaaagagggaaatcatataacgaaatagcaaatacagcatcaggtaaacaaccaaccattacaccagcataagattgtgtgtggattagaaaactgcaactatgggcacttaattctgacagtctattctcgatatttcactctaatggcactcaacagctattgttaaaaaatatatcatttagcaacagaaaagaactacttcaattagtacttatcatttttctagtaacatcaagaagcaaaaatntgactggttagcagaaagtccatcttaattagggtggagtaattacttactagagactacctaatgagataacaccattaggccatatcctcgcaccagaagaaaccacagcatcatgtgctgagctctccaacaagtacacatacgtaa

SEQ ID NO: 75922 - DNA, 394 bp, Zea mays
  unsure (1)..(394): unsure at all n locations
tattcaggccatattgactgtattaaattttaatcatanaagcactatgcatatacttgttaacagtcctctgggtgctcaataatcaatacttccccaacccgttcaattatctactggtttttacatgtatttgctattaccacttaggactgaacattgtgatctgccaataccttaaataataaatactagtaaagtggatgactattgtgcaaaataacaaccacatatagcttatgtactacctgtgttccaaattgtaaaatgtttttgttntgtcctaagtcaaattctctaactctatttaagtttatagaanaatgcacatacatgtacaacatgaaatgagtttcatgaaatccaccatanaatatgtcttgatagtgcattt

SEQ ID NO: 75923 - DNA, 363 bp, Zea mays
  unsure (1)..(363): unsure at all n locations
accaccaccatccaaatcattnttgagtcacagncaacagccagaacggcgacgtcacgctcaacaacaatgcgatcttcgggaggaagtccaagctcgcacagacaatagcactgtgcctgaatcaaacaacatctactagagactacagtggtgcggccaaacaatatcctgatctaacgtatcttaattctttctacctttatattttcttgcaagaaagacaattcaggaagaattactaccccacttcatgtaattataatactctcattacatcatcgctggtcgaaggtgtttctaatggaacggagtaagttcccaactacaaaatcgctctaagggaacgtaagtaagtccaac

SEQ ID NO: 75924 - DNA, 429 bp, Zea mays
agcttatgccgagatttaaaatattgggcaattgatttgaaaccatactcatctaggcgtgtggttaaataataataatatttgcttgtgtagtgaggtgatgacacgctgtaagtagtcatcgcttcctctaagtcttgagtcgggtcaatacgcattgtgtgttcatcaagatacacttcgcacctagtgtaggattgtgttcaagacactgagtggacgcttcaagtaatcaagcaggagttgattgcgttaagtgattgttatatataggttgtgtctcgaattgggataataataggctagccaacatgtatgttatttagcaagcctatgttgttgcattggttaaccaacttgttagatgggttggttaagctcgtagtcatgatgatttgcttgttgagtctaaatgcgtatgggtatggg

SEQ ID NO: 75925 - DNA, 342 bp, Zea mays
  unsure (1)..(342): unsure at all n locations
gctgcacttaccgctgagttctaatttgtcatatataataacaaaggagcccctggcgtaggtggagttagtgttgttagatctatcaaatactgtttcagctcttcaaaggccttctgctggaatggtccccattgaaagacttctgctgacttcagcacttcgaaagaatggtaagttctctctgctgatctggatataaatctattgagagatgccagccttcctgtcaatctttgatcccccttttttgacttggtggctccattcgaagtatagcttcgattntactttggggtggcctcaattccctttggtgaaactacgccaccaagaaatttc

SEQ ID NO: 75926 - DNA, 472 bp, Zea mays
  unsure (1)..(472): unsure at all n locations
gctttcagattggtaaagagcgcattcatatgatttatgaaactccattatgatcgttttactgcggctggtgctggttgcctgacaaaaatgagcgggtttgttcactcgtgcgtttcatctaataatggtatgtttggtttgtggagtcactttatgcttcatgaggtgatgcatcataagttcattccatcaattttggtggaatcaactcactcctcatgtatatactaattattaacttataagaaatagggtgctgatggatcaactcattctattccacaaaccatataaaaaagtgaggagtgagaagaagatggatcacttcattcctcanatcaaacacactataaatggccgaattggctcttncaactatggagactntngtagagggataaaagttcttactgtcagcacaatatcataatntttggttcactactttgggagatatcgaaatttgaag

SEQ ID NO: 75927 - DNA, 307 bp, Zea mays
  unsure (1)..(307): unsure at all n locations
agctagaagggcacacacacgcacaacagcagcgtgattttcgggaggaatccgaagctcgtacagtcaacagtactgtgccagaatcgaagcatatttactgaagaatatcctactcttaatgtacctttatctttcatgacattnntatttttgtatgagaaacaagttacgaaggactaaatttcgatttcttgtaataattgtgcttgcatcaatgaggaaaatatgccttcctcacagttttctgaagctcgaaaatcgttcctaagggagcggagtattagttccgaagctacaaaaaaat

SEQ ID NO: 75928 - DNA, 382 bp, Zea mays
gcgccacaagagtcatggtaacatatggttatgcacctcctgagtatctctcaacaggtaacgtccgacgtgcagctctgtgttttccctccaaatatctgtagatttgcttggcagatatagaaactacatctctttttttggaaaaaacctaactattggtgtacattatatgccacattcgatataaatcctagacaccttataaatggcgcatgattggtcccatgcatgaaaattaccattttggtgtatcatgtgctatattgagttgacaagttaagttgcattcttgaaataagttctagtacaacgcattaatggagtgggagtgaaaaggcgatggatgttagtgttcttttcatggtatctaatatatcaa

SEQ ID NO: 75929 - DNA, 454 bp, Zea mays
  unsure (1)..(454): unsure at all n locations
cttgctctgtcttcaaggtggtccttgtagacttcttgctttgatttcaaggaaatgaaacttcttctgtgatgggtataagttacttacaatttttttaattaaaaaaacgtgcaattgtgaattgatgattatggtcttttccaacttcacttcttgntactaatactgtgtcaacgntttgatatagtggatggatctgattatggngtttgcttaaatactctacttcaagctttttactaatctttctgcagaagtagctattgataaccatggccaaatatgtagcaaagccttttaancctcatcttattggtttctactttggtttggtcttttttccaagctattntttttctagtgcaacacgttaaaatgattcctattctatttgtaattaagtgttctccatccacacaagccttattttttaacataaattttattacat

SEQ ID NO: 75930 - DNA, 330 bp, Zea mays
  unsure (1)..(330): unsure at all n locations
gcgcataaatatacctttgatatcttctcgtactggcagatcattcttcacataanaccattctgtcatccagtcgccgggccatctctttcgaaaggttggcacggggcagcttgacccggaccgagaaacgaaactgtagcagccaaaattattgtgatactgttccttacccccaaggttttgtttcgtatgataattcgtgtatattgcagaagctttttgcatcaagttcagaccttggcttctcacggctcacacgaagatattcagccttatgattgcttcgggggtaagttggtgaagatagacttcaaagattttcaacac

SEQ ID NO: 75931 - DNA, 103 bp, Zea mays
cagcaactacagaccataccagttacctggtctttctcatgctggggactggatatgattggacctttcaagaaagctcaagggggatatactcatgtattgg

SEQ ID NO: 75932 - DNA, 439 bp, Zea mays
  unsure (1)..(439): unsure at all n locations
gctgcagctgaacctggaagtcgatgggccaataatatactaattgactctagcctagctacgggtgcataggtttcaccaaaatccaaaccttcgactngtgaataccctctggccacgagtcgagctttgttccttgtcaccacaccatgctcgtctttgttgttgcggaagacccacttggttcctacaacaatttggttaggacatggaactaaatgccatacctcgctcctagtgaagtngttgagctcctcttgcatcgccatcacccaatccgaatcttggagtgcttcctctaccctgtgtggctcaatagaggaaacaaaagcgttatgctcacaaaaatgtgcaacccgagatcgagtgggtacctccttatgaatgtcgccgaggatggtgtcgacggngtgatctcnttggattgcttggtggactc

SEQ ID NO: 75933 - DNA, 390 bp, Zea mays
  unsure (1)..(390): unsure at all n locations
agtcacctgccgcatgcaagcttctccatccatagcttcggaactaatttattcttcttncagaccgngcctttcataccatgcgcaccttcatctcaaagccgaaggttcctgtaacagtatattatacttgaaaaacatgttagtcgtgtttttgaggaccttcgaaagacgaaggccccaacaattatcaaacaaaggcaacagggaaagagcagcaacacaacatcgtcttctacaattttcaatactagaaggaagcccggtatcctgtgcacaccgaagcanatggctgaatccctggacaagggaatgattctatgtaaactatgatttggagaaaagagaggatantccaggaatcatctagaggcatgtgacacccctctt

SEQ ID NO: 75934 - DNA, 384 bp, Zea mays
  unsure (1)..(384): unsure at all n locations
acccaagttccgttgatgaagcaccagaagaccaatcaagtaaggaatccatgtgggagtttgcaagagaaaggtttgtgtgttggcatcgatgcttcttcaataagctagctaccaagcaaaagctagaagtctgaagatgatctttgagtagccagaatcagcgttggcaatcagcaaccggatgcttccgcagggccagatnttgttgaagttccatctcctcgaagagtctgcanagcgaagatatgtagctgaagtaaagctatacccataacccttctaagccgaatctcgaggacaagattccttttaagtggggtagatttgtagcatcccaaaaattcaaatcttgaatattctcaaactggctctaaattcaaa

SEQ ID NO: 75935 - DNA, 421 bp, Zea mays
  unsure (1)..(421): unsure at all n locations
tgatcttgagtagccagaatcagcgtttgcaatcagcaacacagatgcctcctcaaaggggcggattgtgttgaagttccatctcctcgaagagtctgcaaagtgaagatatgtagctgaagtaaagctatacccataacccttctaagccgaatctcgaggacgagaatccttttaagtggggtagatttgtagcatcccaaaaattcaaatcttgaaattttctcaaactccctctaaattcaaaatgaagtttaaatttcatttcaaaatggttttttgcgagttgatatcagcaaataaaatatagtggtctatattctctccaaaatcctcctcaaaatatcctacanatattttccctagtgatccncttcaagttctttccagagatattggctagatattccaccgatatatc

SEQ ID NO: 75936 - DNA, 318 bp, Zea mays
acaaacaaggtggtttttgaattgtttgacgggacaaaccaacaccagctgtaaatataatctaaaccgcgggctatgtatgaaattacacagcagacagaaaagctctcactttctataatgcaggactgtttacattacgtaacaacatacgttctgaatttgacaaattgacgattagtactgattgcaaaatatactctaacgacagattatgctgtcaatttacacagcagatataagtatttacacgttttataccatttcacaaaatacattagttcttacatacgacgacaaacaccgtgtgtcaaacac

SEQ ID NO: 75937 - DNA, 192 bp, Zea mays
  unsure (1)..(192): unsure at all n locations
cgccaacagtgcccaatgaaattgtcattgaggccatgattaagggacttcggccgggaccttcagcgcaatactttgccaagaaaccgccgcaaactttggagaagctgctccagaagatggacgaatatatccgagctgataatgacttccggcaaagaagggaggaggcattcangttctctgaaatga

SEQ ID NO: 75938 - DNA, 338 bp, Zea mays
  unsure (1)..(338): unsure at all n locations
agtcacctgccgcatgcaagcttcgcgagagannggttgaccttgaagtgagccgtctganttancctcctctgcctctcttgggaaggccctgcgcatcccctctatagatacaaggggatggtccagctgtacatataggggtgtagctatgtgctaacgtggccggcggagaagttcttgagccctgtataagcgtagctggcggtgcagcactgggtcccgctgacgtttctttgccttcgtagagagctgagaacaatcgacgtcatggacgcatacagagaaccatcattccatgttgtcggagtaatctagatgtgacaccggtcttgttc

SEQ ID NO: 75939 - DNA, 343 bp, Zea mays
  unsure (1)..(343): unsure at all n locations
ttgtctcgcatngaatgctatagctcttgtaaggtatagacgttacaaacttggatgccattgaatgtggggtggccctcacatctcatcatcccttctcctaccatctcactccccctcattcttccctcacactaactctcctactctcctctccctctctacactatcactctctaatccactacccacttctcccaacttacctcacttactctcccttccatatcccctccttcttttctttactttttctctactttccctctcctctttttctcaccctcctttacactctattcttcctcaattcccctacttcccttactctcatctctcatcc

SEQ ID NO: 75940 - DNA, 372 bp, Zea mays
  unsure (1)..(372): unsure at all n locations
ttgcgagagaggggttggtcttggagtgagccgtctgtgttatctcctttcgcgtccggcctctnccctttgggaaggccctgngcatncccttttatagatacaaggagatgaaccagctgtacatctgggggtgtagctatgtgctaacgtggcatgcggagaagtgcttgagccctgtagaagcgtagctggcggtgcggccctgggtcctgctgacgtttatntgccttcgtagagagttgagaacaatcgatgtcatggacgcatgcanggaaccatcattacctgttggcagagtaatctagatgggacaccggtcttgttccttcgtagcctgaggcagctagctaggggtagggtaatgatgta

SEQ ID NO: 75941 - DNA, 430 bp, Zea mays
  unsure (1)..(430): unsure at all n locations
aattgactcaagcctagctacgggtgcatagggttcaccgaaatccacaccttcgacttgtgaatatcctttggccacaagtcgggctttgttccttttcaccacaccatggtcatcttgcttgttgcggaagacccacttggttcctacaacattttgattatgacgtggaacaagatgtcatacctcattcctcgtgaagatgttgagttcctcttgcatcgccaacacccaatctgaatcccttaatgcgtcttccaccctgtatggctcaatagaagacacanaggagtaatgttcacaaaaatgagcaacacgagatcgagtggttaccctcttatgaatatcgccgaggatggagttcacggcgtgatctcgntgtatcgcttggtggactcttgngtgtggtggccatggaccctcatcatct

SEQ ID NO: 75942 - DNA, 436 bp, Zea mays
  unsure (1)..(436): unsure at all n locations
taagggagaacacatgataggtgtgactaacgtactattcgtataacatagaccttgtgcacatttcaagctggtnaacaagtgggaggagcacatcaaagcatgaatgtgatgactacttcaagacctctggagctgctgcatatggacctcttcggacccgtcgcctatctgagcatatgaggaagtaagtatggtctagttattggtgatgactcttcccgcttcacttgggtgttctttttgcaagataagtctgaaacccaagggaccctcaagcgctatctcangagagctcaaaatgagtttaagctcaacgtgaagaagataaggagcgacaacaggtctgaattcaagaatcttcaagtggaggagttccttgaggaggaggggatcaagcacgagttctccgctctctacacacctcaacaaaatg

SEQ ID NO: 75943 - DNA, 318 bp, Zea mays
ctgccgtcctagtggcaccttcaaaagtcaaaacatgttatgctgtcaaactggatttcaattgcacaaataatattgctgagtaccaaacacttttattggggctctggaaactcaaggccatgggagtaagaagggctatcctaaagactgattctcaagttattggtggccatgtggataaaagcaacaaggcacgagaatccaaacttgaaaaatatctggatgaagttcgaaggttggaagctttccttcaacgttttttcctcaagaatatttcaagaggtgaaaatgagcctgcagatttgctagccaaat

SEQ ID NO: 75944 - DNA, 473 bp, Zea mays
  unsure (1)..(473): unsure at all n locations
agctngccaattcctatcagagcagcaacatctaccatcacagcaactgcaaaccgtaccagtgacatggtcatttgcgtgctggggactggatatgattggacccttcaagaaagctcagggaggttatactcacatgttggttgccatcgacaaaatcactaaatggatagactacaaacctatcgcttctctgacttcaaccaaggccatagaattcatacaagatataatattcaggtttgggataccaaatagcatcataaccgacctgnggtccaatttcactagctttgaattctttgatttctgtgaacaacggtgcatccagatcaaatatacgtcaatggcacatccaagagccaacggtcaggtagaaagggctaatggaatgataccggaagcactcacgaagaaagtcttcaacaagaatgaataagtcacgggaaagtggatcagagagttaccgtatg

SEQ ID NO: 75945 - DNA, 432 bp, Zea mays
  unsure (1)..(432): unsure at all n locations
ggctcaatggcagtcactttccagtgcaagatcgctctccgacctgtatccgngttctgcttcgagaccatctcgtccgtagcagatgaggaaggaattctgcgccgcatagcggatccaccagagagaaaactttcctaaaaatctccaggaaagccggaacaaggcagcagacagcgcaacctcctacgccccgggcaaagactacttcctaccagtcacgagccgggaactcacttacccgaagaaccccgttgtccacttcgcccacaaaggagtggacatggattacaaggaaaaaaagaagcaagcgggatgaagacccgtcaaattatccttctgatgccttcaccctcaaagaaggacggaaaggaattcatcgctgcagcaactcctttctaccctgacgtcctctttcatcgggggagatgg

SEQ ID NO: 75946 - DNA, 136 bp, Zea mays
caggggtttttaaatatcagccttatcttctggctgtacaaagaattagtaagacagaaaacgaactaaacgggcgatcagggctgctttcaagtctaagaaggctaattttcttacactagtggaaacaaaactg

SEQ ID NO: 75947 - DNA, 474 bp, Zea mays
  unsure (1)..(474): unsure at all n locations
ttaagcacctgagctgcaacttcaatgctgggctccctgttgtattctgctggaacctcgcccatgtggtaaacgttggtgcatatgagttcctgtatttgtcatacatagtgacattactgtgtcatttggtcgcttgcgaggtctttttcagagttcgtatccaacccatctgttcaagacggtagtccaggccatagagcgtgaccttcttcagaggatattgaagccttcattgctacgtaccgggttcttcctgaagagggaaaacagactaatctctggatgcaagcaatcgttgacgaggccgaagtaaatgatgttcttagtatgctggctgatgagtcgttcgtatctgctcgcactgagtcgccgagtgctgctgctgngcgtgcatttggtggngaggagggagcttgcactctcggcggtgtttgtcacaaactgacacgccgagcaggttatccagctatg

SEQ ID NO: 75948 - DNA, 397 bp, Zea mays
  unsure (1)..(397): unsure at all n locations
ggagctatctaagggcttggatctatcggagganggcgggaaagggtttggccacggtggttgccctcgggcggctctagcgggtcgcggagaggtcaccggagctatgggcgagctcggtgaagtttggcgcgatacagaggaggcaaccgggaagatggtcgagcactttgggtgggctttatagccgcggcgcaggcgtggtcacggggtggccgcgggcgcgcggngttcgcgtgcgggcgtgctctgagcatgcccccgagtgtcagccctcgtcgaacacgtggaggttcgcttcttccatggttcaacggccgatttgagtgccttagcgtgcagatattggcaaaaccctcgtgtacggagtcttgcctgcaccaatacttctttttat

SEQ ID NO: 75949 - DNA, 399 bp, Zea mays
  unsure (1)..(399): unsure at all n locations
agcttctcctgaacaagtgctgctcttacctctgagtgcgaagctgccacatataataacaaaggagcccctggcgttggtggggttaatgttgttaaatctatcaaatattgcttcagttcctcgaaggctntttgttggcttggtccccactgaaagacttcggctgatttcagtacttcaaagaatggtaaatctctttctgctgatctggatataaatctattaagagatgccagcctccctgtcaatctttgggcccncttctttgtagttggtggctccattcgaagtatagcttcaattttacttggattagcctcaattccctgtgttgaaaccaagcatccaagaaatttcctcttctttactccaaagacacattnttctggattgaac

SEQ ID NO: 75950 - DNA, 324 bp, Zea mays
aacaggtgggaagctctcatcatgccaaaaatgtgatgacaacatcaagacccctgagagtacttcatatggacctcttcggacccgacgcctatctgagcatatgaggaagtaagtatggtctagtatagttgatgattattaccgcttcacttgcggattctttttgcatgataaatctgaaacccaagggaccctcaagcgcttcctaaggagagctcaaaatgagtttgagctcaatgtgaaaaagataatgagcgacaacgggtccgagttcaagaatcttcaagtggacgagtaccttgaggaggaaaggatcaagca

SEQ ID NO: 75951 - DNA, 452 bp, Zea mays
  unsure (1)..(452): unsure at all n locations
agctattcataacagagccgagcatcttctcttatttgcagcgacgcccagagtctgagccaatgagttcctctgaatacaacctacaaataagtaaacatttgagctttattaaatactaagtcctttctacttattcaaatatcccaacacagtgctaagacaccagtaataatgagattcttagtatttaaatccacccccatcaaccagctccaaaagaaatgcttgacagatctagggcccggaaaaccaaaacagattgatatcaactgccacataaaatgagcaacatgacagtcaataaataattggtgattggtttcatccaaattacaaatgccacatntactgctaccttgccaggtgcattatgctaaattatctgtcgccagcacaactcctttatacaagtaccacataaagagtttaatcttaagtgacaggctatg

SEQ ID NO: 75952 - DNA, 295 bp, Zea mays
gaactaatcagatcctagaagatatgttgagagcctgtgccacctctgtacaatcacgatgggactaaaggttactcttatgccgaagtctgctacatcactagttaccaggctcagcctgtatgaagtcacctggtgtcatgcacttctacggacggagttgtatgactctcgtgtactgggaccaccctggagggagacaggcgtttggccccgacatcttgtttgaagccgaagagaatatcaaaatggttcggtagaacctgaagacagcccacatcagacagcgaagcta

SEQ ID NO: 75953 - DNA, 443 bp, Zea mays
  unsure (1)..(443): unsure at all n locations
agcttatcagcaatataagcatattagagtatttgctgctntggcagatcaaccaaagcctatgctcttgtgtgaagacatagccaaacaaaaagtactgctgggatctcaactatctgatgaacaagaaaagactttgctaagatttttgtttaacaacaaatatgtttttgcttggacaaccaatgatctctgtggtgtcaatagagatatcattgaacactcactcaatgtggacccgtccttctgaccaagaaagcagaggattcggaaaatgtccgatgataaagccgaaggtgcacgaaatgaagtaaaaagacttctaagtgatggcattattagagaattaacatacccaaagtggctggccaacactgtcatgatgaagaaagctaacggaaaatggagaatgtgtattgattttacagatctcaacaaggcat

SEQ ID NO: 75954 - DNA, 393 bp, Zea mays
  unsure (1)..(393): unsure at all n locations
tcggaaaccncatactcctagccatctccctgttgactgttaattctttgntggtaggaaggcagtataggaagtcatcttcgtctgtcccattgaacactagcgccccctttggatatttcaattctttggcatagtgattagcttcaaaaacttcttcttccggtaactttttccccgaagcatgtcgcacgatataatcgtatattttggaagatgcttcggggccagcagtatcaatttcttcaaccaaagttggctctgacattgtcattttttcggttgcctttgcaatntttgtttcttctgcttccaaaggcactaccttggttggttctgaaggccctgtttcaactccagtctgttgcttcggagcttcagcaacggatactt

SEQ ID NO: 75955 - DNA, 423 bp, Zea mays
  unsure (1)..(423): unsure at all n locations
agcttcatccacaccttattgccggtaagattacatccattgggaccgtgatgccgcgcacaccgtgtagcttcgttcaatttgacagtggtgctcgggggaggccgattggggtcacagtcgttcatctccaccgcacggtcatggcggagcacccctgcttggttggtggggggggggaagacaaacgactaccgtccgatctgatatgggcggaggagattagaactaggattggaatctggcggatgagggttgactatgggcgtgattaaatccgaaccgtagttgcttcatccagcgactatggtgagaatagggtgtcgcaaactgtggatcgtggatccctgatccaacagttcatataacataccggttcgttntaagtagtgtctaatctgcgccctcatatttatattcaac

SEQ ID NO: 75956 - DNA, 338 bp, Zea mays
  unsure (1)..(338): unsure at all n locations
tatgttgagcaaccgtctggctttgaagataatgagtaccctaaccatgttaataaaactctctaagcgctttatgggctcaagcaagccccaagagcatgcgttgaatgcctaagagatttcttaaatgatatggcttaaaaggtcgaaagacattccactctctttactaaaacacttgaaatgattggttgtatgccaaattatngtgatgatatcatattgggtctactaacaatctacatgtgaagagttagtagatcatgacccaaaatccagattcaaatatggggagtgaatatttttagctttaaataaacaacttcataggccctttt

SEQ ID NO: 75957 - DNA, 429 bp, Zea mays
  unsure (1)..(429): unsure at all n locations
agctctgcagatagtttgtcgcgtggaaatatgtccactgatgaagnatcaacccgagcaactcagagatctaagcacaaattcaaaaaccccagaaaatggggctttgatggggttttctattttgagttcaaactaagttcttctcaaatctcgaccacaaacagcaacaactgggtgtatgcagtgatccaaggagagcaactcaccatcaatcaacaccaaaccaaatcctttcaaaataatcaaggattttccacaaaaacacaagagggggaagggaagaacaagagaccaaaacaaatccagatttcatcaagaatgaaaaactgagatggagaagtgatcaaacgttgtggaccataccgacgacccttcctttgaataaacttgaagatcaagaacacagtcgatagttacaaaatcgat

SEQ ID NO: 75958 - DNA, 454 bp, Zea mays
  unsure (1)..(454): unsure at all n locations
ngactcaggtatccacacattaatccttaattccttttttcgtctcatggacaaggcatcctccctggattcaagtccatagactaacatagatcctgttatcaagatgaatgcaatcaattcctaacctcgcgcgagtgctagaaaaatcactcgacatctaccgagatcctgattagcaaagcagctactcgacctagcatactagtatccatctcaaaaggaatcctaagtttatgcaactagaggtttcaagcaactcctacacttaggtgcacattacaatcctacaaacattaagtgtagtaaagtagcatatatagatacggttatgcataaaaccggngcttgccttcaatagctagggctgcagggagatcctcgatggcagtctcgagagctngctcctagtcttcctcgtggacagctcctttgctcgggatgagcacgtact

SEQ ID NO: 75959 - DNA, 406 bp, Zea mays
catggccagacataacttgagaatcagattcgagaaccgcccttcttatccccagtgccttcaacttccgaagacccaaaagcaaagctgcatattcagcaatattatttgtacaactaagatcaagattgactgcatatcatgctctgacttttgaaggagaaattaaaacggcagctgcacctgccccgaaggttccccaggaaccatcgcaaaatactggccaagcttcggcatctttacttgcttctgtttactgagcccctggcgtccagtcagcgatgaaatctgctagcgcctggactgaatcgaagatctatgcacataatcaatgcagaactcattgagttccgcattccactctccaatccttatagtggcttctctggttctcataatatacttc

SEQ ID NO: 75960 - DNA, 387 bp, Zea mays
  unsure (1)..(387): unsure at all n locations
caaaaattgcatatntggaaagttacgaattctaaattattctcttgctcttatattaactcgctcattcttttcatatagggtttaatacttaacaacgccttaagggcgcagaaaaatgccgaagacgagagttgcactattgctctcaacaatcttcgaacagaggttattaagctgaggaacgaagctttggaaaaagataaaattctacttactctggtggataagggtaagggggatgaagctatctacaaggcccaatctgaaatccaaaggggcgaaatcgaaacccttcaaaagcaactgtgcgaagctaaattgaaatgtgctattgtcgaagctgaccgagacgccagtgcttactggagaaatattgggagaaaa

SEQ ID NO: 75961 - DNA, 105 bp, Zea mays
aaagaaaggaaaagaagaaaaaagaaaaaagggaggagaggaaagcggaaaaggggaaaaggaggaaaaggaagaaaaagggaaaagagaaaaaaaggaagaaaa

SEQ ID NO: 75962 - DNA, 486 bp, Zea mays
  unsure (1)..(486): unsure at all n locations
aagagccanctgangcatgcagctangtaaacctggtacaagcattttcctttttttcttacatacacaagataaatcaagttaaacaatagccnacaatcatgtaatcagaatgctattgaactgatgacctcttcaacttaaattactgattacctttcgaagactcacagttcattcaacaactatataattggcttggaaatttactactactgattaacaagaacccctaacttccaattaaaccagataaattagttctacttcaaagggtctttctgtgtacaacaaaattagtgtgaattacaaggttaagatgaataaaaacagcaacactctctagctaagaatattaatgtggtcataaactatctgcaaaatgcttatatatgtgatagagaaggataatgacttatctataacaaatgacataatgtcttactgttaagataatcttcaaaaccaaaatcattcagagaaccc

SEQ ID NO: 75963 - DNA, 454 bp, Zea mays
  unsure (1)..(454): unsure at all n locations
gggcaagaacaacaagcgcaagcgtgaaccttctcctctatcggaggtttttggtgactcggaatactcggaggaggagntctcctccgagcccgaggggtctccggctcccgtctctcccccggcgtcgtctgatgactcggacgactcccacgggatagccgcggaggtctggacgtacatccgagccgtcgagcgcgtcgggctcgatggctcggatgagtcggagtactcctcggatgaggaggactcggacggcggcgacgagggtgaagacgacgacgacgacgacgatgacgacgacgacggcgacgacagtggcaggggcggcggcgacggcagcatggacagcaccaatggcggcagcagctagggcagcaccaacggcagcagcaggggtagcaccaagggcggcggcggcgacaggggcatggccagtggctagacgccactg

SEQ ID NO: 75964 - DNA, 447 bp, Zea mays
gcttcaggctccagatatcgtacctgatgtactttttatgcgtgatcctaggcgccttgataccttttattttattacacctgatgaggttacaagcatgaaagaactacattcacctggagccttcgtaggtggggaggagctcggggcgatggacatctgtttttagagctctaccgtccagaccaagtatcaggagtcctgggatacccttgacaacgaagattcttgtaagctttttccttacagcgtcagaataagggatggcaagccatggcattgaactcatgcttgcttggaattcccccttgctgcggtctatcgagacgaagatgacctcgaagcttaccggtctcaagaatttcagctcgttatacaccttcttgagctgtttggagaagacatggctaggtgggcaccagtgtgctccaaagtacaggccgactg

SEQ ID NO: 75965 - DNA, 401 bp, Zea mays
  unsure (1)..(401): unsure at all n locations
nggtgccgatggagaagcagaagtcnttgaaatcttggttgtcgaactgcttgccgntgncgaccgtgagtttggacggtaccccgaagcggcaaacaatattttgccagaagaatatctgggctgtcttcgatgtgatggtggatactgccctcgcttcaatccatttggtgaagtattcgacggcgacgaaggtgaacttgaggttcccctgagccgtgggcaggggcccgacaatgtctaggccccagcgctgaaggggccacgtgtgggcgatcagcttcgtgaactgcgaagggcgccccgagcgtggggaaaatttctgacaggcttcgcaggatctgacgacccgatttgcggcgcaaataatggcgggccagtagaaaccttggcgaatcacc

SEQ ID NO: 75966 - DNA, 463 bp, Zea mays
  unsure (1)..(463): unsure at all n locations
agcttataacaagagaatagaggcaagagctctgtcatatgttatgatagaaggggagttgtacaaacatggagtttgtgctccgttgctcaaatgcttatccagaaccgaaggtatatagataatgaaagatatacatgcaggcctgtgtggatctcacatcggatctaggccgctacttggaaaaattttccgtcaaggattttattggccgaaggcagcttcggatgcagcagaattggttcaaaagtgcgaaggttgtcagaaatgtgcaagagatcaaaaacaaccttcgtccttgacacagctcatacaacccacttggccattgcaaaggtggggccttgacttgttaggtccgttaccaccggcccaagggaactagagatatgtngtggcagctgtggaatatttttctaaatggattgaggcgaagaccttaaccacaataacttctgctacc

SEQ ID NO: 75967 - DNA, 450 bp, Zea mays
  unsure (1)..(450): unsure at all n locations
ccacaaacacgaagcaccatnctnctttatctatcttgtccncgaagcctcaccggcgacctcaccgccgcgggagcccaccacctcaccatggaccggccgttctgagccccccaccggccaaattgaccccaccaccgtgacgccctacccccgcccttgctatgccaccaccccgaccacccagaaccggatcaccggtgaagaaccgccgtcgagatcgccggcggccggttcctccccaccgcgggcggaccgctgttcccctctgacgccgttcccctccccctcactggcgtgtgggcccgcgaccatggcgtcgtccccgcgccgtgcaccgtggcgggcctagctgggtcggacgcccgcgcggtcacacacacgctcggntgggccaaatcccccgacccattaaaccgagaaatcctttcttttcctttttctcttatc

SEQ ID NO: 75968 - DNA, 368 bp, Zea mays
agttcaagaaacacttcaaagaaccctgccaagaatgggtagacacaattgaagttatgtgcaacgatatcctgggcaattacacgagaaaagaagatcaactgatgacagcatccttcggcacccggtcgaaacgaaggttaaaccgagtaatggacgctttgaattctgaatacctagactacgaaaggttaaacaaaggtgccgaagggccaaaacagaaaagggttgtcagtattatacaaagacaagctgctaggatgataaaagaagatgaaaaattggctaaaaagaaaaaatccgtgcttgagccgaaggtggatgtgccgaataaaagataggctcctgctccgaagccgaaagctgat

SEQ ID NO: 75969 - DNA, 230 bp, Zea mays
agccttacacttagcattgcataatactttgctggtgaaggaatttatcatacctgacactaacccctcttgctatataacctacgggaaagactcaacatgggctgttaaggaaaatcccaaatatgaccctatttaggtaacacgactatcagctaatggaagtctaccggcactgctaaataactatcgccttgtaaaaactaacacgctggctaaaactaaggttt

SEQ ID NO: 75970 - DNA, 204 bp, Zea mays
gacaagccctttaaattcagagataggacccgacttactaaggacgttcgctacaatgaagagataagagagacagagaaactctttctatacttgatacacatggtaaattgggactaagagttgtcactcgcctgcgccttaataagacagacacctcggccatggatgatactctccgatttgcttgacgccaagatatgt

SEQ ID NO: 75971 - DNA, 377 bp, Zea mays
agcttggaagggtcttcatcctctcatgtgtctaactgcgaagccacagacagcccatgctagtcttagcaattaagcatgcatctagaccggactcctcttttgcaaaatcaactaaataaagtttgtcgtctagtatacccttaaaagctaatgaatcatcacttcttctaaagacagacacatctacattggtgaataaacagttatatcccatattacacagttggcttacagacaacaagttatatccaagcgactcaactaagaacacattagaaatagagtgctcggacgaaatagcaatttttcctaaccctattaccttgccttggttcccatcaccgaatatgattgaatcttggggatccttgttc

SEQ ID NO: 75972 - DNA, 199 bp, Zea mays
ggtactctctattgccacgttgagagaagccaacggacagtataccagaatagagtcttccaattaaaccatgggccacaccacacttgcttgacacatgcaacgaaaacgcagatactcgatagtagacgaattacttgcaggagaaggcgacttgagcatcaaaacccaaaaactcccttgcgtcggcatcccaaca

SEQ ID NO: 75973 - DNA, 375 bp, Zea mays
  unsure (1)..(375): unsure at all n locations
tttttatatgcaagnacacctaatcatacatctcgtggatcagataaaaatattagggccactatatttacatcatatgtttcagttggagcgatacctgggagtattaaaaggttatgtgcaaaatcgcgctcacccagagggttctatcatggagggatacactacagaagaagtgattgagagctgtatatattacatcagtgacggaacaatgataggtgtgcctgtacctaaacatgagggtaaactatgtgggagagggagaatgggcaagaaaactttttgcgttgaggattacaagctagtacattgtgctcatggtagtgtactacaacatctcacgatagccgagccttacatagaggaacacct

SEQ ID NO: 75974 - DNA, 425 bp, Zea mays
agccatacaagtttactgaagaatgacattaatttcaattggtcttctaagggtaatgaagcctttgagcaattgaagacattattaaccactgctccggtattggctcaaccggacatcactaagccttttgatgtatattgtgatgcatctggcagtgggctcggctgtgtactgatgcaagagggccgagtaattgcgtatgcttcaaggcagttgcgccgacatgaggagcattacccaactcatgatctggagctagctgctgtggttcatgccctgaaaatttggcgtcactatctgctgggaaatatctgtcacatatatacagatcataaaagtttgaagtacatcttcacccagtcagaattaaatatgaagcatagacgatggcttgagcttattatagactatgaactggagat

SEQ ID NO: 75975 - DNA, 445 bp, Zea mays
agcttcggatctttagccttgcaacttttgtcaatatgacccgaaacaacctgggaatctagtttaagaatcgcccttctgattcccattgcctttaattttcgaagacccaggagcagggcttcgtactcagtaatgttgtttgtacagctgaaatcaagtcttgctgcataacaacgtttaacctgggatggtgagaccaaaacagcggctgcacctgctccgaaggttccccaagagccatcacaaaatactgtccatacttcggcatctttatttgcttcttcatcctgagcccctggcgtccagtcggcaataaaatctgccaatgcttgagactggatcgaggatctatgcacataatcaatgtaaaattcattgagctctgcagcccattttccaatccgtccagtagcttctctatttctcatgatatccttcaacg

SEQ ID NO: 75976 - DNA, 277 bp, Zea mays
cccctgactcatggcggatggagctgctcaggtaaaaatcatcactgatttagatgatgtcaaagatgatctagatatcgacgatggtgatgatgaaggctatccatatgaagatcttgttcaaatgttaggcgacgccgatgcctacctgcgcatcgacttagacaaactcaacaccttgcacggatcgtataaaaacctccatatgattattgaggaggtcaagacctctcacagtgacctcaaagaagattgcgagacagttcgggatgctcaa

SEQ ID NO: 75977 - DNA, 453 bp, Zea mays
  unsure (1)..(453): unsure at all n locations
agcttatccagnatacctaattaactatttattttatctctgccctttcggctctatccctgtcaggctcgtgcagttgcccagccttggtgctcaacgtcagaaagaactcacttctcggtagcgcacttgccggtaatgcctacatccatccattagtctcataatctgcatcgaacgattctagaaagcaaataataacgttgattgctntgcatcttgctttgtcctaaaaactgtccgccaagttgcaggtgctctctcataggcctttgattcttattcacagattnttgacggccataatggcaaagatgctgctcaatatgtctgtgataactngccatgggtcatcatggaagatgatgatttatctcttgagcttaanaaggtattanagtggncatttgtgcaacataatactcactctgttctttntatttatggcgatta

SEQ ID NO: 75978 - DNA, 452 bp, Zea mays
  unsure (1)..(452): unsure at all n locations
tcttcctaagatcacccagaccacagcaatatatatgatataatagccactggngaatagttgataatgccacaacatagagaaagaaagtggaactttctatcatggaccggactgtctgcgccagggggccaaactgtacgcgccatcgtggcggacggtccgcgactgtccaggggcgagttttagaaccctagccacccaatgcattcaatcaacgattcgacagaaaataaccatccaaatcggttcaaatttttgcacaatattcacaatgagtaacactagcaattccaccaatcaaatttgtaactccattgcccaattctagatcagagagaaatccctaagaattcccaaagttgaataaatcacacaaattccatgagattttgaaataccgagatgaagacatagttgatgaacttccagcaatctcccggacagtccgt

SEQ ID NO: 75979 - DNA, 481 bp, Zea mays
catgcaagcttaagagacttttttcacggatcaagctcgttactaaaaacgatctagcaccgcgaaaggggctactgttgggtctatgcttcgtcgccgaaggtctttaaggaagaagcggctttcggctgaagctgcttgtgagaggtggccgaagcttcctcttcatgaagcttcggtattacaaaccgacttaaagatagaatgaccttttagtccataaaggtctgagtcaatgttgtaaacttttataaggggcatacttgtaatttctcacaggctgcgtcctgtgcctataaatagtgaacagtattcctttactgttcacggattctgagaattgcagtcgcatctttcggaattctacctttgccaaggcagaggtattattgtgttcaatgattcaatatactaagtaaatataatataattcgtccatgaaattattaccccttttataccctctatgttatgttggttt

SEQ ID NO: 75980 - DNA, 340 bp, Zea mays
  unsure (1)..(340): unsure at all n locations
tctcggcgcagcgtgaagaaagctagcctgagatctagactgatttctttgtccaagncgagcctcacagagtgcggatcacgcagtccagcttttgcaaaatctgcaagtgcgctcggcaaagtggcactaataagcaacgtgtgacgtgtatcagttatccttttcagaatatcatgccaattgtttgccggaccccttgctgaacaaggaatcagcttcatcaaacacaacatattccactgaacaaagagtcatgtccttaacatcattcaaatggtgcatgagcctctctggccgtgcaattatgatatcaggactggcctgttgcgttcaactt

SEQ ID NO: 75981 - DNA, 505 bp, Zea mays
  unsure (1)..(505): unsure at all n locations
accttagagngacctgaggcatgcaagcttctaaagggagaacacgtgatagggttttatctaatcttgctattccgaaaaagatagaccttgtgcagcttgtcaagcaggtaaacaagtgggaggagcacatcacagcaagaatgtgatgaccacttcaagacccctggagctgctgcatatggacctcttcggacccatcgcctatctgagcataggaggaagtaagtatggtctagatattgttgatgacttttcccgcttcacttgggtgttcttttcgcaggataagtctgaaacccaagggaccctcaagcgcttcctcaggagagctcaaaatgagtttgagctcaaggtgaagaagataatgagcgacaacgggttcgagttcaagaaccttcaagtggaggagttccttgaggaggaagggatcaagcacaagtcttccgctccatatacaccacagcanaatggtgtggtagagatgaagaacacgacgctaatc

SEQ ID NO: 75982 - DNA, 388 bp, Zea mays
  unsure (1)..(388): unsure at all n locations
ctaagcttctaagggagaacacgtgataaggctgactaaggtgcttttttttttatagaccntgcgcagcttggtcagcaggtaaacaagtgggaggagcacatcacagcatgaacgtgatgaccacttcaagacccctggagctgctgcatatggacctcttcggacctgtggcctatctgatcatatgacgtagtaagtatgggctggctattggtgatgacttttaccgcttcacttgagtgttcttttgcaggaaaaagccgaaacccaagggactctcaaacgcttcctcaggagagcgtaaaatgaatatgagctcaaagtgaaaaagataagaatcgacgacgggtccgagttcaagaaccttcaagtggaagagttctct

SEQ ID NO: 75983 - DNA, 423 bp, Zea mays
tatagaaggggagctgtacaagcatggagtctgttctccactactcaaatgtttatccagagccgaaggtatataattgatgaaggaaatacacgcacgcctgtgtggatctcacattggatctaggcctttgctgggaaaagttcttcgtctaggattttattggccaaaagcagcttcggatgcagcggaattagtccaaaagtgcgaaggctgtcagaaatgtgcaagagatcaaaaacaacctttgtctttaactcaggtaatacaacccacttggccattgcaaaggtggggccttgatttgttaggtccactaccaccagcacaagggaacttaagatatgttgtagtggcaatggaatatttttctaaatggatcgaggcataagccttatccacaataactttcggttactgtca

SEQ ID NO: 75984 - DNA, 374 bp, Zea mays
  unsure (1)..(374): unsure at all n locations
atactttaagcttctttaaatgccttaaaattccttatttaacctaaaaatcatgaaactcattttattaaattctagggaaaataaaaaacctacgacaattggtttcacaattttatgaattttctacaattttctacaagttnattggttctgaagtaaaaagaaaaggacaaaggcattaacagtaatgggctgactttggcccacatggcccagacctaagcagaagcacgcccgcgcccgcgctggtggctttacagaaaggccctcagggttttagctaactgggaacaggttcttttactatttcacagagtcgctgacattttgcagataaacccctgaagttctaatttctcgcagcactgggt

SEQ ID NO: 75985 - DNA, 420 bp, Zea mays
  unsure (1)..(420): unsure at all n locations
acctgacctgaggatttcatatatcgcctagagagatggacattgtcctggccttcagccttcatggtcttagaactgaaccagcatggccaggcaatgaaccagactaccagacgttgaacactaatgtaatttcttgcaatgagtantaagtccagtaggtcatgctntattagttcatgtttgccactactggttggtagtgtaaaagtactgagcacgcactactggttttgattgccactgatgcaacacgaaatgtaaggcagtgattgaaggatcatgaggatagttgcatatgttctttcttaagcttaatgatgataacatgagcaagattactgatgccactactggctgtattttccctctagtctagcttgtaaccttcagttcatgatggtaccaggatcaatgtat

SEQ ID NO: 75986 - DNA, 354 bp, Zea mays
actaagcttaagttcgtctgtcgcatcattcccccatcgaccctcagtttttgcctttcataggtaaccatatatgtgttgtctctgaatccaaccttcttcatctcgtttccatcggagttcttcctccgaaggagctctgttcgtggcggatctgccgtggggtcactattccgacagaagacacccacgaatccgtcatttacgttccttttcttatccgcggacttgctcttcccatttctcctttcttccgcggtctccttgatttctatcgcttgaatctgacccatctgaaccccaattccattcttcaagtttctgtttttgttcatttatgtgaagcctttcttg

SEQ ID NO: 75987 - DNA, 413 bp, Zea mays
agcttgagaaatacgagatggcgcgccatttttcgatctaccgatacatcctcgaacacaggaggaggagagactaattgatctgctccgagaccgttggatcaccaatgcgcgcctccgcgtacattctattgctgagcgtactgtatgtattgcaccgttccgtcgtcacacacacctattgcggcgaagaaatgtagaataatagggtctacactatcaagggcggcttgcccaggttagatgtaacggtattacgaccatagcttttctctattactccaaccaccgaggagaacgatcctctgtcgtcttctccgatggacgccacttcgcaatcatttaccaagaactgctagtcgcaaattgacggtaatagaagctgaagctacatctcgccactacctatgcat

SEQ ID NO: 75988 - DNA, 480 bp, Zea mays
ctccgcttggaagaacgagatcaggacacaaagatcagtgacggtgtgttcgtttaatacccatcccacacctgattcgagcatagcgatctagaaagctgagtgcggggtgatgttgtttttctccaccccatcgggcaacatgacggcccgcataaagagtgcctgcggaacatatccattaacgattttgctctgatatcaaaactttgatgcatctctgttgccggagtggggatcgaacaagatgctaatatatttaacccacacaatattggttatactaatataaactggatctgtcatagtttaaaattagacactttcatctactgctcgaacacttgatcgatgtgccctacataatttattacagaatcaaatctccaatattaatccttggacgcgatttcgtcgtcaaaacagcgtgcggacggataaattgaatcatattcccgcgcacgacatcactccgacgac

SEQ ID NO: 75989 - DNA, 465 bp, Zea mays
  unsure (1)..(465): unsure at all n locations
agcttgctcagaagtgggctatctactttttgttttcagnattagctaattgactaagttctgaatttcagtaaactttagccatgtctggacctttgtagtggctaacctgttgggaaataaattatgtctcttatagaaaagcgatagagctatagtagaagatcaggtgtggttaaaggccatacccttgaagctatttggaactaggagaaaaggtgagctaaagtggagctgccagatctctggagtttcagatggcgaacagngagctgaatctgcaatttcagttttgtggctggtttggagttcatttgtggctaatctaaaaggttttaggttgtggtgtttatagagtaagtgaagcccatatgattgtgaacaagtatacttaagtgagtttggtttggtcctgtataanaggtggagtaaaactcgctcatagttgggccgacacactatgct

SEQ ID NO: 75990 - DNA, 365 bp, Zea mays
  unsure (1)..(365): unsure at all n locations
tanaggagaanagaaagaggggagcgggtcttactaccttattattataagctcaagaaatagtttaaagcaccctgccaagaatggctcgatacaatcgaagtaatgagtaatgaaattcttggaaattactccaaaaaagaagaccagctgatgacagcagccttcggcactcagctgaagcgaaggctgaacaaggtgcttgatgctataggatttgaatattcctgatatggtccactgaaccgagatgctggagggccgaagagaaaaagaattgccagcgctgctggcgaagaggtcgccaaggtattcaaaaagaaaaggggagattctgaataacttatccctgaagaattgaaccc

SEQ ID NO: 75991 - DNA, 442 bp, Zea mays
  unsure (1)..(442): unsure at all n locations
agcttgccttcgcctcagagtactatcctctatccaactgagatgnggaacgcgccaatggtaaaattttcacagccatcaaaaaaatgctcctcgacgacaaaaaaggcaagtgggcagacctgttacctgaagcggtctggctgctgaacacgactgagtgcagggcgactgggttcacccctttccgccttctatatggatcggaagccatgactccgcaagaaataaaacatgggtccccacggacagtcgcgtcagccgtccccgacgtagacgagcctacttcgaaggacctcatcgacggagaccgcgtcttcgccctacaggctctagataaataccaagctcaaacaaaagcatggcgcgaccacacagtcatctcgagggaattcagcgaaggagacctcgtactcgtccggacagctcggacagagtcccg

SEQ ID NO: 75992 - DNA, 428 bp, Zea mays
  unsure (1)..(428): unsure at all n locations
tctaaagggagaacacgtgataggtctaactcatgttcatttcgaaaaagatagaccttgtgcagcttgtcaagcaggtaaacaagtgggaggagcacatcacagcaagaatgtgatgaccacgtcaagatctctggagctgctgcatatggacctcttcggacccgtcgcctatctgagcatangaggaagtaagtatggtctagttattggtgatgacttttctcgcttcacttgggtgttctttttgcaggataagtctgaaacccaagggatcctcaagcgcttcctcaggagagctcanaatgagtttgagctcaaggaaaagaagataggagcgacaacgggtccgaattcatgatcttcaagtggaggagttccttgatgaggaggggatcaagcacgagttctccggtcctacacacctc

SEQ ID NO: 75993 - DNA, 447 bp, Zea mays
  unsure (1)..(447): unsure at all n locations
agcttgagttactaaaacattattttagtttttagacgatatgtatagaacatcatgaagagacgagctcttcgtagagagtttgtcttttgattcttttgtagaaaaatgtctagagaccccttaattaatatggttgtacatgccctaaaaacggctaagtgaactggcgagggaggggggcgaggggggtataaatggctaaactggtcggtcggaccgacattggcatctgtactattaggcacgacactgttaggcactattagtaattcgatcgcgccggcactagtgcctagtcatcggcccagtcattacactatagtgcctaatcgngccgngtctacactatacgtaactaacacctaatagtgcctatgtcagtccacacattatttttgagagctcaaaaacatacatgatctcttaaattatatggataatctt

SEQ ID NO: 75994 - DNA, 398 bp, Zea mays
tggcgacaactggaattctcatagcctttgaagtacctttctcaaatgttcctcatgctcttgctcattctaggaatatacgagaatatcatcaatgaacaccactacaaacttgtcgaggtagtccatgaacacactgtttatcaagtacatgaagtaagctggcgcattcgtcaaaccgaacgacatgaccgtgaactcatacagtccatacttggtgataaatgttgtcttcggtatatctgaaggtcggatcctgagctgatggtaacctaacctcagatctatctttgagaacacactagctcctctcaactgatcaaataggtcttcaattcgaggcagggggtacttgttcttgacagtgacttcattcaaagctctgtaatcgatgcaca

SEQ ID NO: 75995 - DNA, 375 bp, Zea mays
  unsure (1)..(375): unsure at all n locations
agcttnctgaagctagaaaacatgtgtnggttacttgtgtctgtcacaaccagggattaccgagcataaaacctatcgtctatgtacccatccaagagagtacttttgacatccatttgacaaaaagattaaaaccctccaaaatagcacaagctagaacgattctaatggtttctaaatgggcaacacgagcaaaggcttgcacatagtatataccctccttctggcaaaaccttgtgcaaccaaccttgccttgagtcgaataaccaacccattctcgctatgtgtgtatatgaacacccaatttgtaccaattgggtggcagattggtggcgaagaaacccataccaaaacctggtgtctctcaaaatttaa

SEQ ID NO: 75996 - DNA, 355 bp, Zea mays
  unsure (1)..(355): unsure at all n locations
ccacagaccaacagcgttgtggagcgcgccaacggccagaccngcacggccattaagaaaacgccgctcgacgacagaaaggcgaaacgggccgacctgctaccagaagcaggctgggcactgaacacaaccgagtgacgggcgaacggaagcactccccaacgcccgcaaaaagaatcacaggccaagaccccgcacgatatcaaacatgggtccccacggacaagcacctcagccatccccgatgcagacgagccaaccctcaaagatctcaacgacggagaccgtgtctgcgccctgcaagccctcaacaaaaaccaggcccaaacaaaagcctggcgcgaccacgcaggcg

SEQ ID NO: 75997 - DNA, 393 bp, Zea mays
  unsure (1)..(393): unsure at all n locations
agcttggatagtgtatttcaatgggtcatgttgaacctttagngcgggtgcagctgctattctgatatcactatctaaaatcaaaacttgctttgcagccagattggagttcaactgcacaaataatattgcacaatacaaagctcttctcttggggcttcgaaagcttaaggcaatggggataagaaaggcagttctcaaatctgactcacaagtcatcgcagggcatgttgataaaagcagcatagcaagagatctgaagcttgaaaagtatcttgatacagtctaaagaatggaagcctccttcgaaggtttctcagtaaagaacattccaagacgggaanatgagtaggcagaattactagctaaatcagcggcacaggggctcccact

SEQ ID NO: 75998 - DNA, 434 bp, Zea mays
tactatatctttaacatctaagttgttattatatttagattcaaagggcaggtggtggtgggggttttggattacgtaccgactcctttgggcagaaagtcggggaagcgagaacgtagaaaatcctcagtctcccacgtagcctcttctactgaatggtggctccactgaaccttatacatcctaatcgaccttgcccgcgttgatctctccttttgatccaataccttgacggggtgctcttgataggacaagtctagttctatctcaaattctggttcaggtagcacttctgtgggtaagcggacacactttcgtagctgagatatgtggaacacatcatgaactgctgacatatggggtggcaacttcaattgatatgctacaggcccacaagtctctttgatctcattgggcccaatgtagcgaggagc

SEQ ID NO: 75999 - DNA, 465 bp, Zea mays
  unsure (1)..(465): unsure at all n locations
ncaagctttgccgggaatttccagtgtacattcttgcgccctgggaattcctgggaccttcgaagctgccgacaacagccgggagagtctctccgggactacatccggcgattctcgaagcagcgcaccgagctttccaacatcaccgactcggatgtcatcggcgcgttcctcgctggcaccacctgccgcgacctggtgagcaagctgggtcgcaagaggctatcttccggaaggacaagcagccctagggccgcccttcggaagatgcccccgaggcgtcaactcagcgcggcgccaagaagaagggcaagaagaagtcgcaagcgaaacgcgacgccgccgacgcggaccttgtcgccgccgccgagtacaagaaccctcggaagccctccggaggtgccaacctcttcgacaagatgctcaaggagccgtgcccttatcaccaggggcccgtcaagcaca

SEQ ID NO: 76000 - DNA, 397 bp, Zea mays
  unsure (1)..(397): unsure at all n locations
ttaccttgtagtctggactataagttggttacgttatgtgagctctatgcagnttgaccatttccagcatttgcataatgaggactctagggaaaagcctcatagtgagaccctagccattcacctcgtaagtgaatacgagtctagctaacctgcgctagaagggaatcgtgactcatgggtaaagatgcgccacctctacagagtgtaaaactgatatatcagctgtgctcacggttatgagcagtctagactcctcacatgataattgaaattgaagatggaaataaatcgagatccgatgatctgccaatggtttgcttaagtgggttcacttaagtgtttatgattcactcttaaacctttggttaataggaatacttgggattcacactta

SEQ ID NO: 76001 - DNA, 442 bp, Zea mays
agcttatacataaaagcatcatgatcaaattaaatgggtttttcaaaaggcaaaatgtgcaaccccaacaaaaaccctaattgagccctatgaacaaaattcaagaaaatggggaaaagagtatgaaaaatttagaatcatggcttgggccaattataaacattgaagtatatttaataagcaacaataaagattgaggaagcttggccaaaataatttaaataaaaccccaagcaagcttctcatgtggggactcaatagggaattctgaatttcagaattctgaatttcagagcttgagccaaagatcaagcgtgttcaccttgatccctaactcaaatcctaatggccccattaacaaaaatgtgcataactaacccctctgtcgcatgccagaagatggcattgggacgcgagccctagacacgaccaaaccctggat

SEQ ID NO: 76002 - DNA, 455 bp, Zea mays
ggtgaaggttcttcatccccacatgtgcttaacggcgatgccacagccagcccatgctaatcttagcaattaagcatgcatctagactggcctcctcttttgcaaaatcaactaaataaagtttgccgtctagtacacccttaaaagctaatgaaccatcacttcttctaaagacagacacatctacatttgtgaataaatagttgtatcccatattacacagttgactcacagacaacaagttatatccaagcgactcaactaagaacacattagaaatatagtgctcggatgaaatagcaatttttcctaaccctttcaccttgccttggttcccatcaccgaatatgattgaatcttggggatccttgttcttgacgtaggaagagaacatcctcttttccctcgtcatgtgggttgtgcatccgctggcgataatccaacttgagcccccg

SEQ ID NO: 76003 - DNA, 472 bp, Zea mays
  unsure (1)..(472): unsure at all n locations
atgcaagcttagaaacgaaccanacgattcattcgtgatgcatgatagttcacatccttccacgccgtaagcatttcactggtacaggacacgaggagagaaaaggtcagtctcttgagaagttcagccaactttctgagcgtaaataagtttgcagttgctaacctcggggtagcagtcctgatgtactatagtttgggtgtgtggattaacatgaaccacgcaagatattctcccctgcaagaagccaagaacaatcattaaatccttgttcgattattcctatcccatgtggattggatgagattagaaaaaatataaaagattttgatttgtttgggatttaaacccaccgttaagccatgtggattggatgatattgagtcggtttaaatctatatgtaagtaaaatacatctcaatccatntcaatatactatactccaatccacgtgaaattataataaccgaac

SEQ ID NO: 76004 - DNA, 434 bp, Zea mays
ctacgcttgccttcgcttcagtctatcatgcgcagtccaacggggttttggtttcgccaatgtgaaaatattcacagctgtcaaaaagatgctcctcgatgaaagaaaaggcagatggaccgatttattaccagaggcagtctgggcgctaaacacaaccgagtgcagggcgaccgggttcactcctttccgccttctatacggatcggaagcaatgaccccgcaagaaataaagcatgggtccccgcgtacagttccgtcagccgtccccgacgtggatgagccaacttcaaaagatctcattgacggagaccgggtcttcgccctacaggccctaaacaaatatcaggcccagaccaaagcatggcgcgaccgcgcagtcattccgatggagttcagcgagggggacctcgtactcatccgaacagctcgga

SEQ ID NO: 76005 - DNA, 473 bp, Zea mays
  unsure (1)..(473): unsure at all n locations
agctngagcagtgactggcttcgtctgatttctttgttatctagntatcagcattttcttcaacttctgccaagaagtgattgtccctggccgaagagaagagtaccaagtctgagcgacgctcttgacggccatgacaaaagattttgccatgactgtagtattgccaccatacgaagatatggttgcttcgtaactcatcaagaattgcttcgggtctgtatgaccgtcatacatgggaagctggggtggcttgtaagactggggccatggtgtagcctgcaattctgttgagagaggagaagcatcattgaaagcaaagtttccgtgatggaaatcttcataccagtcgttctcattgtggaagccttcctgatggagctctctgcgtggaggccttcggctctgatcatcttgaacaagatgacgaacctcttcagaagcttcgtctatctgtctctgaaggtcagcta

SEQ ID NO: 76006 - DNA, 458 bp, Zea mays
  unsure (1)..(458): unsure at all n locations
ctaagcttgaagtatatcttcacccantctgaatcgaatgagacatatgcgatgtctctagctgatcaaggattatgaattagaaatccattatcacctaggcaaagcaaatgtagtggcagatgcactcagtcgtaaggcttcctgccattgtctaacagtgaggacttctgacattacattatgccaggagatggaaaaattaaacctgtgaatgattcaacatgggacttcaaaacatttgaagctggagtcattcatcttacaaaggataattgacgcacaaaaggatgatgagggtatgaaacacatacgtgagaagataagggttggaaaagcccaatgtatcaaagaagacgatcaaggtgtgatatggtttaacaaccgcatagtggtgccaaagaatgaagagatccgccagcaaaatttagatgaagcacatcttagtcgctattcta

SEQ ID NO: 76007 - DNA, 408 bp, Zea mays
atctccttcaccacagccatctttaacactttgcccataacaagaccaaatttcattttcaaatggctgtctgcaagacaagtgatcatttgcaataagccaattatactctacctttatataatctagactaccaaacaactacatatagtagattataatcttgattatataatctagattatataatctataagctgaaacaaacgggtcctattgtcctaaggcaatgcacgcacgataaattcagcataacataaatgttgaaacttagttgtcagagctgatatattttaaatagagtatatggcatctaacatgatcataatgagaaaaaatatgctaaaacagtgaatccattactacaaaacaagctctcttattgcagaagcaaagacataatcaatg

SEQ ID NO: 76008 - DNA, 438 bp, Zea mays
  unsure (1)..(438): unsure at all n locations
agcttcggtagtaagttgatgaaggtatatttcatatctatntaacactgccaccaacaccctatgtaagggaaaacgaagacccgccttcttaaaactcttgaacaccaccacttcatcagcttcaagaagaggaacaatgtcctctcctccagccatcacaatgtatatatcatgaaaatatttgcccttcattgcttcaatctaacccttcttaacagtggatttgccaaatacaacatgacttggtctccatggtcgatcttcgacatcgttgttgtcactctcaatatcaaaaccctcgctgtcacttgaatctccagacagcccagctaaaatttcatcagtaattttttcaatggtggtcctttccatagcttcgtaaaaactagccagtgtggggtctacactccttttatctttggccatttcagcgct

SEQ ID NO: 76009 - DNA, 462 bp, Zea mays
  unsure (1)..(462): unsure at all n locations
tgcacganatanggcacgggagcgagtgtgggtgcgggctatgctcataagaaagctanggtgcgtgtgcaggcgacgtggccagggatctcggcgtgcgtgcacatcggtccatggcggttcgcggggaaggctgagctgaaagggcggtcccatggcgcancgagggggagagcgggcgcgcggtgaaaccgttcagcgtgctgacaggacgggcccgcgaggcagagagggaaagggcgcgcgagcaagggcgattggtgccgatagaacggccccactgggcagagggagagggggagggagcgcgcgcggagagaaaactgccgctgacaggtggaacccacctctcaagcgcgcgcgggcgcgcggccttgctatgccgagctggaccggtttgggctgaattggttttctcttttttgaaggaattataatngcttttcttttttattntctcta

SEQ ID NO: 76010 - DNA, 413 bp, Zea mays
  unsure (1)..(413): unsure at all n locations
cagctgcagcttatagaccattgatttttcttgtgagttaacttcgcgataactaagatatttgacaaaatgatttcttgtacagcgggacttttgccactaccggaaccatattacacaaagaatgattcagaattaaaagatatccttatcgaattcaaggtggtgcataaggcaatcgatgaagctattaacacagttcccaacgaagctgctgaaaaaagtttgaacgaagagtgagagatttttgtaaaaaaactttttcaaattcgtgtntgagaatactgtgaaaaacttttttatgtgtttgctgtgtgtacagacaactatatggaatgtattatgtatataagtatgacttgcatgacattttttatgtagcgtgaaataagtatacgtaccattttgaaccg

SEQ ID NO: 76011 - DNA, 432 bp, Zea mays
  unsure (1)..(432): unsure at all n locations
tagccatggtaattctatatgaatntagtgctaaccaatctattttagccaaaagggtgaactaacaatcaattaagcactagcagaatttttggacagcaatacagcagtcacttgttttgatcataacttttcaaatattaatccaaaaatagaaaactagaactttctggaaagcttaaaaagtgttctacaactttggtattttcacctaaacaagattcaacacttagcaaggttaaaagtgctaacacaacagatctgtccagatttggacagattcagacttgcaacttcaaaaattcacaactacagattcagacattcaaacaaggtgatcctagactttctggaaagggaattaaattgcctacatatcatttataaacatctcaaggtgagtcaatatttaactaaggataaaagacacta

SEQ ID NO: 76012 - DNA, 387 bp, Zea mays
gatgaagaggctattcagacctcggtggattactatagaattactaccaaatgtaaagggcatgggtgtaattttacatgggctgtgtcccgtgcctataaatagatgaacagagctactgtactgctcaggctgacttggcatttgcttttgcgtcacgcttgtacttttaccttcttttaagccgaaggtacatttgtaaattgatatcattcctattcttccataataataatatagaaatgagttgataataatatataataggttacgtcatcctttatatttcatatgttttcttcttcattattatgcgatgtgattatgaaggtacgttctatataacccttcgtcgaatatcattatattccccaaggaaataatgct

SEQ ID NO: 76013 - DNA, 414 bp, Zea mays
  unsure (1)..(414): unsure at all n locations
ctcaagcctccttgatcttatagggaccaaagaagcgattatctaattttgcccttgattccaaacctctggacacctttggtgggtgacacttcaagataaacatgatctcccacttcaaactgcaaaggcttccttctcttgtcatgatagcctctttgcctggcctgcgcagcttctaggttattcttaataactctgacctttttctttgcttcaaggaccaagtctgggccaaatatttncctctctcctgcttgagaccaattcaacggggacctacaccttcttacatacaagcttcaaaaggtgccatctttcaactggactggtagctgttattatacgagaattctgccaaagaaaaacacttgtccccatcctcttcatagtgtagcacacatgccctcaaca

SEQ ID NO: 76014 - DNA, 469 bp, Zea mays
  unsure (1)..(469): unsure at all n locations
agcttgtgaaggttcttcatccttacatgtgctaagcggcgatgccacagccagcccatgctagtcttagctattaagcatgcatctagaccggcctcttcttttacaaaatcaactaaataaagtttgccgtctaatacacccttaaaagctagtgaaccatcacttcttctaaagacagacacatctacatttgtaaataaacagttataccccatgttgcataattgactaacagatagtaaattatatcccaaggactcaactaaaaacacattagaaattgagtgctcatttgagattgcaattntacctaatccttttaccttgccttgattcccatcaccgaatataattgaatcttgggaatctttattcttgacgtaggaggtgaacatcttcttctcccncgtcatatgggttgtgcatccgctgtcgataatccagctggaacccncggatgcataaa

SEQ ID NO: 76015 - DNA, 448 bp, Zea mays
  unsure (1)..(448): unsure at all n locations
ctaagcttgccacatagctctttgaataccttngatcatatcttctttatatgctatgactaatgtgttttcaagtcgatttcaaaccaagtcataggtatattgaaaggaaattggagtcttcggcgaagacaaaggcttccactccgtaactcatgcttcgccatcactccgagcaactctctcgtccttgggggagaaatgagcatcaaggaaaaggacttcatccttgggggagagagtaaaagctcaaacgcaaaaggacttcgtctttggtataatcttaactcacttatttatgaccaaagggaagattgcacttcgagggctctaatgattccgtttttggcgattcatgccaaaaagggggagaaatgagcccaaagcaaaaggaccgcaccaccaccaccaaattcaaaaacttagtgcttcccaaaagtctttatca

SEQ ID NO: 76016 - DNA, 460 bp, Zea mays
  unsure (1)..(460): unsure at all n locations
agcttatgaagattcttcatcccatcatggtctagtcggcggngccagagccaacccatgttagtcttagcaattaaacatgtgtcgagctcagctctatcaaaatctactaagtatagctgaccctctaacacacctttaaatgctattgaatcatcacttcttctaaagacagtgacacctatatcagtaaaaagacagttgtagcccatttgacataattgggaaacagaaagcaagttgtaatctaatgaatcaacaagaaaaacattggaaatggagtggtcaggtgaaatagcatatttacccaaacctttgaccaacccttgatttccatccccgaatgtgatagctcgttggggatctttgttcttctcatatgaggagaacatcttcttctcccctgtcatgtggtttgtgcacccgctgtcgagtattcaacttgagcccgcggatgcat

SEQ ID NO: 76017 - DNA, 292 bp, Zea mays
cacgtcagcttccgcagcagaggctacagggcgcgcaagcttctgtctttatatggaactcacggcgtcatgggtagaagagctgaactctctgcagagagcgtgcagcaactgttatcatccttcgtgcttacgggggacagcgctcgtgccatccggctttattatggacacatatgggctgagagacataggatttaatgatgacttgggttcgaagactacgatgatgttactttatgaagaaacgattcacgggttggctcttgatcataccggactagagtaagat

SEQ ID NO: 76018 - DNA, 462 bp, Zea mays
  unsure (1)..(462): unsure at all n locations
agcttatgaatattcttcattccaacatgtgctagactgtggngccagagctagcccatattagtcttagctattaaacatgcatctagatcgacattctctttagagaaatcaactaaatagagcttgtcgtacaatacacctttaaaagctaatgaaccatcacttcttctaaagacagatacatcaacatttgtaaatagacaattatacccatatgacataattgacttatagaaagtaaattgtaaccgagcgattctaaggacacattanagattgaatgctcggtagtgttggctatctttcccaaacctttaaccttgtcatgattcccatctccaaagatgatcgtgtcttgggaatctttgttcttgacgtaggaggtgaacattttcttcttcctcgtcatgtgggtggtgcatccgctatcaataatctagctggtgcccccggatgcat

SEQ ID NO: 76019 - DNA, 452 bp, Zea mays
tatggaaagagcacgaaaggagcaacttccagacctcattacagatgagcaaggaaccttctggttcaaggaccgcctgtgcgtgccagtgggagaagcacgagaaaccctgctcgatgaagcccacaactcagcttactctatccacccagggaccaccaagatgtacctagacctcaaggccagatattggtggaaagggatgaagagggaaatagcacagtatgtggcccgatgtgacacctgtcagcgaacaaaggccgaacatcagaaacctgcaggcctacttcaacccctcccaatacccgaatggaagtgggaagaaataggcatggatttcgtaacaggactgcccagatcacagagaggaaatgattccgtttgggtgataatcgatcgtctcaccaaggtagcccacttcatttcagtgaagaccacttttggaggagcag

SEQ ID NO: 76020 - DNA, 413 bp, Zea mays
  unsure (1)..(413): unsure at all n locations
agctntgcaggagaaggagatgatatgaagtcttgggggtgcttgagagagtcaattcaattaactcaagctatcaatcttcgataatctatatatccaagattgacccaaagttatttaaatttattatatactcatatcatctcgggaaagatattgatgttgtaggaaataaagaattaccctgtgcaagaaagatcaaggcctacaacatggaggaaagccaaaggatggtaacacttatgctttcaagtgcaagtatattaaattatcatttctcatgtgtcttgtgtagtcacatagaaaaagaagcactttaaatgtctttaaaatatgtcaccattctttgaagaaattcctctcatatgatagattgcataatcatcatttctatactatggcaatctacatgc

SEQ ID NO: 76021 - DNA, 364 bp, Zea mays
  unsure (1)..(364): unsure at all n locations
tgcctcccataatcgggctgtgtacgtatctgtaacctctgctagcttatctggcgtcgatctactagtctacctatattaaaggcatgcacgcaacgcatgcagattcgagcttcgtgccgccgatggtgtacgcggtgctggggagctcccgtgacctggcggtgggcccggtgtcgatctcgtcgctgatcatggggtccatgctgcggcaggccgtgagccccaccgcggagccgacgctgttcctgcagctggccttcacctccaccctgttcgcggggctggtgcangcctccctgggcatcctcaggctcggcttcgtcatcgacttcctgtccaaggcgacgctggtggggttcat

SEQ ID NO: 76022 - DNA, 462 bp, Zea mays
  unsure (1)..(462): unsure at all n locations
agcttaccgcatttgaagcatgatcgctttctcttggtcttggccttgcttggctgtccctttcgaccttttagcgccgtcttgaatctcttgatgatgagagccatctcttcatcattgagcccggccgcttcaacttgcgccatcttgctaggtagcgactccttgctcctcgttgcctttagagcaatgggttgaggctcgtggagtggaccgttcaacgcgtcgtcgacgtatcttgcctccttgatcatcatccgcccgctcacgaattttccaagtacttcctcgggcgtcatcatcgtgtacctaggattctcacgaatattgntcacgagatgaggatcaagaacggtaaaggacctgagcattatgcggacgacgtcgtgatccgtccaacgcgtgcttccgtagctccttattttgttgataacggtcttgagccggntgtaagtttgagtt

SEQ ID NO: 76023 - DNA, 361 bp, Zea mays
  unsure (1)..(361): unsure at all n locations
tgaaggccaagntaagaggcaagccccaatatatttcgtatccgagggtcttagtttatcaaagaaaaattatacagaattggagaaggtactggatgctggtttgatggcctccaggaagcttcggcattattttcaagcttacaacataattgttccttcttcgcaacctctgaaggatattatgagaaaccgagaagctactggaaggattggaaaatgggctgcagagctcaatgaattttgtattgaatatgtccatagatctacgattcagtcccaagcgttggcagacttcattgctgactggacgccatgggctcaggaggaagaaacgaataaagatgccgaagcatggaca

SEQ ID NO: 76024 - DNA, 402 bp, Zea mays
agcagtctcctcgctccatccgttgtctctttttggctacacccctgaccacaaggggtaccggtgcctatacctcaccttccaccgcataatcatctcttgttacgtcgtcttcgacgaagatgtgttttcccttgctggctccaccccacccaccgatcttgactccctcctcgagttcgatccgattactctcccacccccggtgcctcgtcttgcgccgttacctgctcctcgtgtggtcacgacgccaccgtgcacgaccttttccgcgccacgcgcggtcccgttgactcagcatgcgccacgcgctggccctgcgacccctgctgcgccacgcgcggacacatctatcatgcctgtgccacgcgcggtctagttatcctggctgcgccacgcgcg

SEQ ID NO: 76025 - DNA, 433 bp, Zea mays
  unsure (1)..(433): unsure at all n locations
tcgtacctcgttntgcgcttaatcgtatgatgaaacgatcatgtctactcaacgggaccatgtggatcctctcctcgaggaaatccccatcacatcttccggtgaggaagtggaccccaaggtcctcgatctcgccatgaagattgccgagaagatgttcctcataatgaaagaggaagatgctaagaaaaaggccgaagaagaagaatcacgaagaaaggccgaagaagataaaggtaaaggaaaaattgattacaatgacgatctagtggatcttttggtgtcgaaggtgttgagcaaggtaagtctcaacaccgagggatcatctaccaaaagcaaaggtaacgaatttagtaaagttcaattcgattcctctaggaaatttattctccacttctcttccgcccacatggaaagttgcaactcttaatga

SEQ ID NO: 76026 - DNA, 467 bp, Zea mays
  unsure (1)..(467): unsure at all n locations
agcttatgaagattcttcattccaacatggtctattctgcggtgccagagccaacccaagttagtcttagcaaccaagcaagtgtcgagttcagctctatcaaaatctaccaagtatagctgaccctctaacactcccttgaatgctatagaatcatcacttcttctaaagacagcaacacctatatcagtaaatagacagttgtagcccatctgacataattgggatacagaaagcangttgtaatctaatgaatcaacaagataaacattggaaatggaatggtcgggtgaaataacaattctacccaaacctttgaccaaaccttgatttccatccccgaatgtgatagctcgttggggatctttgttttctcatatgaggagaacatattcttctcccctgtcatgtggtttgtgcacccgctgtcgagtatccaacttgagccctcggatgcataaacctac

SEQ ID NO: 76027 - DNA, 332 bp, Zea mays
  unsure (1)..(332): unsure at all n locations
agaacacgngacaggtntaactaatgggcatttctatattgatagactcttgtgcagcttggcaagcaggtaaacaagtgggaggagcacatcacaccaaacatgtgataaccacatcaagaactttggagatgcttcacatggacctcttcggacccgtcgcctatctaagtataggaggaagtaagtatggtcttgttatagttgatgacttttcccgtttcacttgggtattctttttgcaggaaaaatctgaaacccaagggaccctcaagcgcttcctaatgagagctcaaaacgagtntgagctcaaagtgaagaagaataagagc

SEQ ID NO: 76028 - DNA, 350 bp, Zea mays
gagcgtgccaatgggaaaatttacacagctggcgtgaagatgctcctctatgaacaacaaggcgtatggaccgatctactaccggaagcagtctgggcgctaaacatatctgagtgcacggcgaccggagtcactcctttccgccttcgatacagagccgaggcgacgaccccgcaagaattaaagcatggtgctccgcgtacaggttcgtcagccatactcggcgtggacgagccaacatttaaagatctcattgacggagaccggggcttcgccctacacgccgctaacaaataccaagcccagaccaaagactggcgcgaccacgcaggcattccgagagagatcag

SEQ ID NO: 76029 - DNA, 281 bp, Zea mays
tagcgaccggtaagcaccgtctgtgaatctctttgaagagtgagagcgcaactcttcatctactaagtccgtgccgactcaaactgtgccacctagcgtaagtagcgacatcttgcttcccggagcaatcagagccaagcgccgcggctcggtgatccgaccaatcaaggagtgggacacgtaccttagcctcttaatgatgattcgcccactaaccaagttcccaagaacttctaagggtgacatcgtggcatacccgggaaatgtacgtatattgtcta

SEQ ID NO: 76030 - DNA, 426 bp, Zea mays
acagctgggcctcggctttgcggaccgagtatttgttctacctggaacctcgggccaaacccttcgggcgtggtagcgtcgcagagactgctgataccgtgccgagtgtaataaggccacgtcccgagcctcttccagctggtccaatgaatcttctcggctggtctggttgcttcggtcgtcatacgcccttgtcctcgggaaaccgtattctaagtctgtgggtaagatagcctcagccccatatactagaaagaacggcgagaaacccgtggaccggctcggcgtcgtcctcagactccagaccaccgagggtagctctttcatccatcgcttgccaaactttgtgaaggtcgtgtagatccttggttttagtccctgcaaaatcatacacgtggcacgcttcacctgcccattcgtcatggg

SEQ ID NO: 76031 - DNA, 309 bp, Zea mays
accaggcgtctcacactatagagcatgcttttagcaaatttcaactactcatttactaagtcacgctcattcattttggcactaagctgagctatgtgatcattttgctggttaattaaagctatgtgatcatgaatagcctcaaccataatatctctacatctagtgctaatagtaacatgctcaacggaagatggagagggtgcgcaagtattctatacaataatcatatcctgcgaaatgtcattctcatctctaagaatggacatagaagcattgcaaacatctaaattcttagccctagcaatt

SEQ ID NO: 76032 - DNA, 415 bp, Zea mays
  unsure (1)..(415): unsure at all n locations
tgtgaaggttcttcattcncacatgtgctaagcggcgatgttccagtctgtccatgctagncttagctattaagcatgcatctagaccggcctcttcttttgcaaaatcaactaaataaagtttgccgtctaatacacccttaaaagctaatgaaccatcgcttcttctaaagacagacacatctatatttgtaaatagacaattatatcccatatgacataattgactcacagatagcagattgtatccaagactctctactaaaaatacattagagatagaatgctcattagaaatcgcaattttacctaaaccttttaccttgccttgattcccatcaccgaatacaattgaatcttgggaatctttattcttgacgtangacgtgaacatcttcttctcccccgtcatatg

SEQ ID NO: 76033 - DNA, 381 bp, Zea mays
  unsure (1)..(381): unsure at all n locations
accaagcacctgagctgcagctaactggaagacgtgatcaattattgtttgtagatgagcacaatggaaagcgcctcttagtttgcatctttttgtgtgccacaagagcaatataatcctaactagactgtggttttagaaacctgaatatgccatcttacaatgtcaaactgacgatgcaatgcattagcatcaaacttaattgaattattgngcaagaatcaagttgtcttattcatgttgaactttcagaagctatttatgcatgttccagaacatgtatgaacccaacacctgccatctgccatacaataagagcaacatgctgctagcatgagtgtatgatggtaggagtctgcagcaacactctgtggatgtcta

SEQ ID NO: 76034 - DNA, 365 bp, Zea mays
  unsure (1)..(365): unsure at all n locations
actaagctcaatgggacttcatgagttggctggtggccattacatgtttaaatctaaggcatctctggagtgcggaaagtatgtatgttcccttctccctgtcatctccttcattgcctaggggggtccttgccccattccctgaggttgcatgcatggctctatccgtggccatctgttaaaggaaaagtggggttactaacatgcatatgcattttatcatcattcatcattttttgaaacaatcatctttatttcattcatcaaacaaggtcatacaagcatgccatcagcatgatactacaccatgcctgaatgtcgcctnctaatgtgtgcccaaacccttanaggagctcatcgaggtc

SEQ ID NO: 76035 - DNA, 409 bp, Zea mays
gttatcttagcaccatacgaaagtacctaatttggggctggaattattatgaggaaaaggtaataacaatatatgactattgttgttactgcacatgcccaagtattatattttatttaattcaaataatattaattatctatgctttaaagcatgtgagagcaagttaaatctaaaactaattattttctgtagatgcattaccatatcgagtttttttaggctactataataccatgcaatgacagtacaacaccattttccattattgcatctatacattatttctaaatcaattaaaactactcaaggtgcattaaacaagttataacactaacttaatcatacatgcacaacaaattcataatatatttaccagtcaccaagcatcacaccaagagattactgt

SEQ ID NO: 76036 - DNA, 288 bp, Zea mays
tataggctaaaccaaacactatccacacaggagcaacttcaagagagcaacttaatgcttgcctactactagatagccacacaacggtgaattggattgcgtcctaacccacaaaaactatgcatcgaaaaattaagaaactaagactctatggaaactcataaagtctactatacccctggtattatcatcacaacaagattagacacttagaaaagtcaaacagtgctaaacgtaaaatctgtcgagacttggacataattcaactactcaattcaaaaatccata

SEQ ID NO: 76037 - DNA, 347 bp, Zea mays
tgaagcgactcaagcctatctactggtgcatatggttcaccgaaatccaaatcttcaactggggagtatcccttggccacaagtcgggctttgttccttgtcaccacaccatgctcgtcttgtttgttgcggaaaacccacttggttcctacaacatattgattaggacgtggaaccaaatgtcatacctcattcctagtgaagttgttgagctcctcttgcatcgccaccacccaatccgaatcttgaagagcttcctctaccgtgtgtggctcaatagaggaaacaaaagagtaatgctcacacaaatgtgcaacacatgaactagtggttaccctcttatgaat

SEQ ID NO: 76038 - DNA, 419 bp, Zea mays
  unsure (1)..(419): unsure at all n locations
cacacanagcgcaagggagaaccgcggtttatatcttctttatacgctangacaaacggggcaccaagtttattttcaaccaactcatacgtatattgaaagggaattggagtcttcggcgaagacaaaggcttccactccgtaactcatgcttcgccatcactccaagcaactttctatttcttggggagaaatgagcatcaaataaaaggacttcatccttggaggagagagttaaagctcaaaagcaaaaggaccggatatcgtctttggataatcttaactcaattacttatgaccaaaggggaagaaatcacttcaagggcttatatttcacttaaagtatccgtttttggcgatttatgcaaatggggagatagatgagcccatggcaaatgaccgaccaccctaatttaaaa

SEQ ID NO: 76039 - DNA, 445 bp, Zea mays
  unsure (1)..(445): unsure at all n locations
agnctctatagggagaacacgttatatgtctatctttgtaactttcgaaaaagatagaccttgtgcagcttgtcaagcatgtaaacaggtgggaagctctcatcatgccaaaaatgtgatgacaacattgagacccctggagttacttcatatggacctctctggacccgtcgcctatctaagcataggaggaagtaagtatggtcttgttatagttgatgatttttcccgcttcacttgggtattctttttgcaggataaatctgaaacccaagggaccctcaagcgcttcctaaggagagcccaaaacgagtttgagctcaaagtgaagaagataagaagcgacaatgggtccgagttcaagaaccttcaagtggaggagtatcttgaggaggaaggaatcaagcacgagttctttcgctcctatacaccacagcaaaatggt

SEQ ID NO: 76040 - DNA, 414 bp, Zea mays
  unsure (1)..(414): unsure at all n locations
tgacccttaattgctaagtgtaccccaaagttacttatttgatataataagacctaccttattaaattgatcattcccccccatcaaatcttaattataattacatgtcattccatgcatatatcttactcattgcattcattagattgcaatctcgctgacggagagtacgtgctcacccctgagcaaggagctgtccacgaggaagactatgaacaagctcccgagactgccatcaaggatctccttgagccccagctattgaaggcaagccccggttttatgcataaccgtatctatatatgctattttactatacttaatgtttgtaggatngtaacgtgcacttaagtgtangagtntctttaaacccctaattgcatgaacttatgaattccttttgagatggatact

SEQ ID NO: 76041 - DNA, 369 bp, Zea mays
  unsure (1)..(369): unsure at all n locations
agcttcggaattgcaaaccgacttataagtataatgtccttttacnccataaatgtttgggtcgctgttgtaatcccttatgagggacataattgtaattcctcacaggctgcgtcccgtgcctataaatagagaacagtactccttcactgttcacggattccggtatttgcaatcagcatttttcgggatccaatctttgccaaggcagaggtataactgtattcaacgcttaaatatattgaatgaatataatatgggtcgtttataattcatttatctttgatactctatattttatattatcatatacaatctgttagaatttaattacgaagatttaaccttcgaatcgattatcattaacct

SEQ ID NO: 76042 - DNA, 390 bp, Zea mays
  unsure (1)..(390): unsure at all n locations
tcttcccatctctcaacagacagagatctccttgctgtttgtgagacattataagaagacttcttctccgctgccattgnaaatcaatgcccctttcagatatttcaattttcgggtatagaactgagcctcttgcttttatttttcagtcaactaattccccgaagcatgtcgtaaaatataattgagagcttctgaaaatgcttcgggggtggcagtgccactttcttcagccaaaatttgttctgctgcttctgtttctttggtttccaaggatttcacctcggcgggctctgaaggcccagcttcagtctcagcttggtgctttgtagcttcggcatcagaggcttcaatttgcacttcgcgaggttcgacaaatttcttccgagt

SEQ ID NO: 76043 - DNA, 437 bp, Zea mays
  unsure (1)..(437): unsure at all n locations
taaagggaaagcacattntaggacttacaaatgtttattttgagaaagacaggatttgtagcgtatgccaagccgggaagcaagttggcactcatcatccacacaaaaacatcatgacaagtgacaggccactggagctcctacacatggacctattcggcctgatcgcttacataagcatcggcgggagtaagtactgtctagttattatggatgattattctcgcttcacttgggtgttctttttgcaggaaaaatcccatacccaagagaccttaaagggattcttgagacgggctcaaaatgagttctgcttaaggatcaagaaaattagaagcgacaacaggacggagttcaagaactctcaaattgaaggctttcttgaggaagagggaatcgagcatgagttctcttctccctacacccacaaaaaaatg

SEQ ID NO: 76044 - DNA, 446 bp, Zea mays
agcttatgaagattcttcatcccatcatgatctagtcggcggtgccagaggcaacccatgttagttttagcaattaagcaagtgtcgagttcatctctatcaaaatctaccaagtatagctgaccctctaacactcccttaaatgctaccgaatcatcacttcttctagagacagcgacacctacatcagtaaatagacagttgtagcccatttgacataattgagaaacggaaagtaaatggtaatctaaagaatctacaagaaaaacattggaaatggaatggtcaggtgaaatagcaattttacccaatcctttgaccaaaccttgattttcatcctcgaatgtgatagctcgttggggaatttgggtattctcgtaggaggagaacatcttcttctctcttgtcatgtgggttgtgcacccgctgtcaatgatccaacttga

SEQ ID NO: 76045 - DNA, 455 bp, Zea mays
  unsure (1)..(455): unsure at all n locations
ggggggctattagtgttgaattttatatgatcacctattcacccccctctaggtgctctcaattggtatcggagcccgctctcttcacataagggactaatcgctcgaagagatggatcctatagtaaagggcatggtggtcaatgacaaggaanatgagtccttcctcaacgagccaagggacaacaagcccaccgactctagttcgagtcataagaagaaggacgggaagaagaagaggcgcatcaagaagatcgtctactatgacagcgacaaatcttcttcttcaccaagagacgacgacgacgagaaaaagaaaccggttaattcaaattattcatttgattattctcgcattccttttaactccaatgctcatttgctttcaatttctcttggtaaacctccacactttgatggagtggactactctntttggagtcacaaaatgcgta

SEQ ID NO: 76046 - DNA, 458 bp, Zea mays
  unsure (1)..(458): unsure at all n locations
aattcttccccattgtgggctatggtagtacctctaccactgncggnctgggatggctagaggacaacatcagcttgttggtggtgctagtatggaacttcgccaaggtaggaaggctgagtatcttgatatccctttgaaggacagtattaagggatggtgcctcgagtggtttaccatggagaaccacaacaagtccctccctcctcggtcggggaggcagcctaacgtttggacgcccaactagacagaggcccctacagattcagaacttgctgagtccagagtgctgcttgctgagatatgtgcattgaaggacagaggcttgactgctgaagctgttgttgctgattatgtcttcaagaatattcaacctctaaaagatagagtctaccctgtctatctgtatattgnggtcaatcaccctacccgaattaccaacagatggattcctgaat

SEQ ID NO: 76047 - DNA, 433 bp, Zea mays
  unsure (1)..(433): unsure at all n locations
ctaaccttcttcaggctgggcttcggtttcctctaagcagtttcgtggttgaagttttgaagatatttgaaatctgcctacatcaaattactcccgaagcaatcataaggatgggaatcttcgtatgggccgcaaggagccaaggcttggagccaaatgcaaaaagtttttgcagtatacacgagctggtttatgagacaaagccttggggcaaagagcagtatcataacaattttggttgttatagcttcggtgcccgctctatgtcaagctgtcccgtgccaacttttcggaagagatggcccggggactggatgaaggaatggttctatgtgaaaaatgatttgaaggcacgagaagatattaaagatatcatcatgcgccctatctggcagcgttttngactccggaaaccgaaggtggaaatggatga

SEQ ID NO: 76048 - DNA, 379 bp, Zea mays
agcttgtgcgtctcaagtacctggcctttgtcttattttgacttcgttgacgtagtagactggcttctggatggatcggacccctatggttggttccgagtcctcaaactcctggccttccgtcaacatcgtggtggttggaccaccaccttctcctaggggaactctctgactcccctagggatattgtgccatcctttcggcgaccagcaccatgctcatcgcctctgtagccgctgcaatgtacaagtacaatggctcccccagctctggagctaccagtattggtagggatacaaggtgctgcttcaactcttgaaaggcttgttctgcctcttcggtccaagagaatggcatggactttcgctataccttgaag

SEQ ID NO: 76049 - DNA, 407 bp, Zea mays
  unsure (1)..(407): unsure at all n locations
tggtattggcaagatgttactatgttagtgatatacagattcctctatctggtgtgtngctcttagaacatgggaaagtagcatgcaagctctttattatcaagatgttattatgttagcgatgtacaaaagtatcggcttgtcatgttactcttaaaacataaaaactagtagtgaacatattggttggatatgactaacggntcacacacatgctngccatgttgttgttgaatcttaaaacaaaggattctaggtatgaataatgtacacatgcacttgtcgtgttgttgccaaaactcaaaatagaggaatttgggtatgaataatgatgctatgcatgtgcttgtcatttgtngtcataacctgaaaatgaggattttgtatatgactaatgatgttatgca

SEQ ID NO: 76050 - DNA, 448 bp, Zea mays
  unsure (1)..(448): unsure at all n locations
caagcacctgcggcatgcaagcttgatagaaaaataatgcccttattgttctctttatctcatattggntgatcattgaacaacttcgattatcacttatgattcttagcgcctcatgtaatttcaatatgatctcaattggtaattataattgacatctatcttgaaatgcactaaggaaaaaggagaattcatgattcatttatacatcttgtgatccatttgatttatgctaacaaaaacttgaaaaagatcactagttgtagaactctctcttgtgcaaaatattttcacacactgtcattaagcataggtcttaagcaaacaagaccaacgacataagcacaatggagagagcgtctactagtaaaggtacaaacagggtaaaactaattcctatcatctacatatgtacctaaatcttcctcttatatacactctttgcata

SEQ ID NO: 76051 - DNA, 403 bp, Zea mays
actttgacatagaaccactcatatttccattctgctgcccattagcttcggtagctaatgacaggaaacttagtagttttccgatcggcgaagctgtaacaaccaaaattatcgtgcaggccatcccttctagccttcgtttgataatgcaactcgagaacccggcaaaagctgtccgcaaatggttccactgcttggcttcggagtgcccagatataaacaataagtctaacaatagcgttgggggtcagctggtgaaaataaataccgaacctcttcagtacctctgcaataatcccatgtagggggaaccttaatccagcttttagaaagcttttgaaaataacaatttcatccttctccggctgtggggtagtctcttctcccccgaagcgcaatagct

SEQ ID NO: 76052 - DNA, 420 bp, Zea mays
  unsure (1)..(420): unsure at all n locations
aacttacacgacacctgcaagctgcaagcttgagcaatgacaggctattctatatatttggaaaaccgagancagcatggccatcagcttctgccatgatgtgcgcgttcctggctgaacagaggaatactcacgtttgtgcaacttttcttgtaccgccatagactaatagttcttctgtcatgtacttgtagtatttgtcctcactatgaagattatgtgtgctatcgactatcataaaacattactttagatctgagcgcgcctcatacatggggagctggggaggttcgtatgatggtggccttggtgtacatgcagttcagatgactgatgatcagtatcatcaaaagcaaattgtccatgatggaaatcatcataccgctcatcattcttgattgaattgtcctgaccaactct

SEQ ID NO: 76053 - DNA, 302 bp, Zea mays
ccagcccaagatagtcttagcaattaagcaagtgtcgagcttagcttctatcaaaatctacttagtatagctgaccctctaacactgcctgaaatgctattgaatcatcacttctcctaaagacagtaacacctacatctataaaaagacaagtgcaggccattttgcataactgcgaaactgaaagcaagttgtgatctaaagaatctacaagatatacattgcaaatggagtgggcaggagatatagccattttacccaatcctttgaccaaaccttgattcccatccccgaatgtgata

SEQ ID NO: 76054 - DNA, 334 bp, Zea mays
ctagaatgatgaatgctagaactagctaaggaagcctatcataaggtgcagatatcctacaagtgcacaagcctattttatactcccttcgtcctaaacaaataaaccgattaggctattctatctatgcgtctagacctactgtacaattaagtgcataacaagagatgtcaagcgcacttataatttggaatggaagggagtatcacttaaccactcattccatgcagaatcacaagggatcaagtgcatgtccgacacattcctataagctaagagagactatttacttcagttgtaaagaaatgagtaacttgaaatgccttgggtgtct

SEQ ID NO: 76055 - DNA, 382 bp, Zea mays
tgccttcaaactaagctttaagggaaacacggaaggctaactttgtttattccaaatttatagaccttgcgtagcttggcaagcaggtcaacaagtgggaggagcacatcacagcttgaatgtgatgaccacgtctagacctctggagctgctgcatatggacctcttcggacccgtcgcctatctgagcatatgaggaagtaagcatggtctagttattgttgatgacttttcccgcttcacttgggtgttctttttgcaggataagtctgaaacccaagggaccctcaagcgcttcctcaggagagctcataatgagtttgagcttaagggtaaagaagataaagagcgacaacgggtccgaactcaagaatcttcaagt

SEQ ID NO: 76056 - DNA, 361 bp, Zea mays
  unsure (1)..(361): unsure at all n locations
agcttcaaagggagaacacgttatatgtttatctaacatgcaacncgaaaaagatagaccttgtgtatcatgtcaagcaggttaacaggtgggaggagcacatcacagtaagaatgtgatgaccacatcaaggcccctggagctgctacatatggacctcttcggacctatcgcctatctaagcatagggggaagtaagtatggtttaattattgtggatgacttttcccgcttcacttgggtattctttttgcaggataagtctgaaacccaagggaccctcaaacgctntctaaggagagctcaaaacgagtttgagctcaaggtgaagaagataatgagcgacaatggatctgatttc

SEQ ID NO: 76057 - DNA, 383 bp, Zea mays
  unsure (1)..(383): unsure at all n locations
tcagacanaatcttatgccaacgntgaggattatcagatatctctctttttatcaaattaatcaatgtcctattactagactcggcctgtccattggcctgagcataatatggagatgaattaagcagcttaattctgtataattcagcaaattcacgcacctcctttgacataaaagaagtaccttgatctgtagtcaaggtctggggaatgccgaatctatgaataatatgctcagttatgaactcaattacctccttgtgcgtcatgttctttagagcaacggcttcagtccatttggtgaaatagtcagtggcaactaacaaaaactgatgccccattgatgatgaaggatgaaatttttcaataaagtctaatcccca

SEQ ID NO: 76058 - DNA, 216 bp, Zea mays
  unsure (1)..(216): unsure at all n locations
ccccgccaggagggggaacagcacccccacctcaagaggaanatgaatgagcggacacgcaccaagcgacgcgagcaaccaagggacacggcggattcaagccaccgaaagaaggntgacacagcagccggagcagccgcacacaccccaaaacacagacaccgcaggcgacgacacccacaggataatcgcccgacgcacaaagcccggggagaa

SEQ ID NO: 76059 - DNA, 437 bp, Zea mays
ggtgcaacggatgctccgtgtttctattattatatgatatctccgctaaaggcaaacattcatcccatctttctgtgagaagtccaaaacacatgcccgtagcatatttttcagtatttgattgaccctctcagtctgcccactgggttgaggatgataagccgaactgtggagtattttactacccaaggatttgtgaagatcttcccaaaatttggatactaatttgcgatcacgatccgacactatggttttctgaacaccgtgcagactaagaatacgagcaatgtacaatagggcatagacaataactgtgggattggtcttgactggcacaaaaatgagatattctcgtaagccgatctacaataactcagatagagtcattcccttttgttatcctggtaataccctataaatgcatactaatgtcttcc

SEQ ID NO: 76060 - DNA, 459 bp, Zea mays
  unsure (1)..(459): unsure at all n locations
agcttgncacatttgngatttgtgatcacattcatctgtgatgtctctggccaaataatttttagttatttcctagttcatcaaacaacaaacaggttcttatatatgtcaaggcatgtattctcaattccaacttccatcaatagaaccatttactattccttcaagaactaatatagattgagatggactgatagtttgaaacaggtcaaataataaagataaaaaacgtatatacaagtagtgagacaaaaactgcagaatggttcaagaaaccagagtctttgggatagcattattttgaggaatntggtatgaataaatgttgtaaggaaacaaaccaatcgaagngattatgactacaccaagagttaaaatgatagtcctttgacatgaccgctggtacaaaacacacacatgggcaggaaccaggcaagttgaatccaatggaatgacatt

SEQ ID NO: 76061 - DNA, 460 bp, Zea mays
  unsure (1)..(460): unsure at all n locations
tgaagaatcttcatcacaacatgtgctattctgagatttcatagccagcccatgttagtcttagcaattaagcaagtgtcgagttcagctctatcaaaatctaccaagtatagctgaccctctaatactcccttaaatgctattgaatcatcacttcttctaaagacagtgacacctacatcagtaaagagacagttgtagcccattttgcataattgagatacagaaagcacattgtaatctaaagaatctacaagaaaaacattgcgaatagtatggtcaggcgatatagcaatgttacccaatcctttgaccaaaccttgatttccatccccgaatgtgatagctcgatggggatcttggttttctcatatgaggagaacatcttcttctcccttgcatgtggtttgtgcacacgtngtcgagtattcaacttgagcccccgatgcataaacctaca

SEQ ID NO: 76062 - DNA, 461 bp, Zea mays
agcttcggctccatctatgttatggattgtttttgaatctgtccaatttccttcggcctttctggcagcttcctgacttccatgaatagcaataggcccttgatccgaaggtatcttcatgcaaagatatgctgggtgaagaattgcttcgaacgcattaagtgttccacgaccaatgattgcgttgtaagggtattccatgtcaaaaatatcaaacacaacttggtcagtccttgtattgttgataaatccgaaagttactggcatcgtgatcttgccgagtgctacaatatgccttcctccgaagccacaaaggggatgtgtagcatcatggatcttatcttcgggctcttgcatctgtctgaaggccttagcaaatataatatccgctgcactgctgtgtcaaccaaaacattatggaccagatatcctttgataacacaagaaataaccatagcatc

SEQ ID NO: 76063 - DNA, 355 bp, Zea mays
  unsure (1)..(355): unsure at all n locations
tcatgcaactgctgccagaaatgagaggtgaatngtgtttctctgtctgacactatcttctttggcacaccatgaagacaaatgatccgagacatgtacaactctgccaatattgcactgctgtagttggtcttgactggtatgaagtgggctgacttggttaagcggtccaccactacccaaatggaatcgtagccggctcgagtgcgacgcaatccgactatgaaatccataccgatttcattccattttcactaaggaatttgcaacggttacaacaatccagctagtctctggtgctctgcctgatccatcgacatctatcacacataagcacatgctctgcaatttccct

SEQ ID NO: 76064 - DNA, 363 bp, Zea mays
  unsure (1)..(363): unsure at all n locations
aaagatagaattagctagacgctggataaaaagggtttctcaatcaaatccttatatgcccagattataaatgcggnggttaaagtgccttacataattatgtggaaactgaagattcctcataaacttaaaatctttctgtccgtgaatgttaaaaacaaaattctgacttaagagaatttgattgcgtgaagctagactatctgagacgtataggcgagagtacgattacttcacacagttggctagagagaccatcaattatatgttctctaggttctagtcaattgtgaacaagatgcatgccaacaaggcacaactacccaatagcgaacatgagagagcgctgaaattactacatgc

SEQ ID NO: 76065 - DNA, 414 bp, Zea mays
tgaagccatggtaagtagcatatgctaatgatattcgtattgactcaagcctagctacgggtgcataggtttcaccgaaatccaaaccttcgacttgggagtatcctttggccacaagtcgagctttgttccttgtcaccacaccatgctcatcttgcttgttgcggaagacccatttggttcctacaacattttgattaggacgtggaactaaatgtcatacctcattccgagtgaagttgttgagctcctcttgcatcgccaccacccaatccgaatcttggagtgcttcctctaacctgtgtggctcaatagaggaaacaaaagagtaatgctcacaaaaatgtgcaacacgagatctagtagttacccccttatgaatgtcgccgaggatggtgtcgacggggtgatctc

SEQ ID NO: 76066 - DNA, 448 bp, Zea mays
  unsure (1)..(448): unsure at all n locations
gcagttgtgacagccgtcgtcttgtgccattttcttgttgccgccgccgccttgggcacctccacgggcaccacccttagcatgtcctcgcgcctctgcctaagtgcctccatgtgccttgcgcgacttaccgcgtttgtggcctcgtgttgaggaggactcccccttcttcttgtcactctggcaggcctcctactgctctcgagtgagatgtagcttccgccgatagtgataggcccagagggagcctgtggttcgtcgtcgtcgaccaccttgagacgacctattgcctctttgatcgtcatcgnggagaggtccagcagagactcgatcgagcgagcaatctgcttgtacttctcggggatgcaacagaagagcttctcaacagctctatcctcatcgtaggtgtgcgtcgcgaactgtaccatctttatgcaacagagtgttg

SEQ ID NO: 76067 - DNA, 435 bp, Zea mays
  unsure (1)..(435): unsure at all n locations
tcggcattattttcaagcatatcacataattgttccttcatcacatcctctgaaggatatcatgaggaatagagaagctactggaaggattggaaaatgggccgcaaagcttaatgaattcactattgactacgtgcacagatcttcaattcaatcccaagcgctagcagatttcatcgttgattggacgccaagggctcatgaagaggggacaagcaaagatgccgaagcttggacagtgttttgcgatggttcttggggagccttttgtcggtgttttgggtccgaccgcacacccggggttgcccctcaaggtgtttnttaagagtaggacggtgtcgacgactgtagcaaaatggttcgtgccgatcgcacgaaggacaatggacaagaattgcaggttcgggccgcttagaaatgcgtaacaccctacgt

SEQ ID NO: 76068 - DNA, 453 bp, Zea mays
agctacggaagatcacaacttcattctccttatgagtcttattgttatcgtctctcaccatccctcacaatagatatatcatcgaaagtacctccccctcatgctctcaaggtgactatgcttgatggtctactttccaaaaattgtattgtcttggcctccacggtcgatcttcataatcttcacccccactttctgcatcatagttgtcactgtcaccagtatcttcatacaggccctccaatatctctttagtaatcttctctgtatttgattatgccattgattctaaaaacccagctatataaggactctcagccttcttctgttcagagagcttatactcttccggtagcttcgtctcaacaacaatcttattgtctagagacatcttttcttcaaaaatgacgaatacgtgtccttcaaactgaagcttagaaagcttgagaaact

SEQ ID NO: 76069 - DNA, 405 bp, Zea mays
  unsure (1)..(405): unsure at all n locations
ctaagccttatatcatancatgangcatatgcgagtatgatacggtttgctttctctcgagcaaccggtgtaaggtctctccaaaatctaagcctacaacttgagagaatccctttgcaacaagtcttgccttgttccttacaattacgccttgatcatcttgtttgtttctaaacacccactgtgttccaatgatacttgcatcttgtggaggcttttccagggtccaaatttggatatgggtgaagttgtttagttcttcatgcatggcgttcacccagtccagatcttatagagcctcatctatacatataggctcaacacaagaaacaaaggagtgatgttcaattaaagaagcatgtntatgtgatctagtaataatcccttgtgaaagactcccaatga

SEQ ID NO: 76070 - DNA, 398 bp, Zea mays
tcacatgttcgcagcctctcctctccaagatagcggctatccccctagcactcgaaaaggcgcatatgtcctcacgaccactcaaaatttcttcaaaagctttggcctcgccgctgatccagtcaattggaccttcgggatctcccagtacgaagttgctttcattcaaatatgcgccgacgctggcgaaactagtcttaattgtttccacacatttcatggatttttcataacatctttcttttgaagaccgaagttctgcagttgttttctcctaatgaattttccaataatcgctggcgtctcggtcagcttcggcagttgcgcattataatttcgcttcagccagctgtttctgaagatcttcaattcacacttctgggcttagcttgggcttg

SEQ ID NO: 76071 - DNA, 460 bp, Zea mays
  unsure (1)..(460): unsure at all n locations
tagagcagcaggtcaaggaacttaagaaggagaagacattcctccttagtgtctcgatatagcagaaggcgaggaggccaacactcgtgaagcctatcgaaccctgaagatggattatgataagaagctaaaaaagctcgctcccatgaagaaaatccaaaagaataccaagagccaaggatgccaggctgagcggaagaagaaagcccctccagcaccacctcccgctaggatagagaatttgtccgacgtcgaggatatgtccttagctagccttgatgaccttctcaaggaatttggggacactttagaaaaagagttcggaagtacctcagagaacgctcgcatgtagtacgacttgtagtagctgtatgcttgtaatgaaatggtgtaatgaataaaataactttggtgaaaaaagaaatggcatatgcataatagtgattctctncccctggca

SEQ ID NO: 76072 - DNA, 260 bp, Zea mays
gagacatccgacaccgaactgttgacggcttataataatgctgtggaactcacttctgcgaaagatgagtgctcccattctgctaatgaatgttcaaacacgttgaaaaacgatttttctagtgtaggtgcatttctatgctgaccacaagtttcatacgtcgtgatccccacggtgcaatcaagtggattttgtgcgaagtccatccattcgacgaagtactaactgaatgggagaatttatttcacgcgaatgggctc

SEQ ID NO: 76073 - DNA, 305 bp, Zea mays
acacctatagaacatataatctagagcaaactggttaatacaataatttgagcagggcaactcaaccaccaaaattaattaggaactaggtgtaagcctaaatccctttcaaatacgcccctatgccgcatgtcaactgggtcactgtgccagaagctgaggtagaaaatccgggtggtagccgagcagatcagcacaaaagatctagtccaagaatatctggcctataaagtgatcccgacgctgagtgaatggaacatgccaaagcttaaggggacacaggagaagaaagaacttgtgcgact

SEQ ID NO: 76074 - DNA, 452 bp, Zea mays
agcttgatgaagagtgcatttttgaatatatatatgaacggcataagcaaataatattttgtaggattcgcataacaccaggactggatgtgaacatgcattaacaataataactactggctaccaggtacatattaaaataatattgtttatttgtctaaattgaaaatataattatatgctgcatgtaaatgttgatgtatatgggttgggctttaaaggaggacaacataagatttccacatgaggttggtgatacaagttctccgtatcacgtagcacatgaacaattggaaaatattgctgcatcgtcagaagctaaaaaggtgagcattgctaaatgattttactgattggtataaatatatgtaagtatgcatatactaaatagtaatcgctattattgtgcagaggctgaattctaatgtggatgttataaatctgaatatgcc

SEQ ID NO: 76075 - DNA, 401 bp, Zea mays
  unsure (1)..(401): unsure at all n locations
ttacaaaacacttanatagattagagagagattaagattgtcttaagaggaacaaacgaaacacataacatcctctctctcaagtcactaagcacttttgatcacttgacttgattttggaacttggagaggatttgatgttttgattgcgtctttggattggatgattatgctctagtattgaataagaaagctggaatgtgtgggtggcttgaaatgtgatggttgggggtatttatagactcaaccactattttcaaccgttggctaacttctctgtcgatgggcacaccggatagtccggtggtgcaccagacacaacactatntactatccggtgtgtgccacgttaacagaccgttggagtttggagcaattgaccgtagaagtctttatccttt

SEQ ID NO: 76076 - DNA, 399 bp, Zea mays
  unsure (1)..(399): unsure at all n locations
agcttaggaaatcccatactcttagctatcttctggcacacggatatttctttattatccaggagacagtacaggatatcatctttgttggtaccattgaacactaaggcccccttcggatattttagtctttgggcatagtgtttggcctccaagatttcttcttcagataattttttccccgaagcatgtcgaacaatgtaatcaatatctccagttaaggctttggggataggagaatttgcttttattgccatatcttgctctgtcgtcttaccggtatctgaaatttgctgacccaccttatcttcaggctcggcggccttcgtcttagtaggcgatgaatgcccagctntggcttcgacttggagtttggtagctccggcagttttcttggta

SEQ ID NO: 76077 - DNA, 446 bp, Zea mays
  unsure (1)..(446): unsure at all n locations
ncataactcctagnggtacctattattaccttcggatgtccaatgggctcaagaatgctggaggaagcttcagcagaatgactgccaaggttcttcactcctaaattggcaggaatgtgctgacatatgtcgatgacatcatattgaatagcacaaagcaagataatcatgttgccgatttacaagagacgtttgccaatttcatacaagctggtctcaagttaaatccagacaaatgtgtcttcggagtgaagaagggcaagtttcttggtttcctggtatcgacaaaaggcatcgaagctaatccaagcaaaatcgaagctatccttcggatggagccaccacattcaaagaagggggctcaacggttggcacgaaggctggcatccgtgaatagatttaattcaagatcagcagagacgaatttaccttctttgaatactgaa

SEQ ID NO: 76078 - DNA, 313 bp, Zea mays
agcttataaagggagaacacattttgtgatctttatatgttcatcttgagaaagacaggatttgtttcgcatgtcaagcacggaagcaagatggtgtttatcatccacacaagaacatcatgacgactgacaggccaacttagcttctacacatggacctatttggcccgattgtttacataaacatcagtgtgaagaagtactgtctagttattgtggatgactattctcgcttcacttgtgtgttctttgtgcgagataaatctcatactcacaaaaccttaaagggattcttgaaacagactcataatga

SEQ ID NO: 76079 - DNA, 447 bp, Zea mays
tgccaagccctcggacccagccggacttcatcggatgttctagatcgacctcatcggacttcggtcttccgccgccgcgcgtggaccgagctatccagtgagtctccgaccaatttcttgcacccatatcttctctggcattccgtgaacctctctgacccatccaattgctctatctcgccgtgaccaggccggactcctcgccaccgacgagcatccccgcctgctcgcgtggaccgaccgactacggccatctccgacggcgacccgcacaccgttgtgatccccgagacctcccctacgtcctcgaccacttcaccggagcaatcttcgccgcggtaagcccctctcgcctttcttccgctgcgttactgtttaagatagaagaaggacctcgggttatgattcgtagaacccgagggggtttctgtaacgtcagtgactcat

SEQ ID NO: 76080 - DNA, 443 bp, Zea mays
agctctagcgattagagagagagatttgtttgtttatttgagctcttgcgctcggatcgcttcttatctttctcattctttcttgcgaacaactcaattgtaaccaaggcaagagacaccaattgtgtggtggtccttgcaaggaagtctggctcccggttgatagagaagagaagctcactccgttctagggaccgtttgagagacggaatgacttgaaagagacccggtctttgtgacctacctaacggggagtatgttgcaagaaccgcacctcggcaaaacacaaccttcggcttacttcctattcgctcacgattttgttttgcaccctctctcggactcgcatatatttttacgctaacccggctggtgttgcgctaagtcgtaaatttagattcgcctattcaccctcctctagcgactacaacccctttgtaatt

SEQ ID NO: 76081 - DNA, 411 bp, Zea mays
  unsure (1)..(411): unsure at all n locations
agcttataaaattatcttcaacttctcttaccaacccacagtttaattctgttgagtaaattgcctaaatcttaagagaacagattctgcacagaattatgagactgaaaaactgctatagtaagactgcaataactttctggtcggatgtccgattgaggtgttcttcgcggccaccgaaagatctacaaaatatctacgactcatacatagactttttatttttttgaggccactaagaccacagaaaactggcatgaacagaaactgtcgaatctgccattctgtagaaaactaaattcgagatcaaaacctaacccccattanatccaacctctaatcctttaatttccatgatgcacaacctccacaagcctataatacagggaggaacaaagatcttatccatac

SEQ ID NO: 76082 - DNA, 385 bp, Zea mays
  unsure (1)..(385): unsure at all n locations
ttncagaatgntaaagagtgcattcatattatttgcgatactccagttatgtttggtttactgtggctggtccttgttacctgaccaaaatgagtgggtctgttcactggtgggtttcatctaataaatggccgaattggctctttcaactatggagacttttgtagaaggataaaagttcttatttacagcagacattcataatttttggttgagcagttctggagatatcgaattttaaagttaaccatactgctgtctaaaacagattcagtcagttatcttgtcagatgttntagaacttgtagatggcagaatttaattatctattgaatactgaagttgtagagtattttgtgtagatactcctagagtatttgttgat

SEQ ID NO: 76083 - DNA, 298 bp, Zea mays
agcttcagctgtggtcatatattttgactgtacaacagtgcaatgacaatgaatgctgtggtaactccacacctacccgtctgtttatatagtgctgcaggtgggaaggtgaatcgccaagccgcccgcacccgctgagcagtcgcccgcacccgctgaacggtggaccactcggcgcctggcaagagaattaccagatcgttcgtacccgctgcatggtgggccaccttgcgctccaaatattttaatcgtttctcggcaacgagctcagggaaggttgtttttggaccttcggctt

SEQ ID NO: 76084 - DNA, 435 bp, Zea mays
tatcaacctgattgatcacagttctcgggagtatcaagttgcacatgtaataggccggaagagaagaaaataccgcattgaccatttggagtctgccagcctgagatagaaaaatagaggttgcagctagtcttctttcaatcttttgaatgagaggaaggaaagcttccaagttgggttttttaagccccaaaggaagacccagatacgtgaagggcaaagtcccgaccttgcagtgaaatgtatttgctagcaaagccattttctgctccgaaacattgatggggtaaatgttagatttgctataattcacatggagccctgtagaatcagcaaaagaattaagcattgctttaagatagaagagttgtctagggcacgcttccagaattaggatggtatcatctgcgtattgaatacccggaagtcagatcc

SEQ ID NO: 76085 - DNA, 314 bp, Zea mays
  unsure (1)..(314): unsure at all n locations
agcgttgcatcaagattcaacttttcttgttctaaatatgcgagcgggaaagaagctttgaatttaattctgatatttntgtttagcatccgacaataagcctttggctggttgaagctcgaagtctttattttcgatggcagctaattggtcttttatcttggtttccaagatctcaattataacttcatgcgctttgtcctctaagtcctactgcatttttaaggccttgctcataagcatactctgtggacaaataatcttcggtagaaaatatttctgttattacacataataagagttgacacaagatg

SEQ ID NO: 76086 - DNA, 416 bp, Zea mays
  unsure (1)..(416): unsure at all n locations
gctttaagtttacaggatcacctattcacccctctctaggtgctctcaattaccaaaaagggggagattgtgaatcatctaagccccttagtgatgttntggtaattaatgacaactgtntgtggactaacggttcttggagaaataagaatgcagggttggaccacatagaacagaanatcttggagatttataagcattgtgtgtggatcaagngaaggcgcaagtgtaacactatgtttgttttttgccggcctccaggagtttaaagaagttatttgaccaaattagtaggctagatggtcgcactataaagaggggttaatgacatttgtctgtgtcaaacttagtgcctcatagagcatctagtggttgcatttgcatgaggactaacaacgctttcaatttcaagaatt

SEQ ID NO: 76087 - DNA, 461 bp, Zea mays
ggattacggctggcgtgacatgcctaggccgcacgcgtgcccagtcaaaaaggaatccttgttgcaaaagtccgactctgcttggaagtcgccgccccaaaccttgaaatcttgtgactccgactagcaagttgcaccctttggagtttaaaatcgattcgttaatatcctcacgggacaaagaataaacgatcaaaactaaatcatcctcttttttcgcccaaaaatcgcgatcctctcccttgcaccagaaactgccgtgccgtggtgtcgatcgtctgcagaggagctaatcgagcgctgccgaatgattttggtaggaaattgtgtatggattttttttcttttttttatatataaacagaagagtaacgcggacgctcggattgaccgaattttctttagcgggatcaacatcaggacgacgtaacctaagcctaagcacgacgcgtgaaaataaa

SEQ ID NO: 76088 - DNA, 471 bp, Zea mays
  unsure (1)..(471): unsure at all n locations
gcttgcganactgtggaagtacgcgccgtaacaaaatgcactgcccgacccttcatcagcccccacagggagacactctcccctcaggggctacttttaggggaatgaccctcggtccctaggacccaccagttagagagtgtgctaaggaaaggagcccctaatcgctaggccccaccggtcagtcagaagaggcaggtgtgcctaccctagaaggacctgccccgatcgaaccccgtggcaccgagcccgggctcgagcaaggcggagcctaacaaacgaagtcgggcgtgtcggaagagagccactcaagtggatcccgtgtctggccctggactgacccctgtaaatgactggccacattaaccacgcctagcaccgagccacagcgtgggcgtgtcacaccagaatttaaggtcaaacccgagcgcgaatcatatgtgtgcctggatcaagtctcacacatatgat

SEQ ID NO: 76089 - DNA, 382 bp, Zea mays
  unsure (1)..(382): unsure at all n locations
actaagctgcttcgcttcaaagaaaggcttcngaaaagagattagaggctatttatgcttcgctgtgtacgcaaagaagggaaggtgtttttcgcctatggctcaaaagtattaatttcgtccacaccaaagcatttcatacatggacggaaaagttagattatattacagagtgaaattcaattacatcatactttatacaagttatcacatgagttttttgagctatttgtacagactattcgagcttcgacagcatctctggagcttcttgcttttattctgcagcttcaacttgggcttggccaacctgtatgtaagtattataagctaaattcataattccaaggaaaaggtaatcatattgtataatattgttacc

SEQ ID NO: 76090 - DNA, 468 bp, Zea mays
  unsure (1)..(468): unsure at all n locations
ctgangcatgcaagcttctagagggagagcacatgttaagattatccaattgtcattttgagaaagacaggatttgcagcgcatgccatgtaggaaagcaagttggagtccaccatccacacaagaacatcatgactactgacagaccgctcgaactactccacatgggtgtattcgacccaatagcttacataagcatcggctggagtaaatactgtctagttattgtggatgattatttttgcttcacttgggtattccttttgcatgaaaaatcacaaacccaagagaccttaaagagattcttaagatgagcttcaaatgagttcagattgagaaataaaaagattagaagcgacaatgggacaaagttcatgaattcaccaatagaaggatttctctaggagggaggcatcaatcatgaagttttttctccctacacaccttaacaaaatggtgtagcggaag

SEQ ID NO: 76091 - DNA, 447 bp, Zea mays
ctaagccttatcaaatggacgtgaagagggccttcctcaatggccctatcaatgaagaggtttatgttgagcaaccttacgactctgaagatagtgagtaccctatccatgtttataagctctcaaaggcgctttatgggctcaagcaagccccaagagcatgggatgaatgcctgcgagatttccttatcaccaatggcttcaaagtcggtaagccgatcttactctcttcactaaaactattgcaaaagaccttgttatatgccaaatttatgttgatgatattatatttgggtctgctaacaagtcatcttgtgaagagtttattaggattatgatacataaattccagatgtctatgatggggagttgaagtatctccttggatttcaatcaagcacacccagagggcaccttatcagccgactaagtcattcagacatactt

SEQ ID NO: 76092 - DNA, 320 bp, Zea mays
aagaggtctatgttgatcaacctccctgctttgaagatagtgagtatcctaaccatgtgtattaactctctaaggtgctttatgggctcaagccagtcccaagagcatggtatgaatgcctataagattttcttatcactaatgacttcaaagtcggaaaggccgaacctactctatatactaaaacccttgacaatgaattgtttgtatgccaaatttatgatgatgatatcatatttgggtctactaacgaattttcatgtgaggaatttagttcgatcatgacatataaactctagatgtctatgatgggtgagttg

SEQ ID NO: 76093 - DNA, 429 bp, Zea mays
  unsure (1)..(429): unsure at all n locations
tgacatcctatagatgaatcctattaatctggaagctgtgcaaaattaataaaggagtgaaaaggcgacgtatagttcccaaccaaaatataaagcttaatcacgcctccttaatttattacgcaggagtcacacgaaacttgtaatttcaaaaactgtcgttgtatatattttatactaaattcgttgcaattcatataggtatagtctacaattttcgctctcaatctcttaatcacaactacgataaaatgcatgtgatccgtatcggcacaaaaataaataacaattatttatagtttgataaggataaattttgatttcttacgatacaaagattactacaaatcgttaaagcaacaatgtatttatactagttacttatataagagtgtagtgtgaaatcatctaaaanatttctgacacctg

SEQ ID NO: 76094 - DNA, 392 bp, Zea mays
  unsure (1)..(392): unsure at all n locations
tgcaagcttctaaagggagtatacgtgtattgtctaaccaatgtaactctcanaaaagatagaccttgtgcagctggtcaagcaggttaacaagtgggaggagcacatcacaacaagaatgtgatgaccacatcaagacctttggagctgctacacatggacctcttcggactcgatgcctatctaagtattaggaggaagtaagtatggtcttgttattatttgatgacttcttccgcttcacttgngtattctttttgcaggaaaaatctgaaacccaagggaccctcaagcgcttcctaaggagagctcaaaacgaagttgagcttcaggtgaagaagataagaagtgacaatgggtccgagttcaagaaacctctagtggaggagtac

SEQ ID NO: 76095 - DNA, 441 bp, Zea mays
  unsure (1)..(441): unsure at all n locations
tntataccaattgaaagtagtctagaagttggtgagtatgctacacctgataatatcaccacanacttcaaaataatgttcaattgacaattcgactggtgtaggccggttcaacataggcagttgaaccactctaaacatgtccaactgcgagaatagatctaggctaagaacaacacggtgtgtaatgagagaatcctttataagaataactcaagggataatctaagtaaaaattgtgatcgatccgagtggagcaactccacaaaatccacacacagcgaatcgcatgatgccttgcttgccacagataaactgcaatggatgaataaagcaagaacacanaaacacgagaattataccgaggtttgcccacaccacaaaggtgtcctactccccaacggctatggactgtccggtgcgcccatcgacatcaccctc

SEQ ID NO: 76096 - DNA, 454 bp, Zea mays
agcttcaacagagcagcgaacctgcttgtatatcgggcagccggcggccatggggcagcggtagtacgaacgggggcacggattgcccttggtcatctattgcccgcatttactccattgacacccatcactgatctgcgtaccatagagaagaacaaacatttcagcgacagctcgctcagtaggccagtagccagtcacagtcagaagcggagcactgtcagcctaccatgagtacctcggagcgggctcggacggagacgcgggccttccgcatggtggcgggctcggggcccttgacgggaaagaacttggccaccttgttcgagagccaaccctgattcaccgccaggtggtgagacggtggctcgtacgggctgctactgctacccctctcatgggcgaggagctggtggtggccgtgctccaacgcgggcagcggcatcaattacat

SEQ ID NO: 76097 - DNA, 352 bp, Zea mays
gacacaagatactcaagctaacatgcttgatgcaagtgcattcctttcatccgcaattctatcaatagagggtttcaaggtaattacttctatatctttattgcgaatcaactcttgaagctctaggtttccttccttttcaagataaccagcttcttgacataagagttgcctttcctttatctaacttttccattaattttgcgataacattgtatccatttaagccaaattctttaatcattctatttttcatggcaatttgatcatcatcatcatcatttgaaagatcattactaaacaaagttaccttatctccttttgccatgaggcaagttggaatgtatgagtc

SEQ ID NO: 76098 - DNA, 464 bp, Zea mays
  unsure (1)..(464): unsure at all n locations
agcttgagcggggagctggactntggcggttttcgtctggctccggagcggagatggtgctggatctcaatgtagcgtcgccggcggactcgggcacgtcgagctcgtccgtcctcaactccgcggacggcggcttccggttcggcctgctcgggagccccgtcgacgacgacgactgctccggtgagatggcgcctggcgcgtccacggggttcatgacgcggcagctcttcccgtccccgaccccgccggccgagccagagccggagccggtggcggcgccggtgccggtgtggcatccgcaacgcgccgaggatctcggcatggtccagaggccggtggcgccagcgaagaagaccaggcgcgggcctaggtcgcggagctcgcagtacaggggcgtcaccttctacatgaggacgggccgctgggaatcgcacatcttggactcagcctctgacctcgtc

SEQ ID NO: 76099 - DNA, 455 bp, Zea mays
  unsure (1)..(455): unsure at all n locations
ntagcagaatgacagcaaaggtccttcattctcagatatgcagaaacgtgctaacatatgctgatgatatcataggagaaagtacacagcaggaaaatcacgttgctaatttacaggagacattcgctaattttagccaagctggtttaaagctgaacccggaaaaatgtgtctttggggtaaagaaggggaaattccttggctggttggtttcaacaaaaggaatcgaagctaatccaaataaaatcgaagctatccttcggatggagccgccaagcacaaagaaaggggctcaacgactgataggaagactagcatctttgaatcgatttatatccagatcggcagagagaaatttaccattctttgaagtactgaagtcagccgaaggttttcagtggggatcagctcagcaaaagccttcgaagactgaaatggttttgatagatttaaca

SEQ ID NO: 76100 - DNA, 391 bp, Zea mays
gcaagcttctgaacgtatctgaataatatgatgtcttgagctagcacacagcaggaatgcaactatatatggctggatttcgcagaccatgtggcctggctattcctcaaacctaattgtggccaaagcggcaagtgttttcgactagtgaatacaatgcgttactgcataagatactcacccatgatgctgcttaacatatataagcgtaaataattccatcttatctcctgagacctgtatgtagaagcatcatccttgggcttggaatattttacatgctagatattcaacagttctttctgctgcgcacatgcagcatgcaacaacttgcatgaattgttcttatatatataaagtcaggcacgcgcgccatatgtcactctttaca

SEQ ID NO: 76101 - DNA, 381 bp, Zea mays
tcggcttcatctatattatgaatagccttctaatctatctaactcccttcagctctcctagcagctccttgactcccatgtacatcaatgggcccttgttccgaaggtatcttcatgcaaagatacgctggatgaagtattgcttcgaaggcattaagcgtccctcgaccaatgattgcattgtatggatacaccatatcaacaatgtcaaagacaacctgttccgttcttttgttatgaacatagctgaaggtaactggcattgttatcttgtcaagtgccacaatctgtcttcctccgaagccacaaagagggtgtgttgcatcatgtatcttattctctggctcttgcatttgcctgaaagcctttggacagatgata

SEQ ID NO: 76102 - DNA, 408 bp, Zea mays
gtcacctgcggcatgcaagcttaggaactggtgctgcatcgcaacctggttgtgcatctgaccttcaaccatgccctgcggaccaccactggacagcggcagattcctctgaccctggaaggacgacactggaccggaggactgagggaagatcacgccgcctggtcccatcatgccatgcggcgcaccagagtggaaggcttgctgctgttcatggcgatgcatcattccctgcagcagaaggtgctgtgaacatcagaagtctagaaccttaccagaccaagaaacaacaaaactctcatactagagcattgcatggagacgacaggcagattaaacgaaaacgattggaaggggtcggatttttctataagcaacgttaaattccgatcggccctactaaaaaac

SEQ ID NO: 76103 - DNA, 411 bp, Zea mays
  unsure (1)..(411): unsure at all n locations
ttccacccgggagtttaggtggttacagtgggaggagatatcatcgtattggttgtcgagagtgtggaggtatccggccatgtagacaatggtggggtcatcctcggtagggtctctccctgacagggcctaaagtgggggtttcaaagatctctctgctgtagttttggcatagctgtttaagggcttttcgggcaacactttggcaagtgtctgggaagcggtgcacgatgaaggtgacttggaagggagggtggtttgggtagcttcggctttctcccaggtagaccgccatagagaacttctctattccattntcgcggtattccttccagacatatccgagcttcttgcggatccccatgcatagtgcgcaacttcatacgaggtgaggaaatcctttcttccttg

SEQ ID NO: 76104 - DNA, 409 bp, Zea mays
  unsure (1)..(409): unsure at all n locations
cctgcacgcatgcaagcatcggcgagggttcatattttggttgtttaacagcgcaaacagcacgaattgctgtggtaacttcacccctactcgtctgtttatatagtgccgcatgtaagaaggcgaagcgccagaagttttacgccaggcggacacccgctcgcactcgctgtacggtgggccgcaaagactgaacatgtaattctgcacggtggggccgccacgcgcagggaaattgaatcgtttctcgacaacgagctcagggaaggtgtttttgagaccttctgngctccgaagcttaagaaacttttttcacggatcaagctcgttacgaaaaacgatctatcaccgcgaaaggggctactgttgggaccatgcttcgtccgcgaatgtcttataaagagaagcg

SEQ ID NO: 76105 - DNA, 271 bp, Zea mays
ctacttcgacaccgcttcgttttgcattgcctacgcccagaccttggcctgtgggtaagtgtatcataatcgttagtctcaagctttctactgtcccatgaaactcgtgatcacactcaaaatggaattttctgtattgattaatcgattaaatccatcttcttaacgtgaccctttttgttgcggtcatcaagaactcattttttgatacttacccttgtgaccaacacagattccttttccctaacctttcgatactcaacattgctaa

SEQ ID NO: 76106 - DNA, 346 bp, Zea mays
agcttatgaagattctttctttctactttgtctactccgcggagccacagccaacccatgttggtcttatcaattaagcaagggtcgagctcagctctatcataatctaccaagtatagctgaccctccaacactcctttaaatgctattgaatcatcacttcttctaaaaacagtgacacctacctcaatgaaaagacagttgagcctattttgcatacatgagatacagaaagcgaattgtaatctaatgaatctacacgaaaaacacaggacatagaatggtaacgagatatagcaattttaccctatcctttgaccaaaccttggtttccatcccaaatgtg

SEQ ID NO: 76107 - DNA, 426 bp, Zea mays
  unsure (1)..(426): unsure at all n locations
cgctgngataaaacaagtgatgatgatggtgggaaagatgatgagattgatcttccccctgcccacgcccctgttattcgagggttggtcctccaccgggcggaggcccgtcgttctagcaatgagccagttactgattttactgccagcggaggttctgctcttcttcaggacatccgctttcagaatcctacattgcgcattcgtgatgccaggattgatgggaaccgtttttggactctccagcatgtggatttttacaactcagtgatcctccccaagaaacatcagcccatactacatcaacggtacatcaactgggaaggatgtgaggctattgnggacccaaagatgacacagacattgagggcctgtgaaagaaagaagatgaagaatataatgacattccaatatgaatggaattat

SEQ ID NO: 76108 - DNA, 368 bp, Zea mays
agctttatcaaatggacgtgaagagtgcctttctcaatggaccaatcaaggaggatgtctatgttgagcaacctcccggctctgaagatagtgagtaccctaaccatgtctataaactctctaaggcgctttaaagcaagccccaagagcatggtatgaatgcctaagagaatttcttatcgctaatgtcttcaaagtcggaaaagccgatcctactctctttactaaaactattgcaaatgatttgtttgtatgccaaatttatgttgatgatatcatatttgggtctactaacaaatctactgaagagtttagtatgatcatggttcaaaaattcgagatgtctatgatgggggaggttgaagtat

SEQ ID NO: 76109 - DNA, 452 bp, Zea mays
tatgaaattctctatatcccttatttatattcataccattttgagcaaatctgacgtattggacagtccggtgtgtaccacacatcccatatgctgttgcagttctttcagcaattcctactttgtactgtgggcataacttttagctatgaactcctattttgatgatattgaactttttggaaaacttataaaattatctacatctcaaagttgaagccatgttagtttgattagattacttttgtgaaacacttccaattcagtcagcccttcctctcaactttgtcaactttacttttgttttgtagctttgcctcccacttctacttcttgatgtgttggactcttagcatttataaagtgtcttcaatatgactttgtaatggcttctataggtcttataatatcttctttgaggtgttgcattctcagagcctcagtccaatcca

SEQ ID NO: 76110 - DNA, 268 bp, Zea mays
agtaccctaaccatggttacaaactctctaagttgctttatgggcttaagcaagccccaagagcatggtatgaatgcctaagagactttcttatcactaatggcttcaaagtcggtaaagccgatcctactctctttactaaaactatagcaaatgatttgtgtgtatgccaaatttatgttgatgatatcatatttgggtctactaacaaatctacttgtgaagagtttagtaggataatgactcacaaattcgagatgtctatgat

SEQ ID NO: 76111 - DNA, 380 bp, Zea mays
tcgaatgtcatacttgatgcatatccactctatttgttcccttgtatgatgtactgtttgcttcccacattgaatggatgaacgtacgtatgcttgctatcgcatagagaacgatccggtcgaagagcccgacgaactcgcatgagaagcccctgaacagcagtcgggtggtggaggcagagtgcccttgacctatctctgttctattcattattgaattcacctcccgctctacacatctatgcctaaagattggactagcttttgtatccatgtccttggttacctatctggggtggatattattgttagcttatgctttgctcaactctatcaatgacatgatgagatttctatgatcgctgcttcccttctttata

SEQ ID NO: 76112 - DNA, 378 bp, Zea mays
  unsure (1)..(378): unsure at all n locations
tgccaccgacccaacgctttgtaggatctaagacaccgactagatggggagtgaatagacngttttgactaaaataaatacactagagaaacttgatcaatatgacaagacgtatatattctctagtcacaacaagttaacaatctatgagaatcacatatggtgattgtatactcgaagaacaatatgcacaatactaatcacttgcacgacaataagtaatgcaagaaaagaaagacaccggattntatcccgtgtatcggtgatttgccatcacccctatncacgttaggtggacttaagtctacttgctctctatacacacacttgactttagccagggcagaattactaatattcgttcctatgtactttgcg

SEQ ID NO: 76113 - DNA, 297 bp, Zea mays
agtcagcttattaaataactagtacatctgaccttacatcctaatgcatgatatactttttaagacgaaccctattcgaaaagacgtgaaccatttgatatgaaaacaaagcagtatattaagaattcagaaaacatgaataaaggcaggaatacaattacaagtcttgacaacctgattcatcccgaaggatacttttggggcatggtttctataggggagaacatctttctcccagcatgtggttgtgccccgctgcattatcaactgagcccccgatgataaacctcaaacaaa

SEQ ID NO: 76114 - DNA, 292 bp, Zea mays
  unsure (1)..(292): unsure at all n locations
aattntaagcactaaagctgagctcatgtgatcatttttgttgtttaattaaaagctatcgtgagtcatgaatagcatcaaccattaacattctctacatctattggcanatagagacatgactaacaatagatgtagaagggtagcaagcacttaattcatcaatctagcatgtaacatgacattctcatttctaagattggaaacatattcatttcaaacatataaatttctagccttagtaatcaacttatcattttctatcctaaagctagcaatagattcatttcac

SEQ ID NO: 76115 - DNA, 221 bp, Zea mays
  unsure (1)..(221): unsure at all n locations
ttttaaagttgtacatgaagtatttcattgntatgcttaattctttctttttcttgcacggcttaattcttagcaatgccttgagggcacaaaagagcgccaaagacgaatgctacacaatagctctcaacaaccttcgctcagaggtgattgagctgagaaatgaagggttgaagaaagacaagattntaatttcattggtgaataaaataaaagaagat

SEQ ID NO: 76116 - DNA, 304 bp, Zea mays
  unsure (1)..(304): unsure at all n locations
ctacgttgagcaacctccctggctatgaagataatgacgaccctcaaccatgtgtatcaactctctaatgcgctatatgggctcaagcaagccccaagagcatggtatgaatgcgttaaagaatttcttatcactaatggattcatagtcggaaaggccgcacctacagtctttactaaaactcttgaaaaagatttgnttgtatgccgacattatgttgatgatattatatgtgggtctactaaacgaatctacatgtgaagaggttagtggatcatgacactaaaattcagatgtctatgat

SEQ ID NO: 76117 - DNA, 340 bp, Zea mays
cagttactgaaccatctgtcgatgaagaggagttctactgccccgatgtgagtgatgagtggtacttagcgactcagatagcaactcgaatactctgaatttatactcatgatcacatagtgaggaagctttaaatcatactggggtcacttgcttgagcactatctggagatgctagctaagcactggactagttatgagtaacctgagatggacatgtgatctaatgtcatgtgtgtctctgaaagtatgaacattatatattcttgtcatagcttgggtgtatgacctgttgcatgctcagtatactaataagcgcttcatatcagtgcctgccatg

SEQ ID NO: 76118 - DNA, 298 bp, Zea mays
  unsure (1)..(298): unsure at all n locations
cacgtgatatgtttgactaacgtacaattccgaaaagatagaccttgtgcagcttgtcacgcangtaaacaggtgggaggagcgcatcacagcaagaatgtgatgaccacatcaagacccctggagctgctacatatggacctcttcggacccgtcgcctatctaagcataagaagaagtaagtatggtttaagtattggtgatgactcttcccgcttcacttgggtgttctttntgcacgataagtctgacacccaaaggaccctcaagcgcttcctcaagagagctcaaaatgagt

SEQ ID NO: 76119 - DNA, 454 bp, Zea mays
  unsure (1)..(454): unsure at all n locations
gcttatgaagattcttcatcccaacatgggctagtctgtggtgccagagccaacccatgttagtcttagcaattaagcaagtgtcgagttcagctctatcaaaatctaccaagtatagctgaccctctaacactcccttaaatgctattgaatcatcacttcttctaaagacagtgacacctatatcagtaaaaagacaagtgtagcccagttgacataattgagaaacggaaagcaagttgttgtctaaagaatctacaagaacaacattggaaatggaatggtcaggtgatatagcagatttacccaaaccttgatttccatcctcgaatgtgatagctcgttggggatcttggttcttctcataagaagagaacatcttcttctccctatcatgtggttggngcacccgtgcgatgatcaacttgacccncggtgcataacctacaaacaa

SEQ ID NO: 76120 - DNA, 290 bp, Zea mays
  unsure (1)..(290): unsure at all n locations
aatgaatgctgtggtaacttcacacctacctgcttgtttatatagtactgcangtaagaaggcgaagcggcggatatggtacaccaggcgcgcagtaacttgtacccgctgcgcagtggaccgcaaggatcaaacagtaactctgcaaggtgggaccgacacgcgctcggaagccggatcgattctccgcaacgagctcaaggaaggtgttttttggaccttctgcttcccgaagctgaagaggcttttttcacgggtcaagctcgttacgaagaacgatctatcaccgc

SEQ ID NO: 76121 - DNA, 125 bp, Zea mays
actacgacataatattatcgaccttagtatctcataaattctttgtgaataatcaataccacacttaacttgataaaatcaaattatactacaatgaaaatatcataaaaacatttgggttttat

SEQ ID NO: 76122 - DNA, 307 bp, Zea mays
  unsure (1)..(307): unsure at all n locations
ctaagctatgagatcttatccaacatgggtagtcnggatgtagagccacccatatattttatctttaagcaagtgtaagttcatctttggtctcataaaaatcaactaaatatagcttgacctncacagtcccttaaatgctattgaatcatcacttcttctaaagacagtaacacctacatctggtaatagacagttggagcccattttgcataattgagaaacagaaagcaaattggaatctaaagaatctataagaaaaactttggaaatagaatggtcacgtgatataagcaatttacccaat

SEQ ID NO: 76123 - DNA, 221 bp, Zea mays
  unsure (1)..(221): unsure at all n locations
cattggaatggctagatattatcgacgtttcattgaaggtttctccaagattgctaggccagtgacagccttgctagcgaagaaagttgaattcagtggaccccagagtgccaagagttcttttgaacattgaagaagaagtngaataccgcaccggtattgattctgccagatgttcataaactattctcagtgtattctaatgcttcgtacactggtct

SEQ ID NO: 76124 - DNA, 420 bp, Zea mays
  unsure (1)..(420): unsure at all n locations
gaagatagtgagtaccctaaccatgtctataggctctctaaagcgctttatgggctcaagcaagccccaagagcatggtatgaatgccttagagaatttcttattgctaatggcttcaaagtcngcaaggccgatcctactttattcactaaaactcttgacaatgaatttgttgtatgccaaaattatgtngatgatatcatattntngtctactaacgaatctacatgtgaagaatntagtaggatcatgacacagaaattcgagatgtctatgattggggagttgaagtatttctaggattccagtcagcaactccaagaggaccttcattaccaacgaagatacttagacatctaagcaattggatgaggatgcatcccatcagacaccatggaacaatggcatctcactcacacg

SEQ ID NO: 76125 - DNA, 214 bp, Zea mays
cagcactttaaggaaacacggaagctaacaatgtaacttcgaatatatagaccttgtgcagcttgtcaagcaagtaaacaggtgggaagctctcatcatgccgaaaatgtgatgacaatatcaacacccctagagctactttatatggacctcttcgggcccgtcgcctatctaaacataagaggaagtaagtatggtcttgttataactgatg

SEQ ID NO: 76126 - DNA, 364 bp, Zea mays
  unsure (1)..(364): unsure at all n locations
atatttgtcaatagatgtgctatgactctggcacagtgctgntgactgtgcgagcttccgactgttctctgaagtccctttggtgtggagcatatcggcttccttctggctagtggccttgttgcaccggtggtggatgcggaggctgttgcacgaagctgaggtgactcgccgaacaacagaaactgtacggtgattgcctacatattctgtgatgtaaggcgatgatacgagcagtgtcatgacctgcttcgctgacctgtnggctgcacttcgctattcttttcttttgatggaacatggacatctggtggatggctatgtctcacacaaacagcaaagatctctnggtgatctcaatttc

SEQ ID NO: 76127 - DNA, 390 bp, Zea mays
  unsure (1)..(390): unsure at all n locations
aatctttacacctagtacaaatttcaacatgttctacacaagaataggatttatttgctacttctaatttagcatttaaatcattggtgacacctttcaaagtagaaatggtttcatgacaagtagatagttcataagagagcatttcatttcttttaacttctaaagcatatgatttttgtgcctcaacaaatatatcatgctcttcatacaacanatcctcttgcttttctaanagtatattcttttcattcaaaggcatcaataattcattaattttgtctatcttagatctatctaagccccggaacaaacatgaataatctacttcatcctcatcactagaatcgtcctcactagaagaagcatanagtagagtgcgagtacata

SEQ ID NO: 76128 - DNA, 309 bp, Zea mays
  unsure (1)..(309): unsure at all n locations
aacgaatgtccaactccgagatgcttgcttcaacccataaatggatttctgaaagttgcatatctttccagcattgatcggatcgacaaaaccctcgggctgtatcatatacacgttctcatctaaggttncattaaagaaagctggtttgacatccatctgccaaatctcataatcgaaatatgcggcaatagctagaatgatccgaatagaattaagcatcgctactagcgagaatgtctcgtcatagtcaacttcttgaacttgtcaanaccctttgcacaagtcgagcttatagatggaaacatt

SEQ ID NO: 76129 - DNA, 357 bp, Zea mays
tgaacccatgttgatgcacgtactagaatttgtgttgttgttgatggtgctaaatgccaatgggctcgaccttcttatatgttaaagtagctcttctatacttcttactgaggattggcaatgagctagcatatatttcccacttataaactaattataacatttcaaagtttatttctttgaatcactcttgtgatcactccgataataaatgatatttgtgtacttgtagttttgtataaacaattccggcaaatgtggtgtggattgagttacttatcttggacctaatatatgggttatccgggtcctggacctcgatgatctgtagtatcgggccatcataccggtgagctt

SEQ ID NO: 76130 - DNA, 512 bp, Zea mays
  unsure (1)..(512): unsure at all n locations
ctcagcttaatatattagagcctgngtaaaattgggatggtttgaaccatgtttggttcttataacctaagaccctagtcccctgccctatgaacttcactattgacgtccaaaaccctangttccggaggctcgtgaaggaaagttatattcaagacattagataataaactcttattatctttgcattntcatgagtattacatgaacattcatgattatatatggatatatatagaanacgaggaagaaatataagttgaagaagcgaggactacaccacaccaccacctgaagaacctcaggcaggaaactacttttactttgaaatctgtatagcagagcctgattcacctatcacacaaggcangccccggtgcatttcnncactcttggtatttgaatcttctcactacttgtgcatangtgaaggagtgtgtgtaaacagttgtgcattcttcttgattgatactctctttaatctatntacaaaggtttctatgctacttgtt

SEQ ID NO: 76131 - DNA, 349 bp, Zea mays
  unsure (1)..(349): unsure at all n locations
tgtgaagagtgcttttctcaattgacccatcaaagaagaggtctacgttgagcaaccttctggctttgaagatagtgagtaccctaaccatgtgtataaactctctaaggcgctttatgggctcaagcaagccccaagagcatggtatgaatgcgttagagattttcttatcactaatggattcaaagtcggaaaggccgatcctacagtctttactaaaactcttggaaaatgattcgttgtatgccaacattatgctgatgatattatatttgggtctactaacgaatctacatgtgaagagtttagtaggatcatgacacacanattcgagatgtctatgatgggg

SEQ ID NO: 76132 - DNA, 127 bp, Zea mays
taggcctactacttcgatgatcacggtcaaggaccttcttacccaagatactgcagaaattcgccaggaaaggctacataaagcctgaaccgaattaatctgttcctatgcgaactgctcactgggc

SEQ ID NO: 76133 - DNA, 374 bp, Zea mays
  unsure (1)..(374): unsure at all n locations
cactgaccctgaaaagaaggaatggtttatgagaggccctaatgaccggctacaacggaagatgtccacctgcctcgacctcttctacagcaaggttgtcagcacgacgctggcagttgaagcttagtatgcaagcccacgaaagtcaaagggctttagaggtgacaggtccaaccaggggcctgaaaagcgacaaagggtggtgatccaaccttttcaattaaaccgttctttacctcgtccaccctcctaccncttcaaacaacctagtatcatccgccctgctactggccccacctcaacaactcaatcgagggcccttgtggctcgttnctcgccctccccgagtcatcaactggcctgtttcaatatgg

SEQ ID NO: 76134 - DNA, 205 bp, Zea mays
tcattctgggtctcatcatgcttttatgtataagaatgagacatctagttctaggcattctacccatgtttaaatgccttaaaagaaatctcatgctgcatcaaatgatcataatgttagtaccgactcttcattcaccgtcacattcggcaccgagttcactacttcgaagcgtcaagagcgcaataagaatagtaagatgcct

SEQ ID NO: 76135 - DNA, 420 bp, Zea mays
  unsure (1)..(420): unsure at all n locations
ctcagcttaggtcgcatatttcaaattgcacacttcagcttcatcatacttcaagctcgcatcctattatattgaagaacagaatatgtgcacatttaacgagaagggtaaagtcataaatataagtttcttaccggcttaagatgacttcgagcttcgtcaccagccatttttccgcccgccatttacccaaatctgggtcatgaatcctatttcaatacttcaggctacgcttggaatatatatcagatctgatgatgataagcttgaagttggttctattcacaattttccatgcgtgcagccaagcttgagataagcggtagctgtgccccgagaagctaccagtgcacagaagtcagcatggccaccaataactncgtcaagggcgcaacctccgcttcatatattctatatgct

SEQ ID NO: 76136 - DNA, 237 bp, Zea mays
tcttagcgaataagcaattatcgagttcaactctattgaaatcaactaagtatagctgaccctctaatactcccttaaaagctattgaatcatcacttcttctaaagacaagtacacctgtattcgtaaaaagaccagtgtagcccattttacataattgagaaacagaaaggcagtggaatctaaagaatctacaagaaaaacattggaaatagaatggtcaggtgatatagcaat

SEQ ID NO: 76137 - DNA, 466 bp, Zea mays
  unsure (1)..(466): unsure at all n locations
ctctattctactatttcaaaatctctcaagtggtagctgatccatttatactntggcctttattntcttccccttnggcatcaagcaccanaacgggacaatcttggccgtaaccccattgnctcaccaaagtcttcaatttagagcaaatggcaataagatttcatgagatgaacttggaattatgtaccctctcatcggagtgcagtggaagtctttcatggtccaagtccaccttttccctttcaatccttcttcgagactaaattaccaaactcaagcacatggttagtctcanagggtcaagttgtaacacatctnccnctaaacatgtgcatcactttgcaacggacttgtgaagtccagggagtgttngtcaacttgagcaccataataagcaacataatgcanaaaggaacatgatcaanagcataactacatgtatgctacaattcaatccaggttc

SEQ ID NO: 76138 - DNA, 303 bp, Zea mays
  unsure (1)..(303): unsure at all n locations
tcagcactccctcgtgaggccggtgcgcctagcattgctctagcgaagcaagatggtatagggatggaacctggcaagcaaaagcactcgtgatggtcaaatcctctgaagcagcatgacaaactaacaattttttgagactcgaactgctaggtattcaatatctccaatgaaatctcccaaaataatcaattcaccaacacaaaaaccacagaaatgagctactctaatgaanatgtacatacatatcgtcttaataatcaaaaggtgaactcatgcaggaacaacaccccacaaattcag

SEQ ID NO: 76139 - DNA, 296 bp, Zea mays
ctccaaagtacatcaagaatgatcacccacttacataaaggtgagtgatgcttgatggccactgatagtatgtctatatatggtgatatacaagagataattatttaatgctcaaaggacctacttaactgtccattaaaaaaagcaaggtaaaaaaattactacatgtcagacaacagaaaaaattcaactgaaaccttctcctcgaaaagactatgcaatgccatgaaaatctttactgtttatatttatagcacaatgactgctaaagacagtcaacctccaagcatggtcaa

SEQ ID NO: 76140 - DNA, 419 bp, Zea mays
  unsure (1)..(419): unsure at all n locations
tgagctgcagcttctacctcattgggtgttatgctggaggatattgctattgcacaagcgtggaaatcgatgatttagagcgaagtatatcttaccatngagatcaatggtggagcgacatacgcgacactagacctgaagagggaagagcggtggcatggtgagtgctggcggagaacgctaatatggatcgacatctacttctatttgactcanatgatgaacatttggatgtttagggtttagagttagacttttgtcataccttgtttgtctgtgcccgataggtgggtcgcaacgatttctaactacaatacttctctanattatataaaccttgattagctgtaacgattccggatgtaagccgacagaaacgacaagccctctaggcggacattctcacttaacataaaaca

SEQ ID NO: 76141 - DNA, 428 bp, Zea mays
  unsure (1)..(428): unsure at all n locations
tatcggctcattgagttagcattgntacttccaataacaacagccacggttgaaagggctttttctgncatgaagaatatcaaaactgagttgcacaacaaaatgggtgattattggcttaacgatttaatggtgatctacattgagagaagaatgttcaaagagcttgatcttcaaaatattaagaaagcatttcacaagaagaaagataggcaaatgcaattgcctatgtctccaagacatatataacaaaatcagtggtatgaacaatttcatgtttgtagcaatttgttttaattttagacatgtttatttctttatatatatcgcgagttgtatataagtgatcgatgtgtgtaacattatatggtgtgagagcatacctaatttttcgtctccgcctgcagcaacctcttgcgatatttttc

SEQ ID NO: 76142 - DNA, 485 bp, Zea mays
  unsure (1)..(485): unsure at all n locations
tgcgctaacacctacctggctaaatcttctcatcggaacgcnncgcaaccctcatgcagcgatggcacaacataggtatcaacagaaacattcttttgattctacctctgacgcataggaagcaccgtctagcatgcagggaggagcacatattcctccggcgcaacccaccgaggtggagccgacatagaccaagaatgttttgccttggtaaacgtatcaggagcaaacattacagcagatgtcatccagaacgagctaaacaaaattaccagaagatgggactggtcgaagtggaagcattacctcgtggagaggaattctttcttttcttgtgntttcttctttcangaaataagcgtatggccacatagataccagtacaaatcttgagtcacctacaattcaagtgcagattcacgatgtacaccactatagttgataggatggacatatacgaggcaataagaactgagttttcatgc

SEQ ID NO: 76143 - DNA, 232 bp, Zea mays
  unsure (1)..(232): unsure at all n locations
tcttatcaattaagcaagtgtcgagttcaactctatcaaaatccaccaagtatagctgaccctctaacacttccttaaatgctattgaatcatcacttcttctaaatacagtgacacctacatcagtaaaaagacangtgtagcccatttgacataattgggatacagaaagcacattggtatctaatgaatcaacaagaaaaacattggaaatggaatggtcaggagatat

SEQ ID NO: 76144 - DNA, 342 bp, Zea mays
atacatctagaactctgactctgcaagctgtgcatctctataaattattttggtatgggactcatctttggacacctgtcaatcagtaaataatgccattctcattaccattggcttcttaccatacaatgtggctagcatttgggattcacttcttgtgacccacactgaaagcttttacttcgtcgggcacctcgttatcgctgacatttcgagctttgttctagtcgaagatgacacttgatgatgtcatgacgccatgcacccaagatcgtgtgactgcaacatttgtgtgataaacctatcggttctctgttcaatatggatcacatactttgttgt

SEQ ID NO: 76145 - DNA, 278 bp, Zea mays
ctatctcaaaacacgcacacaagaactatctcttgcttcattcactctcttgtggcacctgagaggatctgatcaatttggagtggttatctaatgtataagacatggtgcgtattgaatgagttggttggagtgcccgtgcgttgcaacgacacatggaatattttacataatggttgtgcacaatgattacatgacaacaaccaacatatatatatttatcgactagaataatctcacacatatgtccacaaccaatctctactataaagcatcag

SEQ ID NO: 76146 - DNA, 385 bp, Zea mays
  unsure (1)..(385): unsure at all n locations
cctttcttagaacataatgagcattgaaagcaaatggtcttgagtgcttatgcaaaggaagtggtggtttgactntgcagttgtgggcaaagtgaccttcatttccacactcaatgcatttgatangctcgtgagtctgctttggcttgtattgagtggtagctntcttttgcacaaaagcattgtatccaataccactcttgttgtnttcataacagtgttcataagcagctcaatttggaggtattgacccttgntgaactntngcacactnngtgcaagatgtcattntcacttttaagtactngacctcattnntaacctttanatatnncactgcaactcatttgtgaatcattgtctcaatacaacctttctctagtag

SEQ ID NO: 76147 - DNA, 490 bp, Zea mays
  unsure (1)..(490): unsure at all n locations
ctaagctaagcatcccctttagtggtcaagtttaattagataatgaaagcataactaatactcctttttccaagaccgcagaatataacaaaacaattaccttaaagtaaccataaaacattcactatgcaaacatagtgaacccaatgtatcaacattacataccccatacatatataaccaacatctttgttctaatttccagctctaaatctatgaaggttcgagaagctcttgaccatgagcacgcttgatatatcattntaaacttctctaaagggatcacacatatntatccacaagtcgtgttgccatatggagagtttcaaagtccattcacctcttccaagaaagttctcttcactctaggatctngtctagtcaaatcttcgagtggtagacccanaacatagagtcggtnctcaaaccactntcatctgacatgtnntgatatcatcaaantatatatatatatatatatatatataat

SEQ ID NO: 76148 - DNA, 289 bp, Zea mays
  unsure (1)..(289): unsure at all n locations
tcttcaatttaccttctgaacacgccatttaatatgtttcacctaatacttattgatgtggtctactgcttgaaagcctggcccttctatggtggcttttgttatgttgcaggtctcttcatcttctgtcgaagctaaggtccttattgagccttttcttgcttcttccggtgttattgcttcgtcaccgaacaaaagctttgacggngtaaaattcgttgacctacagacagcagctgtgtggttccacaccattcacctttattagtattacattgataccttcggc

SEQ ID NO: 76149 - DNA, 326 bp, Zea mays
  unsure (1)..(326): unsure at all n locations
actcagctggtgagggtcttcatccncacatgtgctatacggcgatgccacagcctacccatgctagtcttagcaattaaacatgcatctagaccggccttctcttttgcaaatcaactaaataaagtttgtcgtctagtgcacnccttaaagctaatgaaccatcacttcttctaaagacagacacatctacanttgtgaataaacagttatattccatattacaaaagtgactcacagacnacangttatatccaagcgactcaactaagaacacattagaaatagagtgctcggatgaaatagcaaatttttctaaccctttc

SEQ ID NO: 76150 - DNA, 403 bp, Zea mays
gcacacatgtaggcgatgatatcactaccaaaccgccgtatgtgtgcttatccaaatcttaacaaatgagcttaaagttggataaagaacataagaactttgccacactagcaatttacacttgtgtgaaaagctagcttggaaaagaaaaaaaacgacaaatctttgtagagttgtcatctattaccaaaaagggggagattgcgagaccctgtttggtttggtaattggatgacaacttatatggactaataagtgtttatgttgagatacacaggtgattagtccacacgtacactagtgtgagttattctagccatggtggtgatgtggctcggtgatattgagatgctcaactagtgtgataaaggagctcattgcatatgaagacatgacatggtgt

SEQ ID NO: 76151 - DNA, 391 bp, Zea mays
  unsure (1)..(391): unsure at all n locations
ctgcacttaccatccattgaggacttaactttcaccacatctattcttaggggagatagaattaattccaagaacttgcagaactacctagatgaaatgaccttgatcagactctgcaccggaaagtattcagatcaggcaatgaacaacatgatgaatgacgaagagtggcgaaaagagactgaaagtaaccttgtcttgatgaagacaacaaaactgtgttttgatgaagacaacanaattgtcgaagatggtctatctatcatactgatggagaacaaacaagcccccaacatttgtgatatccattatattagaattaaagagcagagatgatggacatgttctatctattcatgagcagatctgcaacattactcagtcttgacat

SEQ ID NO: 76152 - DNA, 246 bp, Zea mays
attgtagccattttgctaatgagatcagaaacaaatgtatctatgaatctcaaaaacattgaataaatggctgaatatacatttaccaaccttgaccaacttgttccatccgatggaagctgtgggatctgtttctcgagagagacatcttttcctgatatggtggcccgtgcagttcactgaccccgagctaactacacatttagttgattagaccaacgttggccttgctagaacaatttggac

SEQ ID NO: 76153 - DNA, 171 bp, Zea mays
aagatatcggctaattgatctttagtattaatggtaagatatctcgatatcccccttttgttggcgatccctaaagaaatgataccgaatggctatgtgcttagtgcggctatgctcgacgggattgtcggccatcttaattgcactctcattatcacatagcaaagggac

SEQ ID NO: 76154 - DNA, 414 bp, Zea mays
cattctctatctcatgctcaccgatttactatgttaatgactatatgatcattttggtggttaattaaagcaaggtgatcatgaatagcatccatattaacatctctacatctagtacaaatagagacatgacttacagtggatgtagaggggttgcaagcattaattcatcaatttagcatgtaaatagcttctcattctagattgaaataaaacatgcaacattcaattttacctttgaataactacatttcagttaggctagcatgatcattcattatcatctacaataactacatttcattttagatgacattgatatgacaacattgatttcacatagcataactacatctagtctaggtggaataggcatgccatctactcttatcaagttacatttctattctgact

SEQ ID NO: 76155 - DNA, 97 bp, Zea mays
  unsure (1)..(97): unsure at all n locations
agacaattatatcccatattgcacaattgactaacagatagtaaattatatnccagagactcaacttataacacattagagatagagtggtcatttg

SEQ ID NO: 76156 - DNA, 276 bp, Zea mays
  unsure (1)..(276): unsure at all n locations
tcaaaagaaccgcaatagtgtattccctaatggaccaanctatgaatagggttatgttgagcacactcatgactttggagaagaaagtatcttaaccatgtctataagcataataaagtgatccacgatcttaagcaagcacctagaagcacgatatgaatgccttaaagatttccttattgcaattcatttaaaatagaaaagcctatcatacgctttcactaagacgggtgatgaagatctaatgtatttgtaaatttatggtgatgatattat

SEQ ID NO: 76157 - DNA, 385 bp, Zea mays
  unsure (1)..(385): unsure at all n locations
actagagctatctcacatggacctatttggaccanatacttatgctagtgctggtgtcaacctctattgtctggttattgctgatgatttttcaagatacacttgggtgttctttcttcatgaacaaattgacgttgcatcaatattcaagatattcgccaagaaagctctaaatgaatttgactgtataatcaactaattataagcgtcaacagaaaggaatttacaacaccatatcatgaatctgcgatgaaatacgatcaacatgaagttctgcacgtatacacctcacaaaatgagttgtgaagaaagatagaacttgatactcttgcaggacatgaccacaagataccaccgagaggtttggctgaactgcacattgatc

SEQ ID NO: 76158 - DNA, 324 bp, Zea mays
  unsure (1)..(324): unsure at all n locations
atcatcatcatcatccgagctatcatctgagtcccattcaactaagtatgctttgccatctntcttcttggtatagnatttctttttcttcttgtcactttcatctttgcccttcttcttcttgcttggacaattcatggcaatgtgaccgggttccccacactcaaaacattttctatcattgaaagcatttcttctagatgtttgacctcttctaggttgacctcttctcatcttcatgaatntattgaatntccttacaaataaagccatgtcaccatcactctcactntcattntcttcatcattggctatcttcttttc

SEQ ID NO: 76159 - DNA, 317 bp, Zea mays
  unsure (1)..(317): unsure at all n locations
aaagatatatatattgtctctgatgataataacacaagaaacaacagcatgcgtcgtatatgtataactaactagcaattcttatactagtgctagtgacaaaatagatatatgcataagtatccttacagtgggattgttagcgcaagatagtagacgtagcagaccgacgagaacgacgacgtcggcgtagaggaagcacacgaacaatgagcattcacgacgccgcttcccaagaacctgatactaaagcctctactccgtgcanggacacgaggggacgtaggcttcagagatcatgctctcccgacacgatg

SEQ ID NO: 76160 - DNA, 267 bp, Zea mays
agcttcgtcagcaaattctttttctttttccgaagctgtagttacgacctcttcggcgacgggagtagcctcttctgcagtcatgtccagcacgtattggtcaaagtggtcaattgtgctcttcacgttcaaatcttcagctgaggcaacttccgcagctgcggcctccgaagtgcaatttcaatatccgtcttctctcgcaccgctggtgttttctggaccgaagctcttggaagcgtcttgtcaattacttctgtcacagagata

SEQ ID NO: 76161 - DNA, 388 bp, Zea mays
  unsure (1)..(388): unsure at all n locations
cgaaatatatagaccttgcgcagcaaggcaagcatgtaaacaggtgagaggagcacatcacagcaagaatgtgatgaccacatcaaggcccctggagctgctacatatggacttcttccgacctgtcgcctatctaagcatagggggaaataagcatggtttaagtatagcggatgaattttcccgcttcacttgggtattctcttcgcacgataagtgtgaaacccaaaggaccctcaagcgctttctaaagagagctcanaacgagtttgagctcatagtgaagaagataaagagcgacaatgggtccgagttcaaaaacccttaagtggaggagtaccttgaggaggaaaggatcaacactagttctccgctctctacacaccac

SEQ ID NO: 76162 - DNA, 246 bp, Zea mays
  unsure (1)..(246): unsure at all n locations
atattgaggctatatgttgatgatatattgatatttggcacanaaattgatgtgatcaataaagccaagtcttttctatcaaagagttgtgatacgaaagatctgggagaagctgatgtgattctaaacatcaagctgattaaggcagatggtgggattactctctcgcaatctcactatgttgaaaagggtttgaagcgatttggcttctctgattgcanaccttctcccacaccttatgatcta

SEQ ID NO: 76163 - DNA, 249 bp, Zea mays
tcattagatgaccagagtgcgtctacagttgggtacacgcgacggagaggaagcctgaagtacacagactgccccaatctctcaagtaatgaagcgctcaaggctggtagcactcgaagaagcacctgccactgaaacataacaagctgatgttgacgagactgagtctgaagatggttatagctgcacgccaagtatacccagccacctggatttcagaaatccaccatctccgatgatgatctgcct

SEQ ID NO: 76164 - DNA, 355 bp, Zea mays
  unsure (1)..(355): unsure at all n locations
ctaagctgtcatcattgagagattcttagcataagcactatcgaaccagngtgtctaattttgtctgtngtctcaacaatccctggggctggtctctaccaaagcgttcgaggactaaattcccaaactcctcccaagaaatatggacaactctagattctattgattgcaaccatcgagcagccgatcccacaaattgcatagaggctactttaatccatacccganggtcgactgaatacataatgaaatagtcttcacatctagatttccacaacttggngttctcaccatcgaaagatgggacgtgcagctcgggtagatttcctaaattcctattgggaaaactctcata

SEQ ID NO: 76165 - DNA, 392 bp, Zea mays
  unsure (1)..(392): unsure at all n locations
cacaagtcgagcttggtccttgtaccacaccatgctcgtcttgcttgttgcggaagacccatatggttcctacaacatatagtgtaggacgtggaacttaatgccatacctccgttctcgtgaattgttgagctcctcttgcatcgccaccacccaatccaaatcttggagagctgtctctaccctgtgnggctcactacaggaaacataagagtattgtcacaaaaatgagcaacccgagatctagctgttactcccttatgaatgcctccgaggatagtgtcgacagtgtgatctcgttggattgctagttgactctcgggtgtgcgcgcttagctctcattctcctagtcttgaacaattgatttccactcgatcatctgcgcatcttg

SEQ ID NO: 76166 - DNA, 486 bp, Zea mays
  unsure (1)..(486): unsure at all n locations
aaactaagcttaccaatggacggaaaggccttctcatggacaatctagagagtctttttatcttctccggcttgaagatgagagatcctaccatgtgtataacccttaaggcctttatggctcagcaagccccaaagcatggtgtaatgcctaagagatttcttattactaatggattcaaaagtcggaaagccgatcctactctattcactaaaaccattgataatgatttgtttgtatgccacatttatgttgatgatatcatacttgggtctactaacanatctacttgtgaagggttaagacgatcatgaatcataaattctggatgtctatgatgggggagttgaatattttctatgattcaagtgatcaactccaagatggcacttcatttgcaaatgaagacattcatacatactcccatgttggaatgaagatgccagccatcaaacacccatgtaacaatggcatctcgactcacac

SEQ ID NO: 76167 - DNA, 256 bp, Zea mays
  unsure (1)..(256): unsure at all n locations
gaagcccacaagacaatcaacgaagaattctgtggagtttcaagagaaggttgtgtgttggatctatgctcttcaataagcaagctgcaagctaaagctagaagcctgaagatgattctcgagtacgcagaaccagcgnttgcaatcagcaacccgatgcccctcagaggccagattttgttgaagttccatctcctcgaagagtctgcatagtgaagatatgtagctgaagtaaagctatacccataacccttct

SEQ ID NO: 76168 - DNA, 199 bp, Zea mays
atgcaactagaccgcgctcctctcttgcacaatcaactaagtaaagggtgtcgtctaatacacccttaagagctagtgaaccatcacttcttctaaagacagacacatttacagttgggaatagacaattatatcccatattgcataattgactaacatataacaatatatatccgagcgactcaactaaaaacacatt

SEQ ID NO: 76169 - DNA, 391 bp, Zea mays
  unsure (1)..(391): unsure at all n locations
ctcggctgatccncaaagatttctttcctgctattactgaatctatggccgccattactggaattttgtcgcgctgagttcttgagctggaggaattcctgccaggaatctcgacgtttccatagtaactcactgcattaggagcgggtaggacatttctgtaaacttttctctcacttttactccactnttaccttttgggtgctntgatagtgactggtgtgtgtgtatgctcgagttctgttcatgaaaattcccttttactggaatttctggagtttggcatcttaaaacggaagggttaactttagcttcattagcattcgcatcgctagattattctggcttcataatgtgccgcgtataatcacgactgcataattaatagtac

SEQ ID NO: 76170 - DNA, 315 bp, Zea mays
  unsure (1)..(315): unsure at all n locations
acatgtacaaaatgtatatagacataatcaatatcatctcaatgtggaataagctcatgagttctatttagggatantagtaaaagtggaagcgcttccgatagtgctagaatcctcctaaaaactctcgataagtcatcacatatataactccttataatgtgtgtcagaggctanggcatgttgtggctgcttcctcacccacactacctataatttataccctgtctgaactagctacctggtgtggtatcaatataccacaaacanatctgaagtagttgacactgcaccacgttactagatactatactc

SEQ ID NO: 76171 - DNA, 440 bp, Zea mays
  unsure (1)..(440): unsure at all n locations
aattattatcaagtgaaagggcatgaatggtattttgtatgggttgtcgtccgtgccctataatagatgaacagtacccccgtactggagacgctgacttggcnattcggtattttgcgtcacgcttgtactatcatctctttcaaggtggagggtacattattattcaacgatatttctgttatacatgatacatataaatgttatgtgcttctgattcctacatttaatctcgcactgataatgatttatgaaggacgcccttcataacctctgtcaaaaccatatatctataggaatatgcttcgatgacaaggacttaacataacattctatgtgcttgtctaatatacattgaacaagtccaacatgcgccactcgggaactattccagctgattctgactcttcggacataactcgtatcgcgagaagttacac

SEQ ID NO: 76172 - DNA, 302 bp, Zea mays
  unsure (1)..(302): unsure at all n locations
ctatctcttgtatgtgagttccaatggcagatatgccctagctagggagatatgcngacgccaaatctgggttgtctcactggtcaccccgagacanaagtggtgtcaaaatgtgtcaaacgaatttggcttcggttcacaattttccagtgggttccttacgtagtttggctcctttttggtattcagactaagtggttntggcgccatttactaagtgaacacgcctgatctttnaaactatggttattntggacttagagaagattagagagctctagtgtgctttctacttanggaat

SEQ ID NO: 76173 - DNA, 307 bp, Zea mays
  unsure (1)..(307): unsure at all n locations
gcttctttatgcgaatctcacttatatgacccacacgacagtgccacatgtaagtaggacttaaatcattacgtcgaggccctttancactaatattacagatatgtgcattatcaagaattaaaatgaataacccattcataatggatgccaaagccacaaacatgccattcttagagatcacacaaccattggtttcactcgcagatgaataaccactcttctatcaacatgaaagagacataatgtttctacttatactaagaactacgatacaatttattaactccaaaataaatcctgatgg

SEQ ID NO: 76174 - DNA, 334 bp, Zea mays
  unsure (1)..(334): unsure at all n locations
gacatgagaagcattctaatttactctgtgtttgcttcaccaaaccgatgattcattttcacacaaattttatcaaccacaacatagaaaatctcagcccgataatgaaatcatcacaatgctttaaacagntgttgtgaacactattaacaccaccaacatgctcaggcaatgatttgtatgcgtgcttccaattaataaatcctgttctagtgaacacctcagagccatattgatcagcccttcctgtgtgcttaaagagaaaacaatagatacaatatgctgcatcttgggactcactatanttctatcaattaaatttttcataccatga

SEQ ID NO: 76175 - DNA, 311 bp, Zea mays
  unsure (1)..(311): unsure at all n locations
tatgtatcgggggaagtaaagtggatgatacgaagcactatgcatgacctgcttcggctgaacttgttgagatgcagcttcngctattttcttctgcttctggattgtaatatggcacgtcgtggtggtatggcccttgctttttccacagaacaagcaaaacaagtttcttggttgatctccgaatctccgccgaaacccctggcgccttctgctctcggagctggtgacctgaagaaagttngttgttgccccgaagcctgtgaagagcactgccgtctgttctgctgacttctcttatcatcattctg

SEQ ID NO: 76176 - DNA, 423 bp, Zea mays
  unsure (1)..(423): unsure at all n locations
atggtgcatgtatagttacaatgcatttgtatgcattgcaactatttttctcgagcgcgcatgagagctgcacaccattatattaagaagaaaaagatctaaaatagaccgatacaaaccgtcggagcggttaatgcacgaaaatagaagagggttacaagacagcagagagaacctgaaccacacaatacactaagggcaaatctgcttcagccccagtgcccctgctaagcaccataacctgggcttctncttactatctttgacaaccatgggcacactggtggaaattttatcaaaacacatgcattacgatgtntcacagccccangccaaagagcgccatcgagtaaagcctctctttctgttaagctctcacacactgcttcacatattggaactgaacgcagataggactactgt

SEQ ID NO: 76177 - DNA, 236 bp, Zea mays
  unsure (1)..(236): unsure at all n locations
caacacgacgcacttggaaantttgaaagtttccccgacccagatgaaaaagccctacgaatgagaaactacccaaaaactggaggatcggacctcggcgaccttcattaaaagaagaaagctgaagataccaaagcaccgggcacatgtaattaatgaccacaagcgtcgaagaaaagcagtcaacattagtggactagtcaacatcaacgtgcaagtgggtagaaccaccgaaa

SEQ ID NO: 76178 - DNA, 339 bp, Zea mays
  unsure (1)..(339): unsure at all n locations
gcatgcatctagaccggcttcttatattgcanaatcaactaaataaagtctgcatctaatacacccttaaaagctagtgaaccatcacttcttctaaagacagacacatctacatttgtaaatagacagttatatcccatattgcataattgacttacagatagtatattatatcccagagactcaactaanaacacattagacattgagtgctcatttgagaatgcaattttacctaaccctnttaccttgccttgattcccatcaccgaaaataattgaatcttgagaatccttattcttgacgtaggaggtanacatcttcttctcccccgcatat

SEQ ID NO: 76179 - DNA, 429 bp, Zea mays
tctggagagaacaatgtgattaaacttatatggaacatgataatacttcacgagtactcttatcagggatgcaacatggttgttaagctaaagatggtgcaacatacattttcttgtacacaaggtctcatagaagacaacgaggagattatatgtgtaaatgccttttcctttctcatttctggagtggagcttctgcgtgagacactttctaggcgttcactacagctttggtcagagtggctaaatcttttgatgttccataaaggcggtggtcttcctactaacttgtcttgctaatacattgcagtaagtcaattttattatctgatgcttatctgactaccttgttgttatgacgctcttgttcaactctatgtaacaaaatttctgctggctgggacattgaacctgtaaaataaacttttc

SEQ ID NO: 76180 - DNA, 390 bp, Zea mays
  unsure (1)..(390): unsure at all n locations
cgtgcatgtgagcacatatgagagcgtagctattttcttattcatctgnggcggcgatgagtctaattaatagaagaagtcaaaatcggctcaagcattcaggtgaaacaattagtagaaaaattaaagaggtcctcaatgctataatggctatgggaaaagaattcctaatgccaaanaattcaaattttccagaagttcacatgagaataagagacgacagaaaggcttacccacactttaaagattgtattggtgcacttgatggtacgcatattcgggtatgtcttccaccagatgacccaagtagatatattgtgaaatcangaatacccacgcacaatgttttggctgtatgtgacttcgacatgcactttacttatgtgtcga

SEQ ID NO: 76181 - DNA, 154 bp, Zea mays
  unsure (1)..(154): unsure at all n locations
ctaagcttgtacgcactcatagtatctagaaaaaaactctctaagctatgggtatatattgttaataactatggggagtaanaatcacgggcggaaggcccattatggcccattatagcccaagccataaaaaacaggttaaccctaatcagtc

SEQ ID NO: 76182 - DNA, 273 bp, Zea mays
atgctaatcttaacaaataagcatgcatctagaccggccttctctcttgcaaaaataactaaatacagttcgtcgtctaatacacccttataagctaatgaaccatcacttcttctaaagacagacacatctacatgtgggaatagacaattatatcgcatattgcataattgactaacagataacataatatatccaagagacctcaactaaaacacactagatatagagtgctcggatgagatagcaagtttacctaacccttttaccttg

SEQ ID NO: 76183 - DNA, 310 bp, Zea mays
  unsure (1)..(310): unsure at all n locations
gacaattgaagatatattaaccactgcgtcggtattggctcaaccggatattaataagccctttgatgtgtatggtgacgcatcaagcagtggcctcggctgtgtgctaatgcaagaaggccgagtaattgcatatgcttcaaggcagttgcgccgacatgaggaatattatcctaatcatgatctggagttagctgcngtggctcatgccctataggtctggcgtcattatttgctgggtaatgtctggcatatttatacagaccataaacagttgaagtatatctttacccagtcagaattgaatatg

SEQ ID NO: 76184 - DNA, 307 bp, Zea mays
  unsure (1)..(307): unsure at all n locations
tacgttgagcaacctnccggctntgaagatagtaagtaccctaaccatgtctataagctctctaaggcgctttatgggctcaagcaagccccaagagcatggtatgaatgccttatagatttccttattgcaaatggcttcaaagtcggcaaggccgatcctactttgntcactaaaactcttgacaatgaatttgttgtatgccaaatttaatgtgatgatatcatatttgggtctactaacgaatctacttgtgaagaatntagtaggatcatgacacaaaaattcgagatgtctatgatggggg

SEQ ID NO: 76185 - DNA, 326 bp, Zea mays
agcttgcacactccaccattctgtgacaggtaccctattattcgaaactatatttctgtgggtctggcaaccgagggtccggttctagagaacggacacccatcctctggggtggtgcagagctgtgtggtcacttagtctggtcccataccctaagcctacgcgctgcactgctctgcgacgcgtgttctattatttggaactgtgatccacggggtctggacacacggattggcttcccggtctaaatcctgcaagtctcgttgcgtgaatcacaagataaaagatactagttagtggcggtcctatgggtgcactactaaagc

SEQ ID NO: 76186 - DNA, 479 bp, Zea mays
  unsure (1)..(479): unsure at all n locations
tgatacatcacagataacaaagttgtcatcatacttatatgtcatatcatcatgggcacggcagcaatgtacgaagctcactctaacatattcaagatcttctcngcaattgaacagattattgttgacaccgtcactcattgaacgttgttgcttctcgagtcgccttatcatcctctaaatcttccgtctctcccctgcttttcttatcactctactttccagatgacatatacatcgaacanagggtgggtgctctctgttggctactgctcctgcctataactatctaatntcgctatatattatacgtatataccttaactgctgcatctactgatttggttttctcttcattcagaccaggataaactgagtctaaatcaagtcagctcactaatcttataggtcatctcaagtcagtgactcatcaaccaggtacttgacacactgtgatactcaacatcaatatatccata

SEQ ID NO: 76187 - DNA, 282 bp, Zea mays
  unsure (1)..(282): unsure at all n locations
agcacggaaacaggtgggaagctctcatcatgctcagaatgtgatgacaacatcaagacccctggagttacttcatatggacctcttcggacccgtcgcctatctaagcatangaggaagtaagtatggtcttgttatagntgatgaattttctcgctccacttgagtattctttttgcaggataaatctgaacccaaaggacccttaagcgctttctaaagagagctcaaaacgagtttgagctcaaagtgaagaagatcagaagcgacaatgggtccgag

SEQ ID NO: 76188 - DNA, 333 bp, Zea mays
gagagtccttacgaatgtcgaagtcttgcccgaacgcagccctacgtgccatgaaactattgaacctgacaaggtttcgcatgctacgccatactcctagaacccccaacttggaaactgttagaaatgatagacattggctgcatgattcgcaaaagaaaactactatttctgaatacaggctttgagaaaccactagctgcgacatcacactcatcaatatgcatgagcagttaagccagcagtacagcttagaacacaactctttgcacactcagggccagcggaggtcgagaattggacaccaaaacatgtattgggaacagccctcaa

SEQ ID NO: 76189 - DNA, 386 bp, Zea mays
actcagctatggacgacgggctacaacctacttagccacgagattataaactttatttttatttctgaaagaatattcctcgacatgagccaataaagaagcagcagacagcactattgacaagccgaactatcaacaggagttgtctcactgtgaaggttgctagagcgaagtcagagctatgaagagatcttcaggatatcagactatattgatccaaatttcttgaaagtttaacatgattattggcgatgcacttgatcacttcaaatggaactgccaagggcagagacaaacaccttgtttactactattaccactggcatgaagggggctaatactagcactcacacgaggaattgattgtgggacaggggtacttaagg

SEQ ID NO: 76190 - DNA, 141 bp, Zea mays
  unsure (1)..(141): unsure at all n locations
gaccttgtgcttggaccgaccacgtaacaggggggcacatcattaccctacccctagctagtctaagctacagagaacaagaccagcgttctcattggctggccccgtanacaaacaatgatagcaccctgcgtgctccta

SEQ ID NO: 76191 - DNA, 189 bp, Zea mays
ttctttggagtatgcctgaagattaattgtctccagaacatctaacacattaaccatcctcttttcttttggggtcactggtggacccatctggccttttcctggttcaacccttgccgaaagacctgaaacttctgatgttgtcgcttcttcaagccctaggtcttccatcttttctggtgctggcac

SEQ ID NO: 76192 - DNA, 114 bp, Zea mays
tatgaatgacaataaggctactataacaaggaaacctcatgatatgaactaaattacccttacaaacgtcatgcataacatcaattgtgaataaaagatgaaagttgcatgaat

SEQ ID NO: 76193 - DNA, 399 bp, Zea mays
  unsure (1)..(399): unsure at all n locations
catgcagcttgtcaacatattttggtacccatctcttgatggtgtgcatcaaagttattcaacaaagatctacgaacccaaacgtcctgtgtgttagcactangtaaactcattacctttctagcacaagntgcaattttgggttgcctagttatatgagaaataattgacaagctaggaagtgggattgtgccatgggacaatccttgcantgatgtcccttctttcngcatatgtagcataagcgatctttaagtcttgaagatttcttctttccttgtttctgcttgctacatggntagagaatattttcttttctaacataatgcctctttgtttaaataaggacaagatctaattaagtgtcccttctttgagcatctaaaacacaagttatca

SEQ ID NO: 76194 - DNA, 124 bp, Zea mays
  unsure (1)..(124): unsure at all n locations
gctgtttctttacctgatgaatagaaagctgagtagccctttgagcccaaactgcaccttacttattctcatatntactaaacagtttatacaattcatttttgacatcaacataatatgtact

SEQ ID NO: 76195 - DNA, 273 bp, Zea mays
  unsure (1)..(273): unsure at all n locations
gtctcagctcgacccgtcgcccntagaatctgtccggagcngtgctttatcttttatctgggtagagagaacaagggagttgtgatgataggtgtatctccgtccaacattggctgccacgcgtatccgcgagccatattcgtctcgctccccgagtacttcggatagagtcggggtagaaccgggtcggacagtcccgtcgttggcagctgaaagctgtgaccgatggttcggcaagactccgatcttccgctgctgacgtccccacgctgg

SEQ ID NO: 76196 - DNA, 280 bp, Zea mays
tcaggaacctttatacaagtattgaaaatgttgtttagccacggacaaggaccacatcaacaacactacacccaacatgactcaccaggaattcgcgaagtacaaactcgcggagaagatgcatatggagatatccgtcactgggtccttcagaaaccaaccagaactaagatctgaacggcaaagagcgtgagacaaaataagcaacgacgatagacctaataagctctagagagcatacgatctcttctccccacaagggatgaagaaacactatgaa

SEQ ID NO: 76197 - DNA, 491 bp, Zea mays
  unsure (1)..(491): unsure at all n locations
cactgtgtgtcaagagactgatggtatattgttattctctggtagtcatcagtcagattaacaaggaatgggattgttccagcgattcaatgggaaatactgcgccgtcgtccgaaagctagaagaataattcgagggtctggagtttcatcatatatgaaagagatcggaacacggcggccgatgtactgtccaagctctgatcccgtcggactcangtcccgcccggagtcttcgtgcaagatattcttcagccgagcatctcgacggatcanatagaagagtgcaacatcatagatcaacccaagtcagactctgatgactggagacaaccgattattatgtatataaagaatgaagaagaaccagatgacangaactcngcagagcgcattgcccagacatcagctcactatacactcattgnggaggaatatacangngngcgcgtatgcgtctcataatgtgtctccgtcacggaacactttgag

SEQ ID NO: 76198 - DNA, 330 bp, Zea mays
  unsure (1)..(330): unsure at all n locations
ttgactcaagcctagctaccggtgcatatgtgttaccaaaatctaaatcttctacttgtgaataccccttggccacgagtcgagctttgtttcttgtcaccacaccatgctcgtcttgcttggtgcggaagacccacttggttcctacaacaatttaattacgacgtggaaccaaatgccatacctcggttctcgagaagttgatgagctcctcttagcatcgcatcacctaatacgaatcttggagtgcttcctctaccctgcgtggctcaatagaggaaacaanagaagtatgctcacaaaaatgtgcaacacgagaatgagtgggta

SEQ ID NO: 76199 - DNA, 482 bp, Zea mays
  unsure (1)..(482): unsure at all n locations
aacacgtgatagggttgactaacgtgcatttcgaanaagatataccttgtgcagcttgtcaagcaggtaaacaagtgggatgagcgcatcacggcaagaatgtgatgaccacttcaagacctctggagctgctgcatatggacctcttcggacccgtcgcctatctgagcatatgagggagtaagtatgggttagttattggtgatgactnttcccgcttcacttgggtgttctttttgcaggataagtctgaaacccaagggaccctcaagcgcttcctcatgagagctcanaatgagtttgagctcaaggtgaagaagataaggagcgacaacgggtccgagttcaagaaccttcaagtggaggagttccttgaggaggaanggatcaagcatgagttctccgctcctacacaccacagcaaaatggtgtggtgagaggaagacaggacctaatcacatggcgagactatgctgagagtc

SEQ ID NO: 76200 - DNA, 291 bp, Zea mays
agcttatctatgctatactttgtgtgtccaggaaggtgttccactacttttacgcacacacgggtgttgtgtggacctcctttccgttaacggccattctccacaactctaatgccattggcaacatcgcctagtgggtcgcgagacttgctgaattcaactggaccttcagcctcaccacgctagcaagagctaagttctggctgacttcatcgtggaaaggacccctctccccagcgctccttgggagctggatcactatttggaccgcacacctacggagcccggtgc

SEQ ID NO: 76201 - DNA, 341 bp, Zea mays
  unsure (1)..(341): unsure at all n locations
tattcactaattgatcttccgatctcactcctcctaaaattatatctcctttagcaacatgatctctaaggaagtgatgaccgatatcaatgtgcttggtgtgagagtgntgtacaagattattaacaattntaacagcactctcattatcacacaacanaggtattttttctagaactacaacatagtcttgaagagttcgttcatatannagaattgtgtgcagcaagcacctgcggcaatgtattctgcttcaacgttcgacaatgcnnacactgtttgctttttagatgtccatgaaactagtgatctcccaagcaaatggcatnnctcggatatac

SEQ ID NO: 76202 - DNA, 310 bp, Zea mays
  unsure (1)..(310): unsure at all n locations
ttgagacattgcgggtatgacaagaatagcactctcttagtttgttggaagtcatactgtttgccggctcatggttgagcaatttaagttatccagctttatttgctttcaacgccatacttaaactgcgtgcttttctggaaatctaggtgtagtggtctcttggatctcagcaatccacattgttctaaaaatctgatggcatggtcttttggagtaccactcttcgttcgtctctaattgttgttagcttgtgtacttgctatgcataggttttgaccttcaccttaanaaaacaaaacaccatgta

SEQ ID NO: 76203 - DNA, 201 bp, Zea mays
tacttatttatataccggctgaacttttaatgacataaaaatttctgattccttcttaattctatcaacaatgagcacagtgacttctacatttattactatacaaatataacataccttttctaaagacttaataaagatgaatttctgcatacccctttttctttactataagtcttcccttattcacataagcaccct

SEQ ID NO: 76204 - DNA, 448 bp, Zea mays
  unsure (1)..(448): unsure at all n locations
ctatctcatactcattggatttagtagctaaatcgagctatatgatcattttggtggttaattaaagcaatgtgatcatgaatagcatcaacattaatatctctacatctagtacaaatggcaacatgctcaacagtagatgtagatgggttgcaagcatttaattcatcaatcttagcatgtaaaatagcattctcatttctaagactggaaatagcatcattacanacatttanatctttagccttagaaagtaagatatcattctcaatttaaggctagagnatgttcattcaattatcaatcttagcaataaactagcattttcattttaagactgacaattgaccatacanacattaactgtcaacctagcaataaactacatttcagtctaggatggaatgtgcatggcaatgtagctttagtaatttattttcttattctg

SEQ ID NO: 76205 - DNA, 297 bp, Zea mays
ttcgcccagcgctgctctctgcctcttccatggccgagctcgccctaacccccaacgccggacgtgctcctctgctccaccccatatgcagtggtggacccacaaattggctaatgctctggccgacgcgaccataacttgtaataatagtatataaagaataattgtacggcaaaacaacattgtcatagattgtaaagataacatacaatctatgatgtatctctctcccaatgtattatgtcaacatcaacatcaatgctttttgctcgagaacctttgatgagatcatattaa

SEQ ID NO: 76206 - DNA, 309 bp, Zea mays
  unsure (1)..(309): unsure at all n locations
caagcgagagaaaaagcttaactcggatcaaacttgacatgtcttagctttaagcttttagcacttaaattcttactttttatgcaatttgtggttcttgaaatatgcatgangtactgcacttanggggagtattcaaaactcaaatcactcatganaacccctagtgcaagccanaaatgcaaattcaccatttgcctatttttctctaaaactcttctagcctatggcacaatattttgaaatatatgagaaaatacatganggtgccaatacctattccaacaaagtgtattttgtgtgttataa

SEQ ID NO: 76207 - DNA, 482 bp, Zea mays
  unsure (1)..(482): unsure at all n locations
nggtgaactaatgagctctggctctcatcgtctgacactatcccttttccggcactcccgcttttcatggagatcaatattcgacaaggttcggtcaacaagaactttgngatatggttgtttcttttgttcatatagttttcttctttcaacttgtgtcgtgtattaatataaacttgaattcatctggaagtagccttttacggtcttgcttaattttttcgtgcaatcttcttggccgccccataaaatctcgtcctgcgtctatcccgtcggcttcccttanggtgtgtttggttggatgtacatgcagaaatggaagagagcggctacaatttttatagtgtttggatgagagttacgtangggcgagatgaataccggaagtagtntggcgacgtgatcctaataaatcgaggggacggtgtcgcccccgcctcattccactttgaccttatacaaacacatccttacgccatcac

SEQ ID NO: 76208 - DNA, 392 bp, Zea mays
attatttcagttcttcaatcttcactgtacacaggagaaatagtaagaactgctctctctagtaactccactgaaggtgcctttattgtttctaaaaatacatctcgaagtagcggcaacccctgtgctgcagacctggctaacaaatcagcatgttcattttgccctcgagggatattcttaacaaaaaatccttcgaaagaagcttctatccttcggactgtgtctaggtatttttcaagcttcgggtctttagccttgcaacttttgtcaatatgacccgaaacaatctgagaatcagttctaaagatcgccctgctgatacccattccctttaatttccgaagaccgagaacaaagcttcatactcagcaatattaattgtgcagctg

SEQ ID NO: 76209 - DNA, 476 bp, Zea mays
  unsure (1)..(476): unsure at all n locations
actaagctttgacaaacanaaactctattatactagtttcaaaatctctcaagtttgttctgatccatttatcactgtggcctttattttctccccctttggcatcaagcaccaaaacgggatcaatcttggccttctaaccccattgccttaccaaaatcttcaataagaatacaaaggcaataagattgcatgagatgaacttggaatatgttaccctctcatcggagtgcagtggaagtctttcatggtccaagtccaccttttccctttcaatcctccttcgagactaaatcatcaaactcaagcacatggttagtctcaaagggtcaagttgtagcacatctccccctaaacatgtgcatcactttgcaatggacttgtgagggccagggagtgttttacaacttgagcacctaatatgcagcaaatgcacaaggacatgacaaaagctaagtcatgtatgctacaattca

SEQ ID NO: 76210 - DNA, 392 bp, Zea mays
  unsure (1)..(392): unsure at all n locations
ctcctagagtcctaattttccatagtatctaataaaaatagttntatgattcttacgtcaactggggaattttggagcatttaaaatagcttaaaacctcgtttctagatttttagcaaatagatagtaatctcaaaaataaccaaactttttatttgaactctaaacattatttagaagctttgggtagagtttggtatgaattggaccttgtttgacacctaaaccccaaaaccctaccccttgccctttgaattctttactgactccggaaaccatagtttctcggagaaccgtgaaggaaaattatattcaagactttagaaagtaaacttttaatattgtgcatcctcgtgagcattacatgggcattcattcttatatatatatgg

SEQ ID NO: 76211 - DNA, 472 bp, Zea mays
  unsure (1)..(472): unsure at all n locations
tgacattggtctccttttggaagccaatgtcatccttaatgccagggcgtctntcattataaagcatgcttctggcaaatttcaaattttcaatttttatctcatgctcattaattttagcactaagttgagctatgtgatcattgatagcatcaacattaatatatctacatctagtgcaaatggtcacatgctcaacggtagatgtagagggtttgcaagtttttaattcaacaatcttagtatgtaaaatagcgttctcatctctaagattggaaatggaaacattgcaaacatctaattctttagccttagcaatcaatttttcattttcatttctaaggctagcaagagaggcattcaatttatcaatcttagcaatcaaattggcattaccatttctaagattaataagagaatcatcacanacatttaaattntcaaccttagtaataagactagcattctcggc

SEQ ID NO: 76212 - DNA, 403 bp, Zea mays
tgatcaaccgaagcccatgctcttatgtgaggacatagcacaacacaaggtgttattgggatctcaactgtccgaagaacaaaagaaaaccttgataaggtttttgttcaacaacaaagatgtttttacttggtcagctaatgatctttgcggggttaacaaggatgttattgagcactcgctcaatgttgatccatccttcagaccaagaaagcaaaggctttgaaagatgtttgatgacaaggcctaaagtgctcggaacaaagtgaaaagactccttagtgccggagttatcagagaagtaaaatatccagaatggttggctaacactgttatggtaaagaacgccaatggtaaatggagaatgtgtatcgattatactgatctcaacaaggcctgtccg

SEQ ID NO: 76213 - DNA, 468 bp, Zea mays
  unsure (1)..(468): unsure at all n locations
tctaaagggagaacacattntgggactaacagatgtgcattntgagaattatagggattgnagcgcatgtcaggcagggaagcaagttggtgttcatcgtccacacaagaacaacatgacgactgacaggccactcgagctcctacacatggacctattcgacccgatagcttacataagcatcgtcgggagtaagtactgtctagttattgtggatgattattcccgcttcacttgggtgttctttttgcaggaaaaatctcatacccaagagaccttanagggattcttgagacgggctcaaaatgagttcggcttgaggatcaagaaaataagaagcgacaacgggacggagttcaagaactcacaaatcataggcttccttgagcaggagggcatcaagcatgagttctcttcttcttacaccccacaacataatgggttagtggagaggaagaatagaactct

SEQ ID NO: 76214 - DNA, 390 bp, Zea mays
  unsure (1)..(390): unsure at all n locations
aagaagcaaaagaaagaggctcagagaagggtacaacatgtaggggtgcaaggacccttcatcaagtcaagatggtctcacatcccgattaccttctcccaagaagatcttcagctcaatgattaccctcacaaagatgctatggttatctcttgtgttatcaaaagatctctggtccataatattctggttgacacaggcagtgcatctgatattatatttgctaacgccttcaaacagatgcaagagcccgaagataagatccatgacgccacacatcccctttgtggctntggaagaaggcggattgtatcacttggcaagatcacgatgccagtgaccttctgatttatcaacaacacaagaactgaacaagtcgtgtttgatatt

SEQ ID NO: 76215 - DNA, 460 bp, Zea mays
atcaagaaccaagactcttcttgtagacaagctcactatgagtggttccttcttaattcattctacttattacgataagtaattacctgcatccacatttctttctattctaggtcaagcacttggcctatactagccatcttctatcatcccttcagtacagtcgttgctacgtgtatggtagtgaccaagtcttcatatccgagaagtaacggcgatccgaatcgattaatacccagctggggatctccaaccacacgacatatgtagcactcaacccttgcatatgtcaactcgcacccacgtttctcaagaccaaaatgggttcacgctaatcgagagcacagatactccacccgccagccttttgccacagaaggtacacactactctcgccatctctccactctcgctgtgctgtagcctttctggtattgtgcccaccgatgcatagcttacc

SEQ ID NO: 76216 - DNA, 403 bp, Zea mays
ttggagaaaatggcacagtatctgacaggcttggcctggcatctcacgcccgcatacataatgggttgcggcgtctctttactaaaaaaaaataccggggcctcccccagatgcaatagatccctctaccccaatattacatggcagagtccctgcctcacctaagaaggtcactaacgcacacaagaaccgaggcgttggggaactgctcgtgcaatggctaagacaatcaacagctgatgcaacgggggttcagctggaggactttcgtcgctgtcttcttggtggccacggcgcagacgacctgtgtttgagggagggggaaattatactgatgcatttgtaggacagggataccagagaacgaatcaccagcaataaaggaaacaacatataaggaata

SEQ ID NO: 76217 - DNA, 421 bp, Zea mays
cactagaaggtaagaaagcctcgcgagaggccttatgcctgttatctcgctaggccatctcttcttggaacaggggaggactactgacggaatgggctggcgcaagaaagaagcgggctcaagcccaagcaactcgtcaaactcgaacgctatctgtagcgtccgcccaacttttccgtgccacaacgccctggaacgtggaatggaattgagataagttggcaagattataggaagatcaattcagtcggctcactattgtttagggacatatcatcatcacatacgcatgtagtgccccacgcgcgagtatataaagcctaggggtaccccatcatttccatcgaccatctactcaactcattagcctttctccatacacgagctcttccttgtaacctaccacataaagatccacacc

SEQ ID NO: 76218 - DNA, 427 bp, Zea mays
  unsure (1)..(427): unsure at all n locations
gctagcacacagaatggttngaatacctttgatatgctatgactaacgtgttctcaaggctatttcaaaccaaggcatacgtatattgaaatggaattggagtcttcggcgaagacaaaggctttcactccgtaactcatacttcggcatcactccgagcaactctctcgtctctgggggagaaatgagcctcacagaaaacgacttcattcttgggggagagaagaaaagctcaaacgcaaaagggacttcggctttggtataatcttaactcacttatttataaccaaaggggaagctcgcacttcaagggctctaatgattccgtttttggcgattcatgccaaacaggaggagaaatgagcccaaagcaaaaagaccgcaccaccaccaatttcaaaaacttagtggtttcaaagaagtattt

SEQ ID NO: 76219 - DNA, 429 bp, Zea mays
agacaggatatgtagcgcatgccaggcaaggaagcaagttggagtccatcatccacacaatatcatcatgacgaccgacaggccgcttgagctactccacatggatctattcggcccgattgcttacataagcatcggcgaggagaaggattgtctcgttattgcggatgattatatctcgcttcacttgggtattctttttacaggaaagatctccgacccaagagaccttaacgggattcttgagacgggctcctaatgattgcggcttgaggatcaagaagataagaagcgactaccggacggagttcaagaactcacatattgtaggcctccttgttgaggacggcatcaagcatgagatctcctctcactacatgccgcaacaaaaaggcgtctatagagaaagaatcaactctattgacatgg

SEQ ID NO: 76220 - DNA, 442 bp, Zea mays
gatcttaagcgactgagctgcagctaatgcctataataattgtttaacttctttaagtgcccagctcccatggctcgggattatgagggctatattctatatcctgctaattatcctgagcacaaaattaagagaattcatgctatgaaacctcattttgtttctcaccatgctcttatatataagaatgagtcttttacctttaagcaatcaacccatgttaaattgcctaaaaagaaaacttctactgcatcaaatgagcctaacatttcatttaatacttctgatgcatcatatgttttaactaacaaatcatgcaaagtagttgccaaatatgttgggagcaaacacaatgggtcaaagacttgtgtttgggtacccaaagtgcttgtttctaacgtgaaaggacacaagactgtttgtgtacctaataacaagacct

SEQ ID NO: 76221 - DNA, 438 bp, Zea mays
  unsure (1)..(438): unsure at all n locations
tangaatgaactanacgtcttagactcttataacttttatcgaaatcctgcacacattgcacattttatacccttgatagtgtcatatctctctcatttggtacaaatgcatatctcttgtttttcttatgccaaagcttagactaatgtgtttccaagtgtatttctatgcttagtcttacattgaaagggaaatggattaataggcaaaagcaaggcttcccctacgactttgtcggtatcatataccctctgccctactcgtgtatttacattcatatctttcttattgaaggcctctagctgtttcttcatttttggcacagggggattaattaataggccaaagcataaggaccgcaccaccaccccctgtttttctaagaatcttctcacatagaggggggaataaaatagggggagacattaatagccatt

SEQ ID NO: 76222 - DNA, 428 bp, Zea mays
  unsure (1)..(428): unsure at all n locations
nagccttttagaaatcagtgacatcttcatcttccactttataaatcagcattgccttgtcttcatctcaagctttacaaatcaccattctatcattagttcatgctttagagatcagcattctatcttttggggttaatgattcattgagtgtaccggaggcgcacccaatgggtgtagcccccacactctgagtggattactgaaaataatccactcaaaggtcttcatctcatgctttttagaaatcatccttttatcttcgttgaatgccttagagctcagcattatatcgctagctctatgctttagaaatcaccatacacgtttgtctttgagatcaacaacgcggtctacccatgtcctgttaagttttgaaatttatgtgatccgcgacagactggacatcccgtagatggctctctgct

SEQ ID NO: 76223 - DNA, 466 bp, Zea mays
  unsure (1)..(466): unsure at all n locations
taatcatcgtgctcaaacgaaacttcgctttgattctgtttatcacaagaggaagagcttcgggaaaatcaaaanagtcaacaacaaaaatttcaagaaagtcataatcaaatggccagagttcgctccactgccagggttgatcgtgagggagatgagaccgaagctactgagactgttctgatttccgaagcaatgaagcagtctgggctggtaacattggaggacgtccctgtcactgaagcagagcaagctgatgctgaggagaccaagtctgaagatgattatagcagcgcggtgtcgagcaaacccagccatctggatttcagaaaatccaccatctccgaaggtgacttacctaagatgctgannatgngctatttaagtgaagaaaagaaagagctggttcattntggtggagaagaaactactccgaagccaggaaaagatgaagtagtaatcttta

SEQ ID NO: 76224 - DNA, 436 bp, Zea mays
  unsure (1)..(436): unsure at all n locations
agcttctaaagggagagcacattntatgatttacaaatgttcattnagagaaagacaggatttgtagcgcatgccaagcaaggaagcaagttggtgctcatcatccacacaagaacatcatgacgaccgacaggccactggagctcctacacatggatctattcgtcccaattgcttacataagcatcggcgggagtaagtactgtctaattattgtcgatgattattctcgcttcacttgggtattctttttgcaggaaaaatctcatactcaagagaccttaaagggattcttgagacgggctcaaaatgagttcggcttgaggatcaagaaaattagaagcgacaatgggacggagttcaagaactctcaaattgaacgctttcttgaagaggagggcatcaagcatgagttctcttctntctacaccccaca

SEQ ID NO: 76225 - DNA, 124 bp, Zea mays
gcgcaccaagaccaagaaaggaaaaaccaggaccaaagaaaccaccgaagaagccaaaacatacaaagcagacgaaaaacagacacagtgaaaaccccgacgagaccggcgccgaaaagcagcg

SEQ ID NO: 76226 - DNA, 205 bp, Zea mays
tatttacgtagtgagcttggactttgcgtaattagcttggactgattataacttatatttaatctagcaatgaaacagataagggagaaggttgagatttattatttttaattacatgctttatcttaacagaataaattgaacttcaatttaccttgaataacacattaatttagtaaatgatctcattataactatataatac

SEQ ID NO: 76227 - DNA, 323 bp, Zea mays
aacttcggaagaagaaagtgttaaatttccacatattcataattaaacggccagagtgcgttctaccgccacggttgagcgagaggggggcgaaactgaatctgtggagactgttcccatcttcgaagccatgcaacgatccgggctggtgacttcggaaaagatccctagtgatgatgcacaacaagcagaacaagcaatcgcttgagtacaacaagaagatattgaggaaactgatcccgaagatgattattgcattgccatgcgcagcaagcccagccacctggacttcgggaaatctactgcttcgaacgctgatttgt

SEQ ID NO: 76228 - DNA, 402 bp, Zea mays
agcttagttcatgtatggtagtatatggttttaatcctcgagctccaattgatttgctacctttaccaacttctgaaatagtgaacttggatgctacacaatgttcagaattcattcttaagttacatgaaacaactaagttgccaattgaaaagatgaatgaaaagtatcgtattgctgctaataaaggcaggaaggaaatgaaattggaacctagtgacttggtgtgggttcatttgagaaaggataggtttccggatttgagaaagtctaaactcatgccatgtgctgctggtccttataaagttcttgcaaaaattaatgataatgcatatacacttgagttgcctccagaatttggggttagccccacctttaacatttgagacttgaagcatatat

SEQ ID NO: 76229 - DNA, 445 bp, Zea mays
  unsure (1)..(445): unsure at all n locations
tcctccatcattttgtgatatgcaagttcacctaancatacatctcgtggatcagataanaatattagggccactatatttacatcatatgtttcagttggagcgatacctaggagtattaaaaggttatgtgcgaaatcacgctcacccagagggttcaatcatggagggatacactactgaagaagtgattgagaactatatagattacatcagtgacggaacaatgataggtgtgcctgtacctaaacatgaaggtaaactatgtgggagagggagaatgggcaagaaaacttttcgcgttgaggattacaagctagtacattgtgctcatggtagtgtactacaacatctcacgatagtcgagccttacatagaggaacacctggatgagcttcgtaaagaaaatcagaaccgcacagaggactggatcatgatggagcac

SEQ ID NO: 76230 - DNA, 471 bp, Zea mays
gctttgatgaaatccttagcgatagaggagaattttgtgcatgcatcggttctcgaggatgcaaaagctggctgcgagcatgcaaaggctgtaattcagccataattctcagtctcagcgagtgacgtcaaggatccttcagtcaaaggtattgcccttagcagaaaattttattctgaagtttggttgaatgctggccgagaaacagcagacaaggctattagacaaaatgaaaaagattctcatactgcattagaagaaatgaggaaaactaaagaaggtgcagaatgtgaaaggcttataagtatgtttgtcatgatttatgatagaagacgcggcccgatcttccgtgagatacgataacttgattgagtggagatctcgacgttgatgatccaaggctccgagcgaatggttcctcgcaatcactacaccacggctccgttggttatcacccgtgacacacgaatg

SEQ ID NO: 76231 - DNA, 446 bp, Zea mays
  unsure (1)..(446): unsure at all n locations
agcttggtgccaatagagaagcagaagtctttttgtcttggctgtcaaattttttgccggtgtcaactgtgagctcggacgggactccgaatcggcaaacaatgttttgccagaagaatttctgggccgtcttctatgttatcgtggatactgccctcgcctcgatccacttggtaaaatactcgatggcgacaaaggtgaacttgaggttcccttgggccgtgggtaacgacccgataatgtacaggccccaccgttgaaggggccacgtgtgggcgatcagctttgtgaactgcgaagggtttcccgagcgtggagataatttctggcaagcttcgcaagacctcgtcacccgattcgcggcgcanatcatagcaggccagtagaagccttgacggatcaccttggcggctagggcgctgtgccctacgtgagaaccgcaagtg

SEQ ID NO: 76232 - DNA, 401 bp, Zea mays
  unsure (1)..(401): unsure at all n locations
aagcaggcaaacaggtgggaagctctcatcataccaaaaatgtgatgaccacatcaagacctctggagttgcttcatatggatctattcggacccgtcgcctatctaagcatagaagtaagtaagtatggtcttgttatagttgatgatttttcccgcttcacttgggtattctttctgtacgataaatctgaaacccaagggaccctcaagcgcttcctaaggagagctcaaaatgagcttgagctcaaggcgaagaagataaggagtgacaacgggcccgagttcaagaatcttcaagtggaggagtaccttgaggaggaanggatcaagcacgagttctccacttcctacacaccacagcaaaacggtgtggtagagaggaagaacaggacgctcata

SEQ ID NO: 76233 - DNA, 446 bp, Zea mays
  unsure (1)..(446): unsure at all n locations
agctngaaccgagggcccgcgtcaccggagtatgttcttatctctctcaccggagttcaagaacttccccgcgcgcgtggaccgggtaaaccctttcaccatttcccgattcgttgcgcgcatggcctctgtgtcatcccgtgaagctcctcgtgccccttaattgaactctcccgccgtggtttggccggagcaggcgtcgccgtcgatccccgccgcctgtgttcgtggccaggggagctccgaccacctctgacgccgacccgcacatcgacgtgaccgtcgcgacctcctgaacatcttcgaccacctcgccggacctccctcaccgccggtaagccgcgccaccctttcttttcccgcggctactgtttcagttaaaggagggactgcgggtgagagggagagaaatccatggggttaagtgaaaagtcagtgactccagt

SEQ ID NO: 76234 - DNA, 479 bp, Zea mays
  unsure (1)..(479): unsure at all n locations
aactcagctnttctgcanactattaaagttgattcttgctaaaagccttttcttgattcccatatccagcatatctttgagagtcttttccttagtcgggtaagacttgcgaaaagagacttagataatttagtnnnngaacccatgtttttgcaggtaatcaagagttttctatgtgtccttgtggctagaagatgcttctagtcttanaggaggattagttagtgctggggacttgttctcaaatgctatgaatcaagaacaaggcaacatagaatgttaaatattaacgcccttcgtccttcaaaacattatttcccttaggatataatgatcttcagacgaaggtcataaagtacataccttcgtacatcgaaggtatgatgataaaaaaaggaagcgccgaaaatacaaaagataacataatcaatcatataacattatccattcatctccattatattatcatgagagaataa

SEQ ID NO: 76235 - DNA, 437 bp, Zea mays
  unsure (1)..(437): unsure at all n locations
ctgaccacacatcagaccactctttttatgctgcctctgcaagntggtaaagagaccgatcgacccgaaacaaaaatagggggtcgtacaaaccgaggatcaaaccacgagcatatatatatcatatatactgcatgtaataaaccataaacaagcattgatgttcacggtcccaaaaggtgcaatccccacaaacatctcccaccaccatgtggccaaattcgggggttgctgctagtacagcgtaacaacacaataagttgcacgacaccactcccctgcagccctacaataatcagccttgcaagtttttgttttgcttaacccattgctacaatcactggtgcagaaaataaacagctcaatcctatggtaataataagagaaagaaatgcctaagcgggtgctaataataagcagcctcggaatggcgggag

SEQ ID NO: 76236 - DNA, 307 bp, Zea mays
actctcgcttcggcggtcttttgcgcccttaaggcgttgctaagtattaagccctacacaaataatatgaatggatcaatataagaaccaaagactaattcgaaattcatagaattccaaattcacaattttcgtaccttcagactgttatacgcaaggctatccgcgagatccgccttcgtcatggcacaaaggccaacttcgagcttcggaaagcccatacttctagccatctcctagcagacagataattctttggtgtctgggaggcaatataagaagtcatctttgtctgtgccattaaaca

SEQ ID NO: 76237 - DNA, 356 bp, Zea mays
  unsure (1)..(356): unsure at all n locations
aagcctttgaagactnttcacttgttatgatcacagccatttttacacaccatcatggggtgaataccgtttgtacattcatagaggagacggccgaagaattctttggagcacgtacagcattttacacgtgaaatttgttcagaaaacattactggagattgtcacatggcgaaaaggaacaagatccttgcttgtgaattgtgatgcaccttgtatgcgatgcacttgaatccaaagtgcacgtgtgattttattgtctgaacgaaccgtgcgacggcctgatgtttcctgtggtattgctgaggcgtgatcaaactagtccctatcgttccagtatttcacgtttgcctttc

SEQ ID NO: 76238 - DNA, 411 bp, Zea mays
cttcgcccgggtcgccgtctgaggccgggccaggttccgccgagggtggaaacaacgctgagggtgctgctgcttctcctgccgatgcctgaacctgcaagaacagtttgtctatagcatgcgcatgtttttcgcggccgctgaggcctaaacactttatcgtcgtgttaaaaagctgtgttttctttcctctcgtttcgagcatcacgacatgtctgtcagtaacagaatcgtttatccaagcgagagttacttctcgcggaaggtgatgaatgaggtatccgtatcccggaggcgtatgagttcctctgctcggtcggccttgccgcttacgtgtactctcgtttggtcggaagattccgctattgatacagtcgagacagcacgaaagttgtttctacccgagtgttg

SEQ ID NO: 76239 - DNA, 398 bp, Zea mays
  unsure (1)..(398): unsure at all n locations
tgatcggattgcttacgggacgacgggaaattccggtgatgagatcaagtgtggaacaacatgtgatntaggggcgaaagggaagacgggaggggtattgtctggtttaggttctatatattttgcaccaacgattatgcacttagatatagatttcttttatatctatgtacctagtagaaatagtatatttctaaagttaaagaggtgttataatttataatgaaggggacagcttcttattgcctagcaaaatagaagtctaagaggagatgatgcagataaaataatcgttacatgccaaaggagcccaatttctgacatagttaccctatttcgatctaattccctgacatagttaccctgaccaagatggatctgaccatgataaaactagt

SEQ ID NO: 76240 - DNA, 386 bp, Zea mays
agccacgagccactggagatcaatttggaaggccattcttgccttctatcgagtggtgcaccggacagccactgttcatgttcggtgcgcgatctccttccatatcgggtgcagccgaccattgctcctcgcgactagttagcgcaccgggcactgtccgatgcacatcggatagtctagtgcacccaaccggtcgttggagcgagccacgtgtcgcacgctgatcgcgcgaacgaccgttggccactggcgccgttggctcaccggacagtctggtgaattatagccacatcgccttttccgtttcccgagagctacgagttcatcgcgaatgactcactggacagtccggtgaattatagccgtacacctccatcgatatctga

SEQ ID NO: 76241 - DNA, 431 bp, Zea mays
  unsure (1)..(431): unsure at all n locations
agcttgacaatgaagagatggcgctcgttatctatagctttcgccaaatcctcaaacaaaggagggggaaagactacnagtcccgctccaagaatgtttgctacaaatgtggtaagcccggtcattttattgctaaatgtcctatatctagtgacagtgaccgatgcgacgacaagaaggggaagcgaaaggagaagaataagtactacaagaagaagggcggcgatgcccatgtttgtcgggaatggaattccgacgatagctcaagcgactcctccgacgacgaggacgccgccaacatctgcgtcaccaaggggcttctctttcccaaacgttgccacaaatgcctcatggcataggacggccaaaagaaggttaaatctaaatccttcactaaatatgaatcctctagtgatgacaatgctagtgat

SEQ ID NO: 76242 - DNA, 400 bp, Zea mays
  unsure (1)..(400): unsure at all n locations
atggcactgagtcggttcttgctggttcgttgcaagctgcttccggtggcggccttacccctggtcgtcaattgatctctcatgatttgggggtcccttcgttcttttccaacctccaggtactgtgatatactttagcttgagttttacaccgcataaactgctgtcattacactcatctattctccttatcaagctttggtggacgggatggctagccagctgaggttacagggtgcttctgttccagaagtagcttcgtctcttgcatgttggaatccagtgttacttcaacatcgtgtctctgacttggaggcgaccaatgctagttagtggctttttgcttcttcagtattaaactgctttacattctgaccncttntgtctgattgtcctcctc

SEQ ID NO: 76243 - DNA, 396 bp, Zea mays
  unsure (1)..(396): unsure at all n locations
tagctaaagaaacttcgaacctgatccacagtggctgacggtctccactctaaaatatcattgaccttgctgggatcgaccacaatctcatttgcagacaatacatgtcccaaaaattggatgtcctccagccaaaacacgcatttgctaaatntcgcatataattgatgttcccttaagcgcgttaatacgatccatagatgctgagcatgctcctcttcattcttggaatatatcaagatatcatcaatgaagaccaccacaaatttgtccgactcgggcataaatactgagttcatcatatatgtgaagagggcaggggcattcgttaatccgaaagacataaccaaatatttcaataatccgtaccgtgtagtaaatgccgtcctgngtata

SEQ ID NO: 76244 - DNA, 222 bp, Zea mays
  unsure (1)..(222): unsure at all n locations
aaacataagganggactagccnnccttncacctagccctcgattaccttttgggttatcatgggtagcctatgctaatgctttaacttaatcaatgaacatgatgtgactatttatgatacgacgatgctatcccaacgatgatactgcgatactttagggggctcgagcagtttctcgagtgcctctccgcaaggacctgttcgttgagagacccacccgg

SEQ ID NO: 76245 - DNA, 438 bp, Zea mays
  unsure (1)..(438): unsure at all n locations
agcttatanccttatatacaaaagattattatagttgttcaagcaanccttaactaccaacgtgccaacagctttctagaccatcaagttagatctaaccgactaaccgtatatcacatttaacatttaaactcttccaccggacgctctcgcaacattataaaagaacctcctaacaaactactattacatctaagattggattatgatctaactgactagaaggctcgcttacatgtttacatctaagacctgcttgcacagaagtcgttgactatacaaattaggtaatcatttctggtcgaaattgttctagtcaatggtttccttgaaaccaaacacgtctntagttttattccactctgtgttgctatctttggagcatcttcactagttcctaaagactccttaaatttattagggtgctagaataaaaaa

SEQ ID NO: 76246 - DNA, 430 bp, Zea mays
agctcttaaccaagacaatagagctttagtttatgtctcttctttagctacagagctgtaggaaataccatggacatctttgtacaagccacctcagttgcccatgtacgatagtcattttgatccgaagcagttccttatgagttacgaagcgacgatatcatcctatggtggcaatacagctgttatggccaagtccttcgtcatggcagttaagattgtttctcaaatctggtactcctctcttaggccaagaacaataatgtcttgacagaaattgaaagatatattgatcacaagctctcaaatgttttagacgaagctagtgaatgctcaagctgtattccaatgcatacaagatcaagaggaatatctacaggcttatgtctgaagggttttatggcttacagcccaagcatccacgtaccga

SEQ ID NO: 76247 - DNA, 384 bp, Zea mays
  unsure (1)..(384): unsure at all n locations
tgcccgaggaactgaccgttttgtgtatttttaacaccgncgcgtcgttcgatgaatgttgttgagggtagtgtccacgtcgaccggccaacccgtagctcctccagactgaaagggaaatgtgcccttgggccatttctaagtattttggtgattgagtgccaacacaagtgcttaaatgtgaattcatgattatggatggacaaagtgcaaaacaagagcaaaggtatgtttctaagtcttagtacattggttttgtgtactaatatacttgtctaagtattagaaacagaaagaagaagataagagaagagttggctgtgtacagccaaaaggctgtttcggtctggagcaccggactgtccggtggtgcacccgacagtg

SEQ ID NO: 76248 - DNA, 393 bp, Zea mays
aatactgtatctctttgtgacttaacacgattcttccttgttcaaagcattctttcgaagatcgatattgtgtccccttcttgcgccatatgcagcatgaagtatgatgcttatgccatgcgaaatgatgtgatgatgttatgctatgtaaaatggtatttattctgaagatacacgcacatcctcgcaataaaatacataatctatttagatcaacgttgatttttcgctgtaagcctcccttaagagcttcttcgccttttacttcagcggaatcagcgtttatttttcgctgtaagcctcccttaagagcttcttcgccttttacttgtcgcggtattcgcgttgactcttcgcgctacaccttttacttaagcggtatcagcgcttatt

SEQ ID NO: 76249 - DNA, 460 bp, Zea mays
  unsure (1)..(460): unsure at all n locations
cacgcttaacaacttaagcctatagaggaaatatatttttcttgttgcacacaacgaaaccattacgtgagatttgaaaagtgtcctttattacacagaanataaatctgaatggaaaagactactatcaaggtaggatatttgtcaataaatgtgcttcgactctggcacagtgctattgactgtgcgagcttcggactgttctctgaagtccctttggtgttgagcatattggcccccttctggctgctggccttgttgcagcggtggtgaacgcagaggctgttgccaggaagcttgagggtgactcgccgaagctacagaaactgcagggtggttgcctacatattctgggatatagggcgaatgatacgaagcagtgtgcatgatctgcttccgctgaccctgttgagctgcagctccagctatatccttttgcttatggatggaacatggcaca

SEQ ID NO: 76250 - DNA, 448 bp, Zea mays
  unsure (1)..(448): unsure at all n locations
agctntaccttgattcccaaaagctagcatattcttgagagtttttttccttagacgggtaagacttgcgaaagtacacttcgtactcagggttttcgaacccatgttgttgaaggtactaaaattgtgctgctatggatggtgttaagcaccggtgggcacgaccttcttatatgtctaagtaactcttctatacttcttattgaggatggtcacttaagctagcatatatttctaacttataaataatttataacatttcaaagtttatttctttgaatcaattttgtaaccactctaataaacataatgtaaatttgttgtaacttgtaactttttgtaataaagaaattccgctgcaaaatgttggtgtgtgatttgtgttttcttaatcttgcgatcctggttgtaagtggnttatctgaggtctttggagcactcagacgga

SEQ ID NO: 76251 - DNA, 523 bp, Zea mays
  unsure (1)..(523): unsure at all n locations
agtttcacgggcctctcanngggaagctatccgagggtcntgtgactcgtatcggatggagggcnngggaaaggggggttggctcatcggtgnnggatgcccttcnngggtggcntttctggcggnngtcgcgggggagggggtcgccgnngagctcatgtggccgaagctnnntggggganngttaggggcgtggtaccggagggaagacantacggtgtgaaatgcagcccaagccactggggaccgggcttttattatgtcgtggcgccgggccgtggtcacggggcgggccgcgggccgcgcggnggttcgcgcacagggcgtgctttgagctcgcccccgagtgtcagcccgcgtcgaacacgtgggagctcgcttctgccatggttcaacggcggatttgagcaccttagcatgcgtatcttggcaaaaccactgtgtacggtctcttccctgctccatatcctacctttntgctgtgagttccaagtcaagatatggtcggggtatggagatagag

SEQ ID NO: 76252 - DNA, 438 bp, Zea mays
agcttgaatacgccattaatggagacggtttatatctgttctacaggggagaggaagagctctgtatccattaatggcgctgggaaagagaggaaactgctcgctcactaaagaggaggaaggggagaggaaacatcatcgcagtgggggaagaagcgggcgttcgtggaccttcgtggcctacatcggagatgagcacgcgagcgcggaatctgactcgacggcagcgattccaggctgctgcgtgtccgtgctcagcaagagccgaacagtggctgaacgaccaagttggcgatggggcccatccgcccatatgtaaatgaaaagaggaagatgagaatacgtgaggaggggctgagccggatgagccacaccgctgggaaagaaaggagagtacctgacaaatatgtctcacagcacataggaaaaaaagtatga

SEQ ID NO: 76253 - DNA, 398 bp, Zea mays
  unsure (1)..(398): unsure at all n locations
ctattaagcatgcatctagatcggcattctctttcgaaaaaacaactaaatagagtttgccatctaatacacccttaaaggctaatgaaccatcactccttctaaagacatatacatcaatatttgtaaataaacaattgtagcccatatgacataattgacttacagacatcaaattgtacctgagcgactctactaaaaacacatttgaaatcgagtgctcgttcgtgatggcaatcttgcccaaacctttaaccttgccttggttcccatctccaaagatgatagtatcctgngaatccctgttcttgacgtangaggtgaacattttcttctccccatgatgtggtttgtgcatccgctgtcgataatccagcttgagcccnccggatgcataa

SEQ ID NO: 76254 - DNA, 299 bp, Zea mays
cacgggccttaaacgactgagagggagacactacaccgagactctctgtcccgagcaagtcacccgccccgcctcagcataaggcatctcaacgccaagcgtgggaccagacagaagacatctcgtgcgaaggagaacccatcatggccatgacggagccaccatctagtcttactatccaaaacaacccacccactttgcaacatcatgttctgagaaaacaaaacattttgctctgctaaagcgaagctaagcataagaaaaaccctttgcaaaagagggatctaaagagaagaatc

SEQ ID NO: 76255 - DNA, 441 bp, Zea mays
  unsure (1)..(441): unsure at all n locations
agctttgaagtatntgaaaaggcaagcctatcttgttctgttccatgccaaatgggttgagtttatcgaaacatttccatacattgtgaaatataagaaaggttaggacaatgtggtcgctgatgccttgtctcgaaggaatgtgttgaatcaactaaaagtaaaaagtttggggcttgaaaatttgaaagacatgtataatgatgatcctgaattttcagaaccatataatcattgtaaagatggaaaaggttgggaaaaatatcatatacatgatggatttttgtttagagctaacgtactttgtgtaccaaattcttcggttaaattgcttttattgcaggagtcacatggaggaggtctaacaggacattctggacaaaagaagacttacgaaatgctcagtgataatttctattggcccaagatgaagagagacgt

SEQ ID NO: 76256 - DNA, 379 bp, Zea mays
atgcagcttatattactctacggatgagagtctttctttcgttacatcgaggccaagctatgtttgattggaaatgccttcatggttcttaaaccctaagatatgttacttatggaagcaattctccttgtggattagctattcagacgtacattcttgtcaaaaatgataatcaagcttttgaataaaaccacattacaaatcataaacgcaatgtatgaccttgcatacctatcttttccaaaattgtggatagacgaacctaatgtcgcctattagatctttttcaaagtggaaagtaccaaactagagatgtagagaaggggtgcacgagcccctgtaaatgtatttgcattgatcttgcatataaatcttacaa

SEQ ID NO: 76257 - DNA, 450 bp, Zea mays
atccccacatgtgctaagcggagatttttatcttttctctgtctagcatagcaaacaagcatgcatctagaccggactcttcttttgcacaatcaactaagcaaacgttgtcgcctagtacacccttatatgctagagaaccatcacatcttctaaatacacacacatctatattattgaatagacagctgtaacccatattgcacaattgactaacagataataaattatattccagagactcaactagaaacacattagagatagagagctcatttgaaagtgcaattatgcctaacccttttaccttgccttggttgccatcaccgaatattattgaaccctgtgaattcctgtctttgacgcacgaggcgaacatcttctctctccccgtcatatggatagggcatccgctgtcgaaatccaacttgaacccccggatgcataaac

SEQ ID NO: 76258 - DNA, 413 bp, Zea mays
agcttcatgaagaggaaccttcggctcttttatacatttgtttcagccgaaagccgcttctttctatgagaccttcggcgacgaagcatagacccaacagtagcccctttcgcggtgctagatcgtttttcgtaacgagcttgatccgtgaaaaaagtctcttaagcttcggggagccgaaggtccaaaaaacaccttccctgagctcgttgtcgagaaacgattcagtttcccagcgcgtagcggtcccaccttgcagagttacttattggtctctgcggtccacctcgcagcgagtgcgagcgggtgcccgcctggtgtaaaaatcctggcgcttcgccttcttacctgcagtactatataaacagacgagtaggtgtgaagttaccacagcattcattggctattgcact

SEQ ID NO: 76259 - DNA, 387 bp, Zea mays
  unsure (1)..(387): unsure at all n locations
gaccctgcgcagcttgtcaagcagagaaacaggtgggaagctctcatcatgccaaaaatgtgatgacaacatcaagacccctggagttacttcatatggacctcttcggacccgtcgcctatctgagcataggaggaagtaagtatggtcttgttatagttgatgatttttcccgcttcacttgagtattctttctgcaggataaatctgaaacccaagggaccctcaagcgcttcctaaggagagctcaaaacgagtttgagctcaaggtgaagaagataaggagcgacaatgggtccgaattcaagaaccttcaagtggaggagtatcttgaggaggaaggaatcaagcatgagttctncgccccctacacaccacagcaaaatg

SEQ ID NO: 76260 - DNA, 425 bp, Zea mays
  unsure (1)..(425): unsure at all n locations
agcttaaagacatgctggtcaccatctttttttggtttcanaccaagccagncactggtcaggccttgttccagtgcacataagaccatgaggagtaccttcatgcgtatgtctgaagattcttgcgtctgatagcacaagcgcccacagtgcccaatgaaatcgtcattgaggccatgatcaaaggtcttcagccatgtcctacggctcaatattttgccaggaaaccaccccatactctggagaagctgcttcagaaaatggatgagtacatccgggctgataatgatttccgcccaagaagggaggaagcttacaggttttctgagatgactatgggcttcggaagaagaatccacaactccagacagaggacgccagcttcagaggtcacagcaaggctcacagtcttcaaggcagcagca

SEQ ID NO: 76261 - DNA, 385 bp, Zea mays
ctttcgcgtgccttgggaaggccctgagcaatcccctttatagatacaaggggatggttcagctatacatatgggggtgtagctatgtgctaacgtggccggcggagaagtgcttgagccttgtagaagcgtagctggcggtgcggccctgggtcctgctgacgtttctttgccttcatagagagctgagaacaatcgacgtcatggatgcatgcagggaaccatcattacctgttgccggagtaatctagatgtgacaccggtcttgttccttcgtagcctgaggcggctagctaggggtagggtaatgatgtatcccttgtagcgtagtcggtccgaggccgatgtcgggcgaggcggtgaccttctcccgaggccgatgctg

SEQ ID NO: 76262 - DNA, 412 bp, Zea mays
  unsure (1)..(412): unsure at all n locations
agcttctaaaaggagaacagacnctgggtttatcanatgtctcaccngagaaagacagagtttgtatcgcatgtcaagcacggaagcaagttggtgttcatcatccacacaagaacatcatgacgactgacacgccactctagctcctacacatggacctattcgggccgacagcttacataagcatcggggggagctagcactgtctaattattgaggatgattattctcgcttcacttgggtattctttctgcagaaaaaatctcacacccaagaaactttgaaaggattcttgagacaggctcataatgagttcggcttgatgatcaagaagataagaagcgaccacgggacggagttctagaactcacaaatcgaatgcgttcttgaggaggagggcatatagcatga

SEQ ID NO: 76263 - DNA, 420 bp, Zea mays
tctaaagggagaacacattgtgggacaaacttatatttattttgtgaaagacaggatcacgagcgcatgtcaggcagagaagcaagttggtgttcatcatccacacaagaacatcatgacgactgacaggccactcgagctcctatatatggacctattcggcccgatagcttacataagcatcggcgggagtaagtactgtttagttattgcggatgactattctcgcttcacttgggtgttctttttgcaggaaaaatctcatacccaagaaaccttatagggattcttgagacgggctcaaaacgagttcggcttaaggatcaagaagattagaagcgacaatgggacggagttcaaaaactctcaaattgaaggcttccttgaggaggagagcatcacgcatgagttctcttctct

SEQ ID NO: 76264 - DNA, 433 bp, Zea mays
agcttcacataaaacaattcatttgttcttctggtcggccacttagtgtgagaaccaatcacaggagcctttgtgtcctttcggtatgcaaagttgtagcacccaaagttctagtgcagaccatcggttctagccttcatctgataatgtagttcatgcacccgacaaaacccttcagcattagcactcttcccttggcttcgaagagcccaaatgtacacactaagtctaactatggcattgggggtcagctgatgaaggtaaatttcaaatttcttcagaacctcaccgatcatctcgtatagggggaaccaaagtcctaccctgaagaagcttttgaagattacgacttcgtcatcttttagctctagaatcacctcttctctagcaaaacgaactagtccatcatcattctctcaaaagatcctatttt

SEQ ID NO: 76265 - DNA, 442 bp, Zea mays
  unsure (1)..(442): unsure at all n locations
ttannaacatattgtacccaaacaaatctgatccgtcgttatgctaaatgggtagaattcattgagtcttttccttacattattaaacacaagaacaggaaggacaatgttattgctgatgctttgtctcgtcgctataccatgctgtcatagttagattttaaaatctttggtttgcacactgtgaaagatcaatatgttgacgatgctgattttaaagatgctttccgccattgtattaatgggaaaccatggggcaaatttcacatataggatgggttcctgtttcgcgctaacaagttgtgtgttccagctagctcggttcgtcttttgttgttacaggaagcgcatggaggcggtctcatggggcactntggcgtctacaagacacatgaagtgttggctgcccacttcttttggcctcggatgcgcgctgatgttg

SEQ ID NO: 76266 - DNA, 383 bp, Zea mays
  unsure (1)..(383): unsure at all n locations
gcccatgttagtcttaacaattaagcaagtgtcgagttcagctctatcaaaatctaccaagtatagctgaccctctaacagtcccttaaatgctattgaatcatcactttttctaaagacagtgacacctatatcagtgaaaagacagttgtagcccattttgcataattgagatacagaaagcaaattgtaatctaatgagtctacaagaaaaacattggaaatagaatggtcaggagatatagctattttaccaagacctttgaccaaaccttgatttccatccccgaatgtgatagctcgttgtggatcttggttnttctcgtaagaagagaacatcttcttctcccctgtcatgtggtttatgcacccgctgtcgagta

SEQ ID NO: 76267 - DNA, 467 bp, Zea mays
  unsure (1)..(467): unsure at all n locations
tattgtcttcccttaatgaaagaatgacgttggtttcttcttgatgcctcgctntgcttgattataaaactgattcttttgagacagtagatgaataacttgggcatcacactgacacttccagaagtagctgccgagtaatcttgtagtcggtatcggcgttttagaggcaacgccgagcgattgaaggtcaacgtcggcattttagaagtaatgccgagcgatcgaacacgagatcagcgttttagaggcaacgccgagtgattgaaggtcgacgtcggcattttagaagtaatgccgagcgattggatacgagatcagcgttttagaggcaacgccgagtgattgaaggtcgacattggtattttagaagtaatgccgagcgattggatacgagatcaccgttttagaggcaacgccgagtgattgaaggtcgacgtcggcattttataagtgatgccgagcga

SEQ ID NO: 76268 - DNA, 380 bp, Zea mays
ttcactaacttggaaaaacctttcataaatcttctatagtatcctgcccatccaagaacacttctgatcttggacgcatcctttggttgctttcaatccagtatctcacttatttttcctgggtccactttaattccaccatcggtaacgatatgccctaagaaagcaacttcttttaaccaaaaatcacacttcgagaacttcgcatacagttggttgtcacgaagcttttgtaggactagccttagatgatcttcatgtgtctcttcattcggagaatatattagtatgtcgtcaatgaatacgaccacacactgatccagatattccatgaatactttattcatcaagctcataaagtatgctggtgcattagtcag

SEQ ID NO: 76269 - DNA, 386 bp, Zea mays
cggcccgaaccactctaaaacctcgcgtgttcatgtgctcggcgaacgcttagcaagacaaacaaaatgcttaagccccttcctcatcttaagaatacggcgggtgcattccgccacccggccggagaattccctctccgacatttggcgcgccaggtaaggggctacgcattaagtttttgcttgtttcctcgctcagcatgatgttgcaaatcgtggagcatcacgccgagacttcaacggatttcctggcggaggaagaacatgtttcttccacgccacaggtatccaacaacccagtgtcaggcactgctgctatgcacgctgcactgcagcatacaacaacgcagacattcccgattccgtcgaggacggctccgggagca

SEQ ID NO: 76270 - DNA, 448 bp, Zea mays
  unsure (1)..(448): unsure at all n locations
agctntaaggcttagtggagctttctactactactatgttttataaaagncaaacaacagatttctcaattttcctatcttcttcattgcgtaagatcaatcattctttaagttggttaactttgctcatagggaagggagtgtaaatttttttggaatatatagtctttcttatggggcaaggggtgaagtatattacatcaaatttttatcttagtcttatatttttctctggtagtttacatcataagtacttaaataaaaattgggttgctcactagtgtaatacccactttgtaagaaaaatctaaaaggagaaattatatttctttatatatatgtgtgttatctctatttatcatttcatgtggacacctcacttacacaaatacataattaacaaaagacactcaaaaaaatcaagcattatgttgaggatgtcattttt

SEQ ID NO: 76271 - DNA, 449 bp, Zea mays
cgacgaattccgaaatcaccagccgccatatcaccgctctgaggccaccgatgatcctggcgagcgtccgcgatcacccgtagaatcccgagcgcttcacatctctcgtcggtggtaattacgtcgatggcggagctcaaatcccaatctccaatcccggctctcctcaatcctcccccaggtcttcggcgacaatagctcacggcactcaggggtttgtgattgcggcggcggtctaatggtctagggtacaaaggcatgctactgccttaaatcctccccgaggtcggcgagttaaggggagcgacacccgattcctgcggcgtcacacgcgcgcgaagggaggaggttattgaagctgacagagtggtccacaaggcagcgtcccggcgatgaccaagcgtgggcggaagggtggccaaagggccccacacgtcagtcacttaaac

SEQ ID NO: 76272 - DNA, 451 bp, Zea mays
  unsure (1)..(451): unsure at all n locations
tgcaagcttacccgcaatctttatcattgtctttgtttttgtttcttgaagncttgtaccatgtttcatttacatcttttaataaggcacgacagaagatagaacccttctgttttccttcaaacaaaaaaattaccaagtaaaaatcggagtataggccattctctgtcctctcgtcaaactgacttttgttcagctcaaactcatgaatccgcacgaagcagacacatgagcctcctcgttggatctccaaatcttcatcaagaatgtgtggcacatgtggcagaaccgtccgaattattccagcttaagagcctaagtcacgccttaaggacaacaacacacttaaatcggaataacccgtcagtttctcagatctagtcggataaagccacttaaccaggatcaaataccacatactcactcgaaagtgagtcacagaagaaataca

SEQ ID NO: 76273 - DNA, 436 bp, Zea mays
  unsure (1)..(436): unsure at all n locations
actcttacccttgaacaagcgagtataatacattatanagggcgcnccaaacactgcaagaacaaagaaattgtgcgtgttgcacattgatatcatgatcttccatgttcttttgcaaatctagggctaacagacggctcatcttaacagtataacacacatttgtacataagttatcatagtattatatgtttccgttgcaacgcacggacactcacctagtaaactaagaaaacaagaaggccaaaacttagctagaactatcttggctntaagtttgcgttcaactcgttctgaatttgaatgaaattcgagtacccatcaaatccatgtcactttggcagcacagggaacgcgcagcaagtgtngtggttcctttctttcttagcggcaacatgattatactttcgctaatggcctcttttaatcatctttg

SEQ ID NO: 76274 - DNA, 439 bp, Zea mays
gcttttgttgagctgggccccatagaattattcatttgattttaccacctcgaagaagggtagatttctttccgctgatctggatataaatctgttaagagatgccagtcttcctgtcaatctttgggccccctttctttgggttggtggctccattcgaagtatagcttcgattttattaggattagcttcaattccctttgttgaaaccaagcatccaaggaacttacccttctttactccgaagacacattgttctggattcagcttcacaccagcttgtctgaagctggcgaaggtctcctgcagatcagcaatatggtcttcttgcttcgtgctttttacaataatgtcatcaacataggtcaacacatttctgcctatctgagaatggagaaccttcgcagtcatcctgctgaaactccctccagcattctta

SEQ ID NO: 76275 - DNA, 410 bp, Zea mays
  unsure (1)..(410): unsure at all n locations
tgtctgatactatcttctntggaacgccatgcaagcatacaatccgagacatatatagttctgccaacattgcactgttataggtggtcttgactggtatgaaatgggccacctttgtcaaacggtccactactacccagatggagtcataaccagctcgagtgtgaggcagaccaaatataaagtccatcccaatctcatcccatctccactgaggaatctgcaacggttgcaacaaacctgtgggcctctgatgctttgccatgattctctgacaactgtcacatctggcaacatctgctatctcccttttcatgtcataccaccagaatctttttttaggtcttggtacatcttctcgctaccagagtgtatggaatatgttgtctcatgggctttcttgagaatca

SEQ ID NO: 76276 - DNA, 427 bp, Zea mays
  unsure (1)..(427): unsure at all n locations
gcttcttgaccacctcaacgatcaccaagttgttgcatctaccaccgtcaatgacggtatgtacacggcagtccttgacgatgaagaacatgttgaaaaggtttttgcgttgtctggtgtcgncctcactagccgtggtactcaaagctcgttgcacaatcaacgccttataagtctccgtcgctgttgtaccaagaacatcatcaccagtagcaatgtatgcccgtttgctggggcaatctcgctgaatatggccaaatccttggcagcggtggcacttgatgtcggaggagcggcctgtggaagaagtcgtcatagcaggttttgctgcaacacccgaaggcaccaaagacttgttgttgtcgtgtccctgtgatgccgaaagtgcggtgctgcgtgtgccgctggtggaagaagatgtggacgt

SEQ ID NO: 76277 - DNA, 207 bp, Zea mays
ttgttttagaccgcggacccaatctggaagcaatcttgccttctgacgagtggtgcaccgaacagaccggagcaccaccggacagccactgtagcacgccggcgctcgatttcctttcataccgggcgcagccccgccgtggacctcgggaccggatggcgcaccagacactatccggtgcacaccggacaatctggtgtgcccaac

SEQ ID NO: 76278 - DNA, 404 bp, Zea mays
agcttgtgggtccaaatttggaatatctatttggatcgcacatatcctgtgcgatcatgctgtagtaaatcctgtttgttttgttatcattcaagtagtgctatgctataatcatcccattaccagcataagaagttatcacacacacgagtttatctattttcttctatataattccgatgttaacgaagccaatccaaatcacaggggaaatgggatgattgatgttttatcatccaacggaaaacggactaccgcccgaatgtctggagcatcacagcacatgagtttcgtcgtcacgtctcactagctggagagacctgctcgcttctgaacaactagtgtgctatttacaacaccaatgggctactcacgcctgagcccatttgtcaccgaaagtattt

SEQ ID NO: 76279 - DNA, 470 bp, Zea mays
  unsure (1)..(470): unsure at all n locations
ctaacccgaagccgtgatgtnctctttccgcacctcggngangttcattttcatncacgtacacaccgacgatgagatgctccttcgccgncgtcacgtgtagagcgtgtgctcggtgttgcgagctcgccgagcgtgtcgtcaagcttcgtgttccaagcccgtggagcctactgtagcccgtagaacaccttggacgacaaactccctgtgctcctacccttggacgacaaactttggagcttgcttgacgaagaacacctccaagagctcaccattgaggaaggcggacttcacgtccatgtgctgggctgggcacgccagtccttcgttgctccagcgccatcaggaggtggacaacttccatctgcaccatcggcacgaagacttccttgccgtcgatctccccctgctggacgaagtgtctggtgacaagccttgccttgtgcttcacaatggtgctacactca

SEQ ID NO: 76280 - DNA, 393 bp, Zea mays
ttcggtccttttagctacctctttgatttccatgcacaacgataagatctttgtcagatggtatcttcatgcacaaatatgctggatggagtattgctttcaatgcattcagtgtccctcgaacaatgattgcattgcaaggatactccatatcgataatgtcaaatacaacttgttctgttcttgtgttgtgaacataaccgaaggtgattggcattgttatctttccaagtgccactatctgcctttctccaaagccacacaaggtgtgtgttgcatcatgtatcttgtcatcctactcctgcatctgcctgaaggtttttacgaatatgataattgctgcactgcttgtgtctacaaagacattgtgaactaaaaaccctttgatcacac

SEQ ID NO: 76281 - DNA, 411 bp, Zea mays
gcaccttcgaaagttagaacatgttatgcagccaagcttgactttatttgcacaaataatattgctgagtacgaagcacttctgttgggcttcggaagttaagggcaatgggaataaaaagggccatcctgaaaactgattctcatgtcatttctagccatgtagacaaaagtagcaaggcaagagatccgaagcttgaaaaatatctggatacagttcgaacgttggaggcttctttcgaaagtttttctgtcaagaatattccaagcggtgaaaatgagcatgcagatttgctagccaaatcagcggctcaggggctccctctaccttcggaagtattttttgaaacaataaaagctccttcagttgaactcatggagagagcagtgcttactatttctccagtacata

SEQ ID NO: 76282 - DNA, 441 bp, Zea mays
gcctaataatttcctaagtaaacaatgtttacctgtatttaatctaggaaatccttaattaggtataacccatcaaattatgcagtatatcaaaaagtaaacattattatatgcaatgagtgggtacaaacaaaatatgcagagggagaattcacttgccttgctcaaaagtgtccttcggatcgttctcaaacaaatttgaatcctctaccacacaatcagcttctaataacatcgtacgttgtcatacaaaaagaaagcatgcaccaataaataaacatacaccattccacaaacaattaaacatacactttacaaatcatacttataaaaggaagacatctaaaaataaaacttggattgtaactataatataagtctattcatatcgacgatcatctcatttgctatgaagtaaaatactaatcatttagttttgat

SEQ ID NO: 76283 - DNA, 463 bp, Zea mays
  unsure (1)..(463): unsure at all n locations
caagctggactcaggtatccacacattaatccttaattcagttttttccgtctcatggacaaggcatcctccctggatccaagtccatggaccaatatatatcccattatcaagatgaatacaatcaattcctgacctcgcgcgagtgctagaaaaatcactcgacttctaccgagatcctgattagcaagcagctactcgacctagcatactagtattcatctcanaaaggagtcctaagttcatgcaactagaggtttcaagcaactcctacacttaagtgcacattacagtcctacaagcattaagtgtagtaaagtagcatataataacatggttatgcataaaaccggggcttgccttcaattgctggggctgcggtgagatccccaatagcagcctctgaagcctgctcctggtcctnctcttggacaggtccttgctcggagatgagcacgtactc

SEQ ID NO: 76284 - DNA, 392 bp, Zea mays
ccagcgaacaaagagttttaatactgggtgcgaaaggagaaaagaataatactttatagtgccaaaaatgtggcattgctgatggacacaacagctgaacctacttgtctatagaggaaaatagggttaaattggctagccttgccgatagaaaaagaggaccgccgcctgggtctagaaacaaaaattcaacaatgaccccgcagtggaatgagacatccacatcaaaaaaacataaacataccgattctgaagaacatggttcggatgacgataatttggcacgaatgtaaaacatttatacataaataatggatgatattgaaatgctatgatcatgatactatttgatgattatgaatatttacggtaaaagttcactgtatggatta

SEQ ID NO: 76285 - DNA, 477 bp, Zea mays
aatactcaagctggtgaaggttcttcatccacacatgtgctattcggtgatgccacagccagcccatgctagtcttagctattaagcatgcatctagaccggcctcttcttttgcaaaatcaactaaataaagtttgccgtctaatacacccttaaaagctagtgaaccatcacttcttctaaagacagacacatctacatttgtaaatagacagttatatcccatgttgcataattgactcacagatagcagattatatccaagagactcaactaaaaacacattagatatggagtgctcattagatattgcaattttacctaaaccttttaccttgccttgattcccatcaccgaatataattgaatcttgggaatctctattcttgacgtaggaggtgaacatcttcttctcccccgtcatatgggttgtgcatccgctgtcgataatccagcttgaaccccacgatgcataaa

SEQ ID NO: 76286 - DNA, 458 bp, Zea mays
  unsure (1)..(458): unsure at all n locations
tgacattgcctccctgttggaagccaatgccgttcttatgctcttggcgnctcccattatagagcatactacgagcaaatntaaatttctcattctctaattcatgctcggcaattatagcatctaattttgctatatgatcattatgttgtttaatcatagcaatgtgatcatggatagcatcaatattaacatctctacatctagtgcaaatagagacatgactgacagtagatgtagagggtttgcaagcatttaattcatcaatcttagcatgtaaaataacattctcatttctaagattggaaatagaaacattgcaaacatctaattccttagccttagcaattaatttttcattctcaatcttaaggctagcaagagaggcattcaactcgtcaaatttagcaatcaaactagcattatcattttcaagttgacaagagatcatcacaaca

SEQ ID NO: 76287 - DNA, 434 bp, Zea mays
agcttgccaattcttatcaaagcagtagcttttacctacacagcaactgcagatcatacccgtaacatggccatttgcgtgctagggactaaacatgattggacccttcaagaaagctcagggaggatacactcacgtattggtcgccattgacaaattcaccaaatggatacaatacaaactcattgcttctctgacttcagccaaggcagtggagttcatacaagatataatattcatgtttgggataccgaatagcatcataaccgacctgagatccaatttcactagctctgaaatctttgatttctgcgaacaacgaagcatccagatcaaatatgcatcagtatcacatccaagggccaacggtcaggtagaaagggctaatggaatgatactggaagcactcaagaagaaagtctttgacaagaatg

SEQ ID NO: 76288 - DNA, 466 bp, Zea mays
  unsure (1)..(466): unsure at all n locations
ctcagcttataactcctagaggtacttatggctaccttcggatgttctgttggctcanaaatgctggaggaagcttcagcagaatgactgccaaggttcttcactcccaaataggcagaaatgtgctaacttatgttgatgacattatagtaaaaagcacaaaacaagaaaatcatgttgccgacttgcaagggacgtttgccaattttaggcaagctggtatcaagttgaattcagaaaagtgtgttttcagagtgaagaaaggcaagtttcttgcctgtctggtatcaacaaagggtactgaagctaatccaagcaagatcgaagctatccttcggatggaactgccaaattcaaagaaggtggctcaacagttggcaagaaggctggcatcgntgaatagaattatatcaagatcacgagagagaaactaccattctttgaatattgaagcagtcgaagtttt

SEQ ID NO: 76289 - DNA, 380 bp, Zea mays
  unsure (1)..(380): unsure at all n locations
agaaccttcggttgcctggagctcgaagttctttttctcgatagcatctgattgctcctttattctgctttctaaattttcaattataacttcgtgcttcttgtcttcaaaatcttgctgcatttttaaggctttgctcaacagcatgctctgcacgaaatcaaccttcgtcagacgtgttttcattattagaagcaataaaagttaagggaaagctagttcaccttgaaattggaatagaataaactaccaacgatatgttgtcgtcggtagcggctgatgtctgtctccagcttcaggaaaccgatactctntgacagagtaccgataactttggctccagtttgatctcgaatacaatctatattttcatcatcaat

SEQ ID NO: 76290 - DNA, 466 bp, Zea mays
  unsure (1)..(466): unsure at all n locations
tatgaagattcttcattccaacatgggctagtctgcggttccagagccaacccatgttagtcttagcaattaagcaagtgtcgagttcagctctatcaaaatctactaagtatagctgaccctctaacactcccttaaatgctattgaatcatcacttcttctaaagacagtgacacctacatcagtaaatagacagttgtagcccatttgacataattgggatacggaaagcaaattgtaatctaaagaatctacaagaaaaacattggaaatagtatggtcaggtgatatagcaattttacccaatcctttgaccaaaccttgatttccatccccgaatgtgatagctcgttggggatcttggtttttctcatatgaagagaacatctttttctcccctgtcatgtggtttgtgcacccgctgtcgagtatccaacttgagcccncggatgcataaacctacaa

SEQ ID NO: 76291 - DNA, 399 bp, Zea mays
ccccacctgcaagtctccatctttccctgaggcgggcccgggggccactatcggtaccctgaaactagggtaccccttactactatataaagacgcagcacccgcacgactatctttagtcgcgtggtaaaagtgatgtatgtggtacgaggccataactcgccccagcctcgggcgactactctgggccagctacagcgcctgaccccaccacatgggcgggtccggagccgccacatgtccagagagagtgatatagtctgaggcctcaacagtgagtccggacccccatgggaaagtgcccgacccctgtatatacagtccggaccaccaagaatggtccaggaccctcacgagtaccgaccggacccctagaatgggatccggacccctccatat

SEQ ID NO: 76292 - DNA, 443 bp, Zea mays
  unsure (1)..(443): unsure at all n locations
tgtggcgccctcgggcgtcttgtcgcagccgtatcacttagtctcccacttggaagcctcggngccgaaccctntgggcgtggtagtgtcgtaaactgctgataccgcgccgagtgtagtaaggccacgtcccgagcctcttccagctggtccaaggaatattctcggctggtctggttgccttggtcgtcgtacgcctttgtcctcggggaaccgtattccaagtccatgggtaagatagcctcggccccatagactaggaaaaacggcgtaaagcccatggcccggctcggtgtcgtcctcagactccagaccaccgagggtagctccttcatccatcgcttgccgaacttngtgaggtcgttgtagatcctcggttttagtccctggcaaatcataccgatggcgcgctccacctgcccatttgtcatcgggtgaactac

SEQ ID NO: 76293 - DNA, 447 bp, Zea mays
  unsure (1)..(447): unsure at all n locations
agctttgaatgagtgtttcctcaagcagtatcatcctagtatgttgcaagatgcttaagaaaaccgatataatcacatcaaattagttgcttttggttcgctcaactccaccaaaaggcagggggcatatgttgagcaccaaaatgagcaaccaaacggtccggccctggggtcggacgatccgcggtccggacggtccgtgtcggtggtccagactgtccgcgctggtggtccggactgcccgcgcgcgcgcagaaccaattagggttccgagtttcttgctacagttgntggctagattcgcagaattaagctgggaaatctatttgtaacgggtccagccccccttctctataaatacagaggagtaccgtccaataaacattatcaattgaactcaatatcaatttatctcgcatttattttctatacattgaggaatagttc

SEQ ID NO: 76294 - DNA, 465 bp, Zea mays
  unsure (1)..(465): unsure at all n locations
gcttcttatgaacatggtgtttggcaataaataagtatttatgaaggaattcgctctttcaagnttngaagngaccatgagattctcaattctgatctagcctcatgaaggttaaagatgaatttttacggcgggtcagttccgggtaggtgattgtcaatctaccacgttttgggaggatagatggcttttaaatcgatctcttatagatgagaaataagtcgactcttgctgcagatgtcttacctggtgccatcaccaacctgtccttctgcataccattagtgggtataacactagttgagtaccagaattcgtcactttngttggccccaattaatttacgctctatttgggataggtttctttaaggtctcaatgagatggacttttcttagttcgatctatgtattctattttaatgaataaccccactccacatcttaatgttgttctttggaaact

SEQ ID NO: 76295 - DNA, 206 bp, Zea mays
cccccccccccaaggttgtctctgcccgactacacgactcactaactgtgagtgagcgtttcacgggggcgaggtcctcaggcggaaagaccgccgcccgactacaccacaaactccctctcgcagtcgatacggactgcgtcgcccttaacaacacatgtgattgagaggcagcgaccagcgggacccccacccacggttcgcac

SEQ ID NO: 76296 - DNA, 478 bp, Zea mays
  unsure (1)..(478): unsure at all n locations
gcttcggcgttacaaaccgacttaaagatagaatgacctctttgtccatattggtctgagtcaaggctgtaagtttttataaggggcatacttgtaattcctcacaggctgcgtcctgtgcctataaatagtgaacattattccgttactgttcgggcattcgattaattgcaatcgcatctctcggaattcaactctctgctaaggcaaaggtattattgtattcaatgattttgtatattaagtaaatgcaatgtaattcatctatgacatgcttattcctcttatacctcttattttatgtcattttataatcttcaccggaattttattacgaacgttcgagcttcgtagttatgcttttatcaaccttcgtccaggattcattattctcaaaaagaataatgtttcatagacgaaggacattgacatttaacattntatgttgcctctgtcttaattctaagcatttgagaac

SEQ ID NO: 76297 - DNA, 430 bp, Zea mays
  unsure (1)..(430): unsure at all n locations
ctccccccccagaggnnntttgatctcgtagccgcctcnnacaccgaccgcagcaagcagcccagcgacaacaagagccaagttttttatagatttcggaaagccaaaacagaagcgtatttcacacctactcccataaagagctccttaattaataaataggagaaacgaaactcctccgaatcctaagattgcacccctggacatgtacaaatgtatataaacggggtggcactcatactcatgcatccgcatacattagaatgcaatctcgccgacggagagcacctcttaatccaagagcaagaggcacaacaagaaagagccccggaaccacctcccgaactccgcgccgaagaacctcccgccgcacccgcattagaaggcaagcccgcgcatatgcataacccgtatctgctattctacagca

SEQ ID NO: 76298 - DNA, 416 bp, Zea mays
tcgaaaatagcgttgtgtggcacttctgcttttgtcgctctattaatcagcttgaacaggcggtaggacttattcctagaatgcagcctgttgatctcatgacattctattaattatgagcgtagttaggtaggatactgacacaacacacatggtttctggtccatatttattagttacattccagtatatcgtggattgctcatcacttgttaaattagagaaaattgatgctctgagcttcagatgaactatgtttcgtgcttgtgcgtgtgttcttcacccttctggtatcagtgtgtggccagcacttgttgtctcggcgctctctctcactcactctgagtggttccactacgtccttgtctatcttgtttgggccatttggcgctaacttaccaacaagtgcacaagag

SEQ ID NO: 76299 - DNA, 444 bp, Zea mays
agcttccttgcgcgtagcttcagaactggttcattcttcttcccgaccatgcttttcatattgggtacaactttattctgagcccgaagattcctatacatatgttacacttgggaaacattgttagtcatgtttttgaggacctttggaagacgaaagcccccaacaaggacgtaaaaagaatcatgcgatatttagtttacactactaagtttgggctttggtaccccaagggatccacctttgatctaattgggtattctgatgccaattatgtgaaagttgcctagcggggggggggtgaataggcaagttaaaacatttttcaacaaaaactacaagcaaactgggtaaaactgaattgatctcgaaattcacccagttaactttggaaatgagatgttctaaatgatccacagggttcatagtagtagatctgagaag

SEQ ID NO: 76300 - DNA, 460 bp, Zea mays
  unsure (1)..(460): unsure at all n locations
gcacttaagagggtgggcaaaanatgtaagtggtgcgtacattttagaaaagaaaggaattntgaacagtttggatgtgttggataaaaaagcagaagtatctgttttgtcagcacaagagcttgacttaaaacaatacttgcaaagtagacttgcagaattactaagagaagaggaggtaaaatggtatcaaagagccaagactaagggtttgttacaaggtgatgctaatacaaaatattttcacttagtggcaagtggtaaacatagaaagtcgagaatttatcatcttcaaaatggggaccaggttatagaaggtgatgcacttttgaaagagcatatcacttcctactataaaggtctttttggtccacctgaagcatctatggcgtctttggactcgtctgtaatggatgatatcccgcaaggttctccggatgagaattcttttctaacgaca

SEQ ID NO: 76301 - DNA, 436 bp, Zea mays
  unsure (1)..(436): unsure at all n locations
agctctttgggtgtagagaggccatctactatcttattatagctcagctaaaacaagaacatactaatgatatgccaaattaccaacgttactgtttggcttcatttccatataacaaaaaggtccaatcactcacagctgacaccgaggatgactactcagtggcttcaaacaaaaaaacttcatttcacaccccttatatgtctagtaatgttcttcctacacttttattttcccttataggagcatccatcttctctacagactgctgatgtgtctgctccttctcctcttcttctggttctatttttattttctactgcggagtggccttcctccattatatcattcgcgttattgccattntgtccaccatgactatcatcctctttctcctcttgctctagaaccgatgtcgagagcttcatatcattct

SEQ ID NO: 76302 - DNA, 425 bp, Zea mays
  unsure (1)..(425): unsure at all n locations
gaactcaccacgtcagggattcttccttatctccggncgccgcgttactcgaccgaattaagcgccaccgacgaagccgcctataaattgaagccaccgcaagctccataaggcagtcaagtaccccgacacccactattgtccccagccgatcaccagcaagctccaatttcatacttcccccaaatcagtcgaagaacaccgtgaaaccaagtccaccgtggccagccgattctggtaaagctctatccgattcaaaccttggttaagtcttctcatagctcagtgatgctcgccaagccatcaatttgaatgtagatgcccccaatcgtcgggaacgcgctcctncacccgcaacacccctggtcgtcatggccagtgcaaaccatagggtcattatgtgaaataggttggggaaatggatc

SEQ ID NO: 76303 - DNA, 340 bp, Zea mays
tttagcctctcattttcttctttgagcttctgatatgcatcatcttgcgttcctgctaatcctagctcatacggagtcttgcttgtctaccaacaacaagcactagcacatggtaatgcagttttaattcggatacatgtcgcatgactgaggatgctcggattttaagttctctatcacaacctcatcgagccatatagctatcgacatgatcatctataagatttcatgacaacatagatgctatcctatttttctcgaacgctacactccaacttttacttttctacttggccttaacaacgctttccatttactatatgacgattacagcaagcgc

SEQ ID NO: 76304 - DNA, 437 bp, Zea mays
  unsure (1)..(437): unsure at all n locations
agctggagcataatggagacttatttttctgtgttgctccnccntcttttcttccgctgccctgaatgcaacggatagcacctctagagtggaggtggcaccttgctccaagctgacaatgtgtttggagtctttgattataagtccaaagctcataaacttgccaataacctccttgggagacatttgcttatacctacgatcttcatgaataaattgcacttgagtggggttatgaaaaacaagacatcttagaataaccttgaccatttcatggtcatcccactctgtgctcccgagggtgcggacttggttcaccatcgtcctgagcctgctgtgcattgcttgaggctcttcttctctattgaagaccaactgaacgagtttctcctcgaatggttctcgcttggcgatctttgtgacttcatgcccttcac

SEQ ID NO: 76305 - DNA, 439 bp, Zea mays
  unsure (1)..(439): unsure at all n locations
tggaactcgtaacatagctgggtttcagttaacaggcgttttccgtctacagaacaagaccttgcttgctctgccagtctgcctcatgtatatagggaggacatatcctgtgcaatcactcattntggtgcaagcgtgcaatcaaactattcagagcatctaatctagatccaacggtttcatatgaaaggggttaaaagtaaaataagtactatgttttacgtggaaggagttaaatataaaataacagtcatcattagatctagatcggatgcaccagatcgctcgattgcatgcttgcaccaggataagtgattgcatangatattttcccgtatataggaccaaaattcgagtacgctaaaacgaagggccaaaatacgaccatacatataacaagggtgtcaggctcatctatctgtctgtcgttttctttaac

SEQ ID NO: 76306 - DNA, 437 bp, Zea mays
  unsure (1)..(437): unsure at all n locations
agctntagtacattggatgtgcattctattattcttgtctaagtatcagaaacagaaagaagaagaanagagaagagttggctgtgtacagccaaaaagctgtttctgtctggggcaccggactgtccggtggtgcaccggacagtgtccgttgcgctaagctgcctcgagcgaagtggccgctctcgggaattcgccgacggcgtacggctaaacttcaccggactgtccggtgtgcaccggactgtccggtgagccatcggtcggccgagccaacggtcggccgcgcgatctgcgcgggacacgtggccaagccaacggtcggaagggggcaccggactgtccggtgcgccaacagctccaaatctgccaacggtcggcttcgtcatttaaggaaagaaatctggcaccggacagtgtccggtgtgcaccgtact

SEQ ID NO: 76307 - DNA, 461 bp, Zea mays
  unsure (1)..(461): unsure at all n locations
ntagagggttgtgggctaattnttagttcctccatttttgtctattntagttcttaaattgtcaaatatggaaactaaaatagagttttaattagtttatatatttgccaatttaatgactaaaatggaataaaatgtcactagaaaccaaacatcttcttaatctactattagacatatctatagatggtcaaacggaccgtccgggaggagagatcctagtgtttgtcttgggatgtggcaggccacccaagatgtctctagacaacatagagttacagagatgtgaagattgagatgaagaaggctatgtgactggctactcctacgcaagaaagtaaatggattgataaactggttgattgattcgattgatggtgcccacaattggtcgtaccccttcatatatatagggggaggtctagacctgttcctangcgttccccaatagaatccacggt

SEQ ID NO: 76308 - DNA, 261 bp, Zea mays
gcgaagcacatatcggaaaggagtgggattcggattgctcctcctccgactccgacaatgaaggacttgccgccactgccttcaacaagtcatccctctttcccaacgagcgtcacacatgccttatggcaagggagaagaaggtatgcaatcaaaacaatgtcacttatgatccttccagtgatgatgattctagtgatgatgaaatatattactctatttttttccggggattgtatacacctaaagtatataaataat

SEQ ID NO: 76309 - DNA, 454 bp, Zea mays
  unsure (1)..(454): unsure at all n locations
ggggataactagntgtataaagtgaatattcaaggctattatatattttgncgagatgagttaaactatatggtgttggtcaaaaacttgtttgacatttggtggggacagatagattatgccattcatcatgactctatgggttaagttaactcctttgctcatggttgagttgatcttatatgctaaattaacacttggctagaagggtctaatttcttctaccaatatcactgatctgtttaagtagaccacattagattagattatcttagattctataatcctatttaagaataccatgtagttgagcatatccagctgactttacttttatgaaattctagtatttctttatacactcgaattttttgttgccattagcacgcgtggtataaaaacaagcgtacatggggtaggtaggttaaacagagttttgctttcttggataaat

SEQ ID NO: 76310 - DNA, 440 bp, Zea mays
agcttgtcaacagtggcaatgaaatgctttttttaatcctgcctcaacacttggcttcacatcaacaccaagacgttccagatcgacgtcatcttcgacatgccatggttggtcgaccatggcaacatcatgtggaactttgtgaccctagagaagcaattctaatggggcgaacataccatcatcttcgtcaatgtccctgaccgttgagcaccatagaatttgcttgttcttcctgtcttatgccaatcctaccggtgcctcgacacccatcacttctcccacgatcatggtctccatcgcagccatgatgtaacatgagcaaggcaattcaaccgtgtcaacctaatgccctcgacaaaatcagcattgtacgacgccatcataagcaatggtactcgagctacgcgccatcaccaccaccatcataagcgggagag

SEQ ID NO: 76311 - DNA, 461 bp, Zea mays
  unsure (1)..(461): unsure at all n locations
tgtgaatgattgtaaaacccgattaagcaactattcctttttaactaagtctgtctatgtgtaagtcatcgtaaatttatgtgcacttaactagtttaataataagtaaccaatgaatgataaaagtgaacatggtaaatgcttgtactcgtgatgtcgtgtttgtgtgggtcaaatatagtaaatgtttgtcatctttccagtaatgttgacttgttatgcccaatgacgtatagatagctagcgttaacgtatggatgtttatgtgtcttactagttaatgttagttcgctatcatgtacttaaagtatcttgtgttgtttcatgatattcatacatatgcatcctgcatctcatttangaccgagagatgatgatcgtgcaagtgatgtggcgccaaccataagatgcaattggtggacgacccaaagaagtatgtacttaaccaagtggatgctcgc

SEQ ID NO: 76312 - DNA, 159 bp, Zea mays
acgtgaaaccctgtgggaccatcaaggagaagtaagccccctggtagagccgcggagactgagcactccttctttggacattttgagctgtagcatttgagtacatgccgccactgggaagactatggggaggtaatgcaagctcaaaggcacatgatc

SEQ ID NO: 76313 - DNA, 447 bp, Zea mays
tgccttcgcctcagtatatcacccacaatctatcggcgttttggagagcgccaacggcaagattttcactgccatcaagaaaatgcttctcgatgacaagaagggtaaatgggtcgacctgctacctgaagcagtctgggtgctaaacacgaccgagtgccgggcgactggattcactccctttcgcctactatacggatcggaggccatgaccccgcaggaaataacacatgggtcaccacggacaagcgcttcagtcgtccccgacgtagatgaaccaacctccaaagacctcatcgacggagactgtgtcttcgccctgcaggccctcaacaaataccaagctcaaacgaaggcctggcgcgaccacgcagtcatcccaagagaattcgacgaaggggacctcgtactcgtccgaacaaccctgacagagtcacggtgcaagct

SEQ ID NO: 76314 - DNA, 374 bp, Zea mays
ctgcttgctgttgtcaactgctattcaaacggtcctctgaagcggaaactatgttttgcccaaagaatttctgtgcagtctttgatgttattatggaaacagccctcacctccatccatttggtaaagtactccacagcgacgaaagtgaacttgatgttcccctgagccgtgggcaggggcccgacgatgtccatgccccatcgctggagaggccatgtgtgggcgatcagttttgtgaattgcgaggggctgcctgatcgaagagaaaacttctggcaggctctgcaagaccttatgacccgatttgcggcgcacatcattgccggccagcagaaccttggccgacacctttgcgggtaaggccctggccct

SEQ ID NO: 76315 - DNA, 447 bp, Zea mays
  unsure (1)..(447): unsure at all n locations
ctgcattgagatcttgcctttcttgttcgaactgctcttactggcggagaagcttcgngttcagctctgatatttttgcttcagcttccgccagaaaaccttcggctgcctggagctcaaagttctttttctcaaaagcatctgactgctcttttattttgttttccaaatctccaattataacttcatgctgtttatcttcaagatcttgctgcatttgcaaggctttgctcaatagcatactctacataaacacaaccttcgtcagacatgtttttattataagcaataaaagttaacggacaagtcattcaccttgaagctggagaaaaataaactaccaacgacatgttgtcgtcggtagcggctgatgtcttgttccagcttcgggaatcaatactcctgacagagtctgatactttggccctgttaggcccgatacactct

SEQ ID NO: 76316 - DNA, 444 bp, Zea mays
agcttctaaagggagaacacgtgataggtttttattttgttcaattcaaaaaagatagaccttgtgcagcttgtcaagcagggaaacaggtgggaggctctcatcacaccaaaaatgtgatgacgacatcaagacccttggagatgctgcatatggacctttttggacccgtcgcctatctgagcataggaggaagtaagtatggtttagttattgttgatgacttttcccgcttcacttgggtgttctttttacaggataaatctgaaacccaagggaccctcaagcgcttcctcaggagggctcaaaatgagtttgagctcaaggtaaagaagataaggagcgacaacggatctgagttcaagaaccttcaagtggaagagtttcttgaggaggaagggatcaagcacgagttctccgctccctacacaccacagcaaaatg

SEQ ID NO: 76317 - DNA, 432 bp, Zea mays
  unsure (1)..(432): unsure at all n locations
tgtgaagagtattggtggccttgctgctggctccctcgatcatcactttgagtagagttatgaactgacctaacgtgcctcgggtgaaatcttcctccgaagcccctggttattttagagaacctgaatgcttcctcccttctttggcggaagtcattgtcagcttgaatgttctcgtccatcttctggagcagcttctccaacgtttgtggtggcttcctggcaaaatactgcgctgaaggtcccggccgaagccccttaatcatggcctcaatgacaatttcattgngcattgttggcgcctgtgccctcagacacagaaaccttcggacatacgcctgaaggtattcttcgtgatcctgagtacactgcaatagagtctgggcagtgactggctttgtctggaatccttggaagctggttatcaacata

SEQ ID NO: 76318 - DNA, 327 bp, Zea mays
  unsure (1)..(327): unsure at all n locations
ggacggtactccgaagcggcaaacaatgttctgccagaagaatttttgggcagtccttgatgtgataggggaaacagccctcgcttcaatccatgtggagaagtattcgacggctagaaggcgaacttaaagctcccctgagcggagggcaggggcccgacaatgtccaggccccagcgctggagaggccatgtatgggcaatcagctntgtatattgcgagggagtgcctgaccgaagagagaacttctggcaagcttcgcaagaccctgtgactcgatttgcggcgcagatcatngcaggccagtaaaacccttgtcggattacc

SEQ ID NO: 76319 - DNA, 468 bp, Zea mays
  unsure (1)..(468): unsure at all n locations
taagcacacgttcattggaaagcttaattagatccctagctgttgtttttctagatgacttcacaaatttaggattatgtgctttagtaatgtactcttgaaaagcattagattcaccaaaccatacaggcaaatcctctctagctatcaaacgacataattcggttctagcaacagcattagagtattcccatcaaactagagaaccatcaggattatacttaagaagagactgaacaatgccactatgttgttgttcctttctagcattgcaattatgccgaagcaaatggccaatcccacaactagatttagcactgaaggtctgcttacagtatttgcaaagggcaccataccttaccctcttaccattgacgagattagtcagctcctcanagtcattccagactttggatatcttcctggaggcattggcacccatgctaccactagtaccagtaccaacac

SEQ ID NO: 76320 - DNA, 380 bp, Zea mays
agcctatgctcttatgtgaggacatagcaaagcagaaagtgctgttatgatctcacttatccgaagagcaagagaaaaccttgataaggtttttgttcaataacaaagatgtttttgcatggtcagctaatgatctatgcggagttaatagggatgttattgagcactcgctcaatgtcgatccatccttcagacccaaaaagcaaaggcttctgaaaatgtcatatgataaggccgaaagtgctcgcaacgaagtcaaaagactcctcagtgcaggagttattagagaagtgaagtacccagaatggctggctaacactgttatggtaaaaaaggccaatggcaagtggcgaatgtgcatctattttacagatcttaac

SEQ ID NO: 76321 - DNA, 460 bp, Zea mays
  unsure (1)..(460): unsure at all n locations
aacattatncatcccaatgtgggctagncgggggttccagagttttcctatgtcagncttagcagataagcaagtatcgagtttagctctattgaaatcaactaagtatagctgaccctctaatacgcccttaaaagctatagaatcatcacttcttctaaagacagaaacacctgtatccggaaagagacagttgtaacccatcttgcataattgagaaacagaaagcaagttgtaatctaaagaatctacaagaaaaacattggaaatagaatggtcaggatatatagcaatcttaccaagtcctttgaccaaaccttgatttccatccccgaatgtgatagctcgttggggatcatggttattcttgtaagaggagaacatacttttcttcccagtcatgtgggttgtgcacccgctatcaatgatccaacttgatcccccggatgcataaacctac

SEQ ID NO: 76322 - DNA, 370 bp, Zea mays
  unsure (1)..(370): unsure at all n locations
ccctccctccttgggaaggacctgagcatccccttttatggatacaaggggatggtccaactttacatatgggggtgtaactatgtgctaacatggccggcggagaagtgcttgagccctgtagaaacgtatctggcggtgcggccctgggtcctgctgacatttctttgccttcgtagagagctgagaacaatcgacgtcatggacgcatgcacggaaccattattgcatgttgccggagtaatctagatgtgacaccggtcttgttccttcgtagcctgacgcggctagctagaggtagggtaatgatgtatcccctgtagcgtantctgtccgaagccgaagtcaggcgaggcggtgacttctcctg

SEQ ID NO: 76323 - DNA, 473 bp, Zea mays
ctcaagcttattcaaagctggactttggtttccgttgagcagatatgttgttgaagttttaaagacataccagatgttccttcaccagatcactcctaaagcagttattagaatggggatctttgtcagggctgtgagaagtcaaggtctatagccaagtgcacgatgtttttgcagtatgcatgaactttcgtatgagacaaggccctgtggttaaggacaataccataagcaatttggttgctatagcttcgttgctcgctctggcgcaagctacccagtgccaacgtttctgaagagatggcccggtgcctgggtggaagagtggttctatgtgaaaaatgatttgaaggcgagagaagacaataaagagatcatcatgcaccccatctggtcctgctttggcctctgaaaaccgaaggtagaaattgatgaggcagccgaagcatgccgaagggccttcaacacaattt

SEQ ID NO: 76324 - DNA, 371 bp, Zea mays
agggaggaataccaaagttgagcaacactcctgacagccataactaaaaattttgtcatgactgcagtattgccaccatacgaagatactgttgcttcgtaactcaatcaaaactgcttctggtctgaatggccgtcgaatatgggaagctgatgcggcttgtaggacggaggccaaagtgtatcctgcatctcagcggacagaggagaagcatcatcaaaagcaaaatttccgtggagaaaattctcataccagtcatcttcgttgaagaaacccttctgatgaaagtctctatgctgaggccttcggctctgctcattctgagaaagatgacgaacttcttcagaggcttcgtctatctgtctttgcag

SEQ ID NO: 76325 - DNA, 465 bp, Zea mays
  unsure (1)..(465): unsure at all n locations
tcnggaaccccatacttctagccatctccctgcagactttttattcttnngtgnctgggaggcagtataagaagtcatcttcgtctgtgccattgaatattaaggccccctttggatacttcagttctcgggcataatgattagcttcaaaaatctcttcttcagataatctttttcccgaagcatgtcgtacaatataatcgagggctttggaggatgcttcgggggcagcagtgtcattttcttcaaccaaaattggctctgttatttttgtttcttcggcttccaagggtttcatcttggtgggttctgaaggcctagcttcagtttcagattgttgctntgaagcttcggcaacaaaggcttcagtatgcacttcagaagtttcaacaattttcttcggagttgtgcttgaagacttaattgtctccanaacatncagcacattaaccataccttttcttt

SEQ ID NO: 76326 - DNA, 272 bp, Zea mays
aatccctctaagctcaaccccattaaacaatcttctaaatccacctagcatagctttgcctatgctcagagtatttttgccttcacagctatatatctgagggaagtcaccacccccaaaccaaggaacatgactagtaggactgacatgccttacaccactcaaaaaaaaccgtgcttcaaattatctgggtgcggctcatatacactagcaaaccacaaaagctccattgaaacatattctacttggacagaaaaagaataattatgaac

SEQ ID NO: 76327 - DNA, 450 bp, Zea mays
  unsure (1)..(450): unsure at all n locations
ntcctaanagttacgggcaaaatacgacaagcggacattgtttgttcggtgcacaccggaccgtccggtgcgccatgtccggtgcgccatcttctgaagctcaaacggctacttttaacggctagtacacgtgggatgtccggtgcaccaccggacagtccggtgcacctgtccggtgcgccgcagaaagctgcagaactgctttccaacggctatatttgagttggggcctatatatacttcacccaaccggccatttggaggtgtgggagcccaagaaacataccaaggcatattgtagacatttccaagtgctcaaacacccaagtgcttaatagaataactcggtgattagcgtaggtgctttgtgaagtgcttaggttagttagaccgcaatagcgcttgctctatgtgaatcctagttagttgagtgaagtttgtaaaccacac

SEQ ID NO: 76328 - DNA, 454 bp, Zea mays
tgactttagttgcacaaataatattgctgtgtacgaagtgcttctattgcggctctggaagttaagggcaatgggaataagaagggccatcctgaaaactgattctcaagtcatatctggtcatgtagacaaaagtagcaaggcaagagatccgaagcttgaaaaatatctggatacactatgaaggttggaggcttctttcgaaggtttttctgtcaagaatattccaagaggtgaaaatgagcatgcagatttgttagccaaatcggccgctcaagggctccctctacctttgaaagtattttttgaaacaataaaggcaccttcggttgaactcatggagaaagcagtgcttactatttctccagtacatagtgaagattggaggacttgaattatatcccttctcctaggtaattgtctttagatgacgaagcttataattagagaatgg

SEQ ID NO: 76329 - DNA, 324 bp, Zea mays
tcggttaaatagagcaccaccgcccacggactttataaatagaccgtacccccagctccgacaatttttcaagcatctacggcacccacctgcattccacaccccccaccacagaacctgaatttggaagtttccccacaccgggtgaaaaacgccgtgaacccaagctcgtcgtggccagccctcctcaggtccgagcacgccctctctaatctcggtttaacaaccttaagctctcctcaaactcaccgacgcatgcacatggaatgagaatcctctggtcgtcgggaacgcgaccacctaaccgcaaagctcttaggcacc

SEQ ID NO: 76330 - DNA, 462 bp, Zea mays
taagtgtgataaagatgaaacactcgttgatccactgtttcttttactaagatatcaagaatcgcgcaaggttcttattaatccttgttggtaccctagcaaagggaagcccgtgtgagggtcaagcaccgagtcgagtaacttcgtagatagttgcgagccttctccacgcgcaagctccacttccctccgtctccactatcaagctttcgtctgaaatgtgaaagtcgcctagagggggggtgaatagggcgaaactgaaatttacaaagttaatcacaactacaagtcgggttagcgttagaaatataatcaagtccgcgagagagggtgcaaaacaaatcgcaagcgaataatgagtgtgacacgtggtattgttttaccgaggttcggttctcgcatacctactcctctgtgaggtggtcacaaagactgagtctctttcaaccctttccctctctc

SEQ ID NO: 76331 - DNA, 376 bp, Zea mays
  unsure (1)..(376): unsure at all n locations
agctcgtcctcaagcttgaaatctgtgtgtttacgccgaaattccagggcatcttcccacgtagcctcttcaatatcctgtcatgtccattggatcaagaactggcgatgaccttgaatgaagcgttgagccaatatgctgtaaggaaccaactgtgcatattctgaagacggataagaaacatcagccggtaaatcgggagctacgaccggaggagtgcctttaaagggtttcaacatggagacatgaaaaacatcatgaattttggccgtggttgggagaactaggcgatatgccacctcgcctaccttgctgaccaccaaataaagaccaaaaaanttgggcgccagcttgtgatagtgtccctgtcgcactg

SEQ ID NO: 76332 - DNA, 459 bp, Zea mays
  unsure (1)..(459): unsure at all n locations
tctaaagggagagcacatnttaggactaacatatgtttattntgagaaagacaggatttgtagcgcatgccaagccgggaagcaagttggcactcatcatccacacaagaacatcatgacaagtgacaggccactggagctcctacacatggatttattcggcccgattgcttacataagcatcggtgggagtaagtactgtctagttattgtggataattattctcgcttcacttgggtgttctttntgcaggaaaaatcccatacccaagagaccttaaagggattcttgagacgggctcaaaatgagttcggcttaaggatcaagataattagaagcgacaatgggacggagttcaagaactcacaaatagaaggctntcttgaggagggcatcaagcatgagttctcttctccctacaccccacaacanaatggtgtagtgaagaggaagaatcg

SEQ ID NO: 76333 - DNA, 378 bp, Zea mays
  unsure (1)..(378): unsure at all n locations
tgatggatncaccatcataagttcgcttttcgaaaattttccatatccattggtacacatcacttcttttttttaaaaacaactttttatcttctaaacagggctcagcatcttgaattcttttataaaacgagtatctaagaatggtaaccaatatcccaaggaatggcaatgcatcatataaggtgataaagaatttaaaacaacaaagaatggggtaaatgcactgcggcttgcctgagataaaactagttagtgtttgttacacgatgtccactagatgactatctctcatcttgacacctggtcaaaccatccggtntccagttcatcagctgacatcctcttgtggtcttctctggaccacgttctttactt

SEQ ID NO: 76334 - DNA, 395 bp, Zea mays
  unsure (1)..(395): unsure at all n locations
actgctctcggccattctccctacataccagaatatgtgggccaccaacctgcagtttatgttgctttancaagccattcagaggcttcttggcctcagctcccaccgtcgccactactgcaacctacttactctcgaagccagcagccagaagggcgccagcactcccaacaacaacgtgaattcagggaggagtccgaagctcatacattcaatagtactgtaccagaatcaaaacacatatactgaacaatatcctgctttagagatcactttaccttctaggctattctactttttgaataaggaacaaacaatgaaacattagttttaaattcttgattcttgcttctatcagaatgaatctttgcttctattagaaagaaatatatctt

SEQ ID NO: 76335 - DNA, 376 bp, Zea mays
  unsure (1)..(376): unsure at all n locations
cccccgatcctggtcgaccacgacctacacccaacataagacttccctagttatttagccacacccacgagccatgatagttctcatggaagcactgcctacccgggtggtcactccatgttccaactattatgcaataatcttgcataatcatcaagttaacaacaataatgtacacttaccatttcggaacattaatatcataagcgggagtgactgcataaagntaagacgcagcaatagcatagctacttgattacaatataatcccaggttatacaaagagcaaggttggaaagcgtatctagacaaggaacccatccagtgatgcatatatatctcaaagacgaaactttattaaatgcattgcactgga

SEQ ID NO: 76336 - DNA, 442 bp, Zea mays
  unsure (1)..(442): unsure at all n locations
agcttctaagggagaacacgtgatangtctaactaatgtacatttcgaaaaagatagactctgtgcagcttgtcaagcaaggaaacaggtgggaggctctcatcactccaaaaatgtgatgaccacatcaagacccttggagatgcttcatatggacctcttcggacccatcgcctatctaagttgaagaggaagaagcacctcaggcacctccaactcaagttcgagcgacgattcaaaggaatcatcccgtcgaccaaattttgggtgatattagcaagggagtaactactcgttcaagattagttaatttttgaggaactcaacaacttcaagcgcaattgaagttggacactggtgcctcgtcccaagcaaaatgttgtgggaaccaagtgggtgttcctcaacaaacaagacgagcacggtgtggtgacgatgaaca

SEQ ID NO: 76337 - DNA, 499 bp, Zea mays
tacggacctataaaactcagcttccataaccaatgatcggtgttgtaagatgcttgcatatagcagtcgagtcttttagtgccctgtcaaaacagtgaaatgcagaccaatggttagtgcttccattgagggtgcagacactggataagcagggccatcagagcatcaccaagggcacgaaagcatcgcaggcccgcatggcaacactagaaccttcttctccaatatgactctcgttcattcacacaagctcaagcactttgatgctaccactggagttggcagccactaccatgtttgacttccctctccagcaaacactggacacaaattgctggttgtcttcatttgtcacttgtccagttatcgggtcaatagaaccaaacctatgagaagttattggcatggggaaagttttgtagtaagaaaacacctgcacacaccaaaaggcatatgagcaatccttctacttattagattcatctatatgcttcttttg

SEQ ID NO: 76338 - DNA, 442 bp, Zea mays
  unsure (1)..(442): unsure at all n locations
agcttggaanaatctggtataaatcggcggttattatctgccagcccaacgaaactctcgacttgatgaacagtgggtgggggtttccactccaaaatgtccttgactttgctgggatccaccgcaatccccttggcagacaatacatgttcgagaaatcgaatttctttcagccaaaacgcgcacttactaaacttggcatataattgatgttctctcaagcacgttaacacgatccgtaagtgttgggcatgctcctcttcattcttggaatatattaaaatatcatctatgaagaccaccacaaacttgtccaactcgggcatgaataccgagttcgtcagataagtgaagtgggcaggagcatctgtcagtccgaaagacattaccaggtattcaaataatccataccgcgtagtgaatgtggtttttggtatattct

SEQ ID NO: 76339 - DNA, 459 bp, Zea mays
  unsure (1)..(459): unsure at all n locations
tcttcgtattcaatgaagcattntgtcgccaaagccggacaactctttctttcatattatcgntcgtgcttcatgtcatgataatgatgatcctacaaatgtctaatgaatgtttgtatgaatgcaaagaatgacgcgatgaaatatgcaaatgtatgacccgaacacacacgaaaccataccgagactctgcatccccttatgaacgacttttgagtctcttcactttctattttggtggcatttaagctctgcattcccttaggaacgtcttttgagcttcttcaccttctgtctcggtggcatttaagctctgcattcccttaggaatgacttttgagcttcttcaccttctatttcggtggtattttggctctgcattcccttangaacgactttngagcttcggaacttactctatgctcccttatgaacgacttttgtagcttcggaacttac

SEQ ID NO: 76340 - DNA, 443 bp, Zea mays
agcttaaagccatggtaagtagcataagtcaatattatgcgttttgactcaagcctagctaccggtgcataggtttcaccaaaatccacaccttcgacttgatagtatcccttggccacaagtcgagctttgttccttgtcaccacaccatgctcatcttgcttgttgcggaagacccatttggttcctacaacattttgattaagacgtggaactaaatgccatacctcattcctaatgaagttgttgagctcctcttgcatcgccaccacccaatccgaatcttgaagtgcttcctctaccttgtgtggctcaatagaagaaacaaacgagtaatgctcacaaaagtgtgcaacacgagatctattagttaccctcttatgaatgtcgccgaagatggtgtcgacggagtgatctcgttggatcgcttggtggactcttgg

SEQ ID NO: 76341 - DNA, 469 bp, Zea mays
  unsure (1)..(469): unsure at all n locations
agcttggggtcatgtgggatntcatagttatatgtctactcttctcacttctggttgatcggaggtagataatggtaagcatgccaaagggtggaattcactgtagttcggctacataaaccccaggtatgtgtccattcaggaccgacctttaccatttagcttatagtgtataccataccagtcaaaggactatcccaagtcaattcaatgactataagtatttacaattctgagagatgtatgcaacacaagcatagaggtcctagataggacgagtaaagtggttcgggaacacacaatggttttcacacaaacattgtgaaaaaatctcagaattacctttcgatgtactcgcaacttcgtgttgctaaggtactagtcatttatctcacagttcgcttcatgtcgttcaacgacaaatagcaatgtgccaacatctggttgagtaatgtatgactgagattct

SEQ ID NO: 76342 - DNA, 457 bp, Zea mays
ttaagtcacctgccggcatgcaagctttggtatgctgaagtataattattgatttggtggtcacttggtcactgcgcatgggccaccaaatttcgtcatgcagatgtaagtgaaaacttttcatgtaaatgtgagccacgaaacgcgtcgaactcaagtggcgtttggttgagcacttgtaatgataacattaatgtaaataaataaaattggtatctattaccatgagagtgaaaagcgctcattgtttggatagatatgataatgttttctatgggcagagcgtgcggccgcgcttgccatttgcgttgcaagccgtgtttgcgttgcgtcgatctgtaagccgtgcgcttgtcgtgtgcgttgcacgccagtgttgcgctgcgttgatctgcacgccacactctcgcttccacgtgatctgtagcataactgcataatcatattacacatattt

SEQ ID NO: 76343 - DNA, 451 bp, Zea mays
ggctccctagcgaaatactgctatgtcagttctgatcagagccctttgatcatagcctcaataacaatctcagttggcaccattggcgcctaggccctgaaatgcaaaaaccttcggacatacgcctttaggtattcctcgtggtcctatgtgcattggaacagagtttaagcagtcaccggctttgtctggaaaccctgaaaactggttaccaacatatccttcagcttctgccatgacttgattgttctcggtcgaagggaggaatactatgtttgagccacgctcctgactgccatgatgaaggacttcgccatgacggcaatgttgccaccatatgatgatatggtcgcctcatagctcataaggaactgcttcggatcgaaatgcccatcatacatgggaagttgtgcgtggttgtacgtggtgaccatgtagtagcctacaactc

SEQ ID NO: 76344 - DNA, 210 bp, Zea mays
  unsure (1)..(210): unsure at all n locations
cctttcatgccccctcaggtgcaagcgacccgaccaccggcaaatgcgtgtgggcactagtctaagattccaactgcctatcacaaactaatgttccgaaccgaatgcgccaagacctacctacttcaactnggtgaatggccccaataataccttagcatccgtcgaccaagcgctctcgttctttagccagcagaacaagacccatta

SEQ ID NO: 76345 - DNA, 248 bp, Zea mays
  unsure (1)..(248): unsure at all n locations
ccttggtatatgcttgttgcggatgatgctaaagccagncagattataaggtctgcatcttccactaattcaccccaaaaggaaccctctgaccctaaaaatttcagcactaagaaccaaagcctcaagatgtctagcatcggcaagcctccaatactcaacttcatccaaaaaaattgtctttatgcattaattgaagactgacacctaaaaaacaccttatacgatgaagccgtaacacccagccc

SEQ ID NO: 76346 - DNA, 438 bp, Zea mays
  unsure (1)..(438): unsure at all n locations
catgagctngaaccggatcaaaggagtattttaatcttgctcgccggagaacagaaccccgccgtagcacgcggaccgggtaagcctctgcaccataaccaaactcattgcgagcaagtcctctacatcacactcgaggagctcctcgtgcacttaattgaactataccatcacggcttggccggaacaggagccgctcgatacccccgccgcctgtgctctgggccagggtacgtccgaccacctccgacgccgaaccgcacaccgacgtgaccgtcgtgaccttcccgacgtcactggacaccccgtcggagctattatgacgccggtaagcctcgccgtcatatatatgccggggtactgtttaagccagccagggagcgcgagatacaataaagctaggtcaaggtggtatggtgcaatgtgcatgactcatgc

SEQ ID NO: 76347 - DNA, 434 bp, Zea mays
  unsure (1)..(434): unsure at all n locations
gctttctccgcagaacaaagaagcttgttctaatcattcacccagtaactcagtgaaacagttctcaccaccgcaccaaaaccacgaggcgaaagttagagttaatagaaatagtaccatattgcctacccatgtggggagttagtcctatgtaccctatataattagcccatgaggctcaatgcaatacattcatccaattacgccaattctaatatcgtacatggtaccgcgaatgaagccggcgatgatggcctcccatcggctagcaacgctcctgacaacagagccaccccacgttctcctccctcggtcgccttgcctagtgggcggntcaaattatgatttgatgggcctggatctggtactcaacctgtttcttctacagagttgtcagagttgtaagacagatgggtctagaatctatactccct

SEQ ID NO: 76348 - DNA, 433 bp, Zea mays
  unsure (1)..(433): unsure at all n locations
nttatgtgctcaaaacatatgcccatagatgctttgttgccttctacggtattatcanagcttttatgtgctcctggtatacgtgtgaatgtcagccatcgtgctgttacttttatttgcaggttctggaaacctcccagtgcaggggaggtgctgccgaatttttttgttgacagacttgtttatttttttgcagaggtcttcctagccgctgcgggtctgcctcgcgtcgccactgcaccgacccgccacagccccactagcctgactccaccgccaccctaggtataacctctatttccgcatcatggtcgtagatcacgtaacccagttaggcgtctcccattcaaaagagatacgatgtagatatgcacatctttgcatatctacaaatgtatcagtttcgaattatccacgttttctaaacagcccg

SEQ ID NO: 76349 - DNA, 405 bp, Zea mays
agcttttggaaaaatcacctaagcttcgtttgtccatgcccttgcggcggaccgttcgcgacactagggtgagcctcggacagaaccaatgcaaaacacacaagtctacactacggaccgtccgatggaaaagcaagcaccgttcgagaccaagtgcggaccgtccggtctcaagcgcggaccgtccagtcggtgcagaaccgaaaaacctagaggtgacgggttcggtaaaatgaattatagcgtcctcgcggaccgtccggggtgcacgaccggaccgtccgcgactgcctttatctgacatctgacgacgcatttaatgcatagtagccgttactgctgaccgttgcgattgtagccgttgatgtgcaggggcggaccatccgcggtcggcagaaaaagagc

SEQ ID NO: 76350 - DNA, 455 bp, Zea mays
  unsure (1)..(455): unsure at all n locations
aagggagagcacattgtacgattaacttatggttttttctagaaagacaggatnngtagcgcatgccaggcggggaagcaagttggagtccatcacccacacaagaacatcatgacgaccgacaggccgcttgagctactccacatggatctattcggtccgattgcttacataagcatcagcgggagtaagtattggcttgttattgtggatgattattctcgcttcactcgggtattctttttacaggaaaaatctcaaacccaagagaccttatagggattcttgagacgagctcaaaatgagttcggcttaaggatcaagaaaataagaagcgacaacgggacggagttcaagaactctcaaattgaaggcttccttgatgaggagggcatcaagcatgagttcttctctccctacacgccacaacaaaatggtatagtggagaggaagaa

SEQ ID NO: 76351 - DNA, 438 bp, Zea mays
  unsure (1)..(438): unsure at all n locations
agcttctaattgacatcacggcacattatttttctttttaatganaaatgcatgaactcaatctcttctaatcattcacaagttcttcttttaattaaataaaagatattattttaacactttatggaaacattcagttttggagccgccgcactgacttgcgtcattgaaggagaaggaagccgtgccaggacacacaggcggtatgccacaaaaaatcgatcaccaaatcccacaggcaagacacatgacgcacaggcgcaagctggtcgcggttgcgaaggctgttggagttgctattaagcaaatccacagtaatgcaaatgtatgctaaaatggctcatgttgtgatcctaagaaaaaatcaaaacaaagtgtcagtctttacatggtcatctttccactattcagtcctgaccataactacactaaaagttt

SEQ ID NO: 76352 - DNA, 445 bp, Zea mays
  unsure (1)..(445): unsure at all n locations
tcganaggtgaacgaaatagagattggataatggtattatggttcaaatgagtcaagttgatgtgataaaaatcaaggaggccacggaaaataggagatatgggaaggccgaggccgcggagaacgaaaggagcgtaaactactgactcgtgggtatcttcggttgggacggtagtcccgtggcaaacccgccaagaacagagttcccgcggaggaagaaccccgatggagacaagacggaggagctcagcttcggaaataacagacgtatggttacctgcgaacggtaactgactgttggggtcgattgcggngatcacagcagcagacgagttcgcggttntcctcttgggcgccatctagcttctcgctggcaaacagagtatgaggcgagtggcggagaagattcagatgcggaaatgcaagaactatggcacggaaagca

SEQ ID NO: 76353 - DNA, 387 bp, Zea mays
  unsure (1)..(387): unsure at all n locations
cagctcttaaacctctccaagtgtcataatttatataagngatcattcgtgattagtaacttgagagagtgtgattcgtggttcatttattgctcttggtgcttgtctttttaatcatactttcttcatctccttataaactctctagtgacttgtaaagctagcaagagacacctaagtgtgtggtgatccttgcggagtcttagtgatccttgtgattaagaagaagcactcaaccggtctaagtgatcgtttgagagagggaaagggttgaaaatacccggtgtgacaccccagtgtcacctanggtcccttctcagtactaactcaagtgccattatttcatgtgaacccaaatgggcaagaggcaccaatcaacttaagaat

SEQ ID NO: 76354 - DNA, 426 bp, Zea mays
  unsure (1)..(426): unsure at all n locations
tcgtatgacctgggtcccaagtgttttctgcttttgtttccaaaatcgtgccacaaatggtgctcctctgtccgagactatagtccttggtatcccatgcagacgaactatctggtaatgtagatttctgcatacttctctgtcctgtgggtggtgtgcactggtaagaaatgagcagtattagtcaatctgtccacaataacccaaatagaatcatggtgcctggatgtattangcaatcccactataaagtccatgcaaatgtcctcccatttccaagatggtatgggaaggggttgcaaagggcctgctgccttcaagtgactagctnttatcctctggcaagtgtcacactcagatacgtagttggcaatttccctcttcattctggtccaccaatataaagttctgagatcatggtacatc

SEQ ID NO: 76355 - DNA, 448 bp, Zea mays
  unsure (1)..(448): unsure at all n locations
cacctgcggcatgcagctagaccggactcagcgaacacccctttttgcgtccgagccgtcccctcacccctcgcctgcccgagccgtcccaatcggcgttagcttcattcccgccatcatggcgagctcgtcggcgctcggagtccccttcattcctctccctctcccgggcgcctataaaaagagctgtccgagccccgtcctctccacactagcttcgaccaactcctccgtttctccccaagcaaatcaagctagcgccgctgtgcttccccgtcactctggtgagctccatttcccccttcctagtgaacatcagtgcaattgacctgtgcgcgaagctccgccacacactcacggtcacagggcaccccntcccacctgctatggcacccgacaacctcaccggcgacctcaccgttgtggacacccgtcaccgcgccgcgga

SEQ ID NO: 76356 - DNA, 445 bp, Zea mays
  unsure (1)..(445): unsure at all n locations
tctaaagggagaacacgtgatatggttgactaacgntctattctgaaaagatagaccttgtgcagctcgtcaagcaggtaaacaagtgggaggagcacatcacagcaagaatgtgatgaccacttcaagacccctggagctgctgcatatggacctcttcggacccgtcgcctatctgagcataggagggagtaagtatggtctagttattgttgatgactnttcccgcttcacttgggtgttctttntgcaggataagtctgaaacccaagggaccctcaagcgcttcctcaggagagctcataatgagtctgagctcaaggtgaagaagataaggagcgacaacgggtccgagttcaagaaccttcaagtggaggagttccttgaagaggaagggatcaagcacgagttctccgctccctacacaccacaacaaaatggtgtg

SEQ ID NO: 76357 - DNA, 417 bp, Zea mays
  unsure (1)..(417): unsure at all n locations
agcttcctataataatccatatcatgcctgtaaacatatggctagtcatgtttttgaggaccttctgaagaggaagacccccaacacccatccactttcacataagccatttacaaatgacattaggacaggagtgtactttcttcatcctcgactccatgaattccagccttcgtcgcccagttgtctttcctttcgacttgaggtcgaagttccacctttggctgttatctttattactagtgtataaacgaagtgctgttgtacgttgtcttctgtcgaagtttagctttgtccgtaagtgaggacattcctgaattacacttgttaacgacanagctagatgttaagcaagtgatcttcggcatatgagtgatctttggcaatcaaggcccccaatagtagccccttgcggga

SEQ ID NO: 76358 - DNA, 438 bp, Zea mays
  unsure (1)..(438): unsure at all n locations
tattgcacatacctggccactacaacgttgggaactatacatcatcgggccattgcccacagcgcaaggcaacctancattcaccatcgtcgccttgaatacttcaccaagcggattgaagctagagccgtgtcgacaataacttccaagacaacacataaattcttctggtagaacatcgtgtgtcggtttggagtcccatcagagctaacatgtaacacccgggctttaagagataaagccgagtgcatctcatatatgcgccaaagaagacaacatatataataacatagtgtatagagataaacatcacaataatcagagtatttattacatagcggaagtcttacaaaataaaagataaatataaaaggatctaacatccatccttggtgccatanagtcaactgtgagacgccacctagatcgaatcgaact

SEQ ID NO: 76359 - DNA, 420 bp, Zea mays
caagctagcattgggtccctaaagaaattgtgactaaccttgtatgacccaacaagagttgggtacctaagacccaagcctaaatttgccttgcaggtttatgcatccgggggctcaagctggattatcgacagcggatgcacaaaccatatgacgggggagaagaagatgttcacctcctacgtcaagaataaggattcccaagattcaataatattcggtgatgggaaccaaggcaaggtaaaagggttagataaaattgcaatctcaaatgagcactctatttctaatgtgtttttagttgagtctctgggatataatttactatctgttagtcaattatgcaatatgggatataactgtttattcacaaacatagatgtgtctgtctttagaagaagtgatggttcactatctttt

SEQ ID NO: 76360 - DNA, 481 bp, Zea mays
  unsure (1)..(481): unsure at all n locations
ctcagctngaaatggaanacccacttattaagataagatcgagaaccaaaaaaattccaattagaagaggaatgatcctaaatgttcccatagatccaccaattgaagcttgtaggcgaaaaccaaccaaatgcgcgaaaagccgaatcttgcagcgaccaaatgaaatcactaaaaaaattctgagcgatcgttattgattggttgcccgaggcaatttcagacatataatccttgaagaaagaaatcaacccttgcactttatcaatagcatctccaatgagcatatatttggcttgcaaatgcttgcttactgtattaacaacatataatacctcataccaaatgactattgccactataaatttatactctccaagttcgttattagccaaatgtttagcctcactactcgtttctgcatcattatcaacatctgctacctgctattagaaaaaatatgtgttataattggacaaat

SEQ ID NO: 76361 - DNA, 197 bp, Zea mays
cattttccgcgtatatcataagaaatcccacccatgttacataggaccgacaggttacaagactctggaacctagacaagacccaaaaagagatatgagtgaacaaacaaaataaccttgagaaattgctcacagagtatgcaagcaccaaacagtacagactcgataactcacaaaaaattaggaccaccaacaaa

SEQ ID NO: 76362 - DNA, 459 bp, Zea mays
tggatcacgaccacttcggataagctcgtgcgagttagccacttcgcgaccgtgcgccacgtgcctcggtggtttaccacgtcgcagtagttccccttgtgcatatccggtgatctgcgatgaccccgccacggtgacagccacctattccttgcaacagtattcttttcactctccgaccggcaccgcgccatccgaaattcaccggccaccggccttggagactataaattgagggaggggatagttgcgccatgtaatcgtcaagctatagcacccactctcatctccactcgctcaccgtagctccgcaattcgggctttcccccaaattaggctgcgccaccgtaaaacaccactgtcccgtggactgtacgttctggaaagcaccatccaatttgcgcgttgttctcatgtacctatatgctggcgatgctctccaaacccgctaattaaact

SEQ ID NO: 76363 - DNA, 445 bp, Zea mays
  unsure (1)..(445): unsure at all n locations
agcttaagagaatagattctgtacagaattatgttatctgataaactgctataatcaaactgcaataactttctgatctgatatccgattgaggtgttcttcgcggccacggaaagatctacaaattatatacgactcatagatagactttttatttttttgaggccactaagaccacggaaaactggcatgaacagaaactattgaatctgccattctgcagaaactaatttcgagattaaaatctaatctcccatccaatctaaccaaaaaaactaattgcagggcctaaaactcatccaaaacaagggaaagcattcatcaagtggataaaagagagagaggaaaggaaatccatccaattcttggagaggaacgacgatgatgggcgacggtntgccctcatctcccctctcttctcttcttttttcttcctctcttctct

SEQ ID NO: 76364 - DNA, 398 bp, Zea mays
  unsure (1)..(398): unsure at all n locations
tagactgcaccagtgcatgcgcgcccagcttcctagctacagcgaaccanacacgggctcaactgtagtcaatgcatgtgaggagtctagctctcctgatacagccaaccaaacacatggtacgtaacagtgcgggtcctgacaattttaggatgcatttggttggagtcaattaaaatagaacgactgcattctagtttttagaatggatccgttctattctccgtttgacaagcagaacatagttactctatttttgtttggttgaagagtacaataaagcagagctgctcggttctttgtttggttggagagttgtcggcgtctcgagaccagggggtccctaagccgacgagtgagtgtgccgcgtgccccagcccacatgggtcgagcgcgtg

SEQ ID NO: 76365 - DNA, 398 bp, Zea mays
agcttctgcaggtacatgaactcctgaattggtgctgaccgccagtccctttcagaatcgactgcagctcggctttggtttcgtccagcaactcatcgctcatacccttcatcttctcagcaacgaggtccaccctgtcccaagcaacctccctgagagtcatccggcctgcactcgggatcctactccgaaaggcctgcagctcggcgacgccattaccaaccacctccttctccttattatcagctatcctcagtgcagttatcggtgctgatgccacgggaggagcgtcgccgccaccactcttgccgggctccccaggccaagtctcccgtgagctggcgctctctgtggcggagtcatgccccgcgtcggagttcgacagcggcttctgtgtg

SEQ ID NO: 76366 - DNA, 434 bp, Zea mays
  unsure (1)..(434): unsure at all n locations
tctatagggagaacacgtgatatgtctaacttatgttactttcacaaaagatagaccttgtgcagctngtcaagcagggaaacaggtgggaagctctcatcatgccaaaaatgtgatgacaacatcaagacccctggagttacttcatatggacctcttcggacccgtcgcctatctaagcatatgaggaagtaagtatggtctggttatagttgatgacttttcccgcttcacttgggtattctttttgcaggataaatctgaaacccaagggaccctcaagcgctttctaaggagagctcanaacgagtttgagctcaaggtgaagaagataacgagcgacaatgggttcgagttcaagaaccttcaagtggaggagtatcttgatgaggaaggaatcaagcacgaagtctccgcttcctacacaccacaac

SEQ ID NO: 76367 - DNA, 364 bp, Zea mays
  unsure (1)..(364): unsure at all n locations
agaattagccaagccgatcacatacagaacgacctattttgtgttttaccacttgaaacaccaggaggttagacgctttcgtataagccaaaaacaatagcctctgcgaggaaacgagaacttccttcaacagactactttgcatggtattatgaagtccactagaaccgaaagggaaaatgagtatatatggagcatgtagaacatacaacaaatgggttatagatagagtccttgatgtgagaggctaaataaaaacaataattatacaaacctttaatgcgcctcaactctctgcacagagtgaaaaagctccccatntcatatggcaccgcctaataaaacgcagaatctgctcaatagt

SEQ ID NO: 76368 - DNA, 477 bp, Zea mays
  unsure (1)..(477): unsure at all n locations
tactcagcttctaagggtgagcacattctagggttaacaaatgttcattctgagaaagacgggacttgtagcgcatgccaagcanggaagcaagttggtgcccatcatccacataataacattatgacgactgacaggccactggaactcctacatatggacctattcggcccgatagcttacataagcatcggcgggagtaagtattgtctagttattgtggatgactattctcgcttcacttgggtattctttttgcaggagaaatctcatacccaagagaccctatagggattcttgagacgggctcaaaatgagttcggtttaaggatcaagacaattagaagcgacaatgggacggagttcaagaactcacaaatcgaaggcttccttgaggaggagggcatcacgcatgagttctcttctccctacaccccacaacaaaatggtgtagtggagaggaagaatagaactcta

SEQ ID NO: 76369 - DNA, 383 bp, Zea mays
acaacaaagcattataaggtaaaaagttatctcatgagaaggtaagcaacaagtacaagtttaatacaggcttgagataacttctagcttcgtcaccagctaaatctcgcccacccttcgtccaaatttgtgttataaatctatttccaatgcttcaagccaggctgggggtgtcaaccacgtccgctggtggtaagttgaagttcggcctgtttacaatttttccgtgcgtgcaaccagccttcataaaagctacatctgtgccgcgagaagccatcaaggcacagaagtcaccatgcccagctataacttcatcaagcgcctcaacttctccctcaatatgttcgaaagtgcttggtaggtcttcaaccgaaggttcaaat

SEQ ID NO: 76370 - DNA, 463 bp, Zea mays
  unsure (1)..(463): unsure at all n locations
cgtgaaggttcttcatccncacatgtgctaagcggcgatgccacttccagcccatgctagtcttagcaattaagcatgcatctagaccggcctcctcttttgcaaaattaactaagtaaagnttgccgtctaatacacccttaaaagctagtgaaccatcacttcttctaatgacagacacatctacatttgtgaatagacaattatatcccatattgcataattgactaacagataacaaattatatccaagagactcaactaaaaacacattagatatagagtgctcgaatgaaatagcaattttacctaaaccctttaccttgccttgattcccatcaccgaatattattgaatcttggtgtcngggaccataattaggggtaccctcaagacgcctaattctcagctagtaacccccatcagcatanagctgcagaggcctgatgggtgcgattaagtc

SEQ ID NO: 76371 - DNA, 415 bp, Zea mays
agcttaatgcctataagaaatagtgtactttgttaatggaaaagctcccatggttcaggataacgagggttacattttataccctgtcggttatcccgaacacaaaattaggagaattcattctaagaagtctcactgtggctctcatcatgctttcatgtataagggtgaggcatctatctctatgcaatcaacccatgctaaattgcctaaaaagaaatctcctattgcatcaaatgagcctattatttcatttaagacttttgatgctttatattttttaactaacaaatcaggcaaagtagttgccatatatgttggggccaaacacaaggggtcaaaaacttgtgtttgggtacccaaagagcttgtttctaatgtgaaaggacccaagaccgtttgggtacctaataac

SEQ ID NO: 76372 - DNA, 461 bp, Zea mays
  unsure (1)..(461): unsure at all n locations
tggtntggctcatcctccttctacattcagatttgatgataacccgagtagcagtccaataaactcatgagttctgaagaagctactgcatctacaagggaatctattcttggtaatgggaattcatccttcggacataccttattgagatctgtgaaatcaatgcacattctcaattttccattagctttcttgaccatgacagtgttggccagccactctgggtatgtgtgacacccctggagttactgtcactaaaacttgagcataacatcatgagcattggcatatcatgtgtttgttacacctagagtgcattcactangtaaaaatttcaaatcatttgtactgatgtgacctgatgtgtggttaaccctatgataaagtgcttaacctcatatcatggcttatggatataaatgaagcccaaatatgtgaaaacctcacaagacatgagacat

SEQ ID NO: 76373 - DNA, 399 bp, Zea mays
  unsure (1)..(399): unsure at all n locations
agctangcctaggataatgagagggttgtttctatcttttagccaaaacggcagccttcatggttaaagactctacaggagaatgtcagtcccaaatatatgctcgtgcatttctattgacacatatttaaactattccagattcatttacctattgtacaagaagcactattcacctacgctaaaagatgaagtctggatgttggaaaaaatctgacaggatggctcattccattagaggctgaacacatctgcaatatctacaggtgacgattttcttaagctcgtacttctggacccacagaacatgcgcaatgttacttctatgtgggggtggcttaacctactattattatactttgattcttacgagcgtcagtttatgatgattaatgctct

SEQ ID NO: 76374 - DNA, 454 bp, Zea mays
  unsure (1)..(454): unsure at all n locations
tctaagggagaacacgtgataggtatgactaacgtgcttttcttaaaagatagacctcgtgcagcttgtcaagcaggttaacaagtgggaggagcacatcacagcaagaatgtgatgaccacttcaagacccctggagctgctgcatatggacctcttcggacccgtcgcctatntgagtatatgaggaagtaagtatggtctagttattgttgatgactgttcccgcttcacttgggtgttctttttgcaggataagtctgaaacccaagggaccctcaagcgcttcctcaggagagctcaaaatgagnttgagcttaaggtgaagaagataaggagcgacaacgggtccgagttcaagaaccttcaagtagaggagttccttgaggaggaagggatcaagcacgagttcttcgctccctacacaccacagcaaaatggtgtggtagagagga

SEQ ID NO: 76375 - DNA, 455 bp, Zea mays
  unsure (1)..(455): unsure at all n locations
tctanagggagaancacatttgtgactaacaaatgttcattttgagaaagacagggtttgtagcgcatgtcaagcagggaagcaagttggtgttcatcatccacacaacaacatcatgacgtctaacaggccactcgagctcctacacatggatctattcggcccgattgcttacataagcatcggcgggagtaagtactgtctagttattgtggatgattattctcgcttcacttgggtgttctttttacaggaaaaatctcatacccaagagaccttaaagggattcttgagacgggctcaaaatgagttcggcttaaggatcaagaaaattagaagcgacaacgggacggagttcaagaactcacaatcgaaggcttccttgaggaggagggcatcaagcatgagttctcttctccctacatgccacaacaaaatggtgtagtggagtggaa

SEQ ID NO: 76376 - DNA, 460 bp, Zea mays
  unsure (1)..(460): unsure at all n locations
ngaagccatgaggagnagcataagcaaggaatatgtgatattactcaagcctagctacaggtgcataggtttcaccaaaatccaaaccttcgacttgtgaatattcctcggccacaagtcaagctttgttccttgtcaccacaccatgctcatcttgcttgttgccgaagacccacttggttcctacaaccatttgattaggacgtggaactaagtgccatacctcattcctagagaagttgttgtgctcctcttgcatcgccaccacccaatccgaatcttgtagtgcttcctctaccttgtgtggctcaatagaggaaacgaaagagtaatgttcacagatatgagcaacacgagatcgagtagttacccccttgtgaatatcgccgaggatggtgttcacggtgtgatctcgttggatagattggtggactcttgggtgtggccgccttgtagcttg

SEQ ID NO: 76377 - DNA, 384 bp, Zea mays
gcccgggacatacaagctggccaacgatcgaggcgaagtctacagcaacgcttggaacatcgaacaactacgtcgcttctatccttaaaatgtttcaagtcgttcatgtatctcgctttctttacatgtataaataaagcctaaccatcaaggaaggatcagccttgcctcggcaaagctagaccctctctcgggggatagaaggggggaaccccctctgcgtcaaaattttcctcgaaaaagttttctgccaaaatgacttttgtgcctttcgactatatcgataacggaatcataaaaacgagtgagagagaccttaaacggcaaggccgaccgagccgagggactcctacgcctctgggatacagatacctcactcatcac

SEQ ID NO: 76378 - DNA, 424 bp, Zea mays
ggccttcgcctcagggtaccacccacaatccaatggcgtcttagagcgcgccaacggcaagattatcacggcaatcaagaaaatgctcctcgatgacaagaagggtaaatgggccgacctgctacctgaagcattctgggcactgaacacgaccgagtgtcgggcgaccggattcactccctttcgcctgcaatacggatcggaggccatgaccccgcaggaaatgaaacatgggtccccgtggacaagcgcttcagcagtacccgacgtcgacgagctgacctctaaagatctcatcgacggagaccgtgtcttcgccctccaggccctcaacaaataccaagtccaaacgaatgcctggcgcgaccacgcagtcgtcccaagagaatttaacgaaggtgaaagggaattacgcttacaccta

SEQ ID NO: 76379 - DNA, 423 bp, Zea mays
gtagcataagccaataatagacgaattgtcttaagcctagctaccggtgcataagtggcaccgaaatccaaaccttcgacttgggagtatcctttggccacaagtcgggctctgttccttgtcaccacaccatgctcgttctgcttgttgcggaacacccatttggttcctacaaccattttggtaggacgtggaactaaatgccatacctcgttcctagtgaagatgttgagctcctcttgcatcgccaccacccaatccgaatattgaagtgcttcctctatcctgtgcggctcaattgacgaaacataagagtaatgctcactaaagtgtgccacaccagaactagtagtatctccttatgaatgtcacccatgatggcgtcgaccgggtgacctcgtttgattgcttgggcgactcttg

SEQ ID NO: 76380 - DNA, 442 bp, Zea mays
tctacaccgacctcaacaagatcgacaagcgattgttgtttgtactcccctccgcggactggagcctgaggacaacgccgagccgagccacgggcttcacgccgttctttctagtctatggggccgaggccatcttgcccacagacttagaataccgtcccccgaggacgagggcctactccgaccaaagcaaccaagctagtcgagaagactcgctggaccagctggaagaggctcgggacatggccttactacactcggcgcggaaccagcagtccctgcgacgctaccacgcccgaagggtccggtctcgagacctccatgtgggcgacctggtgcttcggctgtgacggaacgcccgagggcggcacaagctcacgccttcctgagaagggccgttcgtcatcgccaaagttctgaagcacgaaacgtacaaactggc

SEQ ID NO: 76381 - DNA, 288 bp, Zea mays
cctaaatgagtattccacttcagaaagagttttctcgtcctttaaagatgaagaaatacttcccctgacagagatcctcctacttatggaaaaagcatgataaattagaagtgcaagacatgatttgtaaagactaacttcccttatgcataggtaacagaatatgagttaactacttatgctgttttagcaacaaggaagcatatgatacgaaatatagtctaatcaaatactgcagaagacatgcacctgatactaaatgtaatctccaaagatcccactgaaagt

SEQ ID NO: 76382 - DNA, 456 bp, Zea mays
  unsure (1)..(456): unsure at all n locations
tggatgcaaaagcactaggagctcttaatctttcgctagaacgcaatctcaagcaaagagtgtgagatagtgaagtagaggatcataaatgagcctaatgtatgctagaaatgacaaagagagacctcacacatgagctccacttgtatttatattccacctcttaattctagctggtatgtgcaactagcacaatatctgcgcacgcgcggacaggtcgcgccctactgccggacggtctgccgtacaggtaacaactataattcatgtttgaaacatgtcagagctgtcagaataagtaaaacccggatggttcgacaaaccagactagacggtccgggacctggtaacttaaattgcttgagcactgaccaagttgaaatatatgggcgaactgtccgtnctacagggccgaatggctcgccatgggagaagtaattggcaggccaatgcctt

SEQ ID NO: 76383 - DNA, 242 bp, Zea mays
gcacccaaaccggtgccatgggcgaccacaaacacaggcgcctctgagaatgtgatctcaaggcgcttctcatgacctcaaacccgagaactgaagccggcggagtaccactagcacatagaacagccaacggtgctagctgagtcataacacaatcccgcacatcgacgaaggaggactgcaacgagcatgactggcgaactcggacactgtcacgacagcagccggccccggggactggt

SEQ ID NO: 76384 - DNA, 448 bp, Zea mays
  unsure (1)..(448): unsure at all n locations
tgctgcagaatgagagtgaactgcgtttctttgttacactatcttctttggcacaccatgaagacaaacgatccgagacatatacaattctgccaatactgcactgctgtagttggtcttgacaggtatgaagtgggctgacttggtcagacggtccactactacccaaatggaatcgtagccggctcgagtgcgaggcaatccgactatgaaatccataccaatttcatcccatttccactgagggatctgcaacggttgcaacaatccagcaggtatctggtgctctgccttaattcttcgacaactatcacacatagccacatgctctngcgattccttttcattcgtccaccagaaatttttttcagatctgatacatcttctactgctaggtgaacaatggctgctcatgactttctagaataattccgaaggactggacatg

SEQ ID NO: 76385 - DNA, 439 bp, Zea mays
  unsure (1)..(439): unsure at all n locations
ctataaaactcagcttgtccacccgggttttaggggcaccaagaccacggcacgttcataatcaccaagtgtgctgggaccaagtctcacacatatgatgaatcatggcacaggatcgaatgtcacaactttactatataataggagttctatacaaaataaataattacatataaggagacaaccgtccagcaacccaaagttgactgggagacgacgacctagacctctcacgaacacatcgcagcatcctccaagcgcctcatcctgcggtacctgttcttgacctgtgggggggtgtgagatgtaacaccccaggtgtttatcgtctgctcgaccacgagtgcggactntaacatgtgatagcggtgaataaaatgtacactatattntaatcatcttcgtcgatcacaanttcgatatcgtgtctgtctccatc

SEQ ID NO: 76386 - DNA, 463 bp, Zea mays
  unsure (1)..(463): unsure at all n locations
ttcttcatccacattagatggtatcctgaattacaatctaataggctcatntgctccaaagtagctgctgcatccactagagagtctattcttggtaaaggaaactcatccttcggacacgctttattaagatctgtaaaatcaatgcacattcttcactttccattagccttcttcaccattacgatattggccagccattctagataggttacctctctgattactctggcactcagaagccttttgactttgtttcgtgcaccttcagctttgtcttcagacatcttttgaagcttctgcctttntggcctaatagtaggatctacattaagtgaatgctcgatgacgtctctgttgacaccaaagagatcattggctgaccaggcaaagacatcnctgttggtgaataaaaatttcagcacggtttcttcttgttcgtcagccatatgtgatcccagca

SEQ ID NO: 76387 - DNA, 449 bp, Zea mays
  unsure (1)..(449): unsure at all n locations
tagaaactnaagccctaactctttgtatgaccctgacctctgcctcagccttaagtatctaatctggcccaaatatctccctatctcctgcttgagaccaactaagcggggttctacatcatctcccatataaggcttcaaaaggtgccatctttagaccggactgatagctgttattataagaaaactctgccaaggaaagacacttgtcccaatcttctctgtattgtagtacacatgcccgcaacatgtcttccaaaatctgaattaccctttccgtctggccatctgattggggatggcatgctgagctttgtattacctgtgtcccaagtgattcttgcagctgctcccaaaaatatgccacaaacagtgctcctctgtcatatacagtggtccttggaataccatgcaactccactatgtgatcacacataatttccgcatac

SEQ ID NO: 76388 - DNA, 497 bp, Zea mays
  unsure (1)..(497): unsure at all n locations
gacctataaaactaagcttctttaagctgggcttcngttcccactgagcaagtttgtatgggatgtactgaanaccttccaaattttccttcatcaactgacccccgaagctatattgaggatgggagtcttcgtctgggcagcaaggagccaagggatagaactaagcgcataatgcttctgcagcatgcacgaacttatgtatgatacgaaggccacgatgaaggaatagtatcacaacaacttcggttattatgggtttattgcccatcccaacacaagttacccagtgcccacatttctgaagaggtggccgggaaattggatggaagaatggttttatgtgaagaacgacttactggcgagggaggatgttaaggaggttattatgcgccccatttggtcccgtttcggccttcgaaagccgaaagttgagattgacgataccgccgaagcatgccaaaagccatttggcactctatgcttcttcattggta

SEQ ID NO: 76389 - DNA, 467 bp, Zea mays
tcgcacctctgaactaactcggctgcatcactctttgttgttggccaatagaatcctgacctgaagactttcccgactagtgttctggaggctgcatgtattccacattgcccagcatggacctcctccagaagttgcttcccagtggacgggagaatgcatttcatgaggacgcctaatgcaccccttctgtataatgtctccccaatgagtgtatagtgagccgactgtctggcaatgcgctctgccgagttcttgtcgtctggttcttcttcattctttatatacttgatgattggccttctccagtcatcagagtctgactcggtttgatctataatgttgcactcttctgtttgatccattgagatactcggctgcagtatttcttgcacatagactccgggtgggacctgagctcgactggatcctatctcggatagtacatcggctgtcgtgttctgatc

SEQ ID NO: 76390 - DNA, 447 bp, Zea mays
  unsure (1)..(447): unsure at all n locations
ntagaagcactttgtttcttagtccccccgacatgatcttttcctcatgcggntaagcgttagaacgaggattagcctctgataccaattgaaagttgcctagaggggggtgaataggcaagttaaaactttttcaacaaaaactagaagcaaactgggtaaaactgaattgatctcgaaattcacccagttagctttggaaatgagatgttctaaatgatccacagggttcaaagtagtagatctgagaagggcacttctcaaaatccacacaccaaaaagatataaacaaatctttcacggaatggtgagagaacgacgaacacgaataagcacaatgaacaagaacacaagagacacaagaattatcccgaggttcggtcacaccaccaaggtgccctacttcctcgttgaggcgcccacaaagagccgggtctctttcaccct

SEQ ID NO: 76391 - DNA, 372 bp, Zea mays
  unsure (1)..(372): unsure at all n locations
ctttatgagctatatatatacgacagatacgccttttctgtatatgacgccacatcttcaggtcatgaaccacagcagntaattctacgtcatgaagttggacaatgaatctcatgccggcacaactatcctgaggcatatgctataactacggcctcttgcatcaagacactacctcaaccactggctgatgagtcacaatacacaatataaatgcttttcaatgtccggttgagttgatactggagcagaggtcaatgacacctctagcttctcgaaggcttcaatgcattctgaagaccagataaattattgatcgttcttcaataaactcgggattggattcacaggcctcggaaaaatcnggataaa

SEQ ID NO: 76392 - DNA, 440 bp, Zea mays
catcaagggagaacacactctaagactaacaaatgtttcttttgataaagacacgattcgtagcgcatgccaagcaagaaagcaagatggcacccatcatccacacaagaacatcatgacaagtgataggccattggagctcctacacatggatatattcggcccgaatgatcacataagcatcggcgggagtaagtactgtctacggattgtggatgattattctcgcttcacttgggtattctttttgcaggaaaaatctcatacccaagaaaccttaaagggattcttgagacgagctcaaaatgagaccggttacagatcaagaaaatataagcgacaatgggacggagttcaagaactctcaaattgaaggctttcttgatgaggacggcatcaagcatgagtcctcttttccctacaccccacaacaaaatggt

SEQ ID NO: 76393 - DNA, 186 bp, Zea mays
atgggctcaagccatccccaagagcatggtatgaatgcctaaaagaatttcttattgctaatggcttcaaagtcggcaagggcgatcctacactctttactaaaactcttgaaaatgacttgtttgtatgccaaatttatgttgatgatattatatttggggctactaaccaggctacatgtgaag

SEQ ID NO: 76394 - DNA, 250 bp, Zea mays
ccgtgaggagtcaaggtttatagccaagtgcaaaatgcttctgcagcatgcacgaacttttatatgagacgaagccctggggtaaggaacagtatcataacaattttggttgctacagcttcgatgctcgctcaggctcaagctgcccagtgccaaccttttggaagagatggcctatagactggataaaagaatggttctatgtgaaaaatgatttaaaggcgatggacgacatttcatacatcatcac

SEQ ID NO: 76395 - DNA, 366 bp, Zea mays
acatccactccgcaaacagtctactggtcacagtctaacacggcttttgctagccaggaacaaagggcagctcattgctcatcaaagatggggcccttgtcactcacatagataccgtccaagaactctcggatatccttcatcttgacatggcatttcatgtttaagagaagaaaaaaattattaacgatggtagttgagtacttctgatagcacattcaccaataacatcattccaatgcagtatctacagttgcagttgcagacatggatgcagagaaatgctgctttccatgaaaggccaaacagcattcattataatatgggcagatcaacttgttccgttgaattacagaaactctttgc

SEQ ID NO: 76396 - DNA, 445 bp, Zea mays
acgaattgtctcaagcctagctacgggtgcataggtttcaccgaaatccaaacctttgactcgggagtatcccttggccacaagtcgtgctttgttccttgtcaccacaccatgctcgtcttgcttgttgcggaacacccatttggttcctacaacattttgattaggacgtggaactaaatgccatacctcattcctagtgaagttgttgagctcctcttgcatcgccaccacccaatccgaatcttgaagtgcttcctctaccctgtgtggctcaatagaggaaacaaaagagtaatgctcacaaaaatgtgcaacacaagatctagtggttacccacttatgaatgtcgcctaggatggtgtcgacggcgtgatcttcgtggattgcttggtggactcttgggtgtggctgcctgggttcttcatcctccttgtcttgatca

SEQ ID NO: 76397 - DNA, 462 bp, Zea mays
  unsure (1)..(462): unsure at all n locations
ncaatagcaaattcattctnggcagatgaggaacggtgtttngttctatgcacatagaacgtntcgctaccaagcataatacaccattccggaacgacgatagcttggaccatacccaatcgaagatggctggacaagattcatctttattcccttcactagggaaatcattgggaaaatcagccaattgtgaattaagtcatctagagagatggcaagcgcatagatatgtgtcgcacaaatgtgatgttgtaatccatatctaacgtaagtgttttggtaactaatgaactatgcatatagattatgaatattatcaatatatggtaatcatggtatatggaacatgcttctaatcttgaacgaaagagacgcgaccgtcccctaacgcctaaagatattgagcagatacagaatcaagaacttccagaatggttagacaacatgtaagtagcctaatct

SEQ ID NO: 76398 - DNA, 361 bp, Zea mays
cttctggcagcttccagactcctatgaatagcattacgccctcggtccgaacgtaacttcatgcacagataatccgggtgaagaatagatcaaaagcatttagggtaccacgaccaatgatggcgctgtatgggtattccatgacaacaatatcaaacacaatatgctcagcccttgtgtactaacaaatccaatgttacggcatggaatcttccagtgccaaaatgccgcctccagcccaaagaggtgcgactcataatctgctcagctctgcttgctgaagttggaataaagcactgactgctggaaaagaatgtgacaaaccttgtaacaaaagaccacaatgaaggggcctcgcgaa

SEQ ID NO: 76399 - DNA, 410 bp, Zea mays
  unsure (1)..(410): unsure at all n locations
tctaagggagagcatnatttgngctaaccaatgttcattttgatatagactgggtttgtagcgcatgccaagcagggaagcaagttggtgttcatcatccacacaagaacatcatgacgaccgacaggccgcttgaactactccacatggacctattcggcccgataacttacataagcatcggcgagagtaagtattgtcttgtaattgtggatgattattctcgcttcacttgggtattctttttacaggaaaaatctcaaacccaagagactttaaagggattcttgagacaggctcaaaatgagttcgacttgaggatcaagaaaataagaagcgacaacgggacggagttcaagaactcgcaaatcgaaggctctcttgaggaggaaggcatcaagcatgagttc

SEQ ID NO: 76400 - DNA, 440 bp, Zea mays
  unsure (1)..(440): unsure at all n locations
cattacggaccttgaaactaagctgcattttaggtgtgtgcacataggaataaacaagccattattgttcgaacaaagnggtaaaaattgaaaggggagaatgtagaagtcttcaaggaaagggccatcaaataggtgtaacaccccgtcccctctcagaccgacggtacttaatcctgcaaccctttaggaccatagaccatcccacagatcaacatgagttttttgtgtgcactttgtcctcactcgtacgtacccggaaagacttcccggtcggtcacccattccaagattgctctagaccaaacatgcttaacccagatgttntttcaagacaggctttcgaanaagaagatgccccttatttgtatgggttctctattaattctattaagctttgggccagcatataaccaccccattgggacaggatatcacaa

SEQ ID NO: 76401 - DNA, 423 bp, Zea mays
  unsure (1)..(423): unsure at all n locations
accaacctcgaaactacacngtcttgtcctgaggagattgtctatttttctctccatcgtgaggccttaacaacacacaaatcctgtatatatctctccctcatgttgacaagacgattttctttaatactctgatatgccgaaaccgcatggcttggtcgccacggtcgatctttggagtcttcaccaccactagtacatatcatagaatgtcggctgccaccagtatcttcacataaaccttgcacaaactacttagagaacctctctggaatagtcttccacataaattgaagaaaacccaaatgcatctcctcagaaagactcancttcgaaccacctacaactttgttatcttcacacatcctggaaacgctaacattagtgccttcaacgcctgaaccttaaaattaaaaggccgac

SEQ ID NO: 76402 - DNA, 170 bp, Zea mays
aatataaaaccataaacatcaaattaccacaaatcctgcataattccgattcaaattcaaccggaaagaaagaaattcggcgggaaaccacccgcggcacaagccccccgctgcatgaaaagcggttaaaatgaaccacgcatccagacgactaaaccttattgttgcac

SEQ ID NO: 76403 - DNA, 408 bp, Zea mays
ctattcaatgcgagcatcatctccttcaattccatatgggagacacactcaccattagtaggcttaaggcccttatccttgtccgtttaggtctttggtcctaacattgtttgtacaaaacataaacaaaggcaccaaacaaacaatataaaccctacaactaatcttatgggtggtggaacacaagttatgaagtgttttatccacctcttacaagggtcttaccaccactacaggtggcaaacgatggccggtgtgacaacacttatagtgtgtgagtgattgcaaaggacctattctactcaagagaaaggtggagctctgggaaggctcactaaatatatatctgcggcacacaagtcagtaaccgatatcaatgatgaataagtgtcaaaagtactcatccta

SEQ ID NO: 76404 - DNA, 144 bp, Zea mays
ttgtgtggaattgccagaagatatgatcacttgcgtgtgtctacaactgaatgctagagctcttgtcagtagttggaacgtggaaaacttggatgacttcgaatgtgggggtggctgccgtacttccattcccacccactcatt

SEQ ID NO: 76405 - DNA, 383 bp, Zea mays
  unsure (1)..(383): unsure at all n locations
ctatnaatactcagcttgatagtctgtaaaaaaatctagaatctttgttattattngngtaaagaatgatgtaattaaactttacttccgggaccttgtccataccttgtaatatattcttacctttccatcaatgtgtaaagtgctttgatgtgaacaaaattaacatttttgagccgaaggcgaaaaacacctctccttcttttcgtacacagcgaagcatataactgcttctttttcttttttccgaagccttctctttaaaaccgaagtaacagcttatgctatgatgatgatgatcctatgtatgcctaaatgaatggttatgaatgcaaatgtatgatgtaatgtaccatgcatgtgaatgttcaagcccacacata

SEQ ID NO: 76406 - DNA, 481 bp, Zea mays
tatatggaagataccaagtcatcacatcaacatgatacatatcattggtacagaacttccggccgctgagaatgcacatagccaactacaaaaaaccaaaataacacagatctaatgataaccaatctgaagtatagatcgccacccgtgcatccgggagaaaaacgccatggtcaccctcaccaaggttcgtgatcccattgcaaccataggtcgtacctccttcctctgtagaatagcccaacgtgaaagccaatgtgtcgccgacaggataacctgcaaaggagaacaatagaagattttcccaaacaaagagcccagcacaagaccgtcgctccaagtataaacacagatttcagtattttattaacgccctgtagtatcccagaacatatagtatcttatacaaagagcccagcacacgaccgccactgtgaatagaagccagttgccatttgacaatattcgaacaagctatcca

SEQ ID NO: 76407 - DNA, 445 bp, Zea mays
agccttagagtactatatctatataaccataactctgatcttattgatttttgtatctacgatctcctagcaacgcgtagaatattcctacgctgattgatctcatgttaggtgtactattatatttttgtactccttgcttatctgcatggattgctacgagtaccaacgaggtcaacataatctgaagaccaacttggaacctgtgaatctacagtctaaggcaagatgtgccctcgatcactcttctttacttaataatgttccttttaatcactgtgacatgcccaggataatttgatgggactcaatatgtttgcccagcattgtttataccacaccttgcaaacaaaagaattattaggtaggtttgctattgctctacccggttatgggatacatgtacatttgaatatgatcatgttccaactaagttgttgtataa

SEQ ID NO: 76408 - DNA, 396 bp, Zea mays
tgaagccatggtaagtagcataagccacagaatacgaattgtactaagcctatctacaggtgcataggtctcaccgaaatccaaaccttcgacttgtgaatatccctaggccacaagtcgggctttgttccttgtcaccacaccatgctcatcttgcttgttgcggaaaacccacttggttcctacaaccatatgattatgacgtggaaccaaatgccatacctcgtttctagtgaagttgttgagctcctcttgcatcgccaccacccaatccgaatattgaagtgcttcctctaccctgtgtggctcaatagatgaaacacaagagtaatgctcacaaaaatgtgcaacacgagatctagtggttaccccctcatggatggcaccgaggatggt

SEQ ID NO: 76409 - DNA, 379 bp, Zea mays
  unsure (1)..(379): unsure at all n locations
tagagccatggtgggcaataaggcaagagttgaaggatgtattgttgaacaacttacactaaaggaggtagcacacttcacacagttgtactttgcagaagaacataatgtatttgctcgacaagaaaaggtaccacttatgaatgaaaccaaaagatgccctccgtgtagtgatctttcgatatttcagacaaacggcaaagcccgttggtccacccaaggcatatcacctcagtatggaagaacggaagtctgctctactggacatgttcacgaatatgcctgaggcggagaaatacattgtgnaagacttatctcttaaactgtcatangngaatagtcatgtatagatatctatgtgtcatacaatatatttgac

SEQ ID NO: 76410 - DNA, 373 bp, Zea mays
ccactacataagatgatggttggcgtgccgaaaagattcaacatatacttgcatcagcttactcataattcaattatcaggaccaggctattattttggttgacaaagccatgacgtggagcctagcgcaaaatggcttttctagatccatgaattacactactatacgaacgcattggtgaaaacatcttcacaataacttcggttgctacaatactgcttatcgaaaagaagctcaatttctagttctcacctaccgtaacaaatggtcgatgcagtggacaaagggatggttctatgtcaaggcggatctgtaagacagggacgatattaagaagttgattcagaaacctattatgcatgccttcgggct

SEQ ID NO: 76411 - DNA, 442 bp, Zea mays
tgagcgttgtcgccggggagcttgagtgagtgtcgccgctttcttgctccaggctggggtatggatcgccgccccactcgccggtgagctcgtcgccatgaaaactgagatggatcgccatcgcggttctgcctcacgccgtgggcggggcccgtgcggcaacactgtgttccgtgtgatctggctcggcgcagcgcagttgtgctccggccatgtcccgacggcacctgaatcgtgccatgaagctgcacaaggttgtcgcggagtccctggtggtcggctaggtgtggctggtctcctcctacgaactcacgcgccgggcgcgatcactcgttcatccatgggctctggcgccgccgtaggttcgcaccgcaccttggccgagggccaccccagcttcacccactgggtagccacatcgaccctgatcctttgggttcct

SEQ ID NO: 76412 - DNA, 390 bp, Zea mays
tgggctctgctgatggtactgagttggctcctgctggttcattgcaagctgcttcgggaggcggccttacgcccggtcatcaattgatctctcatgatttgggggtcccttcattctttcccagcctccacgaactgcgacatactttgctttgattttacaccgcatgaactgctgtcattacactcatctgttctccttatcacgcttaggtggacgggatggctagccagctgaagttacaaggagcttttgtccaaaagtagcttcgtctcttgcacgtcggaatctagtgttacttcaacattgtgactctgacttggaggcgaacaatgctagttagcgcttgttagttcctcttgtcttcactattaaacttgcttacattct

SEQ ID NO: 76413 - DNA, 475 bp, Zea mays
ctttgccatgataggcttgccagtatcacgagagtggatttattatcgctcttccagagggccaaggtccaacatctactcgaaggtgacactaatacaaaatatgttcatttagtggctaacggcaagcaccggatgcaacagattttttcgatggaggatgatgatggtgcatgcatagcggatgaagaagaacttatatcacatataacgagttattacaagaatctctttgggaagcctgacataacatccgctgatctggatgaatcctttatacaagacatatctcaagcctctgatactgagaatgaaatcttaactgctaatcttactatagatgacgttaaaaaggtggtcttttctttggagcctaacaaagctcctatgcctgatggctttccagtcgaactttatcacgctttccggaaacgattaagatgaccatttgcctcgttgggactccatcaaatcc

SEQ ID NO: 76414 - DNA, 489 bp, Zea mays
tcaatgcgagcatcatctccttcaattccagatggtttacacactcaccattagtaggcttagggcccttatccttgtccgtttaagtctttggtcctaacattgtttgtacaaaacaaaaacaaaggctccaaacaaacaatataaaccctacaactaatcttacgggtggtggaacacaagttatgaagtgttatatccagctcttacaaggttcttaccaccactacaggtggcaaacgatggccggtgtgacaacacttatagtgtgtgagtgatcgcaaaggacctattctactcaagagaaaggtggagctttgggaaggctcactaaatatatatctgcggcacacaagtcagtaaccgatatcaatgatgaataagtgtcagaagtactcatcctagaggctcgtctatagaatgtattggcacacttggaggaagacacaacggacggtacaatgatctatgtacaccaatgtgaacaag

SEQ ID NO: 76415 - DNA, 433 bp, Zea mays
  unsure (1)..(433): unsure at all n locations
tttagggtntctcaacttgggttaagttatacccttctattctctatntangggtaagtcctttaaccacagttctatttgcaaaaacattaaaacaatacaacttgtttgaaatttttacctagtgaatgcactctaggtgtatcaaacatatgcaatgccaatgcttatgatgccatgctcaagttttagttacagtaacaccagnggtgttacaccaaaccctagggttatgatggctggggagcaccgggaggattgggaaggggaatgttttgtccgggttgggcatggtggtggcctgactccttccggtataaccgttaatgtaaggacgtgcaacgaaggaaagagtttcggattcnggtctcattggccatgagaccgcagagtctgactagtgggtaaagtgtacacctctgcgcagagtttg

SEQ ID NO: 76416 - DNA, 361 bp, Zea mays
tctagatatgttgaggcgacaaatgatgatgtgttattgttagttacgaaggtcgcagctaagcaacttcgtcggttgcccatcattcctcggctttcaaggttgttcctcaacaaggaaatagctctgcatatgacgtggccaaagaatggtgtacgtctcgtcactgatccagacataatggtccatccgttggacggtgatgcgtggaaggcatttgactgagttgatcccgaatttgcaaatgaccctaggagtgtatggcttggtctatcgacggacggattcacacctttcaataccagtgcaagcccttactcgtgtcggactgtcttcattgtgccatataatcttccttctg

SEQ ID NO: 76417 - DNA, 387 bp, Zea mays
tcaagcgtaagctatggcaagcagtataggccaataatatgcgatttgactcttgtttagctatgggagcataggtatcaccgcaatacaaaccttcgacttgggagtatcctatggtcacaagacgagctttgttccttgacaccacaccatgctcatcttgcttgatgcggaagacccatttggttcctacatacattttgattaggacgtggaaccaaatgccataccttattcctagtgaagttgttgagctcctcttgcatcgccaccgcccaatccgaaattagaagtgcttcctccaccctgtgtggctcaatagaggaaaaataagagtaatgctcacaaaaatgtgcaacacgagatctagtagttacccccttatga

SEQ ID NO: 76418 - DNA, 173 bp, Zea mays
cccacacggagagctccaaccacacgacatagcgagcacttaacccctgcagatgacaactcgcacccgggttcctcaagaccaaaacgggatcccgctacccgagagcacagcaactccaccgtgcagcactcgggcacggacgggacacgctacgtccaccaacacccacg

SEQ ID NO: 76419 - DNA, 407 bp, Zea mays
gcttgagaattagtctcaaggagcatacaaatgtggctcgcattcttgttgttgtccaatgacgagtcgggccatatctacactatgaagctagctgacatgtgggagctaaccgttggggtggtggtagttacacatataaggagaggattaagtggggcgatgatgcactaacaacgaatattgagtttggtatctagatctaccgaattaggtgggagcaatgggtatggaacgaaggagaggggggagtggaagattgaccaccatcaaagagcaaaagcttattgtctttagccatctaggaaagagaatatgatggggagagatgaataatacttatttcttttggttaagcttggactttgcccttaaagtctacttgatgccttgtacatataaaattt

SEQ ID NO: 76420 - DNA, 455 bp, Zea mays
  unsure (1)..(455): unsure at all n locations
ncggnnccatcnatattatggatcgcgtgtgagttctgttctatttcttcagcccttctggcgggttcctgactttcatgaataacaacgggcccttggtccgaaggtatcttcatgcaaagataagctggatgaagaatcgcttctaaggcattgatagttccacgaccaatgattgcattgtaagggtattccatgtcaacaacatcaaacacaacttgttcagcactcgcgttgtgataaactcgaaagttactggcattgagattttgccgagtgctacaatcggccttcctccgaagcctgataggggatgtgcggcatcaagaattttatcttcgggctcttgcatctgtctgaaggccttagcaaatatgatatcagcttgcactgtctgtatcaaccaaaacactgtgaaccagaaatccttgataacataagagataaccatagca

SEQ ID NO: 76421 - DNA, 400 bp, Zea mays
  unsure (1)..(400): unsure at all n locations
catcggnccggnccttaattgactcatgtagagacactacacccacactcccttctcgtgcaagtgtaacaccctgaatttgggggtataaaatttctttctaattatcacccaaattcatgtgttactcttatctctctagtttctatctatctctaggttctctctctcttcctttntaagtagaattagcttaagttagtggagtttaattatttatttttgccaaaacattatgggccatgacatgttgcatcatgctgatcttaaaatattctttgaagtgctgcacatgtttgaannttattgaatctgaaacctaatttgaatttggaatcgaataccctatagacaaggaatagaacacgaattagacaatccagagataaaaaggaaatgc

SEQ ID NO: 76422 - DNA, 375 bp, Zea mays
  unsure (1)..(375): unsure at all n locations
gcgtgggaatggaagacaacaatctangtgaatgtatggcttgagngaagggcaaggtggaacggatggaaaacgggaggaggcgcgcggcgacaggcggcagggctgttcggtcttgcgtctgggctgaaaaccaggtgttcgccatggcgcacgggccaaaaacggaggctcgggcactaactctaaaataagctaagttcaagcatgtggaaagacaccgaacatacagtgtatgtctttggtgaagggcacagtggaacggagggaaaacgacacggaggcacgcggcgacgggcggcatggctgttaggccttgcgtatgggctgaaaacgaggcgttcgccatgtcgcgcgggtcgaaaacaactgttc

SEQ ID NO: 76423 - DNA, 275 bp, Zea mays
  unsure (1)..(275): unsure at all n locations
atagantggngaggcacacggggngttttgtgaaatgacaccttctgccggcggacaggacaggacacattaaatgttgagagggcgcatcgcccgtcagcgtggtggtatgcggcacgtccttaccgcaataaatgcaaagactgcacagccatatgggccttacgtcaggctcggcctgttggcttacgttacgggccacaagccatgcggtcgcggcgagtttccgcctgagcggggagcgtatggcaaggcctgtacacatgtctgcacca

SEQ ID NO: 76424 - DNA, 479 bp, Zea mays
  unsure (1)..(479): unsure at all n locations
ntattgcatagcatgttctgactttggaaggtgcaactattacagttgtcgtacctaccccgaaggttccccaagaaccgtcgcagaacatcatccaagcttcagcatctttatttgcttcttcttcctgagcccctggcgtccagtcagcgataaagtatgctagcgcctgggactgaatcgaggatctatgcacataatcaatgctgaattcgttgagttctgcagcccactttacaatccttccagtagcttctctgttcctcatgatgtccttcagaggctatgacgaaggaacaattatatggaatgcttgataataatgctgaagcttcctggaggccattaagacagcatacaacactttctccaattctgtataatttatctttgagaagcttaatacttcngagacaaagtatactggcgcttgctttatattngtccttccaatttctccgcacaagcgccgcactact

SEQ ID NO: 76425 - DNA, 388 bp, Zea mays
agcaaccttccggctgtgaagatattgagtatcctaaccatgtatataaactctctaaggcgctttatgggctcaagcaagccccaagagcatggtatgaatgcctatgagattcccttatcacaaatggcttcaaagttcgaataggccgatcctactctattcactagaactcttgacaatgatttgtttgtatgccaaatttatgttgatgacattatatttgggtctactaacgaatctacatgtgaggaatttagtactccttgggatttcaagagaagcaactacaagagggcaccttcattagtcaaacaaagtatattcaagacattctaaacaagttcgggatgaacgatgcctagcccatcaagacacccatggtgac

SEQ ID NO: 76426 - DNA, 403 bp, Zea mays
tgggctacattccggactgccatgacgaaggacttcgccatgattgcagtattgcccctatacgaagatatagatgcttcgtagctcatcagaaactgctttggatctgagtgcccatcatacatgggaagctaaggtggcttgtatgatgggggccatggagtagcctgcagatctgctgccaaaggagaagcatcatcaaaagtaaaggcatcatgattaaaatcatcataccatccatccttgttccataagccttcttgacgaagctccctgtgttggggccttcgatcttgttcatcttgaacaagatgacacacttcttcagtggcttcgtcgatcttgctttggagatcagacaagcgcgccatcttcttcttctttctttgtacttgatgatgga

SEQ ID NO: 76427 - DNA, 333 bp, Zea mays
  unsure (1)..(333): unsure at all n locations
cactgtcgtagctcaaaggtacactataaaccatatgtagagaattaagatagggaaaaaatgaataatatgaaattagtgtcatcctaaaaactctntataacttgtccactgaaatgtataaagacaatacccatccactatgttatcttcactgaaaacccaagcctaaagagtaataagcctaacccactggaagccccgcatgactaagaaaccctaagttacttcttaacttagatctctttagcataatggtattaaatccggcataatcatgacatacatgttcattgcatttcgatagactgtaaccttgtgacggagagtaca

SEQ ID NO: 76428 - DNA, 309 bp, Zea mays
attttttaatgactcaaggggaagggagatgcatgtgtaaaaaacatcaccgacttcaatgacacagatgttgatgatgatgatgatgatggctactccatatgatgaacatgttagaatggtaggggaggccgatgactacatgcacaaagataaagaatagttcaagaccttgaaggaattgattaaaaccctgaagagacttttgaggagctcaagacatctcacaacgatctagaagagaattgtgagaaggttgcggaagcttacaactcatctattgagatgaagttgcggtggtaccgagga

SEQ ID NO: 76429 - DNA, 365 bp, Zea mays
tgtatgtcacgagacgaagcttgtacacctaaatagaacaggagggcctaacttcaatgcattaacttatagaggacaatggataatgcagatcactctttgtattgtgcctggagatgccatggatctatgccatgacctggcaattgcctatgagattgatgggagaatctaactattcacacccaccaccaggtttggtggcatgcatgctatgatggcaccatcgcttacattgtattcatgctcatgatctacacacacctttttcgggcgtatatgttcgaaatcagggagggactatcatacggatgcaggctacctaatacgcgaaagttacttgccaccatatccgaattatagac

SEQ ID NO: 76430 - DNA, 357 bp, Zea mays
taggactaccgccactctgacaggggagcaatcggggacaggtggcctctgacaacggctcccgacgctatcaccatcggtgcagcgcacgattacaggaagcccttttgttttatttggcggggcttggcaacccattccaactcaacgcacgaactgcaacggctggaggttgcggcccctctcgaccattaactgcttcctgcttaagaaacatcgataggatgcatgaggagaaagactcggtggttcattcactgcaggtagttatccgatcgtcattgacgaatagacagcatgcgacgaagacagcgtttcttgatcgtgggcatggaaaagaatcaccggatctatcta

SEQ ID NO: 76431 - DNA, 467 bp, Zea mays
atgattccaatcagtcgggcgctttgtgatcgtcctcggcggacatcagctagctttagggaaaattttgggtcgatggtttcttgaaactggtctttagatggagctgatgcttatggccgcttatagacgaaagttggtgaccgattgcatctgcctatccatttggctatccgtcatgacgttactacagggggtgggtgggaatcgacattggaagacacacattttggagagatggattcatcgtttgggctccatcgttcattgtcttcttccttcaaagggttagtttcacaaggaccacaggaagtagaagcacaaaatgaaccatcatgtttggactcctcaaatttattcgtaattctagtccaaatatcatgcgcgtcacgaatagattcattatgattcattatgtaggcgcgatattcttctttgctaagagaaatacctaacgatgcataagc

SEQ ID NO: 76432 - DNA, 458 bp, Zea mays
ggacctatgaaactcagcttctaagggagaacacgcgataggttagactcacgttcaattctataaagatagaccttgtgcagcttgtcaagcacgtaaacaggtgggaggagcacatcacaacaagagtgtgatgaccacttcaagacctctggagctgctgcatatggacctcttcggacccgtcgcctatctaagtataggaggaagtaagtatggtctagttattgttgatgacttttctcgcttcacttgggtgttctttttgcacgataagtctgaaacccaagggaccctaaagcgcttcctcaggagagctcaaaatgagtttgagctcaaagtgaaaaagataaggagcgacaacgggtccgagttcaagaaccttcaagtggaggagttccttgaagaggaaaggatcaagcacgagttctccgcttcctacacaccacagcaaaatg

SEQ ID NO: 76433 - DNA, 332 bp, Zea mays
  unsure (1)..(332): unsure at all n locations
atactgaaagctgcgcaaaagtcaaacagccacactgaaatcaactctgcagatctccctaagaggctccttcacattagctcgtgaaagtacttttgttttgagtttatacctcgctaaggcttggtggtactagtataaatacccccctatgtctatgatgtaaggcagcttatgataatctaaaacagaacccctttgttcagctgtgtgctaacaaatattgagagagatctctacccctctgttcttgtgaattcctttcccngaatgcagaagcggcggcttcatccgctcctaattggtgctcctactccctttgaggtctcctc

SEQ ID NO: 76434 - DNA, 165 bp, Zea mays
atgttcattttgagaaagacaggggttgtagcgcatgccaagcaagaaagcaagttggtgcccatcattcacacaagaacatcatgacgaccgataggccgcttgagctacttcacatggatctatttcgccctcgaagtagcctagagggggggggggggtgaa

SEQ ID NO: 76435 - DNA, 307 bp, Zea mays
atggtggcaacaagatatctgctcagatggacaagaggagtacgcaaccgccgccagagcggatgaagatcgagaagatcaggccttcgccacctgcaggttcatcaagtgttgataccagtgctagtgaaccataagtcactccgatcgatgtgtaggaagtgggtaatgaaggtacattgcagataggagagaaaggtaccgatggccttaacactgatgggtctgggatcgttaataccatggttgaagttcaactgatgcccacaaactctgacaatgcctctctggatggtgttacacatac

SEQ ID NO: 76436 - DNA, 441 bp, Zea mays
  unsure (1)..(441): unsure at all n locations
tgtgaaggttcttcatccacacatgtgctaagcggcgatgtccctctcagcccatgctagtcttagctattaagcatgcatctagaccggcctcttcttttgcgaaatcaactaaataaagtttgtcgtctaatacacccttaatagctagtgaaccatcanttcttctaaagacagacacatctacatttgtaaattgacagttatatcccatattgcataattgactaaccgatagcaaattatatcctagagactctactaaaaacacattagagatagagtgctcattagaaattgcaattttacctaaccctcttaccttgccttgattcccatcaccgaatatgaatgaatcttgcgaatccttattcttgacgtacgaggtgaacatcttcttctcccccgtcatatggtatgtgcatccgctgccaataatcc

SEQ ID NO: 76437 - DNA, 388 bp, Zea mays
gatctcttgccttgcaacttctgtccatatggctctgtattatttctgagaatcagctctcagaacggccctatctatttccattgcccttaacttccgacacctcaacacaagtgcttcgtactcagcaatgttatatgtgcaactgaaatgaagcttggctgcataacatgctttgtactttgaaggtgccactagaacgcagttgctcatgcaccgaaggtttctcaagaaccatctgacaacactgtccaagcttcggcatctttgattatttacttttcctgagctcctgtcgttcaatcatcgatgaagactgcttacgcttgggactgaatagaggatctatgctcataatcaatggcgaattcattaagttctgcagccc

SEQ ID NO: 76438 - DNA, 272 bp, Zea mays
ctgcttaattaacattgatcaatatatctccttccaagcgacattctttctatcagaaataatatattctatggaaaggaatgtcaatatgaaggttaaattccttttgacctaaatctgtacattagagcatattgtgaatacactgctccatgtgcattaactcaaaaggaatctaattaatgcctttacgcctcataaatgatgatctgtatgccattcatatatatatatcatcattaactaaatacttacttgaactactaatacct

SEQ ID NO: 76439 - DNA, 460 bp, Zea mays
  unsure (1)..(460): unsure at all n locations
tgttaaattccttgtattgcatctaggacttgtctaacctagttgagataaccgccaacgaagcgagtgaaaaagcttaattcggatcaaacttgactagtcttagttataagcttttagcacttaaattcttattttttatgcaattattggttcttgaaatatgcatgaggtactgcacttatggggagtattcaatactcaaatcactcatgaaaacccctagtgcaagccaaaatgcaaatttcaccatttgcctatnttctctaaaaattatctagcctatggcaaaatattttgaagagtatatgagggtgccaatacctgtcccaacaagtgttattttatgtgattataagttgggatttggttcggttgggagttagatagaaaaattcataatttccaaactcccctctgtctgggctcaaccgacagtccggtgtgcaccggacactac

SEQ ID NO: 76440 - DNA, 397 bp, Zea mays
atcacatggacgtgaagagtgccttcctcaatggacctatcaaggaggaggtctatcgtgagcaacctcccggctttgaagacagtgagtaccctaaccacgtttataggctctctaaggcgctttatgggctcaagcaagccccaagagcatggaatgaatgccttagagatttccttatcactaatggcttcaaagtcggcaaggccgatcctacactctttcactaaaactcttgacaatgatttgtttgtatgccaaatctatgttgatgatatcatatttgggtctactaacgaatctacttgtgaggaatttagtacgatcatgacacagaaatttgagatgtctatgatggcggagctgaagtatttcttatgattccaagaaagcaact

SEQ ID NO: 76441 - DNA, 419 bp, Zea mays
acctatcatactcagcgacggcaaaagtttatgattactggatctaccaatttaattctcaatatctacaaagctatatctatgcgctattaattgctaaataattcatggttgggactaacaatcttggaactatttctatcaattactagaggaatctaggagcctaataaaattggtctcatgattttaccactcttctagaactttctataaatttcctcagtctggcctaaaaaaggaaaaagattaatcattaatgggctcaaaccaacccaactcatcccactgactgtgaaaacgcgcacgctctggcgacttctcgcagaggaccttggttgttcaaataactagtaaacaatccctagccactatacattgactctctgacattctcacttagtaccctgcactcctgt

SEQ ID NO: 76442 - DNA, 465 bp, Zea mays
  unsure (1)..(465): unsure at all n locations
ntggcgtgctgccctttaatgttatttaccgcagatatcattccactggaagcttgaatagttactgttataattcatgcaggataagaatgtagtcacagtcttcagtgcgcctaattactgttaccgctgtggtaacatggctgctattcttgaaatcggggataacatggaccagaacttccttcaattcaaccccgcacctcggcaaattgagccagacacaactcgcaaaaccccagactactttctgtaattgtggtggtgaccttaactctctggtgtttgatgctcctctcttccgcagcatcagggtatgtagatcttgtccttagatatgggtcccatgtgcccggncttaacgtcttcctattcttttgtatggagatattgtctctgcttctcgatcttgatacacgatgttagaagttgaatgccactgaattctttcttcctgctgtacgt

SEQ ID NO: 76443 - DNA, 374 bp, Zea mays
  unsure (1)..(374): unsure at all n locations
tcggnccttagccttgcgacttgtgagaatatgaccctgatcaacctgagaatcagttgtgaggatcgccctcctgatctccatcgtctttagtatccgaagacccacgagcaatgcttcgtactcagcaatattatttgtgtagctgaagtccattctgctgcatagcacggtttaaccttggacgcggataccaaaacagcagctgctcctgcttcgaaggttctccaggagccatcacaaaacactgtccatgcttctgcatctttattcgcttcttcgacctgagcccctggcgtccattcggaattacaatctgccaatgcttgagactggatcgaggatctgtgcacataattcatgctaaacttatt

SEQ ID NO: 76444 - DNA, 424 bp, Zea mays
ttaccctgtagtctggactataagttggttacggtatgtgtgccttatgcagctagactatttccagcatttgcgtaatgaggactctatggagaagcctcgtagtgagaccctggccattcacctcggaagtgaatacgggtctatctaacccgggctagaatggaatcgcgactcatgggtaaagatgcgccacctctgcagagttgtaaactgatatatcagccgtgctcacggctatgagcagcctgcactcctcacatgataattgaacttgaagatggaaataaatcgagatccgatgatctgccaatggtttgcttaagtgcgttcacttaagtgtctctgatatactcttgtacctttatttaatgggaatacttgctgattacacttattagttagaccggtgttgtaatacaat

SEQ ID NO: 76445 - DNA, 340 bp, Zea mays
  unsure (1)..(340): unsure at all n locations
cttcatggagttcaaccggctacgtatgaatcaaggcctatttactctaagngctatcagagttctattcgtatttaataagctaccatataaatcgctctaataatatgacaacatttttaataagcttccaataattataggaagctctggtccaacggtgccattctgttcatccgtaccacgtttgggcggttataaataaaccctatgatgccagggatttggtcttagcggcggtagcagttctctcgtgcgtgtgagcggcggtgaccccattatcgaacggcggtggcatcctgatgcgagtggctggcggtgacgctcccccaagactgaa

SEQ ID NO: 76446 - DNA, 433 bp, Zea mays
ttgcttgtgaacatacttcattccaacacgggctagtcggtgatgccacagccaacccatattagtcttagcagttaagctagtatcgagttcagctctaataaaatcaactaagtatagctgaccctctagtactcccttaaatgctactgaatcatcacttcttctaaagacagtaacacctatatgcgtaaagagacagttgtaacccactatgcataattgagataccgaaagcatattgttatctagagagtctacaagataaacattggacatagaatggtcaggtgatatagcaaatttaccaagtccttggaccaaaccttgatctccattcgcgaatgtgatagctctttggagatcatccgttttctcgtaaaggacaacatcatattcttccctgtcatgtgatctgcgcatctcgctatca

SEQ ID NO: 76447 - DNA, 315 bp, Zea mays
  unsure (1)..(315): unsure at all n locations
aagacttgcaggagtacactccgtactcagggttttcgaacccatgatgttgtaggtgatgaaacagctgagatctgctctttctgctccaaggtggtgccccagcaggagaaagaacactaaacttatttgggggagggtgcttcggttctataaatgtaataataagttccacactccaacactcggttatgtaataactactctttttatattnttatatgaatgtaaattatatcattgtaaccccttccgctccttctctactctgattatgtggtatgcttgcgtgatgggctaacctctcttgcgcta

SEQ ID NO: 76448 - DNA, 367 bp, Zea mays
  unsure (1)..(367): unsure at all n locations
aaagaagatgaggaaggtggtgtactactaaaccgacacttcatcacccttcacctccgggtccgacgcgccctccgtaacttgtaagcgccatgagcgcaagaagttaagaagatccccttacattaccctcgcacttctagaaatactccattactttccgttccattaggcaaaccgcctacctttgacggtgaagactatgctaggtggagtgatttaatgaaatttcatctaacctcactccacaaaagtatatggaatgttgttgagtttggncacaagtaccatccgtaggggatgatgattatgatgatgacgacgtggcccaaatcgagcacttcaactnccaagccacaaccatact

SEQ ID NO: 76449 - DNA, 404 bp, Zea mays
  unsure (1)..(404): unsure at all n locations
tgcggcatgaagcttcgggcaacaacaaagctatatngctcnctcttctccaaagcanaagcgcgcagggcatttgtggaangattggggatcaaccctatataatttattgcctattctgtggtgaggacaatggccatactacaaggatgtgcccctgcaccattcagaaacagatggaaatatcagaagctgcatcccaacataaccagccgaagcaggtcatgcacactgcttcatatcactcaccatacataccagagtatgtgggtaaccatcctgcagcttctgttgcttcggctagccagccacatgcatcattggaacaaccttcacctctgccacaactacaacctgtgtattcacgaagccagcagccagaatgaagtcagcatacccatcag

SEQ ID NO: 76450 - DNA, 429 bp, Zea mays
  unsure (1)..(429): unsure at all n locations
taagatttgattgcgatatgtatttttcgctgtatccgcatcctctgttacttcagatcctgccaaagcgtcttccggccctcagccgaaaggagacgacgaaattaaaaagatggctgaagatattatggacgaagtcgtcaatcggctcctgaacgaggctgccgaagtcgttttgagagaagattaagtatttttgtaaaacaaaaacttcggaaatgtaatatactaacatttggtaaccacaaatgtaatatacctatttttgttagtcaattctttacgatgcatgaaactctacacgtaccgcttttgagtctttgacgaaaaaacaccttcccttcttttcatgcttcgngaagaagatattttcattgtcacaacaatatccaatgttctgatgaataatatccacgcttgcgaaaaata

SEQ ID NO: 76451 - DNA, 347 bp, Zea mays
tcatctaggggcctgcaaaatatgtcttctacttgatctttactactaatgtaaataaatctcgatatcccccttttgttggtgatccctaagaaaatgataccgaatggctatgtgcttactgcggctatgctcgaccgaattgtcggccattttaattgcactctcattatcacatagcatagggaccttggctaatctgtaaccgtactcccgcatgcgttgcctcatccaaagcaactgcgcgcaacaatgtcctgcggcaatgtactcggcctcggccggggaaagagcgaccgaaatttgtcttcttgtatccccatacaccaaggatctttcccagaact

SEQ ID NO: 76452 - DNA, 436 bp, Zea mays
agcttgtggctagctagccgaagcatcatattctgcaggacgattacccacatattctggtatgtggggtgaatgacacgaagcagcgtgcatgacctgcttcggttgactttgctgggcttcagcttctacgacctctttcggcttttggatggtgattcggcacattcttgtagtatggcccttgtcttcaccacaaaataggaagtagatcttcctatgctagtccccatatcttcctccgaagcccctggcgcctctgcctcttggagctggcggccgaaaagagaattgttgctgccccgaagcttgtgaagaatactacggcctctgaagctgactttctctgtcatcagtctgagtggagttgtgaattgacctgacatgcctcgagtggattcttcctctgaagcccctggtcatctcagagaacctg

SEQ ID NO: 76453 - DNA, 290 bp, Zea mays
cgcgcagcacagatgaccctttttaccttccccccaagcggggagtgctttagagcagcacaaatattttttttcattcatttatgctcatatttataaagtggctatggacatttgggatataaagcaggactaatacacacattagttctacttaaacaaagaaaatgacaatactaagagaggtgcaacttaatcataactacatgcaaggcgttcattaaaaggaaaaaaaagaacataacttaccaaaaaattgattaattaacaaaagacttaatataacaaat

SEQ ID NO: 76454 - DNA, 383 bp, Zea mays
atgcaagcttctaaagggagaacacgtgataggtttgactaacgtacaattcgaaaaagatagaccttgtgcagcttgtcaagcaggtaaacaagtgggaggagcgcatcacagcaagaatgtgatgaccacttcaagacctctggagctgctccacatggacctcttcggacccgtcgcctatctaagcataggaggaagtaagtatggtttagttattgttgatgacttttcccgtttcacttgggtgttctttttgcaggataagtctgaaacccaagggaccctcaagcgcttcctcaggagagctcataatgagtttgagctcaaggtgaagaagataaggagcgacaacgggtccgagttcaagaaccttcaagtgg

SEQ ID NO: 76455 - DNA, 466 bp, Zea mays
  unsure (1)..(466): unsure at all n locations
gccgcatgcaaacttcccctacacgccgaggatatgcgtgatctcttatgtcaaggcacaaataaaatgccccagcatcgaacatttgtagctccaagcgctatattcattatgtctcttggcccacatatcggggttcagtacctttgtgcatgcccccttctgctataaaaggggaggcatgcggcgttacaagacagatccaatcttaatctcactcagacactcacaagttcatacaagctctcagacaatacatcacacaatggagtaaggtgttacgctccggcggccccaaccactctaaatccttgtgtgttgttgtgttnctcccaagttccaactaacaagcanaacgcttaggcctctcttcatcttaggatatagggtgggtgcacatccgcaccctgttggagaatacctctccgacacacatgtaacacataagaatgtgaagtatgatgat

SEQ ID NO: 76456 - DNA, 405 bp, Zea mays
  unsure (1)..(405): unsure at all n locations
aaataatctttaatgtttttttaaatcaagcatgatgntgactttggtgatggaagctcatatattggatgttcttctatggttaggggcacgcacagaaatggacatcccttgatttgtgtttttcgcccatgtgaacagttttcctgtctcattcaggtgtaaccaatcttccctaatagattccatgtagccattggcgaagatttttttaatcataggcccaccacaccttatagcaccaaatgagttggtgtcctccatcatttggtgaaagatctaccagtgactgtagtagaactgtagaagcaaggaactaaaaattcctgcttcctcctgatgaagaagccggtgccagtgccacacaacaatcggaacatgtggatctgaagaggacgtggtagt

SEQ ID NO: 76457 - DNA, 403 bp, Zea mays
  unsure (1)..(403): unsure at all n locations
gatccacagnatcctgcaacacaatgcttccatcccaaatggataaagcgggtcaaaatgattatgaattccggtacatttgcagtgcttttgaatggtgccctatgtaaccattccattgcaagagaagggtcagacaaggtcacccctctcctcgctcctttgtttgttggctgctgacctactccacataatagtcaacagggcgacagtgctaggaattctaaggtttcttctncaacaaagaagtgggcaagacttgctgatcatccaatatacagatgacaccgtactgtgtctggaaacatgtcagaagaaactattctatccgaatggcattttatactcttttgctaaatctactgcgctgcgccncattatcttaagtcaacataattcccta

SEQ ID NO: 76458 - DNA, 456 bp, Zea mays
  unsure (1)..(456): unsure at all n locations
catgcaagcctcatgcctgtaccaaatggattcttttgaggatcagcggncagcttgatgcgacacacaagcaacactctgagataggtaccgaccttttgaaattatcgcatcataggtacttcctttcttctacattcttctgaccgaatttttattgcttcacatatagtggttgtcttgaagaatactacctccattcacaaatatatgacaccgttgactcttttcaaaaactttgaccactcgttttattcaaaatatttatttaaaaatgtaaaattttaagtcaagcacaaactaccttaagtgataaaacaaatcacataaaataaatgataactcattatttcttgaacaaaacgagtgggtaatagtttttttaatgttaacgggggcatatatctatgaacggagggagtactatggaagaaacanaattaatatgtgaggaac

SEQ ID NO: 76459 - DNA, 428 bp, Zea mays
  unsure (1)..(428): unsure at all n locations
agcttctncttgtcgccatcaaccttgacttataaccactccgacttccagcctgctgcccatttgcttcggtagctgattacaggaaactttgtggttttccgataagcaaaattatagcaaccaaaattgtcttgcaatccatcttttctagccttcgtctgatagtgcaattcatgaactcgaccaaagctgtccgcaaacggctccaccgcttggcttcggagggcccagatataaacactaagcctaacaatagcgttaggagtcaactgatgaaaatagataccgaacctcttcagtacctctgcaataatcccatgtagggggaatcttaatccagcctttagaaagcttttgaaaataacaatttcatccttctcggctgtggggtagtctcctctcccccgaagtgaatagcttcttct

SEQ ID NO: 76460 - DNA, 396 bp, Zea mays
  unsure (1)..(396): unsure at all n locations
acctgctgcatgcaagcttgagagctattgagcgccagtttgctcattttatataantgagaaaatacggcgaagagggcacgcagtgtatcatatgcaatttttgttatatcctatttatacgcccagcgcgctccaagttggagggccccgactatcattgactgttgctattctagcaaagggaaagtgtcttttctgaccttcggcttacggccttcatccatatagcaatctgaattcgttattctaacaaattaacattgcgaggggctactgttgggggccttcgtctcccgaaggacctccaaacatgatttaacaatgttcccgatgtgaatataacacgtgcctcgacttggacaaaccataaggtgaaagcacgcacacaatctt

SEQ ID NO: 76461 - DNA, 313 bp, Zea mays
tcgacttgaggggggcgggagagggctggccacggcggcctaatctcttgctgctatggcgggcggaattaaactcgccggagctaatgagagggggctggcctgtgaatgcgactgcggggcgaaatgaggcgcgcccggcgaggctttatatgcgcgggcgggcactaccgaaggcaatggcgcgcggcggacgtgacccaacgccggagcgagcgcgcgcgcgggatgggcgagctctggcgtgccgaccacggtcgaacacgtgtgcccgtgcgttctgaccaagttctggcgcatgtggtcgctcatc

SEQ ID NO: 76462 - DNA, 328 bp, Zea mays
  unsure (1)..(328): unsure at all n locations
catgcnagcctctaaagggagaacacgagatatgtcttactaatggtactttcgaaaaagaagaccctgtgcagcttgtcaagcaaggaaacaagtgggaagctctcatcataccaaaaatgtgatgaccacatcaagacctttggaggtgcttcatatggatctcttcggacccgccgcctatcttaacatatgaggaaggaaggctgggcctggtataaatgatgaattttcccgcttcacttgggtatttcttttgcaagataaatctgaaacccaagggaccctcaagcgcttcctaaggagaactcaaaattgagttgaactc

SEQ ID NO: 76463 - DNA, 403 bp, Zea mays
  unsure (1)..(403): unsure at all n locations
tgcaagcttaagattgaaaatattgttttaaaatggttaaactattcatattgaagaaaaatgcacaatgaatactaaatatttgaatgagccatcaaaacaaatattgaacaatgtgtgtccattctgaatattttcctaaatgaataaaaggtgattttcatacatgttggcattctccttgtgtgttgcattcatatttgaatttcaacaatcaaaaacacatttgaatttgaaagtataaaatatcaagagaaagcaaaaattcggataggaataaaactaataatcagctttgggccgattttctccgggtggcccaactaccccatacgcggcccagcctggagaatgatctggtgccgataggtgggaccacnctgtctgtcactcacccgcatgc

SEQ ID NO: 76464 - DNA, 281 bp, Zea mays
  unsure (1)..(281): unsure at all n locations
tatgttgagcaacctcccacttttatataagagaccctaaccatggtataactctctaagcgttatggctcagcccccccagagatggttgaatgccttaagatttctatcctaatggattaaaggcaaaaggccaatcctacactcttcactaaaactcttgaaaatgacttgcttgtatgccaaagttatgttgatgatattatatntgggtctactaacgagtctacatgtgaagaatctattaggatcatgacacaagaatacgagatgtctatgat

SEQ ID NO: 76465 - DNA, 438 bp, Zea mays
  unsure (1)..(438): unsure at all n locations
agcttgttgaaacaaagagacataaggtgtttgatatggtttatttgcttcttaaattggtattgcttttgccggtggcgacagcaagtgttgaaagggcattttctgcaatgagtttggtgaagactaaattgagaaacaagatgtgtgatagtcttttggatgattgtcttgttacatacatcgagagggatattttcttcgaagtgaatgaagaagatataattgaaacttttatggcactgaggaagcgcacgccaaataagtagtattattggaatttttatgtttaatgtatgcaattttcatgtttatttgttgagtgtcaaactttatatctatatatcaaattgtttaccaaatttagtatgaaattatatgtacattagatataagtatacatgaaaattntgttacggcacaccctatgtaaaaatc

SEQ ID NO: 76466 - DNA, 440 bp, Zea mays
  unsure (1)..(440): unsure at all n locations
agcttgaagccatggtaagtagcatangctcttttatatacgaattgactcaagcctagctacgggtgcataggtttcaccaaaatccaaaccttcgacttgtgaatatcccttggccacgagtcgagctttgttccttgtcaccacaccatgctcatcttgcttgttgcggaagacccacttggttcctacaacattttggttaggacgtggaactaaatgccatacctcgttccttgtgaagttgttgagctcctcttgcatcgccatcacccaatccgaatcttgaagtgcttcctctaccctgtgtggctcaatagaggaaacaaaagagtaatgctcacaaaaatgtgcaacacgagatcgagtggttacccccttatgaatatcgccgaggatggtgtcgacggngtgatctcgttgtattgcttggtggactc

SEQ ID NO: 76467 - DNA, 441 bp, Zea mays
  unsure (1)..(441): unsure at all n locations
agcttctccaaaatcttgaggtaaactgtttatctctatcagacacgatcttctttggtactccatgtaaacacacaatccgagccatctataattctgctagctgagaacctttataagtagtcttgacaggaataaagtgagccactttagtcaatctatccacgatcacccatatagcatcatatcttttttgggtgcgaggcagtcctgtaataaaatccataccaatctcttcccacttccactcaggtatcttcagtggatgcaatagtccagctggtctctagtgttcagccttaactctttgacatacatcgcacatagccacatgtgcagctacatctctcttcaatccataccaccaatacttncgcttcaaatcctgatacatcttggtactaccaggatgaatagagtaatacgagtcatggacctcct

SEQ ID NO: 76468 - DNA, 419 bp, Zea mays
caactttttttatgaagattgacttcaagctcataggatacgcgtccttagaatcttggaagctcaacttttgtgaggaagtttgactttaggcttggaagctcaacttttgtgaggaagtttgactttacgcttggaagctcaacttttgtgaggaagttcgactttaggctcataggatacgcgttagtgagcgtcctgctttcttattctatactaattgagtgcccgtgtttgcaacggtaacatataataccagtatttctacgataacttatatataaaatgtatgttatattattatgagaaaatgtttcataatcaatttgtgatcctagccatacataaattttgttattttaatatagttgtttcaccactacattgcaaccatcagtatcatgcagactttgatatat

SEQ ID NO: 76469 - DNA, 284 bp, Zea mays
agcttgatgaagtggtcgagaaatgtgtctttcttatccggacacccccagaaagagggctgtggtgttcaccctcccgactgcgtagatagcgagctccttttctcgcgtgtataaactctctaaggtggtcgattggctcacgcttgccagctaaggatgcgttgaatgccttatagacatactcatcgctattgtgtttcaaaccggtatatcccatcctgcactctttaccaacagactggaaaatgatttgtcgagacgccactaataagacgatgaaa

SEQ ID NO: 76470 - DNA, 442 bp, Zea mays
  unsure (1)..(442): unsure at all n locations
agcttgccaatacttgtcaaagcatcttcttctgtcatcacagcaactgcagaccataccagtaacttggcctttcgcatgctggggactggatatgattggacctttcaagaaagctcaaggaggatacactcatatattggtagcaatcgacaaattcactaaatggatagagttcaagcccattgcttctttaacctctgctaaggccgtggaattcatacaagacataatattcagattcgggataccaaatagcatcataactgacttaagatccaacttcacaagttcagagttcttcgacttctgcgagcaaaagagcattcagatcaagtatgcatctgtagcacatccaagagccaacgggcatgttgagcgagccaacgggatgatactggaggcactcangaaaaatgtcttcgacaagaatgaaaaattc

SEQ ID NO: 76471 - DNA, 156 bp, Zea mays
  unsure (1)..(156): unsure at all n locations
aatcaaatctgtccttcatcacactttcgatagttgctcgcccaataactcgagatggcttgttcatacggatttggtgtgtgctaatgtgangcacactacgcccatggaaagagaatttgtctgacacgatgccagatatcattatcatcaaca

SEQ ID NO: 76472 - DNA, 419 bp, Zea mays
  unsure (1)..(419): unsure at all n locations
agcctgccacataagtatcccaaacctttctttttgtttgacaaaangaaaatgggtatacaactcctggacttcatagaagaaaatatagattttatgatncaagaatggaattttaaagacatccttgtccaacatttgcaggacctgctttctaaacaacaaatatactagaaacaaagaggactaatcaaatgggccaccatgggtgatgctgggacgaaattttttcatgcaaatgccactgtcaaacatcgccataacctcatttcgatattaacagatagtgacagcaatgcaaccatcactcacgaggaaaaaacagctgctttattcaaaaccttcaaggaaagactttgttcaacacagcatatggctattgtttttaacttatctactctgatccagctggttgacaa

SEQ ID NO: 76473 - DNA, 444 bp, Zea mays
  unsure (1)..(444): unsure at all n locations
agcttatctaaaaagtttgatgagtttttttttattaattactctctaaaattctagaagtatggattttggctattttaaataccctataattccttatttgaactaaaaatcatgaaactatttttgttaaatactatagaaaattagtagtcttgaaaaattggtctagtatttttagcatttttttacaattttctaagaatttataaagcttggtagaaaagaaaaaaagaaaactgtgaacagttctgggttgaaactggcccaatacggcccacgtctaggcgaaatgtgccgcgcgcgctcgtgatggtggttntgcagaaatgcccctattggtttgaataactgaataagggtcacggtagctattccgtgtctcactgacacttgcaaaaacacccncgcgcttctatttcttcacaacccgaagtccacgat

SEQ ID NO: 76474 - DNA, 394 bp, Zea mays
  unsure (1)..(394): unsure at all n locations
ctgcggcatgcnagcttgtgaacaatacatatatttgattgtgttaaagcagccttcacagatcagccgaagcccatgctcttatgtgaggatatagcagagcagaaggtgctgttgggctctcatttatccgaagaacaagagaaaaccttgataaggtttttgttcaacaacaaagatgtttttgcatggtcagccaatgatctctgtggagttaacagggatgttattgagcactcgctcaatgtcgatccatcattcatacctataaagcagaggcttcggaaaatgtcagatgataaggccgaatgtgcctcgtacgaagtcaaaagacttctcagtgcaggagttatcagagaagtaaagtacccagaatggctagctaacacttgta

SEQ ID NO: 76475 - DNA, 433 bp, Zea mays
agcttctaaagggagaacatcttttttgtttgtttaacgtgcaattcgaaaatgagagaccttgtgcagcttgacaagcattgttaacattttgggaggagcgcatcacaccaagaatgtgatgaccacttcaagacccctggagctactacatatggacctcttcggacccgtcgcctatctaagcataggaggaagtaagtatggtctagttattgatgatgacttttctcgcttcacttgggtatactttttgcaggataaatctgaaacccaagggaccctcaagcgcttcctcaggagagctcaaatatgagttgagctcaaggtgaagaagataacgagcgacaacgggtccgagttcaataaacttcaagtggaggagttccttgaggaggaatggatcaaacacgacttcttctgtccctacaca

SEQ ID NO: 76476 - DNA, 404 bp, Zea mays
  unsure (1)..(404): unsure at all n locations
agcttcagtttcgtccccctcacgttcaatcctagttgtagaacggactctggccatttaactatgaatttgtgaaactttaatacttttttctccgaagcaggcttcaagatcgagctttgttcaattctgacaaacaagcttcggcgatggttaaaaattttggcagcaaaacagtgcaaatagcagtaaatgctgtggtaacttcacacctactcgtctgtttatatagtgccgcaggtaagaaggcgaagcgccagaagttntgcaccaggcggacacccgctcgcactcgctgtacggtgggccgcaaagactgaacagtaattctgcacggtggggtcgccacgcgcacggaaattgaatcgtttctcgacaacgagctcagggaaggtgtttttgag

SEQ ID NO: 76477 - DNA, 430 bp, Zea mays
  unsure (1)..(430): unsure at all n locations
agcttntgaattttctgggtgattacaacatgtttttataccggaaaatcgcaacaagctgggtggtgaccctattagaatgctcaattttaatgcggcaatcagtcagctgggtttacaagaaattcctctcaaagggcaaactttcacttggtcaaacatgcaacgtcaacctttgcttgaaaagctagactggtgctttgtctcgccagcctggtcttccaatttccccaccactttccgattatccagtacgcagatgatacaattatgattttggaagcgtgccctagacaactcttcttccttaaagcgatgcttaattcttttgctgactctactgngctccatgtgaattataacaaatctaatatttatcccatcaatgtttcagagcanaaaatggcagttctagcaaatacgttccact

SEQ ID NO: 76478 - DNA, 409 bp, Zea mays
agcttatgaaattatctacagacggcgttttctttctcacttttaattctatggataaaagcgcctaactattaagagaacagattctgcacataattatgagactgaaaaactgctataatcaaactgccataactttctgttctgatgtccgattgaagtgttcttcgcggccacggaaagatctacaaattatctacgactcatatatagactttttatttttttgaggccattaagagcacggaaaactggtaggaacagaaacagttgaatctgccattctgcagaaactaatttcgagatcaaaaactaaccccccatctaatccaacctctaatccttcaatccccatgattcacaacctccataaacacataattacagggaggaacatggatcttattct

SEQ ID NO: 76479 - DNA, 441 bp, Zea mays
  unsure (1)..(441): unsure at all n locations
agcttgaagccatggtaagtagcataggcttgtttcatactatatgattctagcctaactacgggtgcatatgtttcaccgaaatccaaaccttcgacttgtgaatatcccttggccacaagtcgggctttgttccttgtcaccacaccatgctcatcttgcttgttgcggaagacccacttggttcctacaacattttggttaggacgtggaactaagcgccatacctcattccttgtgaagatgttgagctcctcttgcatcgctagcacccaatccgaatcttgaagtgcttcctctaccctgtgtggctcaatagaggaaacaaaagagtaatgttcacaaaaatgagcaacacgagatcgagtggtaccccttattaatgtcgccgaggatggtgntcacggggtaatctcattggattgcttgatggactcttgg

SEQ ID NO: 76480 - DNA, 446 bp, Zea mays
agcttctaaagggagaacacgtgataggttttattaacgtgcaattcgaaaaagatagaccttgtgcagcttgtcaagcaggtaaacaagtgggaggagcgcatcacagcaagaatgtgatgaccacttcaagacccctggagctgctgcatatggacctcttcggacctgtcgcctatctaagcataggagggagtaagtatggtctagttattgttgatgacttttcccgcttcacttgggtgttctttttgcaggataagtctgaaacccaagggaccctcaagcgcttcctcaggagagctcataatgagtttgagctcaaggtgaagaagataaggagcgacaacgggtccgagttcaagaaccttcaagtggaggagttccttgaggaggaagggatcaagcacgatgtcttcgctccctacacaccacagcataatggt

SEQ ID NO: 76481 - DNA, 449 bp, Zea mays
  unsure (1)..(449): unsure at all n locations
catgcaagcttaaacaagtgtaaagcgctattgttttccttttatttattntatnnaaggacgaaaacatacatctacattagttcatattcaatcctaaaaattagagtgtgcagtcagtaagtgaacctattttatttaaacagagaataattctatgaacattttgcaatttgaatcactaaatttggacttcatatgcaaaagttatgaaataaacaagtttgggaattcaaaatatgatattagggccaattatgtgaatatttaaaagtccagggctaaatctgcaagaatataggggcctgcgcgcgataaccagggaccgcgggttgatttacaataaaccgagggtctctttaagaaaactaccgagcgaaggggtatcgggtgaatctaaccgtcagatctaaaaccaacggctgagattatatctgcgggcgagaatg

SEQ ID NO: 76482 - DNA, 378 bp, Zea mays
  unsure (1)..(378): unsure at all n locations
cagcttgaagttccagtcgtgctcgttatttcttttttagcagcaagccgacgagcatagggtgccgtcnagcatccgagccaccgtccgagctgtcctgctgccgccgagcaccgagtcttctctggtaaattaaagtcgcttggataaattagtgtttcaatttaaagttctggacagattgcttgtagggatttgaaaagattacttgctgaaattttagtgggcgggcgggtaatggatatccgttggataatggatacccggcgggtacgggtacggatacagatccgtacccacgagcgtaaatgggtatgggtatgggtttatctncggggtatggatacgcgaacaatatatccgcattccacccacccg

SEQ ID NO: 76483 - DNA, 377 bp, Zea mays
  unsure (1)..(377): unsure at all n locations
agcttgagaatattatatatcccaatatgtttcttntccgcggtgctagagccaaccgctgtctgtgttaacaagtaatcaagtgacaatttcacatatattaaaagccaccaagcataactgaccctctcacactgccttaagagctatcgaaccatcacttattgtgaagacagtgactgccctattacaaaaagacatgatagcatccaagcccctggatggattagtgacacaagacacgtgatattatatgggactaacacgtgttttgcagagacaaatggtaaattaggtcgcatgacatgcataagtactacaaccgtgaaaacgatcccggagataacaactcgaagcgacggctaatacgacagaac

SEQ ID NO: 76484 - DNA, 453 bp, Zea mays
taagtcacctgcagcatgcagcttgaaaaaatctatattattccattgattgacgcttccttcgaaggtttctatgtcaaaaatattcctcgtggagaaaatgaatatgctgatctattggccaagtcagcagcccaggggctgcctataccttcggaagtatttttcgaaacaataaaagcaccttcagtcgagctttttgaaagagcaatccttaatatatcccctgtttataacgaagattggagaactgagatcatctctttccttcatggtaattttctttcagacgacgaagcttataacaggagaatagaagcaagagctcgaccatatgtcataatagaaggggagttatacaagcgtggggtctgtccccattgctaagtgttatccagatccgaagtatagaattaatgaaggatatacatgcacgcctgtgtggatctcaca

SEQ ID NO: 76485 - DNA, 435 bp, Zea mays
agcttgacattgtctcccttttggaagcctatgccatccttaatgccagggtgtctcccactataaagcatacttctagcaaatttaaaattctcattttctatttcatgctcattaattttgctagttagttgtgctatgtgatcattttgttgtttaattaaagctaggtgatcaagaatagcatcaacattaacatctctacatctagtacaaatagaaacatgagcaacggtggatgtagagggtttacaaacatttaattcatcaatcttagcatgtaacatggcattttcatttctaagattggaaacaatatcattgcaaatatttaaatctttagccttagaaattaatttatcattctcaatcttaaggcaagaaattgattcatttaatttgtcaatcttagcaagtaaactagcattatcattt

SEQ ID NO: 76486 - DNA, 445 bp, Zea mays
  unsure (1)..(445): unsure at all n locations
agctttccaatgcaggggttaaattngtgtttcattgtctggntggacagccacacttctcttcatgtggatgccagtggcacagatggtattcaagcttacacactcgtaccagtggaaactgatgatcaaatgctgatgcactaaaatgcaatttgtttgttgggttctgcagtggacaaattaccttaacccaagtaacatcaaagggctgtcagctttcagcatgttgcttgcaatgcttggaaacggacttatgattcctcgcgctgtattcatccgcgatttgatgtggtattaattttttattctatcttgcctgatagtgttcaagaaattgtgatgggaagtatctaactccgactggaaatgcctattgtagatgagaagggaccatatgagaaatatcacttcctatgcattcccatgcatgaagctgtacatg

SEQ ID NO: 76487 - DNA, 323 bp, Zea mays
  unsure (1)..(323): unsure at all n locations
acctaggggagacgaccgccancatagcgagngataaagcttaactcgtatcaaacttgccgaggcttagttttatacttttagcacattaaatgntttactttgtatgcaagtgggggggtcttgaaactagcacagaagcacttaacttaagaagagtattcaatattctaaattactcatgaaaacccctaatgcaaggccaaaatgcaaacttcaccatgtgcctattttctctaaaaataatcaagccgatggcaaaatatttcgaaattatgaaaaaagtttatgacggtgccaatacctgcccccacaagtgttat

SEQ ID NO: 76488 - DNA, 414 bp, Zea mays
aagtcacctgaggcatgcaagcttgggaaggatcttcatgcccacatgtttttttctgcgatgccacatccagcccatgctagtcttatctattaagcatgcatctagaccggcctcttcttttgcaaaatcaactaaataaagtttggcgtctaatacacccttaaaagctaaatgaaccatcgcttcttctaaagacagacacatcttcattcggaaatagacagttatattccatatgacataattgactaacagatagcaaattatatccaagactctctactaaaaatacattagagatagaatgctcattatatattgcaatcttatccaacccttttaccttgcctgattccctcacccaatataattgaatgttggaatacttattttgacgtaggaaagaacatc

SEQ ID NO: 76489 - DNA, 432 bp, Zea mays
  unsure (1)..(432): unsure at all n locations
agctntngggttgaactggagggtgttttgtttcttattatattatatcccaacaaataacatagcttaacaagtagtccattgtgccatttcaacatattacggaaatagggctagtcaggcaaggagaaaaagtttgcaatacaatatagtcctgttataattnnactaaaagcaaactaggtgcatgatatcacattatatgaagtgtatatgccaaacaacctacgtgttgtttggttcacgaaatgtaacgtaaatggcaacggtaatgattcacgctcgagtaccagccggnataagtttgaataggccggtatcaatttctagtgtggtatccgattacgggtgtgcttaaactaacatggtttaacattatcaattacccatcaccgtacaaatatgcgaactaaacagaaccctgaatgaata

SEQ ID NO: 76490 - DNA, 398 bp, Zea mays
  unsure (1)..(398): unsure at all n locations
gaccttaagcacctgagctgccgcttaggtaaagcataaattttttttaataaacttgaatcacttttatacccctgggataccagataccctaattggaaccctgtaaaaccctaaaaccaaaccctaggggcttatgtgcaaaagtgatgaacctttggactaatatgtaaaaactactatggttaagcatctaaagccaattggttcacaaatatgtgaatttacaagccaaaccctgagaattggacttaagtgcaaaagggccacacttggctcatgtgatgaagtctgaaaatcagagaattggctccagctttgggctttgtaactttcaaagcataggtgttttgccctatgtcaccatatcaaagttgaagaccatacatangagaaca

SEQ ID NO: 76491 - DNA, 417 bp, Zea mays
  unsure (1)..(417): unsure at all n locations
agctngncactagaatatactggagcttctttcattaagngatagntcctggccgaagaaaagaataccatgtctatgccacattcttaactgccatgacaaatgatttggccatgacggctgcattgcctccgtatgaagatatggttgcttcataactcatcaaaaacagcttcgggtctgaatgcccatcgtacattggaagctgaggtggcttgtatgatggtggccacgggatatcctgcagttctgctgccaagggagaagcatcatcaaaagtaaaggtatcatgattaaaatcatcataccatccatcgtcattgaacaagccctcttgatgaagctccctgtgttgaggccttcggtcttgctcgtcttgagcaaagtgacgtacttcttcagtagcttcgtcaatct

SEQ ID NO: 76492 - DNA, 343 bp, Zea mays
aggaccaaacaaggaggaggtctatgttgagcaacctctcggctttgaagatagtgagtatcctaaccatgtctataagctttctaaggcgctatatgggctcaaacaaaccccaatagcatggtatgaatgccttatagattaccttattactaatggcttcaaagtcggcgaggccgatcctacattgttcactaaaactcttgacaatgatttgttccgatgccaaatttatgctgatgatatcatatttgggtctactaacgtaattacttgtgaagaattatgaggatcacgacacaaaaatttgagatgtctatgatgggggattaaaagattttct

SEQ ID NO: 76493 - DNA, 361 bp, Zea mays
agctagagaaggagcatcatcctttcatgttctagacggcgatgccacagccagcccatgctattcttaacaattaagcatgcatctagatcggccttctcttttgtaaattaactaaatagagtttgtcgtctagtacaccctttaagctaatgaaccatcactccttcttaagacagacacatctacatttgtgaataagcaattatatcccatattacaaagttgactaacagacaacaagttatatccgagcgattctactaaaaacacattataaatggaatgctcggatgaaattgctatttttcctatacctttaaccttgtcttggttcccatcaccgaatatgattgaatct

SEQ ID NO: 76494 - DNA, 444 bp, Zea mays
  unsure (1)..(444): unsure at all n locations
agcttgtatattttcggcggcgacaaccttaccgccgaatataagttagattcggcggcccaagtgacaaccgccgaaaataggttatttcggtggcctgggtgtggccgccgaaaattagtcttgatttttggcagccagaagccgcggaaaataagctactttcggtggtatatggcctattttcggcgctatatggcctattttcgacggcttctggccaccgaaaatgatcttgtgtgctatagtgagacacaatatgtatgaagtgccatgtagagacaggctctttacgaagaactcgtctcttaatatttgccaactaaacctctagagacccctcaagaagccacatattaaatgagattgtcatgccctaatcaaggggtttagttagaggtgtcaaccgagaattctncctcggatttggacaccccataaacg

SEQ ID NO: 76495 - DNA, 212 bp, Zea mays
tgggcaggattcctctcttgaaaatttcatgcaccaatattaatccggcgggatggacacaatcaccccctttcaggcatggcgtaatagaagaaagtttattttgcatttacactcccttaactaactgaatcaactgcttggcataattgaaaaattccacagctaacatgaacacacgtgtgctatatatctgataaaaatacaggaaa

SEQ ID NO: 76496 - DNA, 376 bp, Zea mays
  unsure (1)..(376): unsure at all n locations
agctctgngcaataggcatcatgatcctgtactctttcatatcagtataagggaaaaagtaatcttaggataaggtaagcaacatgtacaagtttaataacggcttaagatgacttcgagcttcgtcaccagctaagtctcgtccacccttcgcccaaatttgtgttataaatttatttccaatgcttcgggccaggctggggatgtcagttaaatccgctggtgatagactgaagtttgacttgtttacaattttcccgtgtgtgcaaccagccttcataaaagctacagctgtgccgcgagaagccagcatggcacagatattaccatgcccagctataacttcggaagcgcctaacttcgtctctatatgtcg

SEQ ID NO: 76497 - DNA, 335 bp, Zea mays
ggatcttaagcgactgagctgcaactacaatttaggcacaaacttttttgatgagcggacagtggccagaagcgtataaagagtttgcggatggccgatttatacccaagtgcattgaaaatgaagaccccttgcaggaatgtgtatttacaaaggaagggtttttcgacttcggtaagcctcgtctgtcgaatctaattatatttaaacaataaattggagggctctgtggggacctggatcgaagtctcaaaacagattaaagattctggagatatggtgacagatctcgactatcgctacagaacaatatcaagtggcacgcgaagggacag

SEQ ID NO: 76498 - DNA, 441 bp, Zea mays
  unsure (1)..(441): unsure at all n locations
agcttgacaagacattagagctcctattttctattntgtcgtgccacctgtcacctctgttcacaagtgctcgtgttcactgttcttaatcccaacatgaatgcctgatctggtctatataacacttgaggactctaaaagcagtagtactacaacatctgacctaggtaatgtgagtaccacatactaatgtggacaaaggagcatgggaaacaacactagttggcctatcatgtgtaggtagcatggttatggcataaaaattaatggcaagaacaccaatacctaccacacaaaatgtatgatagtaatgtactaccggatggcctccgctagagtgcattaaatgcgtcaatatgcatactctactacctggacgagctctacactcatagcactatacacaaatatattatattgcatcttaacatacggacacac

SEQ ID NO: 76499 - DNA, 406 bp, Zea mays
  unsure (1)..(406): unsure at all n locations
agcttgccatctaatacacctttatagtttattatccatcactccttctaaagacagatacatcaatatttgtaaacaaacaattgtagcccatatgacataattgacttacagaaagcaaactgtgaccaagcgattctactaagaatacattataaatcgaatgctcagtagtgatggcaattttacccaaacctttgaccttgctatggttcccatctccaaagataatcgtatcttgggaatccttgttcttgacataggagttgaacatcttcttctttgtaacgccctgaatttgagggttaaaattttctttctctaacactcaccaaattcaggcattgtctttcctttttctttntcttctcaaagttctagtgagagttaactcgatattgtgtat

SEQ ID NO: 76500 - DNA, 425 bp, Zea mays
  unsure (1)..(425): unsure at all n locations
cgcgctataattagatcgcctttctttcttcccctctaggggactntcaataggtatcagaactcggtgcttcattagagcttaaccgctcgaagtgatgtcgggagatcacgccaagaagatggtgatcggcggtgagaagaccgctacaagccacgtgaaggctccatcgagggagtccgccaacaagaagaaggatggatccccttctcgcattcgatcgcacaggagtggcgagaagaagaaaatgaagaaagtggtctactacgagaccgactcttcctcgccctttacatacggatccgacgcagcgtccgtcacttcttagcgccaagagcgcaagaagtatattatgatccccttacgctatcctcgccttcctaaacatactccattactttccgtcccattaggcaaccaccgat

SEQ ID NO: 76501 - DNA, 303 bp, Zea mays
tgctttcctttgacaccaaatcgagccattttctttattggtgacacttttgaatacacatgatcaccaacgtggaaaatcaaggatcgtcgtctcctatcatcataactcttttgacgagaatgtgccacttgtaaatttcgctggatcactagaactttttcttacgcttcttctacgagatcaggcccaaagaagtatttctctcctggctctgaccaaattaacggtgtgctacaccttccaacataaagagcctcaataagagccatctttatgctttcgtgataactattagtatat

SEQ ID NO: 76502 - DNA, 380 bp, Zea mays
  unsure (1)..(380): unsure at all n locations
agcttcngnagattacgacttcattttcttcatgaacaggaacagtcctgtctccgttggcagccctcacaatagatatatctcgaaaataccttcctctcatgttatcaagatgactctgtctgatagtcgatttcccgaagactgcgtgacttggtcgccagggccgatcttcgaagtcttcgcccccactntctgtatcataactatcgctgtcatcggtatcttcagataagccctctagaaattctcttgtaatcttttctgtgtttgtctttgcaattgactcaatgaatccagcagtcttttcctcaagaagcttctcctcttcgggtagcattcgttcagcaactgtcttcttgtcttgagacttcttctct

SEQ ID NO: 76503 - DNA, 375 bp, Zea mays
agcttatcaatcaagtagcttctttctctctatgaagaagctaaggaagggtagctcatttctttttgtaatgctccgcgaaaaaagtttgatgttgaggtgcatcaagtgtagaagctaggaaagccgcagataccagtataaactaaagcggcgggcggatgcatgcacgtcgttgccaagaaaaatattgcagtgcacgcctgaaaacactatatacatagcaatccaatccaactagtagcttagctgtctcaagagtaactagtcatttaatttaatttaatgtgggatgatgatatttatgattcatcatctacgcacttaattcttgaagaagaaaataaagatatgcatgcatgggtttgaatcagc

SEQ ID NO: 76504 - DNA, 358 bp, Zea mays
agcttaatgcccctaagaaattgtctaattttgttaagggtaaggctcccatggctcatgataacgagggctatattttatatcctgctggttatcccgagcataaaattaggagaattcactctaggaagtcttattctggttctcatcatgcttttatatataagaatgagacatctagttctaggcattctacccatgttaaaatgcctaaaaagaaatctcctgttgcatcaaatgaacctaatgtttcatttaagacttttgatgcttcttatgttttaactaacaaatcatgcaaagtagttgccaaatatgatgggggcaaacacaagggctccaagacttgtgtttgggt

SEQ ID NO: 76505 - DNA, 447 bp, Zea mays
agcttgtgaaggttcttcatccccacatgtgctattcggcgatgccacagccagcccatgctagtcttagcgattaagcatgcatctagactggcctcctcttttgcaaaatcaactaaataaagtttgtcgtctagtacacccttaaaagctagtgaaccatcacttcttctaaagacagacacatctacatttgtaaatagacaattatatcccatattacataattgactaacagatagtaaattatatccaagagactcaactaaaaacacattagagatagagtgctcattggatattgcaatcttgcctaaacctttcaccttgccttggttcccatcaccgaatatgattgaatcttgggaatccttattcttgacgtaggaggagaacatcttcttctcccccgtcatatgtgttgtgcattcgctggcgataatccac

SEQ ID NO: 76506 - DNA, 324 bp, Zea mays
acccccaaggaggagaggctttttttgacacaagaaaagcttgggaaacccccgcttgaagaatttctccctcccctgttaataaccctctaatgtgctttatgggctcaatcaagctcccaaagcatgggaagaatgccttaaggactttcttatcactaatggattcaagtcggaaaggccgatcctactttatttactaacaactcttgataagaccttgtcgtctgccaaaactatgttgatgatattatattcgggtctactaacgagtttacatgtgaagaatcaataggatctgaccattactcgagatgctatgat

SEQ ID NO: 76507 - DNA, 364 bp, Zea mays
gcttgcaagctattgtggacccatctctttttttttcatcaagggtagccaacaaggatctaagaacccaaatgttctttgtgttagcacttggtaaactcattacctttctagcacaagttgcaattttgggttgcctagttacatgtgaattaattgacaagctagaagcgagatatctaccaatgggacaatccttgcataggtgccccttcttatggcatatgtagcagaggcgaacctcaaggcctgaaaatatcattcttccttgtctcttgctcgctacatggataagaaatatattcttttctaaaactatgacttgttgtttacataaggacatgacttatcatagtgcccttgt

SEQ ID NO: 76508 - DNA, 379 bp, Zea mays
agcttctaaagggagagcacattttaggattatcttatgttcattttgagaaagacgggatttgtagcgcatgccatacacggaaacaagttggtgttcatcatccacacaagaacatcatgacgactgacatgccactggagctcctacacatggacctattcaacccgatagcttacataagcatcggcgggagtaagtactatctagttattgttgatgattattctcacttcacttgggtgttctttttgtaggaaaaatctcatacccaagaaaccttatagggattcttgagacgggctcaaaatgagttcggcttatggatcaagataactagaagcgacaacgggacggagttcaaaaactcacaaatcga

SEQ ID NO: 76509 - DNA, 337 bp, Zea mays
  unsure (1)..(337): unsure at all n locations
catgcaagcttcgcaaaggagaacgaaaatagagatttgttttatgtagctacggctcaagcgagncacgctgatgtgataaaaatcatagataccacggaaaaatagagatatgggaaggccgaagccgcgaataataaaaggagtgtcaaccactgactcctgggtatctttggttgggatagtggtcccgcggccagaacgcccagaacagatctccctgggagggagaacccccattggaaacaaggccggagaaactcaacttcagaaatcacaaacatatggttacctgcgaaaggtaactgactggtggggtcgatggcggggatcactg

SEQ ID NO: 76510 - DNA, 419 bp, Zea mays
  unsure (1)..(419): unsure at all n locations
nagcttgtgaaggctcttcatccacacatgttctaagcggcgatgccacagccagcccatgctagtcttagcaattaagcatgcatctagaccggcctcttcttttgcaaaaacaactaagtaaagcttgtcgtctaatacacccttaaaggctagtgaaccatcacttcttctatagacagacacatctacatttgtaaaaagacaattatatcccatattgcatagttgactaacagatagcaaattgtaaccaagagactcaactataaacacattggagatagagtgctcattagaaattgcaattttacctaacccttttaccttgccttgattcccatcaccgaatataattgaatcttgggaatacctattcttgacgtaggaggtgaacatcttcttctctcccgcatatg

SEQ ID NO: 76511 - DNA, 433 bp, Zea mays
  unsure (1)..(433): unsure at all n locations
agcttgtgatttatccaatctaaaacaatctccatctcttaacatagattttctatggataaactcaacacaagagatgacattagtagcacaagcactagtttcttatttagcaaccctttatatgtggaaggcaagcgagttgctaaaatagagaaacctcataatatggactaaatttgccttgaaccctcatgcacaatatattttgaatgacatggataatatgcatggttattcaatgaagtctaaaagggctgacttaatccatattatggtgagtgtctaatatagaagaatcaaatccaaattaactagagagagtacatcacatagttntggatttgttgaccatatgataatattcatttatcttccaatttgacctttatttcataatcaataactgatgtatatcctcaagtgcttcttt

SEQ ID NO: 76512 - DNA, 385 bp, Zea mays
  unsure (1)..(385): unsure at all n locations
agcttaatgcccctaagaaaatgtcttattttgtttagggtaaggctcccatagntcaggataacgagggctatattntatatcctgctggttatcccgaacataagattatgagaattcattctaggaagtctcactctggctctcatcatgcttttatgtataagagtgaggcatctagttctagacaatccactcatgttaaattacctaaaaagaaatctcctattgcatcaaatgaacccaatgtttcaattaagacttttgatgcttcttatgtgctcactaacaaatcangcaaaataagtgccaaatatgttgggggcaaacacataggatcaaagacttgtgtttgggacccatgtgcttgttctaatgttaagga

SEQ ID NO: 76513 - DNA, 251 bp, Zea mays
  unsure (1)..(251): unsure at all n locations
gcatgcaagctttcaaagaatagaagcaggatttgttttttgtttcttcaatgacnccccctgcgccgagggctccgttgctcttatatgtgccagcatcacgttctgcctcgtgatccgcactgagacatgataagccagatggactcgctcacaagcccaccctcaaccacttcgcctccgtaagtctcggcgggactaaagacnaatacacggattgggaggatgaatatgagctgcttaatggcctt

SEQ ID NO: 76514 - DNA, 415 bp, Zea mays
agcttgaagccatggtaagtagcatatgtttgtaaaatgcgaattgactcaagcctagctacgggtgcataggtttcaccgaaatccaaaccttcgacttgtgaatatcctttggccacaagtcgggctttgttccttgtcaccacaccatgctcatcttgcttgttgcggaagacccacttggttcctacaacattttgattaggacgtggaactaaatgccatacctcattcctagtgaagttgttgagctcctcttgcattgccaccacccaatctgaatcttgtagtgcttcctctaccttgtgtggctcaatagaggaaacaaaagagtaatgctcacaaaaatgtgcaacacgagatctagtggtaccccttatgaatgtcgccgaggatggtgtcgacggggtgatct

SEQ ID NO: 76515 - DNA, 289 bp, Zea mays
aggctgaaaaaatctggatattgttcgaatagtccaagcttccttcgaaggatagtctgtcaaaaatatccctcgaggacaaaatgagcatgctgatttgctagctaagtcagcagcacaggggctgcctttaccttccgatgtgttcttcgaaacaataaaggcaccttcagtggaactccttgaaagagcacgcctcaatatatctcctgtttatagcgaagaatggagaactgagatcatctcttacctacagggtaaattcctttcagatgacgaagcttataac

SEQ ID NO: 76516 - DNA, 374 bp, Zea mays
  unsure (1)..(374): unsure at all n locations
agcttctaaagggagaacacattttatgtttaacaaatgtccattttgagaaagacaggatttgtagcgcatgccaagcagggaagcaagttggtgctcatcatccgcacaagaacatcatgacgactgacaggccactggagctcctacacatggatctattcggcccgatagcttacataagcatcggcgggagtatgtactgtttagttattgtggatgatttttctcgcttcacttgggtgttctttttcaggaaaaatctcatacctaagagaccttaaagggattcttgagacgggctcaaaatgagttcggattaaggatcaagataattagaagcgacaatgggacgaagntcaagaattacaaat

SEQ ID NO: 76517 - DNA, 442 bp, Zea mays
  unsure (1)..(442): unsure at all n locations
agcttagtttaaggattaaagcccttgggtagaatttgacatgctttggacattgtttgatcccaaacccaatacactagcttcctagggtataattgcctaaccctagtagagtactaaccccggaaactctagtgactagtgtgtaccatgaaggaaagttgtattcaagatacaacttagtttggttctattataactgcatatgtatagcatcacataagcattgatgtatatgtattgttatgtatagaaaacgaagaagtagtagttgaagaagaagttgccccacaagctgaaattccacctttcgagaacaacttctattntgatatctgtgggacagacccagagcctcctgcaatacaaggcaagcctcgatacatttacccctttccttggtggtttaacttctttatcacttgagatgatgcattacgta

SEQ ID NO: 76518 - DNA, 402 bp, Zea mays
  unsure (1)..(402): unsure at all n locations
actgaagcatgcaagcttgtgaaataagactacacttctattatcttctactccatccaaaggcagggtgtgggaggcgtggctgaattgaaggacgtgcttgttgttcttacattgtcaaagatgacttatttgggaaagatgggatgtaaagtaatcgattggcaaagtaaacttatttgtgttagctgagatgcgaaagaacctctatctgagttggttaggtggtctgagtaacactccttaagtcccgaattcgaatcccagaggaaacgaatttcagcctgaaattaaaaaaggccactcgctgattcccctggtcgtgtgcacaaacatntaaaaagggtcaaagcacagtaagatctgcctataggggcggacctcatgtgacggggacacctt

SEQ ID NO: 76519 - DNA, 386 bp, Zea mays
agctcggcaccctatggagagaggaaacctttgtttattatatcactcgccgcgccactaggatacgtaagtttgtggccagacgatcataacctagaccagcgatgtccactgatgattagttggactatgctgtacagcgacgctacaagaatattaggcagcacagagacgaatcgatacgtttacctttctcagaggcacaagagcatataggccaatgaaactgacaaggaatagaaaccctatcatccatccgatgtgagggtttttgacattctgaggattgtcagcctctgttgctgcttggcgatggattctctatgccaaacagtatgtacaaaccacctgtaatagaatggatatacacaattatcacatctctt

SEQ ID NO: 76520 - DNA, 321 bp, Zea mays
tctccactcttcgctataaacaggagatatgttaacgaccgctctttcaagaaaatccaccgaaggtgcttttattgtttccaagaacacatccgaatgtagaggcagcccccgtgctgctgacttaatctagcacaaccagcatgctcattatgtcctcgagggatatttttgacaaaaaaccctccgaaagaagcttctactcttcgaaccatatccagatatttttcaagcctcggatccttagccttgcaactcttgtgaatatgacccgcaacaacctgggtattaagtttaagcatggcccttctgattcccatt

SEQ ID NO: 76521 - DNA, 421 bp, Zea mays
  unsure (1)..(421): unsure at all n locations
agcttcngctaccctttgtcttgtccattcttcgacacctttattcagattttgcgagtcagggtattcaaaacccacggcgtacattactctattcattcttcgcttcagacgggtaccgaaggccgcaatcatcaactgatcctcttttttggagtaattaccgagtatttcattgcacattatttcaattgtgtctagccactcttgacaaggtgttttaaaatatttcttaaacttgtaatagtaagggaactgcacaagttccccttctttcttctccccctctagcttcggcatttcccattcttttaaggcaggaaaaaccctgatagccaaaaactctcgaaccaggtctcttgtgctgatatgctctgaaataattctaaactcaccccacgctttttgggttggaccttct

SEQ ID NO: 76522 - DNA, 418 bp, Zea mays
  unsure (1)..(418): unsure at all n locations
agcttgggaaggttcttcatccctgcatgttcttatcggcgatgccacagccagcccatgctagtcttagctattaagcatgcatctataccggcctcctcttttgcaaaatcaactaaataaagtttgccgtctaatacacccttaaaagctaatgaaccatcacttcttctaaagacagatacatctacatttgtaaatagacaattatatcccatattacataattgactaacaggtagcaaattatatccaagacactcaactaaaaacacattagagatagagtgctcatttgaaattgcaatcttgcctaagcctttcaccttgccttggttcccatcaccaaatatgattgagtcttgggaatccttattcttgacgtaggaggtgaacatcttcttctnccccgtcatat

SEQ ID NO: 76523 - DNA, 443 bp, Zea mays
agcttggtccctgcttttctccctctctgttctgtctctgctcatccggcaccgaggagtctctgcgcacgtgtcgcgcgctctagcggctgcaacttgccgtgctcccctgcgtgtcgcgcgtccctcccatggctgccttgggacctactgtcgacccttcggcgttgtctcctctggcggcttgcgcttgaaatttcgccgtgcgccacgatgagcttgtcgtaaaacctgcctagtcgctgcgtgtgtttgtgtccgagcccgcccggccgcaacctcgcattgctcctcgcgtcgatgctcaccgagtccttcctcaatccgcgctctctcccagcccatcgtcgtgtcgttcgtcatcgcgtcgtgtgtgcagcaacgtcgctaattcctccatgatgctttgcaacgaacctcgcttcatcgatttctcgccttcg

SEQ ID NO: 76524 - DNA, 455 bp, Zea mays
  unsure (1)..(455): unsure at all n locations
gacctgaggcatgcaagcttctaaagggagagcacattctangtcttacctatgntcattgngagaaagacagggtttgtagcgcatgccaagcangaaagcaagttggtgcccatcatccacacaagaacatcatgacgaccgacaggccgcttgagctactacacatggatctattcggcccgattgcttacataagcatcggcgggagaaagtattgtcttgtaatagaggatgattattctcgcttcacttgggtattctttttgcaggaaagatctcaaacccaagagacctttaagggattcttaagacgggctcaaaatgagttcggattaagaatcaagaatataacaatcgacaaagggacggagttcaagaactcacacattgaatgcttgcttgaggatgaaggcatcaaacatgagttctcttctcctacacccacaacaaat

SEQ ID NO: 76525 - DNA, 403 bp, Zea mays
  unsure (1)..(403): unsure at all n locations
agcttgaaagatatttggatgctgttcgattgttggaagcttccttcgaaggtttttctgtccagaatattccaagaggtgaaaatgaacatgcagatttgctagccaaatcagtggcacaggggctccctctaccctcagaagtattttttgaaacaataaaagcatcttcggttgagctcatggagagagcagtgcttactatttctccaggacacagtgaagactggagaactgaaataatatctttcctccaaggcaactgtctctcaagtgacgaagcttataacaagagaatggaggcaagaacaagaccgtatgtgatgatagaaggggaattgtataaacatggagtttgttcaccactccctcangcgttatcaagaactgagggatggaatta

SEQ ID NO: 76526 - DNA, 309 bp, Zea mays
ttgagtggatttttgagaataatccatttgaaggtcttcatttcgtgtccctttgctgagagtcatcttttcttttttcgaataccttagaagtcagcattatgtcatcgatattatgctttagaggtcagcattatgtgatcaatattatgctttagaggtcagcatgtattttgtcttttgcggccgagttcgtgatccgcccatatcttgctaggtggtgcgatttatatgctctgcgactgattggacgttccctggctagtcttcacgtcgcttctgtcgtcagaatttgacttcaccggtata

SEQ ID NO: 76527 - DNA, 436 bp, Zea mays
  unsure (1)..(436): unsure at all n locations
actggaatcattatatccttcatcttctgccatgatgngattgtgcctggccgaagagaggagtaccacgtttgtgcaacattcttgacagccatgacgaaagacttcgccatgactgcagtattgccaccatatgaagatattgttgcttcatagctcatcagaaactgcttcggatctgagtgtccgtcgtacatggngacgtgaggtggcttgtaagatggatgccaaggggtatcctgcagttctgctgacagaggagaagcatcatcaacagcataatttccatgatagagatcctcataccagtcatcctcgttgaagaagccctcttgatgaagctctctgtgctgaggccttcngttctgctcatcttgagcaagatggcaaacttctttagaggcttcgtctatctgcctttgaggtcatctagcct

SEQ ID NO: 76528 - DNA, 345 bp, Zea mays
  unsure (1)..(345): unsure at all n locations
ccactatttatggttaagttccttaaccaggatntcattngcaaaacacttaaaacaatacaacttgtttgaaattnttggcctagtgaatgcactctangtgtgtcaaacatatgcaatgctaatgcttatgatgtcatgctcaagttttagttacagtaacaccagnggtgttacatccttccccccataaaagaatctcgtcccgagattaanaatcctangggtaagtaatggtaaaggaaacgcatcacatntttatttccttanttttggtacaagacaggggtgatgtgggggttacttctttattacaacagctatacaggctttacaatntacatg

SEQ ID NO: 76529 - DNA, 398 bp, Zea mays
  unsure (1)..(398): unsure at all n locations
gtatgacgcgtttccttttccattacttaccctatgactcttaaatctcgggacaagattcttatatgggggaaaggatgtaacacctctggtgttactgtcactaaaacttgagcatagcatcataagtattggcattgcatatgtgtgatacacctagagtgcattctctangtctaaagttctaacaattcgttatgtttaggaattttgataatgaaccctggatagggaacttaaccctaaatagggattataggggtataacataacccaagttgagaatacctaatagctctacgggagatagtataaaatgtctccaaaatgaacttgaatacctttatcctctaatgtacaaataccctattggaacctggacaacctaaactaaacat

SEQ ID NO: 76530 - DNA, 414 bp, Zea mays
  unsure (1)..(414): unsure at all n locations
tggctgctacagtttcgtttctcggtccgggtcaagctgtcctgtgccaacctttcagaagagatggcccggcgactggatgacagaatggttttatgtgaagaatgacctgtcagtacgagaagatatcaaaggtataattatgcgccttatttggcaaagcttcngccttcggaggccgaagggtganatgaatgangctaccgaagaatgccagagggccttcggcgttatctgttcttttattggaacgagagaattagtacaagagcatattgccttccgggtatggccgctcgcggagaaatggganatgccgcaagaaaccataaaagaggccgacgaaggtggacttgtcagactgaagtacaccttcaagttcggagatanattcgttgagccagatgatgactg

SEQ ID NO: 76531 - DNA, 476 bp, Zea mays
  unsure (1)..(476): unsure at all n locations
tcaagcttgactnggggcggatatgggatgaaaggctcggtgtatanaatctttgatctatgcttctggctccgaaggctctctcaattgatactcgganggaagaatgccttatattgaagagntctcttggattgagtggatgattttctccaccaaattctcttagatgatatcttgtgctacngtaaggtggtagaaagnnnnntctaacagcataaccggagtcaactaaatatgaatttcctagttcaaagaggtctagttagttggattgtgaagtaatttaaaatcatattcaaacatgtcatggaattccctggtggcacaatgaggccatcagatctttccaatgcatctgatagaatcaaggcatcatgagctgaaccttcccagccagcaagaacatatgtaaatctcatatcacaatcaacagctgctagaacattntgtgtcgttgtgtgctttctacccat

SEQ ID NO: 76532 - DNA, 303 bp, Zea mays
  unsure (1)..(303): unsure at all n locations
gcgcatgccaggcacgataagcaagtggcgctcatcatccgcataagaacataatgacgaccgacaggcgcactgaagctctacacatggatctattctgtccgatcgcttacagaagcatcggcgggagtaagtactggctagttattgtggatgattattctcgcttcacttgcgtggtccttttgcatgaaagatctcaaacccaagagaccttaaagggaatcttgagacgggctcaaaatgagttcngttaaggatcaagaatattgaagcacaacgggacggagtcaagaatctcaa

SEQ ID NO: 76533 - DNA, 382 bp, Zea mays
  unsure (1)..(382): unsure at all n locations
tgtgcgccaatggtcgactgcagtgtcagagcaacggctaggcgcacctaacagtgaacagtgcactatctggtgcaccaccagactgtccagtgtgccacagagagcacaacttttctccaacagctagaattgtgttggaggctataaatacactcccaaccgaccattctagtgtatgggagcccaagcaacataacaaggcatatagtagacatttccaagtgctcaaacacccaagtgcttaatagaaatcactcgtgaatagtgtangtgctntgcgaagtgcttaagttagttagaccgctntagcgcttgctctaggtgaaccctagttagttgagtgagtttagaanaaccacacaacccctcggctctttca

SEQ ID NO: 76534 - DNA, 392 bp, Zea mays
  unsure (1)..(392): unsure at all n locations
tctccagccacagcttcngagctagtttatccttccttcagattgtgtctttcataccgngcacaccttcatctcgaagctgaagcctnctgagacagtatatcatactggaaaacatgttagttatgttntttgaggaccttcggaagaggaaggcccccaacagttacctctaaacctaaactggaggagtttctccctctcatgaataaggtggagagaaggctttcttcattctccggctagatttcttcgggtggtagacttaactttggttaattcgactatgtccacgctccctacgtatgatgtgtgcactctcaagttgccactcaagaccatcaactctattgatatagcaagacaggattgcctttggcgaggcaatgatg

SEQ ID NO: 76535 - DNA, 349 bp, Zea mays
  unsure (1)..(349): unsure at all n locations
acctatatactctgtgatgtanggcgagtgatacgaagctgtatgcatgacctgctntggctgagcttngtgtgctgcggcttcngctatttccttttgcttctggatggtaacatgacacatcctggtagtatggcccttgttctcaccacagaataagcaaaagattcttctctgttgatcgccaaatcttcctccgaagccnctggcacctctgcctcttggagctggtggcggaagggagcttgctgttgccccgaagcctgtgaggaatatngtggcctcttgctgtggctccccttatcatcactttgtgtagagttatgaattgatctaacatgcctcgggt

SEQ ID NO: 76536 - DNA, 405 bp, Zea mays
  unsure (1)..(405): unsure at all n locations
tctgctntntgngtcgcaccgaagggtcaatgccctatctgtgctctattatggctcggctgactccgaccagatcgagggcagaccaggcgaagacatctttattcttggccaggcagcagagaagattctcttcttcaagtgaggtgaggtcttcgctgatagttattgtctgcttgggtgtggcctgatcgagggggacagtcttggtcccgtcttggcactgcaactgcgccttgtcgtgctgcttgtcngttgggctggcccngcgcanggacctcncgctgggtcgagagacagtgtatgtttctctgaccgggcacgaagtcccgctcaatgttgcgcgccgtctgctggttgccgtaaactgtgatggcgcctagcgggcctggtatcttcatacat

SEQ ID NO: 76537 - DNA, 472 bp, Zea mays
  unsure (1)..(472): unsure at all n locations
tatgcaactgctgccagaaatgagaagtgatactgcgtcctctatctgacactatcttctatggcacaccatgaagacnaacgatccgagacatatacaactctgccaatacggcactgctatagttggtcttgacaggtatgaagtgggctgacttggtcaaacggtccactactacccaaatggaatcgtagccggctcgagtgcgaggcaatccgactatgaaatccataccaatttcatcccattttcactgagggatcttgcacggttgcaacaatccagcaggtctctggtgctctgccttaattcttcggcaactatcgcacatagccacatgctctgcgatttccctcttcattccgtaccaccagaatttcttcttcagatcctgatacatcttctcactgctagggtgaatcgaataagcggtctcatgagcttccttgagaatcaactcccgaatggactg

SEQ ID NO: 76538 - DNA, 361 bp, Zea mays
  unsure (1)..(361): unsure at all n locations
atgctagtcttagctattaagcatgcatctagaccggcctcttcttttgcaaaatcaactaaataaagtttgccgtctaatacacccttataagctagtgaaccatcacttcttctaaagacagacacatctacatttgtaaatagacagntatatcccatattgcataattgactaacagataagtaaatatatcccagagaactcactaanaacacattagaaattgagtgctcatttgagaatggcaatttacctaacccttntaccttgccttgattcccatcaccgaatataattgaatcttgggaatccttattcttgacgtaggaggtgaacatcttcttctcccccgtcatat

SEQ ID NO: 76539 - DNA, 487 bp, Zea mays
  unsure (1)..(487): unsure at all n locations
tgatattaaattcaattgtgtcttaaagtgtgatgatagctttgaacaattgaagacattattaaccactgctccggtattggctcaaccggatattaataagccctttgatgtgtattgtgacgcatcatgcagtggcctcggctgtgtgttaatgcaagaaggccgagtaattgcatatgcttcaaggcagttgcgctgacatgaggaacactatcctactcatgatctggagtaagctgcggggtcatgccctaagaactggcgcattattgttgggaatgctgtatattatacaaccataaagcttgaatacatttacctagtcaaatgaaatgaacagagcgatggtcgagctatcaggatatgaatagaaatcatatacccaganaagcaatgtatggagatccctcagtccagggttctgcattgctacatgaaactctgcattcatatgcagagagganaatgacctggatgatcacat

SEQ ID NO: 76540 - DNA, 369 bp, Zea mays
  unsure (1)..(369): unsure at all n locations
ctcggcagcatcgcttttcgctcttggccaatagaaactatatctaanagccttcccgaccagagtccttgaagccgcatgcactccgcacttcctggcatggatttcatctagcaattgcttcccagcaaccgagtgaatgcatttcatgaggactcccactgcacctcttctgtacagtaggcccnctatgatggtgtagtgggccgactgcctcgtgatgcactctgctgcagccttttcatctgattcttcttaatttttatatacctgatgatgggctctctccagtcattgnggtccgactctggttggctcaaggtgttgcactcttccacctgacttgagaggatgcttggttgtgatatt

SEQ ID NO: 76541 - DNA, 373 bp, Zea mays
  unsure (1)..(373): unsure at all n locations
aatttaatcttagtctgagggcatgaatgagtggctctaagttcacctcctggtgatcgaattaatagnttcttcttcaacggatagtttggtatattatgtttttccacgaatgactntattatgaaggaatgagatgctccagaatcaaataaaactgatgcacgtatggagttaataagaaacataccatacaccatgtcggcttcctcaagaactgattctgctgtcacatgattgactctttctctactctggatctgcggagtcttggtctgtgcagatccacgagcaagtgtgttctggtcagtcctccagttgctgttcttctggggtgtctggtgattacgtcttgngcagctgttggcatagt

SEQ ID NO: 76542 - DNA, 437 bp, Zea mays
  unsure (1)..(437): unsure at all n locations
atttgagatcgacatgatttgtagcgcatgccaagcanggaagcaaagtggtgctcatcatccacataagaacatcatgacgactgacaggccactggagctcctacacatggatctattcggcccgattgcttacataagcatcggcgagagtaagtactgtctagttattgtggatgattattctcgcttcacttgggtgttctttctgcaggaaaaatctcatacccaagaaactntanagggattcttgaaacgggctcaaaacgagttcggcttaaggatcaagaaaataagaagcgacaacgggacagagttcaagaactcacanatcgaatgtttccttgatgaggagggcatcaagcatgagttctnctctccctatacgccacaacacaatggtgtagtagagaggaagaatagaactctattggata

SEQ ID NO: 76543 - DNA, 410 bp, Zea mays
  unsure (1)..(410): unsure at all n locations
gctacatagattgataataagaatttgaatcctatgatatagntttctccccctatatatgtgcatttcagaaaataccaattntgtactcaaatgccaaaagcacatanttgggtcaaagtatggagacaacttatatcatactattcataggatgcagtgcgtcatanaataaacgtgatgctcatgacatagtatgcactaatcaactntctacatcttatgtttttcttatgaacttccttattttaaatattntctccctttttaaaggctacacttagttacataagactaaaggtaagctntaatgcacaatttctccccctttgtcataaatctccaaaaggatacaaagaatataaagggtagaaattatgattaagcaagatgggaacacactattatga

SEQ ID NO: 76544 - DNA, 313 bp, Zea mays
  unsure (1)..(313): unsure at all n locations
ttacatctatagagtaaaatctgtagaacgcctctgattaagttgtgcatagtggtagtcgtatctacaggatgagtacacgatgtatgatgcgagtggctnttataattgccaaaactcaatcatgactacgccattgtcacgttgattggtaaatgggatgttcgtgatgaaggagatgactttcgcctcgtccggtatatatatatatatttagggcaggtataacgggagccctgtgcttncaatagttaaaggaagcccangccgaccacccctgcaacgtggttcaacctagcgccccgactcaact

SEQ ID NO: 76545 - DNA, 480 bp, Zea mays
  unsure (1)..(480): unsure at all n locations
tactaagctccgcccatcgaacgcggaggacacanggcagctctagcgacggtggtatgcgatcgacgacgtcgaggttaggactcangaggaggaggcaacgagagggacgacgtcagaatctggatgggcggtgggccggtggcctggtgggtcagaccatcagagtggggagagggggcagaccgcagacgtgacgcacggctcagctgaaacgaacaaaanatttgggtctgaccattgtggcacgcgtcngctcgcgaatgactatnntgccgtgaagcatggagagacgctcaaacccgagtgccttttaatactttagatggctcacatgctcgaccttttgggtatgaaaacanaatggtttatagacatcctcattatttcagtcaatcgatgctcgataactctctttcatagctctataaagtgtggcttaataacttaattctttcgtaatggtaccaacttgatata

SEQ ID NO: 76546 - DNA, 467 bp, Zea mays
  unsure (1)..(467): unsure at all n locations
gcaacaggcataaaaagagcatcccccatactctctacacctaagtatggtcgtggcagagtactntcccttnttagcacgcgagtcacanaaacctgtgtgaactcccttccaagaggaacatctgcaaccttagtggttgggtcggttgagataatatttgctattgcaacaggaacttctgatctcatcatagaatataatatgacttctttaccaacctaataaaatatgtgaagtangattacaaagttcaaataatgaaacataaatatgaagtgatagatgagaaaatacatgattatcgtctgcattttaaggtgatccatgatttctttgnggaccattgttgaatgtctcgcctgcgctntgctcttaatagtataacatcttacgattctttacgaccacagtgttgaactcgctagaagctgangtcatttcaccatatttgtaatagcattaca

SEQ ID NO: 76547 - DNA, 434 bp, Zea mays
  unsure (1)..(434): unsure at all n locations
tctanagggagaacacgtgataggtctaactaatgttcaattcgaattagattgaccttgtgcagcttgtcaagcanggaaacaggtgggaggctctcatcacaccaaaaatgtgatgacgacatcaagaccctnggagatgctgcatatgngaccttttggacccgtcgcctatctgagcataggaggaagtaagtatgggttagttattggtgatgactnttcccgcttcacttgggtggttcttttgcaggaaaagtcccaaacccaagggaccctcaaacgcttcctcaggagagctcanaatgagtttgagctcaaagtgaagaagataaggagcgacaacggatccgagttcaagaaccttcaagtggaggaagtccttgaagaggaanggatcaagcacgagttcttcgctccctacacaccacaac

SEQ ID NO: 76548 - DNA, 280 bp, Zea mays
ctatggcatgctcaagattaatctttatgggacccaatacgttaccctactttggtctactttacaccttgatcaccactgaacttttcgcgtagtatctgctattgctctatgtcgcacccggatataacgggaaaacccggttgcatctcatatgtgcgccaaagaagaattacacatattatgtacaactctatactaaatagaattgctcaaacttaattacatattggaagcgtcttactaaaataaatgttataaaattaagcatactactatc

SEQ ID NO: 76549 - DNA, 418 bp, Zea mays
  unsure (1)..(418): unsure at all n locations
agtccactcgaattaatcttctgagagacccgatctcgctttatatgacacccgaaggtccaacgcaacaagcaatgaatgaattcagaattattgcagagcatatcagcacaagggacctggttcangagtttttggctttcaaagttnttcccagtttaaaagaatgggaaatgtcgaagctacagggggaaaagaaagaaggtgaacttgtacgtttaccttactacttcaagtttaagaaatactttataacaccttgccaagagtggctggatacgatngaagcgatgtgcaatgaaatacttggcaattattctaanaaagaagatcagttgatgaccgcagccttcggcacccgtccgaagcgaagactaaaccgagtgctggacgccctgngtttcgaataccctgatta

SEQ ID NO: 76550 - DNA, 417 bp, Zea mays
  unsure (1)..(417): unsure at all n locations
tctaaagggagaacacgtgataggtctaactaatgtaactttcanataatatagaccttgngcagcttgtcaagcaggtaaacaggtgggaagctctcatcatgccaaaaatgtgatgacaacatcaagacccctggagttacttcatatggacctctttggacccgtcgcctatctaagtataggaggaagtaagtatggtcttgttatagttgatgaattttcccgcttcacttgggtattctttttgcaggaataatctgaaacccaaggaccctcaagtgctcctaaggagagctanaatgagttgagctcaaggtaagaagataggagcacaatgggctgagtcaaaaccttaagtggagagatcttgggaggaagaatagccgagtctcgtcctaccacacacaaatgcgt

SEQ ID NO: 76551 - DNA, 524 bp, Zea mays
  unsure (1)..(524): unsure at all n locations
tggtctcgtgttgtcagaatgacacgctntatgtcatcatatagatgcaccatagaagcatattatatcatataaatatgatgtcaataataatgagattacgcatgagcttgaacatatcacaacatcaataaatatgatgtcaataataatgagattatatcaaatctcanagtggatcatttgaatattactcgaaagtaaatcatctaacaaaatgatcttcacgtaaaaagagaaatgggtgtatgtgattcagtatgaaccatgatttanaccaccaaccaccggtatcatgttagattgaaggttgaagtacaattcatatcttagctntcatgagcactntcnntttaaattggcaaatgatgcccaagcatgatagttgaggccatcaaggatgagttcttcaaactctttgtgcccttgacaaccattcaccacttcgcgaaacatagtaaaacatgcagcactcaagcaatatggtatttggtaacagtacacacttatattngatacatata

SEQ ID NO: 76552 - DNA, 414 bp, Zea mays
  unsure (1)..(414): unsure at all n locations
actctgtgcacgaataccttcgtacaaacagttttgtgattataaaagctagagttagatgtgttgtcgtcggtagcggctaatatcggcttcgagcttcnggaaaccgatactctntgatagagtaccgataacctttgctccggtctgatctcggatgcagcctagcttctcatcatcaacaccttcgaagagaagtgcccctggtcggtagccgcaggaaatggcatattccttccattcttcttttcggcttttgtaattctanccaaccaagtntgaanattaaaattcatcttctagtgttttcggcaattcttttttctcggctctgggccgaacctcttcgggcccacagcttttctgggcatgttacagaatttattatataagagcacacttcaatgatatttg

SEQ ID NO: 76553 - DNA, 452 bp, Zea mays
  unsure (1)..(452): unsure at all n locations
gagagagaggataatatacaaaacctgttagtntggtcttaagaaatagnntagaggatgaaatgtaaacacatantttgctagctgagtaaaaaattgctggatgtgctntattcagtccacaatacaatgttcaactgataattttctacattcggattggatgaattcgagctgcacaagatcataatttctaaggacaacacaaagtatgagcaatgacttacctcacaatanacacagcagaaagccatgaatggcctgtaccgataatataatttcagaaatcaataatgaaatcgagatcacaaaccaaaccttctgctgtgtacccagacgagcactccgacctttggcgttggccctatcacgcctgttaccgagcaccccaaatctctcaccttctcgtncggtgcacttggacctcgtcggcgatgctcatgtctgtgtct

SEQ ID NO: 76554 - DNA, 394 bp, Zea mays
  unsure (1)..(394): unsure at all n locations
acatgtgctaagcggcgatgccacagctagcccatgctagtcttatctaataagcatgcatctagaccggcctcctctttngcanaatcaactacataaangttgccgtctaatacacccttaanagctaatgaaccatcacttcttctaaagacagacacatctacatttgtaaatagacaattatatcccatattacataattgactaacagatagtaaattatatccaagagactcaactaaaaacacattagagatagagtgctcatttgatattgcaatcttgcctaaacctttcaccttgccttggttgccatcaccgaatatgattgaatcttgngaatccttattcttgacgtaggaggtgaacatcttcttctcccccgtcatat

SEQ ID NO: 76555 - DNA, 394 bp, Zea mays
acatgtgctaagcggttatgccacagtcttcccatgctagtcttagcgagtaagcatgcatctagaccggcctcctcttttgcaaaatcaactaaataaagtttgtcgtctagtacacccttaaaagctagtgaaccatcacttcttctaaagacagacacatctacatttctaaatagacaattatatcccatattacataattgactgacagatagtaaaatatatccaagagactcaactaaaaacacattagagatagagtgctcattggatattgcaatcttgcctaaacctttcaccttgccttgggtcccatcaccgaatatgattgaatcttgggaatccttattcttgacgtaggaggtgaacatcttcttcttccctgtcatat

SEQ ID NO: 76556 - DNA, 447 bp, Zea mays
  unsure (1)..(447): unsure at all n locations
ctaagctcccgcgactcnctgactgagggcctacctgcaacgctntgtccttcggcatgttgatggcgacgtcgaacttattgntcgccttggggtcgtactcgatgccctcgatcaccagcagctgctccttccccgggtccttggccggcacaggcacggncggcacttncaccacctggcccttagtcagggcgagcgggaacaccggcgccgccttccttgccgacgacgacctcngcgggctgtccttgccgtgggcaccaacgaccagatcttgcacgcaccatggaggtccttgcggactggcgtcgacgtgtaccgaggtcgccgtgtcagacgtccggaactgtgccaccttcgcgggctttgagtcgtctaaagacaactggtgtcaccatccgcntcggatgcctgccgccgcgacctggcgacagagtgcacatg

SEQ ID NO: 76557 - DNA, 190 bp, Zea mays
  unsure (1)..(190): unsure at all n locations
tcctagaccacgaatgttggcgggtggaggaagtcctgcgaggtgattcggcgtcttcggcaaagtagcattcggtctgagggtttgggaagcttcactagcctctanggaagctaatggcaaagctagactcacaagagagggcctgtggtggtcacactgcgctcggattcctggcaatcatcagcat

SEQ ID NO: 76558 - DNA, 411 bp, Zea mays
cacgcgagctggctcctgggcgcgctttatcactctcgtgcgcgaaccccgcgcacccggggcgccgtgacacgcccgcccacgggtataagcccgcccaggcttggctgcttcccgtacctcctcgacctcgcggactcgccgagccagcataactcggcgactcccgcgaccgcaggccgccgaagcaacacgggcagcccttccgtctcttcgtcgaccagccttaagagttctgggaagcggagtttgtcagctgaccaggacccggtacggaaagctaatcggctacggagtagaaccgcgacccgggccggtagccttgcaccgttcattctgccgatggcttggcacccggagctctggccctaatgacatgcgcggggtggcgacagaccgcacaccccgcgc

SEQ ID NO: 76559 - DNA, 443 bp, Zea mays
  unsure (1)..(443): unsure at all n locations
gagagtagtatcacatacatcatctcagttataaaaacagttatccgtcacgaacaatgaaacattctgtgtgtacgaaagcaggataagcttcctaatgctcaagccattgcagtaacaacgaatgcaatgagaaattctaagaaaaacggctattggttattttatgcccatttgtattactattagttggatgaatcacatacatagaaacgtacctaataagcctagctntggctgcagcacagtcagcctctccatccttctaatcaacgtcattaacaaaaagcttctttgaggcctccctgaggtgatgtgacgacctacaccaattggtatactcaggacacatacacaagtgattgaataaaaaatggaaaatgaaggttgtgattaacttttttgacacttgtaggttaacattgatattatactgggaatcc

SEQ ID NO: 76560 - DNA, 375 bp, Zea mays
  unsure (1)..(375): unsure at all n locations
actggaacactaccccacttaaaaataaagagggtagaactctngaatcttttgggattgaactccttgaagtacctcataacaagggtgttacggngccttcttctactgctgatgcttgagcangctgcggagagatgactgacacaaggttgattctgggacaaccttcttctcatcttctcttcactatcttcttttatttcttctcactggctctttctttcgctttgctcttcccactggaggattctatcaaagagtattaccatcatacagaggaggaaaccaaagactatgaaccatgtacaacagtcttcaacccaagaatcaccaagcattgtgatcttatgggcaagggagtggaaaatggag

SEQ ID NO: 76561 - DNA, 182 bp, Zea mays
atttatatcctgctggttatcctgagcataaattaggagaattcattctatgaagtctcattctggttctcatcatgcttttatgtataagaatgagacatctagttctaggcattctaccaatgttaaaatacctaataagaaatctcctattgcatcaaatgagcctaatggttcattta

SEQ ID NO: 76562 - DNA, 457 bp, Zea mays
  unsure (1)..(457): unsure at all n locations
acccctataatccgcatttagggttaagttccttaaccagggtttcatttgcaaaacattaaaacaatacaacttgtttgaaattattgcctattgaatgcactctangtgtatcaaacatatgcaatgccaatgctatgatgtcatgctcaagttttagttatagtaacaccagnggtgttacaggtatgtacccattgccatctctagttccacgggttccatcgttgttatgctcctccacatttaaatagtaaaaatgctaaaattatataaaatggggattcaaaccatttgtgggctcanaactcatgttcacacccaactaaccaatagaacacacatgtctttatattttaatatttataattaagtataaatggaaaccgtagtaacatacgagcactttgctagttcagataaaatacaccatattccaattcaatacgatacactc

SEQ ID NO: 76563 - DNA, 445 bp, Zea mays
  unsure (1)..(445): unsure at all n locations
ctcagctctatcacactatagggggagtctgctngcctttagcatcatcagtatcatcctttacttcaccttcctcaatggatgtgacttccaacttcctttttgcagttntattatgaataacatcgctaagcaagctggaccaaccccatggtttccaaacctgtgcctttgttgaaagcccttttcgttgggcaatatgaacaagctgctgtcttgttgacctgcggccaagaatagcatcttgcccttgtaaaatccatttacattcataacaagggactcctgaagcttgccaagaaggcggacagcttctgaatagagaggagcagcatcaggtctagcaagtagccttgacagaatgacttcagtaaaccctctttcactatcagagagggaaaacccctcagctttatgggataacgaccgaagtgattcaagtgct

SEQ ID NO: 76564 - DNA, 525 bp, Zea mays
  unsure (1)..(525): unsure at all n locations
cacatgtctcgtatgattcanaatcaaacgaagttaaaagcccatcataatgaagcttcttcatgcgattctcacttatatgacccanacgacagtgccacatgtaggtaggacttanatcattaggccgaggccttttagcactaatattacagataggtgcatcatcaagatttanaatgaataacccattcataatggatgcaaaagccacaaacatgccattcttagagatcacacaatcatntgtttcactcgcaaatgaataaccatccttcatcaaacatgaaggagacataatgtttcgactcatactaggaactagataacaattatttaactccaaaataaatcctgatgggaggtggagttgcatcgtcccgacggtcaacgcagcaactcttgcattattgcctacccgganatcaacttctcctcttttcacgcttctagttcttatcattccctgcatcgaatngcanatatgggcaaccgatccggtatcanatacccaagaaataatat

SEQ ID NO: 76565 - DNA, 408 bp, Zea mays
  unsure (1)..(408): unsure at all n locations
tatgtttcactgggggttatgaagctggttnnttgctcatcctccttcttcatccaaatttgatgatagcctanatagcaatccagcagactcataagctctgatgaagctgctgcatcaactagggaatctatccttggcaatagaaattcatccttcggacaggccttgttgagatcagtaaaatcaatacacatccttcatttgtcgtgggcctttttaccataacagtgttagccagccattctggngtatttacttctctgatgacttcggcgctgaggagtctntttacttcattccgagcaccttcggccttgtcatcagacatcttctgaagcctctgctttctatgtctgaaggatggatcaacattgagcgagtgttcantaacatccctgttgactc

SEQ ID NO: 76566 - DNA, 481 bp, Zea mays
  unsure (1)..(481): unsure at all n locations
ctcagctatctcanattataggatagaaatcgattctcatatattatgaggcttatgttttactctaaaacttataacatggtttttagcttactactatatcggttcacaaatatattacatcgttaactnttttcganaactntgaccactcgtcaaatatatgatatccttggttttttgaaaactntgacactcgtattattcgaaatatttatttaaaaatgtaaaattttaagttaggcataaaccaccttaaatgataaacccaatanaataataataacttatttatattttaaataatatgagtggcaaattnntttaanaaagtcagcggtgtcatatatttataaacggaggcaataccttatagcaganatatagcacatacatattntctntatataatcaatgttaatatataaatatattntgtataaaatcatattagcttaatggatatgtgctatctaaaata

SEQ ID NO: 76567 - DNA, 462 bp, Zea mays
  unsure (1)..(462): unsure at all n locations
ctgtagtctggactataagttaggttacgtcatatgtgctctatgcatgttgaccatttccaacatatgcatagtgaggactctatggaaaagcctcgtagtgagaccctagccagtcacctcggaagtgaatacgggacttgcaaacttgggctagaagggaatcgcgactcatgggtaaagatgcgccacctctgtagagtgtaaaactgatatatcagtcgtgctcacggttacgagcagcctggacgctcacatgataatcaaacttgtagatgaaaataaatcttgatcgattntgtttaagcgatatgcttaagtggttcgctcaagtggttgagcttcatgttgatgatattttggttcaagtggttctaagctttatgctatgaatattngctgatgctaatatggggttggtatatacttatacttaagaatcangtggtgataataaaatgg

SEQ ID NO: 76568 - DNA, 151 bp, Zea mays
agaggagatggtctgctttagcatagagacccgtgcctatgtatcatggaggaagaaagctcgcccacgccatggatgttcctgttgccaagccatggatgacccgcgcccatgggagcttctgccactactccagggaggagggagctcg

SEQ ID NO: 76569 - DNA, 271 bp, Zea mays
  unsure (1)..(271): unsure at all n locations
catcaagnggctnggtaaagatatcggctaattgatctttagtattaatgtaagaaatctcgatatcccccttttgttggtgatccctaagaaaatgataccgaatggctatgtgcttagtgcggctatgctcgacgggattgtcggccattntgattgcactctcattatcacatagcanagggactttgtgtaattngtaaccgtagtcccgcagggtttgcctcatccaaagcaattgcgcgcaacaatgtcctgcggcaatgtactc

SEQ ID NO: 76570 - DNA, 417 bp, Zea mays
  unsure (1)..(417): unsure at all n locations
tcaatcatcaatcctacatcgacacagtccttaatcgactcagacggagacactacaccgagactctcttctcgtgcaagtcacccgcccggtctcagctntatcattntaaaatcccaaagtttggtacctggcagaggtacatcttatccgatgttgaacccaccatggccatgatggatcccccatcaagttttattnttgaaaacattcccatccactatgaagcatcaccttttgtttttaanacaaaaacatttgttcttctaaagcagggctaagcatcaggaaaccttntaataaaacaggtaatcaaggaaggataaacagtttcaaggaaggaaatgcaacaattggtttagcacccaactcctatcacctaatgcatcattcaagtgatanataaattanaatcac

SEQ ID NO: 76571 - DNA, 413 bp, Zea mays
  unsure (1)..(413): unsure at all n locations
tgagataaccgccaacaaagcgagtgaaaaagcttaactcggatcaaacttgacangtcttagttntaagctnttagcacttaaattcttattcttgatgcaattgttggttcttgaaatatgcatgaggtactgcacttatggggagtattcaacactcaaatcactcatganaacccctaatgcaagccaaaatgcannattcaccaatttgccctatttctctagaaattatctagcctatggcaaaatattntgtaaagtatatgagggtgccaatacctgtcccaacaagtgttattttgtgtgaatataagttgggatttggtttggttggaactagatagaaaattcanaatttctaatcttccctctgtctggctcaccgacagtccgtgtgaccgacactgact

SEQ ID NO: 76572 - DNA, 462 bp, Zea mays
  unsure (1)..(462): unsure at all n locations
acacagtactgcatgtgctctttatgtcttgatctttanaggtaagaacaaatagaagttagtcaaggaagccaaggggtctaaatggtttatcaaatattatataaaatgaacaaaggggacacacccaaactccctgttcaagctgttcgctgcagcagtagctgctttcccgcctccatactttntggtgaagtcttccttaactctgtccaggaaagctatggngatttgtcgcccaactgattcaacagcaactacacaatacgctgcagaaaagcaaacaatatttatcatttagatgttctagagcattagttgattgataaagtaagcaccanagcagaaatatattaactgatatttcatgttaaactaagaactntcacaagggatagataagtaaaagcaaatagtcatatttgcttcagaaataaaaaaggaagtaatggatgttctata

SEQ ID NO: 76573 - DNA, 431 bp, Zea mays
  unsure (1)..(431): unsure at all n locations
atatttcggatattggtgtgataaatggatattcttcttcactaagcatgaaaaggagggaagggtgtttttcgccaaagactcaaaaacggtacgtatgtaaaagtttcatgcatcgtaaagaattgaataacananatagatatattacattcacgattacaaaatgttacatttcagaagttttttacaaaaatgcttaatcctctctcanaacgacttctgcagcctcattcaggagccgattcacgacttcgtccataatatcttcggccatctttntaatttcgtcgtcccccttcggctgagggtccgaaggtgctntagtcgtatctgaaggacaggacacggctatgctgctattacaaacggaaaatgaggtntaaaactaanaattacaacacaatacanattattagttaatacctagt

SEQ ID NO: 76574 - DNA, 394 bp, Zea mays
  unsure (1)..(394): unsure at all n locations
acatgtgctaagcggcgatgccacaactagcccatgctagtcttatccattaagcatgcatctagaccggcctcttctttngcanaatcaactaaataaagtttgccgtctagtacacccttaanagctagtgaaccatcacatcttctatagacagacacatctacattngtaaatagacaattatatcccatattacataattgactaacagatagtaaattatatccaagtgacnntcactaaaacacattagagatagagtgctcatttgatattgcaatcttgcctaaacctttcaccttgccttggttcccatcaccgaatatgattgaatcttgggaatccttattcttgacgtaggaggtgaacatcttcttctcccccgtcatat

SEQ ID NO: 76575 - DNA, 436 bp, Zea mays
  unsure (1)..(436): unsure at all n locations
gctagaaaaatctggtatgaatcggcggtaatatccagccagtccaatgtaaacttggatctaatgatacagtggtcggggtttccactccaaaatgaccttgactntgctgggatctaccgcaatccccttggcagatagtacatgtcccanaaactgaatntcctccagctaaaacgcgcatttgctgaacttggcatataactgatgttctctcaagcgcgttaaaacgatccgtaaatgttgcgtgctcctcttcattcttggaatatatcaaaatatcgtctatgaagaccaccacanacttgtccaactcgggcatgaataccgagttcatcaaatacgtgaagtgggcaggagcatttgtcaatccgaaagacattaccaggtattcaaataatccataccgcgtagtgaaggcgggctttggtatatc

SEQ ID NO: 76576 - DNA, 434 bp, Zea mays
  unsure (1)..(434): unsure at all n locations
tacatatgaattctgttatctagaatatttagntcattcctcaacatgcanaagcgggtcttatcaagtggcttagtgaaaatatctgctaattgatctttcgacctcactccttctaaaatgatatctcctttagcaacatgatctctaaggaagtgatgacggatatcaatgtgcttggtgcgagagtgttgtacatgattattagcaactttaacagcactctcattatcacacaacaaaggtaccctttctagaactacgccatagtctataagagtttgttcatatataaaatttgtgtgcaacaagcacctgcggcaatgtactccgcttcggcagttgacaaggcaacactatttttgcttttggatgtccatgaaactagtgatctaccaagcagatggcatcccccagaangtacttttctatca

SEQ ID NO: 76577 - DNA, 350 bp, Zea mays
  unsure (1)..(350): unsure at all n locations
actcaccgcgccagggattcttccctatctctcttcgncagtactgctcggncaaattcgccaccgccgcttaccctcgctataaatngaccgtacccncagctccgccatgcatccaagcatctactgcacccaccggcatcccgaaacccccaccagagcacgtgaatntgggatttccccanaaccgttgaagaacaccgcgaagagcaacctcgccgtggccagctcgattcccgttagctcgcattcctctgttgcctgttctagcgtccttaggccctcctaaagctcttagacccgcccaattgaactggaccgcccnccctcgccgagaatgcgtatggtca

SEQ ID NO: 76578 - DNA, 379 bp, Zea mays
  unsure (1)..(379): unsure at all n locations
aattatacccacaatacanagttggaagtgttgaataagtacaagatcattgaaatcagagtttgggactaaaagttatggccaaaatacgacaaagcatcatgttctgtgttgcctgtttgggtcaccatgtccggtgcaccattttcaaaagctccaacgactacatctaacggctagtacatgtggcttgtctggtgcacctgtaacaccccgggtttaagggacaaagccgggtgcatctcatacatgcgccaaagaagacaacatatataataacagagtgtatagagataaatgtcacaatataatcagagtacttattacatagcagaagacttacgaaatataagatagatataacaggatcttaaaatca

SEQ ID NO: 76579 - DNA, 332 bp, Zea mays
  unsure (1)..(332): unsure at all n locations
acatgtgctaagcggtgatgccacagttatcctctttgctgtgttagcagtgaaacatgcatctagactggcctactcttatgcaaaattaactacataaagtgagccgtctaatacacccttataagctagtgaaccatcacttcttctaaagacagacacatctacatgtgtagatagacaattatatcccatattgcataattgactaacagatagcaggatatattccaaagactcagctcataacacattagagatagagggctaatctgaaagagcaattntacctaatccttttaccttgccttgattcccatcatcgaatatta

SEQ ID NO: 76580 - DNA, 319 bp, Zea mays
  unsure (1)..(319): unsure at all n locations
ggaagcgagttcaccggaggtgggcgccaatgttgtggacttgttctcaaatgctaagagntaagaacaaggcaacatagataacgttcaatattaaagtccttcgtnctctgaagcattatttcccttgagatataatgattttcggacgaaggttatgaaggacataccttcataaacattgcatatcataaatgaaaaagggaattacatggaatataaaagataacatgaatagttatgtattattatcaaactcattttattntattgctatagaagaataggaatgatgatgggttacaaatatacctctgac

SEQ ID NO: 76581 - DNA, 475 bp, Zea mays
  unsure (1)..(475): unsure at all n locations
ccttcggctatcttatacanacagcttcatccgaggatcacttctttctataagaccttcggcgacgaagcatagacccaacaataccagatcccaaaacaaggcgtagcgactaaatatctaagaattcgcttcacagccactaagtgacattccttaggatcggattgaaatctagcatacatgcatacgctaagcataatatccggtctactagcacataaataaagtaaagaccctatcatagaccgggtatgcttttgatcaacggacttacctcctttgttgaggtcggtgtgtccgtcggttcccatcggagtctttgcgggcttggcgtccttcatcccaaacctcttgatcaaatcttgtgtgtacttcgtttgggagatgaaggttccatccttgagtngcctcacttggaacccaaggaagtagcttaactcgcccatcatcgacatctcgaatttctgagtca

SEQ ID NO: 76582 - DNA, 362 bp, Zea mays
  unsure (1)..(362): unsure at all n locations
tgcacttacgtggatggggatcacttttccaacatgtttgttgagctttcctttgcaacacatgctcggaagaactgtgtgtttgtttggagtagttgagaacattctagtaacctacctacctaatatgtcgtagactgaccgactatattccaacttttttataatatctctgattggttggtacggtgcatgcagttgtgtntgtgtacaagactgcgctgcgcagcttctnccggccgctgatgcttgcaaaagtcgtcgacggcggcgaccgagagagagacgagacctttctntccttttggctagctagctagcgtacagctggtcctaccatgcatgtcgttggcgaatgatat

SEQ ID NO: 76583 - DNA, 414 bp, Zea mays
  unsure (1)..(414): unsure at all n locations
agtgagtgcagagaagttatattatacattccaatggaggcacagactcctcccgataagttattagcaaaagatcctatgtggaggacgcgagtcctccgcacttcagtcttggttctcttcttttggaaccaccttggcacagaagcagcaaaagtctgctacttcctcacctaanaacaacaaagggataaaccctgagtatgggattactcaggcagtcttaccccgactaaagaaaagactctcaagggtatgctggttatgtgggagtcaaggtaaggcttttcaatattcanagactgtgttttgcagaaatgcttactaaagtggatccttaaaaatccaactttatttgtcaagttaagtaaaaatacctgcactagagttctttctaccctagttcaatcactg

SEQ ID NO: 76584 - DNA, 398 bp, Zea mays
  unsure (1)..(398): unsure at all n locations
acagcttcagccgattaccacttctttctgtaagaccttcagcgacgaagcatagacgcaacacttacacctatggaatcgtntaccattaaagtgggtccaccanagacccaagaatgtgatttgtgtccaaccaatattaatatataaaccaagtaatagttaaatatagagaccataaacaaactatgtgcaaaccatatgaaaattctagagatagttcaagttattccaaccttaataaatgtctagagacagagaatatttggccaaaccataaattctgaaccctatacactgagagccaaaccctcaactcgaaactctataccccataccttaaaccctatgtatcgaaagataactcatatggctttttgaccattatggtctccact

SEQ ID NO: 76585 - DNA, 344 bp, Zea mays
ttctgttctttcggatcccattatttctcctctcggatattaatgatatctaacgacgaaaggtctatgaaagacatatctcttcacgatcattgataaatagatgtgagaacatttcttaccaagtacaggatagtaacataatctttgtaaacattattattaatctatttccattcacattacttgtgtaaacaatagtaaattacaaatgtaccttcggctcgaacgaatgagaatacacgcgtgacgcacaagtgaatgccaagtcagcgtgaacagtacgggaatactgttcacctatttatatgcacgggtcgcagcccatgcaaattacattaatg

SEQ ID NO: 76586 - DNA, 391 bp, Zea mays
  unsure (1)..(391): unsure at all n locations
ctaagcttgatgccattgcccaatcttctaataatctaaagggaccgaattatntgttacagangttgtgacacgcnctagtggccactggaccttgngtgtaaggctggaacttgacaaagacaaagtccccaatagtaaactcattttctatgtgacctttattggcatggtgtttcatacgctggtttgcgcgaaggaggtgctgcttgaccagacggtgtaccaaaattccgtgagtggcggctaggaggaccatttggtatggcacgagtggacataacaacggaggaaggtctcgagacattggttaacacgctccgtctgtccgtcgctttgaggataacaagccgtactcatttgaagcttggtctcggataggcgaaacaac

SEQ ID NO: 76587 - DNA, 386 bp, Zea mays
  unsure (1)..(386): unsure at all n locations
tgctaattgaaagggaaatagggtcaaaccttntcctaaatgaatttggtgggtgaaatgcccaacacaaataattggactaactagtttgctctagatcatatgttctacaagtgctaaaggttcaacacaaaccaataaaaagatcaaagttagggttcaaaagaaaggagcaaaagaaaccgaagagaaccctggtcttgcgcacccgactgtccggtgtgccaccagacattgtccggtgcacctgnggcgatcgactcanactcttcatcttcgggtttctggagagctgctcggctataattcaccggactgtncgctgtgctagcggagcaacgactatcaagcacaacggtcaactccaacggtcgcctgaacgtaac

SEQ ID NO: 76588 - DNA, 422 bp, Zea mays
  unsure (1)..(422): unsure at all n locations
tcagacaaaatcttatgccaatgtttaggagtatcagatatcttcttctctatctaattaatcaatgtcctattactagactcggcctgtccattggcctgagcataatatggagatgaattaagcagcttaattctgtataattcagcaaattcacgtacctcctttgacatgaaagaagtaccttgatctgtagttaacgtctggggaatgccgaatctatgaataatatgctcagttataaactcaaataccctccttgtgtgtcatgttctntatagcaacggcttcagtccattcggtgaagtagtcagtggcaactaacacaaactgatgcccctttgaggatgaaggatgaatntctccaataaagtctaatcctcatcctctgaacgggcaatgcttgatgataggatgtaatt

SEQ ID NO: 76589 - DNA, 461 bp, Zea mays
  unsure (1)..(461): unsure at all n locations
atcttattaacatctaaaaagaccaggtcacagtaacaaactgactcatagtaacaagttcattcaacatacatcaatatttacttgaagttgaatatttacctctggagctgaaactgccttangtcgatcacatgttctctatcttcttggatccatcaccattagctctaccaccaccagctcttatactattgaacatggtagacaagtcaggtagcaccatggtagtgtataacaagtgctcaatngaattgactngagaccacanacaaggagaagggaaggcctgngtagcactaacacaaatggatgggaagatgggacgtaaaggttcatctccaatggcgttcacgtcacccaagacgactacattggtgcacaggaacacaaaaaggcccacgaacaaaacaagtggcaataaggttaattggtccaattctgccagcaagtgtctaaat

SEQ ID NO: 76590 - DNA, 461 bp, Zea mays
  unsure (1)..(461): unsure at all n locations
ctatcgggtacatgagttgcactaccagacataggccatagcatatggccttcacaagaactttggntgctataagtgtgcatatcgaaaggataccaaagccccggtaatcggctaccgtaccaagtggccgactgagtggacaagtgagtggttctatataaaagctgatgagaaaaacatggaaaaactgatgactatggtcatgagtccaatgagattaagcttcggaatgacaaggcccttgtgccacatgcancttnggctcctcgtgccagctggccgaagttgaattaagagtggtagctgccgagaatagcactagggatctagtgtaggaatatttggcgaatagaacgtttccaacctctagcggctggtggtgccaaagaagaaggaagggggaacaagtatgagcttgttcggcttccttatcacttcannattgagaaaacagtcaa

SEQ ID NO: 76591 - DNA, 338 bp, Zea mays
  unsure (1)..(338): unsure at all n locations
taagctctcttcgncaacgccaccgaagagcaatgctcctggttgatagccacatgatattgcataatccttcagctcttccttttcagccttagacaactnttaaccaagtatgttttgaaaattaaaatccttntcctccgaagtatcttcggcaatctgcttctctttccccttctctatttcgggcgcctgggcccagagactcttcggcagctgtagcattttcttctgtagccatatctgaaatcatcttatcaatatcagaaaatacgccctcaagatttgtagcttcggccgtcacagcttcatcatttgtagcttctgtgggagcagct

SEQ ID NO: 76592 - DNA, 455 bp, Zea mays
  unsure (1)..(455): unsure at all n locations
gctataagatcttatcccacatgggctagtcggtgatgccagagtctatctatgttattcttagcaattaagcaagtgtcgagttcagctctatcaaaatctaccaagtatagctgaccctctaacactcccttaaatgctattgaatcatcacttcttctaaagacaatgacacctacatcagtgaaaagacagttgtagcccatttgacataactgtgaaacgganagcaaattgtaatctaatgaaatcaacagaaaaacattggaaatggaatgggtaggagaatatagctatttacccaaacctttgacaaaccttggtttcatcccgaatggatagctcgttgggatcttggttttctcgaggaggagaacatttcttctccctgcatgtggttgtgacccgctgcgatgatcaacttgagccccaatcataaactacaaacaagttag

SEQ ID NO: 76593 - DNA, 344 bp, Zea mays
  unsure (1)..(344): unsure at all n locations
acaatttatatcctgctaattatcccgaacataaaattaggagagatcatgctagnaaacctcacactatttctcatcatgcattcatgtataaaaatgaggcttctagctctaggcattctacacatgttaaaatgcctaanatgaaaactcctgctgcatcaaatgagcataacatttcatttaaaactcttgatgctttatatgttttaactaacaaatcangcaaagtagttgtcaaatatgttgggggcaaacacaagagttcanagacttgtgtttgggtacccaaggtgcgggtttctaacgtgaaaggacccaagactgtttgngtacctaagaac

SEQ ID NO: 76594 - DNA, 363 bp, Zea mays
  unsure (1)..(363): unsure at all n locations
gctaatcccgaaagtgtgtcttcggggtaccccgaggcatgctcttgttgttcatcgtcttcgagcggngcatcgaagccaacccggagaagatcacagccatcaccagcatggggcccatcaaggacttaaaaggcgtacagagagtcttgggatgtcttgcggctctgagccgtttcatctcacgcctcggcgaaagaggcctgcctctgtaccgcctcttaaggaaggccgagtgcttcacttggacccccgaggccgatgaagccctctggaacctgaaggcgctcctcacgaatgcgcctatcttggtgcccctagcagccggagaagccctcttggtctacatcgccgcgaccactc

SEQ ID NO: 76595 - DNA, 525 bp, Zea mays
  unsure (1)..(525): unsure at all n locations
actgacagttcgactcgaggaccgtcctatactctatagcgacgttttcccgctngcccctacccggataaggtaatctctccttaactntcctaattatttggccaagggtgtcccattccacccttgtggtaacactgttttcccgggtggttctccatgttccaattaacagtatgatcttatcatgaacaataattaaacaacaacataattggaacatgatcgtagtaaaacattagtttcccaaaaccaggtagagcagtagcaaatctacccaataattcatctgttttcaaggtggnggataaataatgctagggaaacttattagatcccatcacattaacctcagcatgtcacagtgattaacaagaacattattaggaagagaaaagtgatcaatgacacaactcgctggtgattcgagattccaggtaccatgatgatctntagattctcgtgacgtgactgctattcgtagcaatacanaccaacatggtatatgaaaattaacatcacaac

SEQ ID NO: 76596 - DNA, 511 bp, Zea mays
  unsure (1)..(511): unsure at all n locations
ctaagcttcgcgtacagcagaaaagaaaccgacttanagatgataaggctatccaaacctcgatggattactatagaattactaccaaatgtaaagggcatgaatgtaatcttatataggctgcgtcccatgcctataaataggtgaacagtacccccgtactgtccacgctgacttggcattatgcttttgcgtcatacttgtactttcatctctntccaagccgaaggtacatttgtaatttgatgtcatctctattttctcataataataatgcagagataagttgataataacatataattgtttatattattctttatatcttatatgattcattcttcatcatcgtatgttgtgcttatgaaggtgcgcccttcataaccttcgtccgaaatcattatatcctaacggaaataatgcttcgaaggacgaaggactntatcgtctaacatttctgtgttgcctttgtctaactatagcatttgagacaagtcccacgacacacttg

SEQ ID NO: 76597 - DNA, 389 bp, Zea mays
  unsure (1)..(389): unsure at all n locations
ctcagcttgtcagcacatcatgcganatgattgacaagctatatgtggtgttgttaccaatgggacaatccttgcattgatgtccctgtttccggcatgtgtagcataagcgtctttgaagtcttgaagaattcttctttccttgtttgttgcttgctacatggttagtaaaaactttcttttctaaccctatgcctctttgtttcaaatggggacaagatttgattaagtgtcccttcttttgagcattaaaacaaagtctatcatcctttgttagtaatcaangccattttaatgtanggacatgacctaatcaagtgcccttcttcanagcattcactacacctcttaatgtgaagtgtgacttgatcattacctcggatgttacc

SEQ ID NO: 76598 - DNA, 406 bp, Zea mays
  unsure (1)..(406): unsure at all n locations
tcgccggagaaacacagagagccgcttactaggcatcattttgntattctntgtctcacaactgaagaaaaataaaatatatcgaatgctaaagtttcttcggcagctcgccacaacggtttgcacgcactctgtaccgagcaaaaggataaaataataataataataacagaaaacaaagaaacacagcacactactttgtaacgggaacgagaaaaggtgagcacgagagaantgaggcgccttcactccntaacttgnctgagacgcggcgccggcgagatccgggaaaccgtctggtgccggccgcctgcatcccggcgcccagcacgagcggctcgccggcctccgagtccgagcgacctgcgaggcacacgggccacacgaggaaagccggtacatacac

SEQ ID NO: 76599 - DNA, 391 bp, Zea mays
acatcttaagcaagctcaagaagtagtgaagtcctcctgatagaaataaaaaacaccacatatgaactactgatcttcgtaataagctataatattgtgactaactgaattgacttactgatctctgggtaaccaaaattgatctgtctggagttcttaagatgtcatagggtgatcgcacaatggttgatccctgctcagcgatacatgtaggcccgataaataactgactgaaagcggctgtttgcagatggatttgggaggaggtactgcccatatacaaacaaagcgacctttttacagccgtgagaggctttgaaattacgctgctaatacacctcaacgactctgcatgatttgaagacaactatattagtaacacggctatgag

SEQ ID NO: 76600 - DNA, 423 bp, Zea mays
  unsure (1)..(423): unsure at all n locations
tgcagcataagaaaagaagatagaattctccaacagcattgttcagatgatcatcttcactgagctccaacacagaccacacagcttctcagataaagaggagaggagaataatgggtttcccaactatataactaactttattgacatagtatgtaaaccaaaatgcatgggatacccacactctggtgacaatcattacaaagatccatatcaaacatagttcatcatgacaaacataaatgcacaggatatagcaaacttacctgtctaactaatactaactaagaccgagactaacgctaagaactgaagcttcatgtatatatntgattcgtattaattacaagatccaactctaacgatctatggttctagatntatctaggtcttgcaggcgggattgccataagactggtgtcca

SEQ ID NO: 76601 - DNA, 441 bp, Zea mays
  unsure (1)..(441): unsure at all n locations
tcaccgaaatccaaaccttcgacttgggagtatcccttggccacaagtcgagctttgttccttgtcaccacaccatgctcatcttgcttgttgcggaagacccattcggttcctacaacattntggttaggacgtggaactaaatgccatacctcattcctagtgaagatgntgagctcctcttgcatttgcaccacccaatccgaatcttggagagcttgctctaccttgtgaggctcaatagaggaaacanaagagtaatgctcacaaaaatgtgcaacacgagatctagtagttacccccttatgaatgtcgccgacgatggtgtcgacggggtgatctcgttggattgcttggtggactactttgtgtggcggcctttgctcttcatnctnctttgcttcctcatttgcatctcccccttgatcaatgccatcatct

SEQ ID NO: 76602 - DNA, 347 bp, Zea mays
  unsure (1)..(347): unsure at all n locations
ataatacactacatgaagaagttcatgggttgtattcacaactgcacccgaacgtccctgcggatcttgtcgggacagaagtcggaccttctcatgtagcgagagaagcacttaatggtgaattgtgaccttttaggcccctccctctatgaagttggttgatgaatggtcttcctcgcccgacagtanagctaccaaaagtgaaaagaagtggcttattaggtgcccttaacattggccagacaggactttcctactaatatggntgttctgaaaagccaagacatggatgtcatcttgtgcatgaactggttagcccagcananagcaattctcaaccctgatct

SEQ ID NO: 76603 - DNA, 345 bp, Zea mays
  unsure (1)..(345): unsure at all n locations
acgacatggaggtatagcagaaggccccgaaaggcatgatgaatgcagtcttttcatcttctttctttgctaaactgatttggtgatatccagagtagcaatctatgaaggagagcatagagcagcccagcggtgagtcgactacctgatctattctatggagttcgaatggatccttcanngcagtgttgttgagatcagtatagtcgacgcacatgcgccaatcaactatanttctttttagtacaagaacatgattcgctagccactcanggcgtcgtacttccctaatgaaacctgcagataacagacgagctaattccacctgtatagcctctcttttgt

SEQ ID NO: 76604 - DNA, 374 bp, Zea mays
  unsure (1)..(374): unsure at all n locations
tcgctctggcgtcttgtattatcctagcatagttctcgacatgtcgatgagcgtcatgtttttcctttccaccaagccatattgatgtggagtgtaggggcagagaactcatgcttgatacattccttgccaaggaactctaccacttgaacagtcttgaattctgataggatgtcggtacataaccttcacctttattctcacgctaatattgagcctgacctatgaagcgcttgagggtttcttgggatttagatttattctctatcaagaatacgccagtgaagcaggaatattcatcaaccataactagaccatacttacttacctcgatgctcacgtaagccacgggccattantgcagtagtctaatc

SEQ ID NO: 76605 - DNA, 507 bp, Zea mays
  unsure (1)..(507): unsure at all n locations
tcttgatcttcttctntgccctcagctganaatgggagaaacttgggagacattaatagtcaagcanaacaaataaaccatcgactgtgagttttcaactgttcacatcataattagatactctctctgatcttttgtantttgtcgcggttaattcanaaatgaactagctgacgacagaatactaaatttctaattacaaggcattaaagctntgttgaggtaaaaattatagaattatgacatcacatataaatactaananattctagttgtacctagtatcacanaagttattattttactatatctaattggtcggcttgattctccaaagtaactaacttgacaaatataccgagtagaataccagatgatgctccaaacattatgaatntgtgacattngctangactcaagggaaaagtcaagagctacatgcctaaagctgactcgcaccatcttgcttatatacanatctaannaaaaatatgacaatttgttact

SEQ ID NO: 76606 - DNA, 484 bp, Zea mays
  unsure (1)..(484): unsure at all n locations
ctcagcttctaagggagagcacattntgggactaatcaatggtcattttgagatagacagnggttgtagcgcatgtcaagcaggagaacaagttggtgttcatcatccacacaagaacatcatgacgatcgacaggccgcttgagctactccacatggacctattcggcccgatagcttacataagcatcggcgggagtaagtattgtcttgtaattgtggatgattattctcgcttcacttgggtgttctttntgcagaanaaaatcacaaacccaagagacattgaagggattcttgagacgggctcaaaatgagttcggcttaaggatcaaaaagattagaagcgacaacgggacagagttcaagaactcacaagtcgaaagctttcttgaggaggagggcatcaagcatgagttctctntctcctacacaccacaacanaatggtgtagtggataggaagaatagaactctattagacat

SEQ ID NO: 76607 - DNA, 404 bp, Zea mays
  unsure (1)..(404): unsure at all n locations
ataccttngatatcttctcgtattgtcagatcattcttcacataaaaccattctgtcatccagtcgccgggccatctcttccgaaaggttggcacggngcagcttgacccggaccgagaaacgaaactgtagcagccaaaattattgtgatactgttccttaccccaaggttntgtctcgtatgataattcgtgtatattacagaagctttntgcatcaggcttcagaccttggcttcttcacgcccacacgaagatattcagctntataattgcctcacngggtaagtgatggagatatatttcgaatattttcagcacctccacaacgaagctgctcaagggaaatcgcagtccagctttcanaaagtttcggtacactacgacttcattctcttcgggatg

SEQ ID NO: 76608 - DNA, 408 bp, Zea mays
  unsure (1)..(408): unsure at all n locations
cacagcgatcttgcttaatattgcgattatatgcgccctatcggggttagaacaagagcagaagaaatcgtgccacgtgctcgaccacggctgacatgcccggtgcacgccggcccgcgcgcccgctccggtccacgcccgcccgtgcaccgcgcccgcgcctttaaaagccacccncggacgcgcaacacttcactccacgcttgccctcactgtcccggnctagtccttagcaaccggcgagctctgcgccgcccgcccgagccacccgaacgccgaccatcacggtcagccactcctagagacacctagcctcacccgagcccctggacagcttccccgtggagccgtgaagcttccccaagcaaggatcgatacctgcctcaccggaacagcgagatcaccatc

SEQ ID NO: 76609 - DNA, 401 bp, Zea mays
aaacttcctctccttcagttggtttagtattctatccttagtgggatgtaccatagtatacgttaaatttccttgcaatataaaatgttcaatagtgcatataactttgacatcaactatatgtgtgcactaatttaaaggaatttaatctatccttttgggtttcaagaatgattattcattttccatccacatataacgattatcatattgtgaaaccctcccttgtgtttctaatgctctcttttctaagtgtttcaataaggtctttccaagtgctttcaagatggattcaaaatctacggatataagagtcttggttctttcaatcattgagtctcaatgggtctcatatcacgtatgatcgaaccaagcaaagatgaataaagctcaagatcact

SEQ ID NO: 76610 - DNA, 322 bp, Zea mays
  unsure (1)..(322): unsure at all n locations
tatcccttggccacaagtcgggctttgntccttgtcaccacaccatgctcatctntgttgttgcggaagacccacttggttcctgcaacattntggttaggacgtggaacaagatgccatacatcattcctcatngaagtgctgagntcctcttgcattgctgaagcgtcncaatcctctgggactcanatgtgatacaattactagtcctaggaggctagtaaacacatttatacatcagataataccaaatatgcttaaacgagacannacctacaaggtggcgaacaactttaagaagtggtccacnaactcggacata

SEQ ID NO: 76611 - DNA, 299 bp, Zea mays
  unsure (1)..(299): unsure at all n locations
gcggctctggcgggtcgcggagaggtcgccggagctatgggcgagctccggngagttgggcgcgggacaggggatgcagcggtgaagatggccgggcactgtggcgggctntatagccgtggcgcgggcgtggtcacgggcggccgcggacgcgtggtggttggcgcacggcgtgctctgagcgtgctcccgagtgtcagcccgcgtcgaacacgtgtgtgtttgcttctgccatggttcaacggccgactggagcaccttagcgtgcagatcttggcaaaaccactgtgtacgatctc

SEQ ID NO: 76612 - DNA, 444 bp, Zea mays
  unsure (1)..(444): unsure at all n locations
cgatactctatagcatgagacgattatttatgttctaatacatanagggttnggttccaagtggataatctggattcggaatatccttcanactggcacatcttcggttcttctcaatggagtcccagggaatacatttcattgcaagagaggggtcacacaatgagacccactttccccatcgctgtttgtgttggcggcagaccttcttcatagtattgntaatatagcaaagcacttgaatctgattcggctacctctatctgacagatgtgggcaagattgtcctattgtccaatatgcagatgacaccctcttgataatggaagcatgtgcaaagcagntattnttcctaataggcatcctcaatacattcgcaacatcaacaggtctcagagtgaactacagcanatcaagcatatattcaactaatggtaactctga

SEQ ID NO: 76613 - DNA, 104 bp, Zea mays
  unsure (1)..(104): unsure at all n locations
gtgtcttctggtttttgcccgtctcagtgctatccaaccgaagttatagtgtgaaaaatcatgcacgcctggtggattacatggattangccgtcttggaaaat

SEQ ID NO: 76614 - DNA, 165 bp, Zea mays
tcaaatattgcttcagttcttcaaggctctctgctagactggtccccattgaataacttcaactgacttcatcacttcgaaaaatggtaaatttctctctgctgatctagatatgaatctgctgagagatgccagccttcctgtcaatctttgagcccccttctt

SEQ ID NO: 76615 - DNA, 178 bp, Zea mays
ggacctctatggcttaactggattcgaaatatcctacaaactggcacgtcatcggttttacttaatgtgagtgccatggataacatttcattgctagcgaggggtcacgcacggagatcctctctcacctttgctatttgtcttatcggcagatttacttcaaagtattatcaataaa

SEQ ID NO: 76616 - DNA, 278 bp, Zea mays
  unsure (1)..(278): unsure at all n locations
tactcagcttctaaccttcttgtgcttanagntatacttcaatgtttataattggctcaagccatgantttatatttttcataccctcttctgcattntcttgaatattacacatagggcttacttatggttttactatggttgcaacattattacctttttgaaagacccatttgttgtgatcatgatacttttaagtatagtcttggtggcttcttcattctttattcaatctgatgctcatgctcaatttggttcacatataatgatggttcttg

SEQ ID NO: 76617 - DNA, 164 bp, Zea mays
  unsure (1)..(164): unsure at all n locations
atatttntcatagacttttgccccttttcttcaattctaccttaagagctctattangggttcaacattttgctctttttaaaaaatacttatttgtctggaacatgatgttttagatatacacttagtagatattttattctcaagttaatttgatgcctcat

SEQ ID NO: 76618 - DNA, 170 bp, Zea mays
gccatatctatgatgtgcgtgtttagaagctcgtttgtgatctactactaagaattggatttttagtgtacttgtttctttgtagctctttgagtgaatttattcatgaaactacttttcccttttcttatgtgaaatagaataccatgtataatggttggaggaatact

SEQ ID NO: 76619 - DNA, 213 bp, Zea mays
  unsure (1)..(213): unsure at all n locations
gtgctgtcagaggtcttcatcgtaagacaatgacaggaaaccttacggcttaatgcatcatccacaacattggctttgcctgngtgataatgaatttccagttcatagtccttaataagctcaagccatcgtctctgcctcatattcaattctgactgggtgaagatatacttcaagcttttatgatctgtataaatgtgacagatatttccc

SEQ ID NO: 76620 - DNA, 226 bp, Zea mays
agtactgtgcgccacttggcacgggcgcactgttcgccatcatactggtcatgcgcgccgtctgccggcggattggacaggacgcattatatgctgatatggcgcgtcgtccgtcatcgtggtggcatgcggcgcgtcctctccgcaatatatgcatagactgcacagttgtatgggccttacgtcatgctcggcccgttggcttatgtcactagccacaagccac

SEQ ID NO: 76621 - DNA, 440 bp, Zea mays
  unsure (1)..(440): unsure at all n locations
ctaagctcttggttagcgcagatctaagttttgttgcgaactctaactatcctgatccatattctaaattgtactgaatatttgctagcaacagtgacgtaaacgatgttcttctcaatatattgtgcattctctctcgttctcatcccatggaaggaacatatatgcatgcatgatgtactttntttaaaaaaaataggtttccacactgtgagattatgcttctcttattctagttgttaattcaaagaaaagattatgattgttacactaactcttgtgaaatgtgctcaggtctggcatgctctatgtcctggtacattgttcttggttgccttataaaagctccttctttcagngaaatgattcacgtttgaacataaactaatatatctaaagatatattgcgtctgtgagtgcatagtatctcttctacttga

SEQ ID NO: 76622 - DNA, 229 bp, Zea mays
  unsure (1)..(229): unsure at all n locations
tcgaatgaatgtcttctcatatgagtaggcacctaccttgggaaagctatctttcatattnttcacgcaatccaaggcatttgttaagcatctttccttggattcgtggagctcctcaatatatttctctagcctagattgtgtccattcactgatctctttgctagctgttacaattctcatagatttcattagcctcgtcgagttttttccgaagttgttcaacctc

SEQ ID NO: 76623 - DNA, 259 bp, Zea mays
  unsure (1)..(259): unsure at all n locations
ccaattgctacatttcacaaggctggtatacatcgcacaacatggcgagtcacctccnggtatgggtgtaatctgattagatacagacatatattactcggtccttatctgtgtcatattctctgtttggattcacaccgaatacaaatattatcaagttgtgtccgataagatatgaatgtatatcgacatcttaaatatctaactttgagaatacatatacagataaatatccgatgcggatcggatacgtattgga

SEQ ID NO: 76624 - DNA, 259 bp, Zea mays
tcgcgctcaccggagttcaagaactcgccggcgcacgtggaccgggtaaacaccttcaccatttctcgattcgttgcgcgcatggcctctgtgtcaccccgtgaagctcctcgtgcccattaattaaactctaccgccgtgtgttgtgcggagcaagcgtctccggcgatccccgccgcctgtgttcgtggtcagtggagctcctaccacctctggcgccgacccgcacatcgacgtgaccgtcgcgacctcctgaaca

SEQ ID NO: 76625 - DNA, 272 bp, Zea mays
acttctgatataactgctaacctcattcccgcgcttttttttgtcagactgggttcatacaaattacccaatgttcatctcttctacctgtgttgactgtactacaacttcgaacgtcacgtggttcgaggccaatttacctacctacatgcgtagagaacgtgaataatccaacatcggcccatatcctgtggggaactatcaccttaaaactttgaagacattatttttcggttgggtattttcccccaacgaatactttctgcttatga

SEQ ID NO: 76626 - DNA, 195 bp, Zea mays
gacactactctattcactaaaagaaatggtaaagatttatgtgtttgtcaaatctacgttgatgaatattattttggatctactaatgaattatttcgtgaggagttcggaataatgatgtcaaaggaatctgaaatgtctatgataggagaattgagcttctttcttggccttcaaatcaaacaattgaaagat

SEQ ID NO: 76627 - DNA, 328 bp, Zea mays
  unsure (1)..(328): unsure at all n locations
agcttaatcctatgaaactaaagtgtcgtttggttcacgaaatgtaacgtanataataataataatgattcatactcgaataccgccggtaacaagtttgaatagaacagtatccatttatagtgtgatatccaattacggttgaacttatacaaacatgatttaacgttattagttactcattacgttatcaatatgtgaaccaaacaacatctaaattggacgggtggaagatgagaaagaatgaccagaattgatgttggagagagtagcacaacaacaacgctgcaatatantactatcacagtcagagtaaaattcataacat

SEQ ID NO: 76628 - DNA, 213 bp, Zea mays
  unsure (1)..(213): unsure at all n locations
atattgagctcatgcctaagtctggtataatattgttcatcaagtggctgggtaaagatatccgctaattgatctctaatattaatgtaagaaatctcgatatcccccttttgttggtgatccctaataaaatgataccgaatggctatgtgcttattgcggctatgctcgacgggattgtcggccattntaattgcactctcattatcacat

SEQ ID NO: 76629 - DNA, 192 bp, Zea mays
  unsure (1)..(192): unsure at all n locations
cactaattcccccttcggatatttcagctnttgggcatagtggtgagcttctcgttcttcttctttagagagtctttttcccgaagcatgacagatgatatattcaatactttcttttaaagcttcgggagcacgagcggcaactcttntatgtgaagtctgttctatagcctcttcctctgctgtcttctc

SEQ ID NO: 76630 - DNA, 238 bp, Zea mays
  unsure (1)..(238): unsure at all n locations
tcttcgtcagacccaantgatcataattgtcttcatattatgttgcaactcctgattagctttgctcctgaatgggtaaaaaggaaaggaagacaatgaatangaagtcatcccgggataatctctcatctataatagcanaaggatatcccaataaatcacgaanacaaatatagacctttcaatggaaatggtttaactagttaatgattgaaaatactctgtgcacacatagctg

SEQ ID NO: 76631 - DNA, 213 bp, Zea mays
  unsure (1)..(213): unsure at all n locations
atgtgttgtccaacttaatgtatntatgtatttcattccagaatggcagacaacaacacaaacacaccttntcgaccacctgctgctatcccatatacatgtaaccaaattntccccccacccatgtgggatcctcatatgtggcatgcccaatggttcgacccaacacagggttcaacatttaataatccttcattgtcccatatgatcaat

SEQ ID NO: 76632 - DNA, 215 bp, Zea mays
aagtgtcgagttcagctctatcataatctaccaagtatagctgaccctctacactcccttaaatgctattgaatcatcacttcttctaaagacagtgacacctacatcagtgaatagacaattgtagcccatttgacataattgagaaacggatagcaaatggtaatctattgaatctacaagaaaaacattggaaatagtatggtcaggtgata

SEQ ID NO: 76633 - DNA, 74 bp, Zea mays
  unsure (1)..(74): unsure at all n locations
cacccctttctgcattctatatggatcggaggccatgagcncacaagatataatacatggctccccgcgaacag

SEQ ID NO: 76634 - DNA, 243 bp, Zea mays
cttgatgaacactaaataagacttatcattgcgttttgtgtattttagggactgtattctaagctgtcggttataaatgaatttcgtctgtacttcggattgatgattccgaacacttgcagaaggtactgtttagtcatttatagtattaatgaacttgggtatcatattgacttattactattactgtatgagtatacaagcactctataactttactttcaaccttctaagattgttcgc

SEQ ID NO: 76635 - DNA, 150 bp, Zea mays
ctttatagctcttggttgaaccgattgggagccctacatctctcttaaagtttgaactaatcatttctttttcattccaattcatgtcctgattcctgaagacttgccaagaccggatttttttttttttgattgagcaatctccaatca

SEQ ID NO: 76636 - DNA, 240 bp, Zea mays
gataaaactgtaaagtggagccaccggataagcgatctttaagcccaagtcgttcgacaagccccacatacacagacttttgacatgatatgcccccacccaatggaataagataggtacaagtacacaaagaggtcatataagtaagctcatgcatctgctagtggcattgcgatgagtggatcatcacggaacatgatgacctcaactttacttgtcctatactcattcaggggggat

SEQ ID NO: 76637 - DNA, 197 bp, Zea mays
  unsure (1)..(197): unsure at all n locations
gacatgaagattntgtcaatattctatacatcaaaattagtatctcagaanataaacatattacaataaatgtcctatcatattctcaatacctaaaactcttatgagacattctaatcaaggcgcataagccgatgagtttgttccctctcccatattccatatttgttcctatatacctctctccataatcaatt

SEQ ID NO: 76638 - DNA, 398 bp, Zea mays
  unsure (1)..(398): unsure at all n locations
gacttatacacaaccaccttacgggcagaacaagtgcattgctctattcttacttgngaatggaaactgacatgaagatattgtcaatattctatacatcaaaattagtatttcagataataaacatattacaataaatgtgctatcatattttcaatacctaatacttttaagagacattctaatcaatgcgcatatgccgatgagtgtgttccctctcccatattccatatttgttactatatcccttctcacatagtcaatattgctatgaattaatttctcccttcaaataaaatgttggtgcacaacgaatatataacattgaataatacatgtactataatcttatatctacaaattctctagtattgattcgcactgaaaaaatgtctcat

SEQ ID NO: 76639 - DNA, 284 bp, Zea mays
  unsure (1)..(284): unsure at all n locations
tgtgacccaatgctntactcggtcaccaaacatcttgatacatttctcatcgaagtatgtgaagtcctccctgaatagaaatacataaacaatcacatatgaacttactgcatcttcgtagataaagctataatataagcgacttactgaatctctgcgcttaaccaagaattgtatctttcttggagttcttcaggtatgtcatagtggtcgatcgtcaccaattggtgtatccctgctacaagtgtatcaaatgtcaggctcatatgatagatactgaactg

SEQ ID NO: 76640 - DNA, 187 bp, Zea mays
  unsure (1)..(187): unsure at all n locations
aagacagactcagatgccactgttgtcacatgaatttgcattacatctcgagcaatattttctcaaagttggatacttgatccctgcatattgccaccaattgataatgtcaagctcttgagttcttggcagtgtcggctcctccaagtacaaatgcaactcantccgtataaaggttgaatgctct

SEQ ID NO: 76641 - DNA, 298 bp, Zea mays
  unsure (1)..(298): unsure at all n locations
gtaccctaaccatgtgttttaactctcaaatgcgctttattggctctagcaagccccaagagcatggtatgaatgcctaagagaatttcttatcactaatggcttcaaagtcggcatagtcgatcctactctcttgtactaaaccattgcatatgatttgtttgtatgccanatttacgttgatgatatcatatatggggtgactaacaaatctacttgtgaagatgttagttagataatgattcacaaattcgagatggctatgatggtggagttaaagtatttctaggtttcaagt

SEQ ID NO: 76642 - DNA, 327 bp, Zea mays
  unsure (1)..(327): unsure at all n locations
atgtcacagttacacactgtaccataagtnacatgttcattcaacatacatcaatatttacttgaagatcagtatttgcctctggagctgatactgccttatgtcgatcacatgttctccgtcttcttggatccatcaccattagctctaccaccagaagctctctgtcttatacatggctcctataatctcgactctcagcaaactattgttagcatatgaaaaatactaagaccatgaatgaataatgagaagaaagtgattattntattgctcaagagatctgatacgacccaacaatattctatatatagcgatgaacctatc

SEQ ID NO: 76643 - DNA, 96 bp, Zea mays
accacttaaaatctaaatcgatcgttacgcaacgatatcttcttatattgacacaatgagtggaactctgtctggttggtgccactctactttggc

SEQ ID NO: 76644 - DNA, 315 bp, Zea mays
  unsure (1)..(315): unsure at all n locations
gtgtgagttctggatcactgaagtcatgttcttatgtcatattataaaccatgatggattatttgtggatccaaagaatgtagcatctattttggactggatagcaccgacagatgtttccgcgaatcaagagtttaattggaatggccggctactatccgtgnttcatttaaggtttctccaagaatgccaggccaatgacagccttgctggcanataaagttgagttcaagtggaccctatcgtgctaagagtcctttgagaagttgaagaataatgtgactacaacacatgtgttcattctactatatgttc

SEQ ID NO: 76645 - DNA, 300 bp, Zea mays
  unsure (1)..(300): unsure at all n locations
ttacttctttaattcttaatacttanaatttataatgcatgcatgctgaaagtaattgtcttcctctcataataaaaggtgctcctanggcatccttcataagcctaagtactgtcccacatggcctacttaattatccacctatttctccctccattcctaatgcctttcgtcctatgtctatcgatctattcctgacgattcttattagtttctaagcaagttttagattntgaaaattggtattcatggtttattgtccttctctgtggtggtatttgctctgataccagctgtggc

SEQ ID NO: 76646 - DNA, 208 bp, Zea mays
  unsure (1)..(208): unsure at all n locations
tttcatctaactgacataccgcnccggaaccaacggctccgggtgaagactcgcgtaccttgactggtaaccgtacattccgattgtggccacgcttgtgccccggaaatctcggccctattgccatccccgtggtggcgacagcttgcgtcatcctctcttatctggcatggagtctaaacttgaccgtccgaatcaggacgacgac

SEQ ID NO: 76647 - DNA, 197 bp, Zea mays
  unsure (1)..(197): unsure at all n locations
tttaccacatgtgatcacagtccttaataccaatgtgtgctctatccatggtaacacactgatgtgttacaactcccatgatagaccttcagctcatagattatcttcataatgatgccatggttatatcttgtgtcatcaanggattnttggttcacaatgntctggttgacacatgcaatgcatcggacatcatt

SEQ ID NO: 76648 - DNA, 260 bp, Zea mays
ctcagctgaaccgagctcaaaattcgaactgaagaatctttgataatcgtcagaatatgtgctcggagttcatcactcgatgcattcatcagtttaagcaagtgttccattttgttggagccagtactgaaaagttactccttccgctgaagacctgcctggtgccttcgagcacattgaaggtgaaattaatgatcttcgacgaattatatctgggcatatcgacttctgtgccctgtgagcttctcatggcacaactg

SEQ ID NO: 76649 - DNA, 266 bp, Zea mays
  unsure (1)..(266): unsure at all n locations
ccacgcgcgtccgccgggctcggcgatagaatatgtgatagacacacagctgtactangagatatagacgaacgatttgtagttgaaacccattgcacgggcaattttgactcttagatgataaatacatggatacaacatattaaaaggaataatacacatcatatggtagtgtaatcaattagaatatatttatagtccctgtgtacgaagaaaatctttcgaatggcatttgtgcaaagcgtaatgtttagagtcctaatatg

SEQ ID NO: 76650 - DNA, 276 bp, Zea mays
  unsure (1)..(276): unsure at all n locations
ctaagcttctatagggagaacacgtgatatgtgtaactaatgttaccttcgaataagatagaccttgtgcagcttgtcaagcatgttaacaagtgggatgagcgcatcacaacaagaatgtgatgaccacatcaagacctttggagatgcttcacatggacctcttcggacccgtcgcctatctaagtatagaatgaagtaagtatgggcttggtatagttgatgactnnttccgcttcacttgngtattctttntgtaggataaatctgaaaccc

SEQ ID NO: 76651 - DNA, 269 bp, Zea mays
  unsure (1)..(269): unsure at all n locations
tgctgtatttctgatcttgtatgtggatgacatattatngattgngaatgacattcctatgctggagtccatcaatgcttcactgataaagagattttctatgaaagacttatgggaagcaacatatattttgggcataaggatctatatagatatgtcgaagatgcttatttgattaagtcaagatacatacattgacaatgttntgaaacggctcaacatggaacaatccaagatatgtttcatacctatgtcacatggtaaacacc

SEQ ID NO: 76652 - DNA, 222 bp, Zea mays
  unsure (1)..(222): unsure at all n locations
tctcgaaaatgctcgatatattattttatacttctcaatcacattgagatttgatccaaagatcaaaatgtcatcaacatatatgcacaacataacagactcacccncaccataccgatagtatatacacgtgtcagattcatttacaacatagccaactgctgtaagagtattatcaaacatttcatgccattgcttatgtaacaccctatgtgttaccct

SEQ ID NO: 76653 - DNA, 133 bp, Zea mays
  unsure (1)..(133): unsure at all n locations
accaaattctatgcattatgcacactaaacttataatatccacgagtttgtggtttaagtgtttggcanggataagttcaaatctctacaaaatatacatcaaatggaataaggataaatcttgacaaatgac

SEQ ID NO: 76654 - DNA, 214 bp, Zea mays
cccaacagttgcccctcacagtattagtgtgtttctttgtaacatactcagactgtgaaatgaacgaatgcctgtatctgaaggtgcataaaacaccttaccttcgctagaatagcgagacattatgtattgtggggcccatcggtcattggtgctttgtgcatatatatgacgggtcgccgttgaaatatctgtcgtgctatcaaacttgtgt

SEQ ID NO: 76655 - DNA, 264 bp, Zea mays
ctactacatataatagacttgaaagcatgtattagtctcaaatactcagaatatagaataacctcgccctgataagtgtgcatacaagtcttgtatacttgaatgagacatgcactctgatttgatatcatgagggacaaactatgtataatccgagacttggcacatataattttaaatgataccaattgaaacacaattgaagtattataccactcgtagtatatcaacttgtggataagccatattaaaatatctatcgat

SEQ ID NO: 76656 - DNA, 220 bp, Zea mays
  unsure (1)..(220): unsure at all n locations
atttatatcctaagaactatcctgaacacaaaatcatgaatatccatgctaganaacctcataatatttctcattatgctgttatgtatagtaatgtggcatctaactctaggcattcaactcatgtcaaaatgcctaataagaatattgcttatgcatcaaatgagcataacatttcatttaagactgttaatgcatcttatgtactcactaacaaatc

SEQ ID NO: 76657 - DNA, 318 bp, Zea mays
cactcctatgctcctcctcatccgatgtatggtcccactcgacagtccatcccggtggctatatggacggccaagtcactccatcaaccatgtcctccagataacctgttatattatgccacaagcaatgctgagtatactaatactcagctagacttacccggtgtgaggagtctactcctctacctctatacatgcagctgtgtgtgtgtggggtttggttgccaaaagcactatctgagtttctaagtcaagttttaactctgtcaatctaagtgtgactctcttaatgctaaatgtgtactatctactcataca

SEQ ID NO: 76658 - DNA, 141 bp, Zea mays
  unsure (1)..(141): unsure at all n locations
ttgtctaagtgttgctatctctaccgcataggctaagtntcaatctacactaaataagtatgactacaagattgaaacttaaatgcttaatataaatgcggaatgtaaagagcttagtagagaagcaaactctcgtggatg

SEQ ID NO: 76659 - DNA, 294 bp, Zea mays
tcggatatgatatgtatccgtggtgtgcaaatcgaaccacatatgtttttggtgatggtggatttcgtggtgaccataacgtggtagaactcaatactctaaaggaataaactatgaccagcatctcgacacaaccgatgcatccataaactcaacatgccctaactaagtagtactagtaaatgctcaatggtgtataggattgcggtataactaatctactattatttggctctttctggactatatgagataagaatacagcgaagaaaagtatatctctcaccgattaac

SEQ ID NO: 76660 - DNA, 183 bp, Zea mays
ttattgagtcaattgcaaaaacaaacacatagaagataactaaagagatattataatgcttgtctgaagatactgatgatagcgacaactatgatgtggagagtggaggcgaagactctgaagaatgtccttggcgaccaagtcatgcagtcttcatgaaatcaactatcaaacatagtcatc

SEQ ID NO: 76661 - DNA, 248 bp, Zea mays
atttgcttcgatagctgattacaggaaaacttgtggttgtccgataatgcaaattataacaaccaaaattgtcatgtaatccatcttttctagccttcgtctgatagtgcagctcgtgaactcgacaaaagctgtccgcaaacagctccaccgcttggcttctgagtgcccatatataaacactaagcctaacgatagcgttaggagtcaactgatgaaagtagataccaaatctcttcaatacctct

SEQ ID NO: 76662 - DNA, 272 bp, Zea mays
  unsure (1)..(272): unsure at all n locations
tgtgtgcagcggctgaatgacgtgtttcactctgtcggagctagctcttcttaatttacacctttatctgataatctgncaagaacattagaatatattgaaggcgaagttgatgcccttgacgatattattggtgggcacgccgacttctgcgccctggtatcttctcggtgcacatctactgtctttttgaaggctggctgcacacatggaaacattgtgaacagaccaaacttcagcttgtcagcttcagaattgatagatatcccaag

SEQ ID NO: 76663 - DNA, 241 bp, Zea mays
  unsure (1)..(241): unsure at all n locations
ctggtcacgacgaccgtgctcatgtagtgatggcgggcggtggcgctcgccttcaatggcgaactccggtgatctctggctcgggcggtgctntgtgtgcggatatgcaaatggctaatgcctctgggtgcacttatagacgatggcaatgtgcagacgcgcatggcaatgcgaccactcgcatggcgcgcgctgtcgcggtcagtccgcgctcgttcgattatgcaagcgatccaacacg

SEQ ID NO: 76664 - DNA, 222 bp, Zea mays
tttacaataacatgtgtaagtccctctataaaatcactaaaatatctgaccctcttcacacccttaaatgctatggaatcatcacttcttctatagacagtgacatctacatcagtacaaagacagctgtagcccatttgacataattgagaaacagatagcaagttgttatctaaagaatcaacaagaaaaacattggaaatagtatggtcaggtgatata

SEQ ID NO: 76665 - DNA, 466 bp, Zea mays
cacataagctaagttttatgataaatatctatagaatgcacacttaatttccatattcgagaaataggaaaataaccatagaggaacggtggtggtgacttcgatttgaaaactcgatgcacttatttcaacaacaacaacaacaaaaccttttatcccaagcaagttggggtaggctagagttaaaaacccattagaagtatataacccacgaatgaatgtttggacacatggatagctattttccatggactcttattcaaggctaaatctttgggtatatactatcctttcaagtctcctttatgtctctttcatgtcaacttcgtcttccttttctctttttcattgtttcgcgcctatgatcccaccatcactgaccctttgaggtctcgttgacatgtcaaacaactcaacgatgtggacaaaaagatctcttcaatggtgtaccctacatatatattct

SEQ ID NO: 76666 - DNA, 89 bp, Zea mays
tctttttctgtattctggccaattagaaattgtgaaacctatgtttacctcttatgtaaagagtttacttagctttctatgtaaagcta

SEQ ID NO: 76667 - DNA, 312 bp, Zea mays
gagaatggatgcaagaacaaaaccatatgtaataataggaggcgagttatactttcatgtagtctgctctccacttcttaagtggtcatctagagccgaacgtatacagctgatgaacgagatacatgcaggattgtgtggatctcacattgtgtctaagcctttgctgggaatagttatttgacaaagattttactggccgaatgcaagttctgatgcatcagagctagtccagaagtgtgaaggctgtcaaagatgtgctagagaccagaggcaaccttcatctcttactcaattaatacaagccacttg

SEQ ID NO: 76668 - DNA, 385 bp, Zea mays
  unsure (1)..(385): unsure at all n locations
atacaacaaaacctcttgctnttctaagagcctatcctcttcattcattgtatcaatcaattcattgattttatcaattatattnctggccaatcccttgaacaaactacagtatctatctcatcatcactagactcatcgtcactagaagaatcatatgtgacatcattacgagtgattaccatcttctctcttgccatgatgcaagtgtgacactcgttgnggaagagggatgacttgttgaatgcaccggcggcgagtccctcattgtccgagtcagactaggagcagttctagtcccactccttgccaagatgagcctcgccctcttgcttcgtataaatcttcttcttctctctctttgtcccctgggcctgatcactat

SEQ ID NO: 76669 - DNA, 275 bp, Zea mays
acatgtgctaagcggtgatgccacagccatttcattctatgtcttatcaataatcatgcatctagaccgcgcttctctttggcataatcaactaaatagaagttgccgtctaatacaccctctaaagctaatgaaccatcacttcttctaaagacagacacatctatgtctgtgaataaacaattatatcccatattgcataattgactaacagataacaaattatatccaagcgactctactaagaatacattagaaatagagtgctcatttga

SEQ ID NO: 76670 - DNA, 226 bp, Zea mays
agtccatcatccacacaagaacatcatgacgaccgacaggccggttgagctactccacatggatctattccgtccgatagcttacataagcaatcgcgagaaggagtaatggctcggcagatgggatgaataatctcgctacacctggcgattccttttacacgaacaatctcagaccccagagaccttacagggattcttgagacgggctcaaatgagctccctt

SEQ ID NO: 76671 - DNA, 310 bp, Zea mays
gcgcttgtgctctcagacgcaagaacctcctgacatatgcctgaaggtattcctcgtggtcctacgtgcattggaacagagcctgagcagtgaccggcttctactgagatccttggaaattggtgagcaacatgtccttcaacttctgccatgatgtgattgttcctggccgaagagaaagtaccaagtttgtgcaacattcttgactgccatgatgaaggatttcgccatgacttgcagtgtgccccatatgaaatatggttgctttgagacattataaactgttcggtctgatgccatctacatagga

SEQ ID NO: 76672 - DNA, 395 bp, Zea mays
  unsure (1)..(395): unsure at all n locations
cgtggagaacgcctctgtgacataaataagtgctaattggttaactgatgcaaaattatcatgaagcaattgcaattggaagaaccgttgctggcctcaaggataccagatagatgggaacaaagaaatggtggctctatggaccatgaacattgttggttcaatgacttcttgctacgtagccacaggtaacaataaattcagaagaagaagaagaataatcaaatcatagccacaagtaacagttaattctgacaggagtncgtcattgtaggttctttctcgcggtcagcagtcaattacatggctggctgcaaaacagcggtgtcaaatgttgtcatgtccactggcgtgatgcttacgctgctgctgatcacccccactgtcaagtacac

SEQ ID NO: 76673 - DNA, 378 bp, Zea mays
  unsure (1)..(378): unsure at all n locations
cactaagcttgggagattcttcattcaacatgggctagtcggcgatgccagaaccaacccatatttgtcttatttattaagcaagtatcgagttcagctctggtgaaatcaactaagtatagctgaccctcgagtactcgcttaaatgctactgaatcatcacttcttctaaagacagtaacacctatattcgtaaaaagacagttgtaacccaatttgcataattgagaaacggaaagcanattgtaatataaggattctacaagacaaacattggaaatggaatggtcaagtgatatagcaattttaccaagtccttttaccanacctttgtntccatccncgaatggtatagctctttggggaatcttcgttctc

SEQ ID NO: 76674 - DNA, 239 bp, Zea mays
  unsure (1)..(239): unsure at all n locations
gggagaacactgtttatgattaacanatgctcattntgagacagacaggatttgtatctcatgccaagcangatagcatgttggtgcccatcatccacacaagaacatcatgacgaccgactggccgcttgagctactccacatggatctattcggcctgattgcttacataagcatcggcgggagtaagtattgtctcgtaatagcggatgattattctcgcttcacttgagtattct

SEQ ID NO: 76675 - DNA, 217 bp, Zea mays
cccccgggtttgagctggatggcgggtatctggctctcagttgcgtgaactgatctggtcttaagaaactcggtggcgggttgacatatgcaagggttaagtgctacatatgtcgtgtgatcggagatcctcagctgagtataatcgattcggatcgccgtaccttcgcgcgtatggagacttggccactgacttacacgtagtgttgggtctatgc

SEQ ID NO: 76676 - DNA, 520 bp, Zea mays
  unsure (1)..(520): unsure at all n locations
tgaccttagaatctcagctttctcctcatgagaaatangtatgatccctgtagcttacctattcctactgatctagggcagtgcatgcttggctatgtctagaatgccatgatgctctatgctgatatgatgaagattggtgttaaaccaacaatgtacaagatataatgccctgagatctggtcatgggcaccactgaatgacctccaaactggtgtaagttaagaaatggattttgactacatacnttagatntctagagcaaaagccagttcacaggctgtggaacgctntagtcaaactcagtcatcaatatggtagaccaatctgttacatctgtgcgaccattgaagatccgtattggaaagccctctgttattgccttgtttcaaggcaatgaatattgaaccttggattatttnaattgcacatttgtgacggctctacaaacagtctgatatacacacacctattaagactgacaataatgctgatacgtgatgtacatgaatactgccac

SEQ ID NO: 76677 - DNA, 301 bp, Zea mays
  unsure (1)..(301): unsure at all n locations
actttgacgtagaaccattctgagttccagcctgtcggtctcttgcttcgatagctgatcacaggagaatntgtagttttccgatatgcaaagttgtgacaaccaacatatttatgtagcccatcctttctggccttagttnggtagtgtagctcgtgtacttggcagaaaccttcggcaaatggcttcactgcttgtgttctgagagcccacatgtaaacactaatcctaacaatagcgttaggagttagttggtgaatatagatcccaaatatcttcagcacatcggcgatcatcctat

SEQ ID NO: 76678 - DNA, 348 bp, Zea mays
  unsure (1)..(348): unsure at all n locations
gagatgcaaactcctgttgatgtaatgtgtattttaccgaagtatttataaccgcacaagggtctaactatacctcgttggtgccccaccatatagggaagctcatgtgagggccaagcacctcaagcaggtaacttcatagagagccacgtgccttctccatgcacaagtggtgcttcgcttctagcacctctcagacggtccctggcgtcttcactatcgaactttccgtcgaaacactgcgtgcctcgttcactcctgtacacggtggcgaccacacaacaaacacaagtggtatggtctcacaagaatttcgtccactctgtacanagtacaacgactcacaca

SEQ ID NO: 76679 - DNA, 308 bp, Zea mays
  unsure (1)..(308): unsure at all n locations
cgcagtcgtttattattggttttctatgctgaccggagntcacgcgccaccgggcgactctctctctctctctcccgattcccgagtgttcaaagggttcncaatgtgcctggattgccaggataaggcgacatcaacttcttatatactttccgcagggaaagcctacttcagccgcgcaagccggtggatcccgagcgaatcgcccagacaatccgagtanggatggcagcgggtcggattttgttcgggtataataatacccgacccgaaattggacccgagacttcttacaatatccataccca

SEQ ID NO: 76680 - DNA, 326 bp, Zea mays
  unsure (1)..(326): unsure at all n locations
caccctcgggcgtctgggcgcannccaagtaccaagtctctcacttggaagcctctgtgtcgttactctttggcgnggtagcgncgcagagactgctggtaccgagcctatcccgagcctcttccaactggtccaatgaatcctctcggctggtctgagtgttttggtcgtcgcatgcctttgtcctcggtgaaccgtattccaagtccgcgggtaagatggctctagccccatagactaggacaaacggcgagaagcccgtggcctgactcgatgtcgttctcatgctccataccaccgagggtaggtcttttatccaccgcttg

SEQ ID NO: 76681 - DNA, 268 bp, Zea mays
  unsure (1)..(268): unsure at all n locations
tctcaagggagaacacntgataagtctaacttatgtaactctcnaaatatatagaccttatgcatcttgtccagcaggtaaacatgtgggaagctctcatcatgccaacaacgtgataacaacatccagacccctggagttacttcatatggacctcttcggacccggcgcctatctaagtatatgaagaagtaagtatggtcttgatatagttgatgaatctctccgcttcacttgggtattcctttttgcaggatcaatctgaaac

SEQ ID NO: 76682 - DNA, 234 bp, Zea mays
gtctcggctgtcaaactgcttgccgttgtctacagttagttcgaactgtactccgaagcggcaacaatgtttgccaaagaattctgtgcggtctttgctgttattgtggaaacagccctcgcctcaatccatttggtaaagtactcaacagcgacgaaggcgaacttgaggttcccctaagccgtgggcagtggcccgacgatgtccaggccccagcgctggagggccatgtgt

SEQ ID NO: 76683 - DNA, 331 bp, Zea mays
tgagaattacatgtgttgttaaccatgtcaagcacggaagcaagttggtgttcatcatccacacaagaacatcatgacgatctacatgtcgcttgagctactccacatggacctattctgcccgatagcttacataagcatcggcgggagtaagtattgtcttgtaattgcggataattattctcgcttcacttgggtgttctttctgcaggaacaatcacacactcaagagacattgaagggattcttgagacgggctcaaaatgagttcggcttaaggatcaacatgattagaagcgacaacgggacggagttcaagaactcacatatc

SEQ ID NO: 76684 - DNA, 404 bp, Zea mays
  unsure (1)..(404): unsure at all n locations
caaatgttcattttgagaaagacaggatttgtatcgcatgccaagcanggaagcaagttggagtccatcatccacacaagaacatcatgacgaccgacaggccgcttgagctactccacatggatctattcggcccgattgcttacataagcatcggcgggagtaagtattgtcttgtaatagtggatgattattctcgcttcacttgggtattctttctacaggacaaatctcaaacccaagagactctaaagggattcttgagacgggctcaaaatgagttcggcttaatgatcaagataataagaagcgacaatgggacggagttcaagaactctanattgaaggcttcttgaggagganggatcaagcatgagtctcttctcctacacacctaacaaaat

SEQ ID NO: 76685 - DNA, 438 bp, Zea mays
  unsure (1)..(438): unsure at all n locations
ctcagctaaccttgtacgaggataagctacctttgttccaaaggtggatggtccttaagtctctttgatattcttatagganaatgcttaanatatctgcaacatgctntcataagtgcataaactgtcttgagcatcactcatatactatgacacaatgcacttcactttctctatgatatagactngttctcattaacctaattatgtgcacttggcatttaaggccaaaatatgtattcctctcaaggcacatatttatggggagaaatctatattatatagaactatgatcatgcttaattgacatatctcttgatcatatctctttcattntggtacanatgcatatatcctattattcccgtaccatgactacgactaatatgtttccagtatattactatgctaagtcgtagatggaaagggaaatggagt

SEQ ID NO: 76686 - DNA, 308 bp, Zea mays
  unsure (1)..(308): unsure at all n locations
ctcccttgcatttggatcccaacttcctagccacttactttgattcttacatgaaagaataaaagaagtgtcgcaagcatgaaagacagtagtgggttcattgcacattctcttatgcacatgagacacaacattattcctcctatgcgcatgagacacaacatgattgcgcctangcctatttctactacaatcataggtagagttggaagcaatcatagcatgatcatagtctctattattataagcattcctagaanatgtctatcatatatgtaggcatgacactnttgagaactactagccat

SEQ ID NO: 76687 - DNA, 232 bp, Zea mays
  unsure (1)..(232): unsure at all n locations
gaagagctataacacaccaaggatcactacataaggacgtgacttacagccaatgaggtaacagctacagttatgtggtgtaagtcataatgctcaagatcaagctctaagaaggagatcaatgtcactataaggagaacaagtgtcataaccagaactggaagcagcccacaagagctaagttcaccttaatctttagcttggngtggtcctatgtttggagatgttctat

SEQ ID NO: 76688 - DNA, 106 bp, Zea mays
atccgatgccctcctccacccgacatgaggactcccgcactgactcaacaataggcctcttcccaacagcatacacttgctcatggcagggaaagaaagaatcact

SEQ ID NO: 76689 - DNA, 341 bp, Zea mays
gttgaagcatattatgtagtgctactagcatagcagtattagaccttatatcaagtccaagcctcaacctctcactaaagaacaacaattatgcatacaggtgactcaacttcttcgtggcatcaaaatgccacactactgtccatatagtcgatcaatgacgatgtcgcctaccatgaggagtgcatcacgacaaagggtacctgtggcaacgactgacccttctattgtcgatggatcaataatcctggatgatggaacagtcacattataacatggatcatcatgagttcttcgtctatgtcatttgggcctagcactgtgggcgtcatgcacacact

SEQ ID NO: 76690 - DNA, 390 bp, Zea mays
atgatatgaagccctcgggtgcttgagagagtccattctattcttatcactcgagctatcaatcttcaatgatctatatacatgattgaaccaaggctatttcttcaaattgctatgtcttaaactcatatcatctcgaggaagatattgatattgtaggaaataaagagttatcatgtgccacaaatcaaggcctaccacatggaggaaagtcaaggatggtacttctatgctcttaagtgcaagatttccactatcatttttatggtcttgtgtagcacataaaatatgtagctcttcaaatatcttaatttatataccattccttgaaaattcctctctatggtagatgcatctatcaatccatctatggcattacatgtttaaata

SEQ ID NO: 76691 - DNA, 253 bp, Zea mays
  unsure (1)..(253): unsure at all n locations
acatgatttgtatcgcatgccaagcanggaagcatgctggtgctcatcatccacataagaacatcatgacgactgacaggccacttggagctcctacacactggatctatttctgcccgattgggcttacataagcatctggcgagagtaagtactggtctagttatctgtggatgattattctcgctttacttgtgtgttcttcttgcaggagaaatctcatacccaagagactttatagggattcttgaaa

SEQ ID NO: 76692 - DNA, 306 bp, Zea mays
catggatcaacgagtgatggctaaaggacaaatggatcttttatagtatagaaatacatattatgtctatgacatatgcacattgtcatataataccatcacaattattatgttgagaaggttatgacgaattactcttatgacaattgctatactgtcatagaaaattgtacaaactagatgttagagtatgttatgacagatttaatgacggaggttaaattctcatcattatacagagccatcttctgaaaatcgtcatacacaaggtgatctaatgatgaattattttattgtcatcaacta

SEQ ID NO: 76693 - DNA, 346 bp, Zea mays
  unsure (1)..(346): unsure at all n locations
aagaacgaagatgattgtgttgtgtgctaaacatggatcaacgagtgatggctaaagganaatcgcgatctttatagtatagaaatacatattatgtctatgacatatgcacattgtcatataataccatcacaattatctatgtgagaaggttatgacgaattattcttatgacaattgctatactgtcatataaaattgtcacatacaagatgttagagtatgttatgacagaattaatgacggaggtgtaaatttcatcattatacagagccatcttctgaagatcgtcatacacaacgggatctaatgatgaagtatcttattgtcatcaactattcgtcat

SEQ ID NO: 76694 - DNA, 371 bp, Zea mays
cactcacgctcgatatccgggcagcttgctacaacactcatggcctaactccgagtgcccatgataactataacggagctttcaattgtttatacatgaggcttcatcttgctacatgactcttacccaccaccaccatgacgtcgcggtcatcaccacagaagtcaaatcggaccaaatcatcgatcgaatcatcttcgatgcttgaactagtgtaatacggcgtgctgtccaccgccatggcatccgctaaccccgatatatattgtacactcgatatgcgcaaatagagctgtcggtcctccaacctgggatgagggatagagagtttatccaacaacaaactctctaatttttcaccttccatcatg

SEQ ID NO: 76695 - DNA, 422 bp, Zea mays
  unsure (1)..(422): unsure at all n locations
taacaatgggacgaaaacgaacacggagagctttgggtcggatacggtatcgaaaataccgatcattcgaacacacaaaattcgaaacgaagatacgtcgaagacgatcgatatatgaaactcgagtcggcaatttacacaaacaaacaattaactgaatgacttaattcaaacattaatatatattaagttcatatgcatcaacatatacacatagtgacattattcgagtgagaaattatatctacactcatgtcacatacaatcatactgatagttngacggtatggcacagatcacatgtctgtgacatatgtacacaantctcttattgacaacggacattcggcttattcaaaagngatacctatacctatcactctctcaactccaagtctccagtagcagcagtgaccacaaat

SEQ ID NO: 76696 - DNA, 382 bp, Zea mays
  unsure (1)..(382): unsure at all n locations
gtggctagagaggagttcttgtctaacactatatccacaagaagatcaacacagataggcacagcgggttatcccgtggttcggccaagtccaacacttgcctattccacgttgtggcgtnccaacggacgagggttgcactcaacccctctcaagcggtccaaagacccacttgaataccacggtgttttgctttgtttcactatatcccgcttgcgaggaatctccacaacttggagcctctcgcccttaccatttgatgttcacaaagaagcacgaaagtaaggatgggatgagcaacgcacacaagacacaaaatcagagcacatacacgcacacaagtcacaactcgagctctaacacaacccggagagtctctact

SEQ ID NO: 76697 - DNA, 211 bp, Zea mays
  unsure (1)..(211): unsure at all n locations
agaatgtgatgaccacttctagacccctggagctgctgcatatggacctcttcggacccgtcgcctatctaagcatatggggaagtaagtatggtctagttattgttgatgacttttcccgcttcactagggtgttctttttgcaggataagtctgaaacccaagggaccctcaagcgctttctcaagagggctcanaatgagtctgagct

SEQ ID NO: 76698 - DNA, 405 bp, Zea mays
  unsure (1)..(405): unsure at all n locations
gctataactttagagatctacacatntatgttnnggttttccctctcctctcatatctttatgagagagttcgaaatggtgcacttgggtgaggatgacagannggcccttacttcnnctttgctaaggagggaaataaataagtggtattctctttaaaacataacaaggcccctggtcctgatagcatgcctgatgaattctntcaagaantttgggaccttataaaggaagatgtaatagctcttgttgaaaactttttaaaggtgctctacctattgaaagacttaattatggngtgaatactttgttactcanaattgacatttgccattgaaatgaaaactntagacctatntatctnctaaatgggttgtatanaatataacanaagtatcgaataac

SEQ ID NO: 76699 - DNA, 323 bp, Zea mays
  unsure (1)..(323): unsure at all n locations
gagaaagacatggttttgttctctatgtcaagcacganagcaagttggtacccatcatccacacaagaacatcatgacgaccgacaggccgcttgagatactccacatggatntattcggcccggtcgctacataagcatcggcgggagttagtattgtcttgtaattgtggatgattattctcgcttcacttgggtattctttttgtaggaaacatctcaaacccaagagatcttataagggatcttgagacggactcacaatgagttcagattaaggatcaagaacataagaagtgataatgggatggagttcaagaactc

SEQ ID NO: 76700 - DNA, 363 bp, Zea mays
  unsure (1)..(363): unsure at all n locations
tgtgttgtgtgctcaacatggattatcgagtgatggctaaagcgagaattggatcttttatagtattaaatacatattatgtctatgacatatgcacattgtcatataataccatcacaattattatgttgagaagggtatgacgatttattcttatgacaattgctatactgtcatagaacattgtcacaaacaagatgttagagtatgttatgacagatataatgacggaggttaaattctcatcattatacacagccatcttctgaagatcgcatanacaaagtgatctaatgatgaattattttattgtcatcaactattcgtcatacaaggcgataagtgttgtagtgatacctgagt

SEQ ID NO: 76701 - DNA, 444 bp, Zea mays
  unsure (1)..(444): unsure at all n locations
acttatatatatnttctcgctagatagcgcgcattcgatgtgtacatattatgaataactaatactttaccttccttgggcagcaaggtcacgcagtgccaggtggcatatttgaccatgactctggcccacgattngacaagactcctattggaagtgttgttgcatagccatcttcctatccgaattataatgtgctcgtgctcttcgggcctacttgtgtgctaaagtcattgaattggacacgacatacttgtcaaattggttacctgcatactatcaattcttattattctagtgacaacatcgggcatggatagaactgtaagtttattcattttgaagcataatcttcttccattagagattagtcaaagttatcactgtaagatctgagaatatatgaatatgtattatgttacaatacagtgttccctgtgatgt

SEQ ID NO: 76702 - DNA, 288 bp, Zea mays
  unsure (1)..(288): unsure at all n locations
tagcaattaagcatgtgtcgagttcagctctatcanaatctactaagtatagctgaccctctaacacacccttaaatgctattgaatcatcacttattctaaagacagtgacacctatatcagtgaatagacagttgtagcccattttgcataattgagatacagaaagcatactgtaatctaatgaatctacaagaaaaacattggaaatagaatggttaggagatatagcaattttacctaaacccttgaccaaaccttggtttccatccccgaaagtgatagctc

SEQ ID NO: 76703 - DNA, 373 bp, Zea mays
  unsure (1)..(373): unsure at all n locations
ctcagctttattacttctaccgctttatagtcttcttcttggtggtagatgccaaatgtggataagtntangtaccaaagcaatgaagactaaatcaaacaccaaacaccaccaatctataattttatatctacaaatggtttttcaagaggctgtggtcatttggtcctaaaataggaagtaagtgaattatatagttagggggaggcttaagtccataatatcaccttatggngacaaacatgcatcatagcaagtagaatgcatattctcatatacatacttgtattatttgcttgctttggtgtgttgcatcaatcaccacaaagggggagattgtaacgaaaatggacnccacgccatttggctaatt

SEQ ID NO: 76704 - DNA, 230 bp, Zea mays
atgcttgtcttatcaattaagcatgcatctagaccggcctcctcttctgcaaaatcaaccaaataaagagtggcgtctagtacacccttaaaagctagtgaaccatcacatcttctatagacagacacatctacatttgtgaatagacaattatattccatattacataatctgctaacagatatgtaattattacccagagactcaacttagaacacattagagataga

SEQ ID NO: 76705 - DNA, 231 bp, Zea mays
  unsure (1)..(231): unsure at all n locations
ctcgtccgactaccctaccattataagttcaagatatactttatagtaccctgccaagaatggctngatacaattgaaataatgagcaatgaaattcttgggaattactctanaaaagaggaccaactgatgacagcggccttcggcactcggccgaaacgaaggctgaaccgggtacttgatgccataggatttgaatactctgactatggtcgactgggcggagatgct

SEQ ID NO: 76706 - DNA, 285 bp, Zea mays
  unsure (1)..(285): unsure at all n locations
ctcagctttaccttcataagctctnggccgatggattactggctgttntacaagtcctactggaccgttatcaaatctgatatcatggccgcaattcaagctatctggaataaaaactttgttatatttgacaagttgaattctgcttacattaccttgatcccaaaaaaagaggggctgaacatgtgaaggattntagaccaataagccttgtgcacagtttcggcaagctgattacaaaaatacttgccaacaggctggctagcaagcttaacgggttgatct

SEQ ID NO: 76707 - DNA, 344 bp, Zea mays
  unsure (1)..(344): unsure at all n locations
cctagacacagtccgnaggatcgaagcnttcttcgaaggattctcntgtaagaatatccctcgagggcaaaatgaacatgctgatntgttagccaggtctgcagcacaggggctgccgctaccttctgatgtattctttgaaacaataaaggcaccttcggtggagttacttgaaagagcagttcttactatttcccctgtgtacagtgaagattggagaactgaaataatntcttaccttcagggcaacttcctatcagatgacgaagcttataataaaagaatagaggcaagagctcgtccgtatatcattatataagggggagtatacaagcatggagttt

SEQ ID NO: 76708 - DNA, 357 bp, Zea mays
  unsure (1)..(357): unsure at all n locations
ctatgatactcagctnaagtccaaaaacattctctacaaatgagtacaaccgagacacaagtactatattcattgtttatgacctatgcaacatatttagaagtgcagacctcacacttataccatttctcacaaagttgcatatttaggtgcatatatgtgctcttttggacttgacatcttcaatntgatctttatatatgtgctcatgctcatattaagattgttatttcaaggtgtcgagttaagcatttaatcaccaaaacagttagaaatggtccaagggcatatttccctctcatcgagggaggtggaaggtatgggtggcgggatcctgagtgatgcgggatcatggat

SEQ ID NO: 76709 - DNA, 309 bp, Zea mays
  unsure (1)..(309): unsure at all n locations
agcgcgcccgtgcccgcgcgctgcagactttgcagataaggccctgntcttttggtaaccgtaagtgggcacttgcactatttacacgggtcgctgacagtttctaaaaaggcccctggatttctattcctttgtagaccgaggtccccgacgacggcgagcgcagaaccgggctccggcgagctagactggccggagggagccaagaccggtgctaatctttggtttacacctaattccaaccctaaggagtatnttccctcaattaaattctgaattggagccctacaacactctgctcacggtgac

SEQ ID NO: 76710 - DNA, 358 bp, Zea mays
  unsure (1)..(358): unsure at all n locations
acctagtgacaccaacataccaagtcanatacctgcggaagtggtagttcatgtgctgttggtcgttctcgtagtttaagtccgcctccttagcccattcatcaatataatctctgtggtgggtctcgaagtcggtgaccttcttctgcctctgtctgtcgaacctgcaaaaggtacacacatgttntagtaattcattgcatatctgaaataataattagactatacaaatggacaaagtcactcacttgtggagttctattgaagtggagaatggctccaccggatactcctaacgcagaccaaactgtcgagccactctgtggggcaagtgatactcaacaacatataagcaaat

SEQ ID NO: 76711 - DNA, 245 bp, Zea mays
  unsure (1)..(245): unsure at all n locations
gttctttcactgccgactgcagtgcactgcactggtaaagatctgngcccatcttttgtggtggtttgactggatggactgcccacaaccgacaacccataagaaattgtccagaaaggatcacggacagggtatatccaatcacaaagccatgtgaagtggcgccgaatatggacaagatcgcaacggtacaatatctcttgttgtccggtcttgacttgtacactgagagaagaagatcataa

SEQ ID NO: 76712 - DNA, 316 bp, Zea mays
  unsure (1)..(316): unsure at all n locations
tgcgcatctttcttttcaagtggccaaactnttcttcagatttaactaataatatacagaaggatgttaatatntatatctttaatatactctatgcctaatctaatgatactgatacattnttatataaatttcatatattctttaaaaaataactttctatgaagcgagacgtgtatttattttatgacgtacaacatactcttgaatgtgacaagcagcaccagtaataaaaaggactcaatttgccgacgtgcaattcagatacggattatccgtatttagtatttttgaacctttcgaatcgagtaatatc

SEQ ID NO: 76713 - DNA, 62 bp, Zea mays
ggaggagctcatcacagcaagaacgtgatgaccacctcaagacccctggagctgctgcatat

SEQ ID NO: 76714 - DNA, 361 bp, Zea mays
  unsure (1)..(361): unsure at all n locations
cagcttcggccagtgacagatctcaagacgaaggggtgaaccgacttatagatganatgacttatatacccacgatgttttgggcattattgtagtcgaatgtaaggggcataaatgtaattttacacangctgngccctgtgcctattaatagatgaacagtacccctgtactggtcacgtaatcttgtaactgctggcacattatgctggaattattgctttctgtcaagacgaaggtataaatgtacctaaatattgtgtttaatatttgtggtcatataataaaagatgtgaataanggtatctatttttaagatatctttctataatggttcatgcttcatattntntatttcata

SEQ ID NO: 76715 - DNA, 268 bp, Zea mays
  unsure (1)..(268): unsure at all n locations
actcagcttctaagggaaacacgtgatangttgactaacgtgcatctcgaataagatagaccttgttcatcttgtctatcangtnaacaagtaggaggagcgcatcacagcaagaatgtgatgaccacttcaagacccctggagctgctgcatatggacctcttcggacccgtcgcctatctgagcataggagggagtaagtatgggttagctattggtgatgacttntcccgcttcacttgagtgctcttttcgcaggataagtctg

SEQ ID NO: 76716 - DNA, 313 bp, Zea mays
  unsure (1)..(313): unsure at all n locations
accggagaggacattatatttattggaactcatacatactgatgtgtgcggactaatgagtacgacagctaggggaggattccaatacttcataactntcactgatgattntagtagatatgggtatgtctacttaatgaaacacaagtctgaatccttagaaaagttcaaagagtttcagaatgaagtagaanatcagcgtggcaagaaaattaaagcactgcgatcggatcgtggaggtgaatatttgagtcatgagtttagcaatcatctaaggagttgtggaattgttccacagcttatgccgcctgga

SEQ ID NO: 76717 - DNA, 261 bp, Zea mays
  unsure (1)..(261): unsure at all n locations
atactcagctggggcgcgagggagtctactgtganactctccttcttctctccgtgtcttgatgcactggttggcttcagcgtggagggcttcttgctcgagatttcttgagcctttgtcatcaattcaaagctcacaagatgtcctatcactctctcgggagacattaatgtatatctaggatcaccacgtattaatagaacttgcgtatggttaagacaaacgagtgatctaagaataaccgtgaccatttcatggtca

SEQ ID NO: 76718 - DNA, 369 bp, Zea mays
cgagcttgaaccgaggacccgcgccaccagaatagcgcaatcgtgctcgccggagttctgaaccccgccggagcacgtggaccgagtaagcctctgcaccactttccaattcgttgcgtgcatggcctctacatcaccccttggagctcctcgtgcactctaattgaactataccatcgtgtgttggccggaacaggagccgccgacgacccccgccgcatgtgctcgtggccagggtagctccgaccacctccgacgccgacccacacaccgacttgaccgtcgtgacctccccgacgtcactgaccaccccgccggagctctactgccgtcggtaagccttcgccgcataatctatgccgcgggtac

SEQ ID NO: 76719 - DNA, 403 bp, Zea mays
  unsure (1)..(403): unsure at all n locations
ctcagcttctcaccatgtcgctgctagccaagttgtagcagctacctccatcaattatctaatgacatgaacgctccttaatgacacactctgttngaaacaacgtatgtcgctgattctgctctgccttctccatttgtgcactaagcacacgctgtacaatgaggctctcataatgctctgcatcatctgcaccaatctgttcttcgggtgggtccttagtgcctacatcatcagccgcaagcaaagcaagtgtagcttcatccaaatcactagcagaggaatacccaccatcgtcttttaccaccaaaacacgctgattatgacaataacgctgcacgtgtccatagcccttgcatcgataacacagaacatctcttgttctacctgtggaagctactga

SEQ ID NO: 76720 - DNA, 363 bp, Zea mays
  unsure (1)..(363): unsure at all n locations
gagaagagaagaacagggcgaactcgctcggctggtcttatcagttaagttcatatcacacttccaggaaccctgccaagaatggctggacacgatcgaagtatgtgaacgagatttatggaactatacganaaaagaagatcagttgatgactgcagccttcggctcccgaccgaagcgaagattgaatcgagtaatggatgctctacattntgaatatcttgattatgagcgcgtgaacaatgggccgaagggcagaacagaataagagttgtcggtgttgtgggcagacaggccgctagaatgattaaacaagatgaagaanaactgtagaagatgaaattgagccctgagccgacgaca

SEQ ID NO: 76721 - DNA, 420 bp, Zea mays
  unsure (1)..(420): unsure at all n locations
aaaacacgacaattagagcggtctctaccaataatagatctgtcggggaccataattaggggtaccctcaagactcctaattctcagctggtaacccccatcagcacaaagctgcaaaggcctgatgggtgcgactaagtcagggaccagtccattcgacggactcgatcacgcctcgcccgagcccagcctcgggcaagggcagccgaccccggaggatctccgtctcgcccgaggcccccgtccagcgacgaacatacttncggctcgcccgaggcccagtcttcgccaagaagcaaccctggccgaatcgccactccaaccgaccaaatcgcagaggcatttaatgcanaggtggcctgacacctttatcctgacgcgcgtnnctcagtcgacagagccgaagtgaccgcagtcact

SEQ ID NO: 76722 - DNA, 525 bp, Zea mays
  unsure (1)..(525): unsure at all n locations
atctcaagacgaaggggtgaaccgacttanagatgaagtgtcatatagacccatgatgntttgtgtcattattgtagtcgattgtaaagggcataaatataatctcacacacgctgcgccatgtgcctataaatagatgaacagtacccctgtactgttcacgcaatctagcaatcatgaacacattacgctggaattattgttttctgtcaaggcagaggtataaatgcacttaaatattatgttntaatatttaagttcatttaatgaatatacaaataattctatctggttctgatatatgcttctacaatgttgcaagactggtatgcttcngtatatattgggtttataagcgtgatcacgaaggtatgaccttcgtgatatcttgcttgtggccttcgtctccgaagttcattaaatccttgngcagataatgnttcngcggacgaagggcattaacatttaacacttcatgttgccttngtcttaattcatagcatttgagaacaagtnncccacaca

SEQ ID NO: 76723 - DNA, 360 bp, Zea mays
  unsure (1)..(360): unsure at all n locations
ttgagaaagacagtgatttgtatcgcatgctcaacatggaagcaaagtggtacccatcatccacacaaaaacatcatgacgaccgacaggtgaaagtcgcctagagggggggggtggataggcgaaacctganaataaaactttatcccccaactagatcctttgattagtggttagaacaagatgaacaattatcggagtataaaaactaagttcttgctagtaaagagtatagctntcaaataatgcggaagtgataaaccaatacaactaataagtctatgantataaagcaagaaagcttatatgaaaagagcactaactcaagttctttcttgcggagtgttgcttacttaaatg

SEQ ID NO: 76724 - DNA, 537 bp, Zea mays
  unsure (1)..(537): unsure at all n locations
ctccgttctagacgtttctagacctttcanaacgcntttaaacgctaaanagctcctggaagccaaaaacaagaagctcagtacagtgagctntgtgggctttggtttatgggagcagtttagcttttggaaagtccaaaatctaatagtctaanaatgaccaanagctcaaacaaatcaacagatagtccacagtaatgccacttgttctcaacccaataggcataaaaaggatatccagcgtctggtcatgaaataattagttacttacagcatttcctttgacaatgcttcgtcagcctttacttttcaaatgtattatatntatnggtgactatganatggagtttcacattattanggtagaccctcatcgcacaattgtaaatcctttntagaaatataacanacacagcactgatttttataacttgtattananaagacgggtaccagaagggataaatgtgtgttgaataaagatcagaccaccttatgcgagtcactaactacatatatcaagatctttattatagt

SEQ ID NO: 76725 - DNA, 432 bp, Zea mays
  unsure (1)..(432): unsure at all n locations
tcgtgctttgttccttgtcacccaccatgctcatcttgcttgttgccgaagacccatttgggtcctaccacattttggttaggacgtggaaccaaatgccgtacctcattcctcgtgaaattgttgagctcttcttgcatcgccaccacccaatccgaatcttggagagnctcctctaccctgtgtggctcaatagatgagacaaaagagtaatgttcacataaatgagcaacccgagatcgagtagttacccccttatgaatgtcgccgaggatggtgtcgacggtgtgatctcgttggattgctcggtgaactctagggtgtggcgggctaggttcttcctcatcctccttttcttgattatttcatctcccccttgatcatttgctatatcttgaggcggctcatcttcttgatttgcccttcatcaac

SEQ ID NO: 76726 - DNA, 332 bp, Zea mays
  unsure (1)..(332): unsure at all n locations
gagtccgacactgacacacgagcgctngatcgatcatgcatgagccggctttatcactggacgcgctctcagcaagcacctctgtgtcctcgatctggacgatcacctcatanacttcaatcgagttctttgacatagcgtcatcgctcagagatatctaggttgagtaagaagcaaacatgccgccaatagatccctatagcgccactaataagtacaatctataaaagaaacanatatttcgaatatccgtatctcatccaaacgcgttcttgttgctgtgttgcacaaattgtatgctgaatattttaaatgtgntcaaaacaccaaac

SEQ ID NO: 76727 - DNA, 450 bp, Zea mays
  unsure (1)..(450): unsure at all n locations
aaagacactgtctactgcctcgctatttgaaaaatgtctaacagcacatgtcataattttcctaagttcttaataataaaacattaatcatcccaaggtttggggtggttccaccttggcgctatttttctanggtttatctaacttttccttgttctcttaatataaaacggatcccaattattttgtactataccagagtataatagatgttcgtagtgaactatattgaataagtagactaaccaaaatatggnggcatcctggatctttatttaatttaccttttctattnttttaaccttaacacaatgtaataaatggaaactctaccttatgggtgtcaaacaggggtatcttttaaatagcagaggtggcatgactttccaattatctacctcagtaatatgcactatttgttctatattagctttgcaaatcatattatta

SEQ ID NO: 76728 - DNA, 497 bp, Zea mays
  unsure (1)..(497): unsure at all n locations
actcagcttgacaacaggagatggcgctcgtcatcaagagcttccgcacatcctcanacnatgtatgtgaaagactacaagtcccgctcaaagaatggttgctacaagtgtggtaagcccggtcacttcattgctaaatgtccattatcaagtgacagtgacagggataacgacaagaagggaaagaggagagaatagaagaagtactacaaggaatatggcggcgatgcccatgtttgtcgggagtgggattccgacgaaagctctagcgactcctccgacgacgaggacgccgtcaacatacgcgtcaccaatggacttctcttcccaaacgtctgccacangtgcctcatgtgcaaggacggcaaaaagaaggtaaatctaaatccttcactaaatatgaatcctctagtgatgataatgctagtgatgaagaagataatcttgcgacccttttttgcaacctcaacatgcaacaaanagaaaaacttaatgaa

SEQ ID NO: 76729 - DNA, 392 bp, Zea mays
  unsure (1)..(392): unsure at all n locations
acatgtgctaagcggcgatgccacagccagcccatgctattcttatcaattaagcatgcatctagacgcggccttctctttgcaaaatcaactaaatagagtntgtcgtctaatacacnccttaaagctagtgaaccatcacttcttataaagacagacacatctacatttgtgaatagacaattatatcccatattgcataattgactaacagataacaaattatatccaagcgactcaactaataacacattagaaatagagtgctcgaatganatagcaanntttcctaaccctttcacctttgctttgattcccatcaccgaatnatatngaatcttgggaaatcctgttcttgacgtaggaagagaacatcctcttttcccccgcat

SEQ ID NO: 76730 - DNA, 188 bp, Zea mays
gcgcgacctctgccgagggttagacactggtatatcactcgtgctcatggatatgaacgaccctgatagctcctttgaatacagatattctatataccttcgaggtgacgggtcaatgactacgaatattattagtgatcatcttgcatcttctctctgagggagtaccctctgaaataatacttggg

SEQ ID NO: 76731 - DNA, 500 bp, Zea mays
  unsure (1)..(500): unsure at all n locations
gaaacttctggagttcgatgttggctgcttgttcttgcatttcgtcgtcatgataataaanagtctccacacaactgataannaccttctgttatttgggaacatcaaagattgatgggtcagcataactgtagtgtggattcaacaattaagctgtcaaatgcaatggagaatcaagtcttccagccatcttcttctcaataacaacaacaccatccttgaaacggntctcaacattgccaagggcctctntgacctgtctctntgccttcaatagttctccatatacaaagcccatggatggcttcacatctccaaccaaacggagaactttgaacaatggcgcanaacagccaatgtcaacttcacatccttccaaaagctnggattcaatatagtngctgtggcattnttcccttctttgaatcacantcttcagtgagtcccacctactatgaaccaccatctttcgtagctggtccttcttttcttgtatgcta

SEQ ID NO: 76732 - DNA, 388 bp, Zea mays
  unsure (1)..(388): unsure at all n locations
tacttagtgcttaactagtgttcacttagttgatgtctatgctggactcccgagtcagtccatgatactctgcaatggtcataagtagactaacttgtaactacatagacccgagctcagtncaacaatttcaaattttgtgccactcactacanaactatttcataatccccaagttcatttaatctgcaccctggtagctgctcctatttgcatcggttaatacttcagagggtgaatataattngtatgaactcgatatgaaacctaactatngcttctctcatagtcatctacatgtgaaaggtgttcgagccgaacatcgcccgacaaccangtgaagaatataaagtattatngatngtttctataacaactttgatagtag

SEQ ID NO: 76733 - DNA, 539 bp, Zea mays
  unsure (1)..(539): unsure at all n locations
acacctccacgtgttcgacgcgttctgggcgcgccagagtacgcccgcgctctacctctcgcgccccgcgccacgccaagccgtgcccgcgtctcctgctcgcgcccgcgcctataaatcacccacaggcgtcgaccgtactccttcgcgcacgctcgacctcaccggagcccgaaaccaccggcgtttgccccgcgcacggcgtgcccgcggccacccgagcccctgccaccgtagaccggccaacagagcccttcccagccacgcctgacccttggaagagaccgtgcatacctcggtgaagctctccgagcaaggaatcggactttgcttcgccggagaagccagtccacggtcgccggacttcgcccgaccgtcggtgagcgtagaccgggtaagtctctgccccattcttcgattccttgtgcacatagcctctacgtcaccccgtggagctcatcatgccattttatngaactagatcgccgtggttagtcggaacacctgcgcgacagatcacccgctgccgcgtgaccgac

SEQ ID NO: 76734 - DNA, 479 bp, Zea mays
  unsure (1)..(479): unsure at all n locations
gatgatcagagccgaaggcctccacgcagagagctacatcatgaatgtttccacaatgaggacgactgttatgaagaattccatcatggaaactnntgctttgatgatgcttctcctctctcaacagaattgcaggctacaccatggccccagtcttacaagccacctcagctccccatgtatgacggtcatacagacccgaagcaattcctgatgagctatgaagcaaccatatcttcgtatggtggcaatacggcagtcatggcaaaatcttttgtcatggccgtcaagagcgttgctcagacctggtactcttctctttggccagngacaatcacttcttggcagaagtngaaggatatgctgataactagcttcccaggggttcagacanagtcagtcactgctcaagctntatttcagtgtacccaggaccacgaagaatacctncaggcgtacgtccgaanggttctacgtct

SEQ ID NO: 76735 - DNA, 239 bp, Zea mays
  unsure (1)..(239): unsure at all n locations
aagctagaactgaattcgaagcttatagccgaagtccatttcagctcagaattaaagaaagcattaacaagccttcaagacanatgcttgaactttggaataattgtattggacgattaaagaagatattntactctgttggagccagcagtgggaaatttaacccttcggcgganaatttaccccaggccttcgatcatattgaagctgaaatcgaagagcttgacgaagttatagcc

SEQ ID NO: 76736 - DNA, 348 bp, Zea mays
  unsure (1)..(348): unsure at all n locations
ctatgttgagccaacctccggctntgaagatagtgagtaccctaaccatgtntacaaactctctaaggcgttntatgggctcaagcaagccccaagagcatggtatgaatgccttagagatntccttatcactaatggattcaaagtcggaaaggccgatcctactntgtttactanaactcttgacaatgatttgttngtatgccanatntatgtngatgatatcatattcgggtctactaacgaatctacatgtgaagaatntagtaggatcatgacacanaaattcgagatgtcaatgatgggggagttgaagtacttcttgggaattcaagtaaagcaactcca

SEQ ID NO: 76737 - DNA, 438 bp, Zea mays
  unsure (1)..(438): unsure at all n locations
ttcatgcacctgggagcactggtcttncatctggttcagttcagatccagcagccttggcgccaattcaaatcgggcactggtctatcatctggtgcagcccagatccaccagcagcctctgcgccaactcgattctcagagcagtgttactccgagtgaaaccgntccaagtactctctaccttccgcagccatgaagtttcatcggaagtgttctcatcctagactattggtcctttctttagtgtacttggagnttntttatatcatagataatcattgacagatatcttgctatcctaaaccttctgctgtaatggtttaaagctgagaattaatggtcaaatcttgcggtggtcgggtggaacactgatttgaacatactatagctggtgaggttcagcaccttgtcaatggtaaacaggtgctcgtttatac

SEQ ID NO: 76738 - DNA, 460 bp, Zea mays
  unsure (1)..(460): unsure at all n locations
gagcacatttatgactaaccaatgttcattttgagatagacagggttttgttcgtatgccaagtatgaaagcagttggcgctcatatccacacaagacatcatgcaacggataggccactggagctactccacatggatntatttggctcgatcgcttacataagcatctgcgagagtaagtactgtctaagtattgtggatgactattctcgcttcacttgggtggtctntttgcaggacaaattacagacccaagagaccttaaagggattcttgagatgagctcaaaatgagttccgcttatggtcaaaaagatcagaagcgattatgtgacagagttcaagagttcacaaattgaaggcttccttgaggangaatgcatcaagcatgagttctcttctccctacacacctcaacanaatggtgtagtggagaggaagaatagaactctacttgaca

SEQ ID NO: 76739 - DNA, 367 bp, Zea mays
  unsure (1)..(367): unsure at all n locations
ctcagcttctgcgatgtgttgtcgtggtaacggcataagtccgcttacagcttcngcaagcctatgctattggaaagggttctaacaatgttggcttctgtacggttccgaaggaatcttaggttcccttcgttgaccccaccaaatagcataacccctgatttgtatccgcaagatatgacatatttcttcaactcctctttctcggcgtttggcaattcttgtccgagcaaatcttgaaagttaaaatcttcttcttctgaaatttcatcaatntgctctttccccttctcagttgccgtgttcactgtagccacggtagcttcctcttcagccattntcagcagtatattggcaataacctcaa

SEQ ID NO: 76740 - DNA, 309 bp, Zea mays
  unsure (1)..(309): unsure at all n locations
tatatatgtntagatctgatttcgaaatgctgcttatggcattgccctgttatgtgctttggtttgcgtatagttctttatattattattcccttcggacacaaataatgatattgatgttcaagacaacactacaatctccaaatngactacttatttctattagattacgtctgtactatagacttataacctaatgtactttcaagactgttagagtaactgttagtgtatgtgttagtgtatacctctattgtaatgggcattggcccacctaactctaatatatcaatgcattcccaaccctta

SEQ ID NO: 76741 - DNA, 489 bp, Zea mays
  unsure (1)..(489): unsure at all n locations
ctcagcttaatgatagaagtcctacatgacagtctgacggagttnttaagtatcaacatattattcttgaagtatgtacattcggtatatgacaacattaaattcacgtaatcagaaatgttgtgagccaatacattggtatctagctttgcacgaaggcgagagtcttgaccataattggatatggactggttattgtcatgctagtaagatatagtgatataatgtgcatanttatatggaaacagattaatcactaatcaatatacacagaaatgttctagaatattcagtgttccagaatactggttgtaccagaaaattcagaccttgtttatgttgatgttaccaatggatctgaaaattatgtagctgaaaatggtcatanagcaacgtagcggcaccaattatcatcttactantttacattagagnatctgtactaagtgtgaaaggaagcatatagatatttgcattcacattttgatc

SEQ ID NO: 76742 - DNA, 476 bp, Zea mays
  unsure (1)..(476): unsure at all n locations
gcttgccttcgctagtctatcatccgcagtccaacggggtcgtggaacgcgccaacgggataatcttcacagctgtcaagaaaatgctccttgatngaaaaagggcagatnggaccgattgtacctgaggcagctgggcactataacacgatgagtgcagggcgaccgggtttactcccttccgccttctatacggatcggaggccatgaccccgcaagaaataaagcatgggtccccgcgaacagttccgtcagccgtccccgacgtggacgagccaacttcaaaggatctcattgacggagaccgagtcttcgccctacaggccctaaacaaataccaagcccagaccanagcatggcgcgaccacacagtcatcccgagggagttcagcgagggggacctcgtactcgtccgaacagctcggacggagtccaagggcangctggagcccaagtgggaggggcccttatagtca

SEQ ID NO: 76743 - DNA, 328 bp, Zea mays
  unsure (1)..(328): unsure at all n locations
catgtgctaagcggcgatgccacagccagcccatgctagtcttagctattaagcatgcatctagaccggcctcttcttttgcanaatcaactaaataaagtttgccgtctaatacactcttaaaagctagtgaaccatcacttcttctaaagacagacacatctatatttgtaaatagacagttatatgccatattgcataattgactaaccgatagcaaattatatccaagagactctactaanaacacattagagatagagtggctcattagaaatggcaatttacctaacccttttaccttgccttgattccccatcaccgatat

SEQ ID NO: 76744 - DNA, 343 bp, Zea mays
  unsure (1)..(343): unsure at all n locations
tcgganagccgatactctntgatagagtaccgacaaccttcgcaccggttgggtctcgtatgcagcctaacccttcatcatcaatgccaccgaagagaagcacccccggccggtacccgcaagatatagcatanctctnttaattcctctttttcagcttctgtcagctcttggccaactaagtttcggaagtcaaaagtttcatcttccgaagtatcttcggttattccttctttcttgggttntgcgggcgtggtctcttcngtggctgcatcagtttcttcagcggccatgtntagcagcattttatctatatcagcagctatgctctctaaataatatc

SEQ ID NO: 76745 - DNA, 439 bp, Zea mays
  unsure (1)..(439): unsure at all n locations
cattgtgagacagacaggatgtgtagcgcatgccaagcatgatagcaaggtgggactcatcattcacacaagaacatcatgactagtgacatgccactggagctcctacacatggacctattcggcccgatcgcttacataagcatcggcgggagtaagtactgtctagctattgtggatgattattctcgcttcacttgtgtgttctttctgcaagagaaatctcatacccaagagaccttaaagggattcttgagacaggctcagaatgagttcagcttatggatcaagatgataagaagcgacaacgggacggagttcaagaactctcatattgaatgcttcttgaggagganggcatcaagcatgagttctcttctacctacactccacaacacaatggtgtagtagagaggaagaatcgaactctattggacat

SEQ ID NO: 76746 - DNA, 179 bp, Zea mays
  unsure (1)..(179): unsure at all n locations
ctcatcatccgcataagaacataatgacgaccgacggccactggagcttctacacatggatctattcggcccgatcgcttacataagcatcggcgggagtaagtactgtctagttattgtggatgattattctcgcttcacttgggtattctttntacaggaaaaatctcaaacccaag

SEQ ID NO: 76747 - DNA, 391 bp, Zea mays
  unsure (1)..(391): unsure at all n locations
tacctgtcaaagcaacaacacatgccagcacagcagctacataccataccatttacttggcctttcgcatgctngggattggatatgaatggacctttcaagaaagctcaaggaggatacacccatatactgtgggcaattgacaaattcactaaatggatagaattccaacccattgcctctntaacctctgctaaagccgtggaattcatacaaagcataatattcagattcgggatatcaaacagtatcatcactgacttgggatccaacttcaccagttcagaattctttgacttctgcgagccaaaaagcattcagatcangtatgcatctgtagcccatccgagagccaacgggcanngtgagcgagccaacgggaatgatattg

SEQ ID NO: 76748 - DNA, 438 bp, Zea mays
  unsure (1)..(438): unsure at all n locations
tcttcgcatcttgtgaactanacacanacactagcaaacacattagttcacgggctatattgatcatctacaccanaatcaattagtcaaatgggtcgaggtccattatccttacgaatacgaattttacgtctaccataaaactgtccctaattcccgcggggactgttagttgaaccgatattaagttnttttatcaatatgtacatagtatatgtatttatgcgactnntgtataaatattttttatgcgtgaatcatgtcattnntgtttttttgcttgcatgcagtggaaacgaanatattatccanagttttgcgcgcagcaatggaaattcccacgatcttctataattttggatctacatanaatagaaatcgcatgcattcacctcacataattnttggatctaacatannaatangatcgtgaataca

SEQ ID NO: 76749 - DNA, 505 bp, Zea mays
  unsure (1)..(505): unsure at all n locations
gtgagattcttattccacatgggctagtcggcgatgccagagcctacccatattattcttagcaattaaacaagtgttgagttcagctggtgtttcattaaaatcaactaaatagagctaaccctctaacactaccttaaatgctattgaatcctcacttcttctaaagacagtaacacatacatctgttaaaagacagttgtagcccattttgcataattgagaaacggaaagcaaattgtaatctanagaatctacaagaaaaacattggaaatagaatggtcaggtgatatagcaattttaccaagtcctttgaccaaaccttgagttccatccccgaatggtgatagttcgtgaggaatcttcgtnttctcataggtggagaacattcttttctctcctgtcatgtnggttgtgcatccgctatctaatatccaacttgagcccncggatgcataaaacctacaaacaatntaggccatgttcttatgtaccaaacagtct

SEQ ID NO: 76750 - DNA, 481 bp, Zea mays
  unsure (1)..(481): unsure at all n locations
gcttctgcgtaacagctaagagtggaaccgactttaagatgaagaggctattcagacctcgatagactactatagagtattatctatgtaagggcatgaatgtaattttgtaagggctgtgtcccgtgtctataaataggtgaacagtatccccgtactgttcacgctgacttggcatttgctttntgcgtcacgcttgtactgtcatatccttccgattgaaggtacacttatagttcaatgatattcttgtntatgttcagtaataataaatgaatgctcactgtttactttacattcntatatatttatccttcgtcattgattgatgaatctatgaaggtaagtccttcataaccttcgtccacaagtcattatatcctaagggaaataatacttctgaggacgaaggacgttaacgaataacantctctatgttgcccttgtctaactctagcacttaaaacaagtcccaacattt

SEQ ID NO: 76751 - DNA, 265 bp, Zea mays
  unsure (1)..(265): unsure at all n locations
gtgtataaagcttgatagtatgtcatgtttggtgtaggatagacgaaacttgtctttaagtgacgacataccaccttactgtactatctttattgcannattggaacatacatgcacagcatataggacgaactcaaggaggttttatccaaatatgatgtgtggattcttctacattgcttgtgaagtgaatccatagtaatgaagatgtgcagtgttgttctatattgtcaatgcacctgngtttcatgttcttaanatgcgt

SEQ ID NO: 76752 - DNA, 527 bp, Zea mays
  unsure (1)..(527): unsure at all n locations
tctttaatgctctntctatatganacatccacctatactgaacaggaccaccgaccttattctcatatggaagatgtataaagagatgctgcataggatngaagaaacccggtggaaatattntntccaatttgcacaaaagcaccggtgcctctntctccagctgttccatcacatctcttctgatttctttagcacacaactgtctgtagaaatagctaacttcagctaacgttntccacacagcttcggaaatgtacccacgaaacattacaggcatgagcctctccataattatgtggaagtcatggctcttcagtccattcatcttcattggcttcaagttcacagatcttctaaaaccagcggcataaccatcgggaaattaatatccttcatccacttcatcacttctttccgttgcttagattcagacactagtcagctttttggttgcctccgttntctctaagcacttgngttggacgatcacatatcactgctaagtccatgcgtgccttgtcatt

SEQ ID NO: 76753 - DNA, 179 bp, Zea mays
caatgtcactgtgttcgaggcaattacaaacaacatcgaggactggaaaaatcaacttaacttcagactgaggattatcactaaagtttgaaaaatattttcgttggagcttcccacgcacttttattaggaagcattacttgaaatactcacaaattcagcatgtgtgtgatgagaat

SEQ ID NO: 76754 - DNA, 513 bp, Zea mays
  unsure (1)..(513): unsure at all n locations
tgggtaacctgatttggtttgtgttcatcaataaccacatgtgaatagttatgttactgtcgtggctgctctattccattaactgaacaaggcataanaatatatgcatcattgtgggcttgtggcttctctgttcgcatgtaanaaccactatatattctacatgctaataattcatcaatgtagatacttatctntaaataaacacatcttgtagtattgcctcataaggcctctagttattcttagacatggagctgtattnntcttcataaccagacaccagcacgacacgctcatctaaaccaaactagctagtttggtaccccattttttcaagaattttattttttcaagaaattaattatttttcttgaaaaaaggaatctctaagagatgcagttccaaatagacctaatactaaaaactgttacaggaaatgacaattctcactgctgacttcatcagagggacaggaatactagttctacactcaaatcactcatatcttac

SEQ ID NO: 76755 - DNA, 464 bp, Zea mays
  unsure (1)..(464): unsure at all n locations
cacgtgatatggttgactaacgtacaatctcgaaaagatagaccttgtgcagcttgttatgcatgtaaacaggtgggaggagcgcatcacagcaagaatgtgatgaccacatcaagacccctcgagctgctacatatggacctcttcggacccatcgcctatctaagcataggaggaagtaagtatagnttagttattgttgatgactnttctcgcttcacttgggtgttctttttgcaggataagtctgaaacccaagggaccctcaagcgcttcctcaggagagctcanaatgagtttgagctcanagtgaagatgataatgagcgacaacgggtccgagttcaagaactttcaagtggaggaagtccttgaggaggaanggatcaagcacgagttctccgcttcctacacaccacagcaaaatggtgtggtagagaggaagaacatgacgctaatcgacat

SEQ ID NO: 76756 - DNA, 496 bp, Zea mays
  unsure (1)..(496): unsure at all n locations
gtgttctgcttctttatctctatatcatactagcggtagacccacccaatgaaagcaggggacagagaatangtttctggttggattcctgcatctctatcctttcggtcatggattctcngcttgntttaaaattggagactacctgcataatatgccgatgaaccatattntgtcttgactttctaatttttctgcattatttattgtcgcatatgcatctgactgaatcttgattttagtaatttcaaataactggcattnggttgatggtattagaggttatgggtaaatcatgttgtgtacaagtggtggtgcgaatggggcatatgntcctttgtagcagatgtagagttctctgatttaattgtaggtntacanttattntataatttagaaattgtatggcaactacacctatgagcagtgtacaagatgtagaaccctttttgtgcctagctgagattttgaactcaaagtctttactctactgtag

SEQ ID NO: 76757 - DNA, 468 bp, Zea mays
  unsure (1)..(468): unsure at all n locations
tgtcattttgagaaagacaggatttgtatcgcatgccangcannggaagcaagtggagtccatcatccacacaagaacatcatgtcgaccatcaggccgcttgagctactccacatggatctattcggcccgattgcttacataagcatcggcgggagtaagtactggcttgtaatagtggatgattattctcgcttcacttgggtattctttttacagganaaatctcanactcaagagaccttatagggattcttgagacgggctcaaaatgagttcggcttaaggatcaagaagaatagaagcgacaacgggacggagttcaagaaactcacaattgaaggcttcttgangaggagggcatcaagcatgagttctcctcttcctacacgccacaacanaatggtgtagtggagagaaagaatcgaaccctattggacatggcaagaaccatgcttgatgagtaca

SEQ ID NO: 76758 - DNA, 319 bp, Zea mays
  unsure (1)..(319): unsure at all n locations
aagcagggcttcgtactcagtaatattgtttgtacaactaanatcgagtcttgctgcatagcaagttntaactntggatggtgagaccaacacagcggctgctcccgctccgaaggttccccaagacccatcgcanaacactgtccatacttcggcatctttatttgtttcttcatcctgagcccctagcgtccagtcagcaatgaaatctgccaacgcttgagactggatcgaagatctatgcacataatcaatgcanaattcattgagctctgcagcccattttccaatccgtccagtagcttctctatttctcata

SEQ ID NO: 76759 - DNA, 551 bp, Zea mays
  unsure (1)..(551): unsure at all n locations
ttcagaaaagtcctagttactatnttntggatgcatagttngtgagttatgaataattcaatcaaccattgtgcctgctgtctagaanatantagcttgtgttaaattgattgctctagttcattttgtttggctaggtaggattagtcaatccttgatccttgattgatgaaaacttgttgcatatgaagtgtttatcgaaatgccttgttgtattggattaattcatttccttattaatgttntctctagacttagtaattgggaagaaagttaatgctttgatgaatgtatttgagctggtggctatttacgccttgtatgtgtatagtgaagtagtaatgcgagtaagtaaaattagtacttcactcatctangccgtaatgctgttcttattaattgtaatcttaccaaaagcttatgatctntaatgatgtttggtctgataagtcgatgctttgcttagcgaacaattacatgtcttagatgaattggtntatttgtgtactccatacacctctaagtagtaagtcttatatcatcttgtataa

SEQ ID NO: 76760 - DNA, 448 bp, Zea mays
  unsure (1)..(448): unsure at all n locations
tcgtcctaatcgtacttcatgttcacaatctgggtccgaagatatctgtncatacatttcacttgtaagatattggcanatcatgtctttgaggaccttcngaggacgaatgcccccacattaatgaacatgggactatccgtactatcaaagtgcattccattttctactatctcccatatactnggatggagagagaacaagtggtacgcattntgtgactccaaaatccatagtcctctccatcaaagtggtggggtntaccgaggggaatggaaagcaaatgagcatttgaactttgcggaattcgagaataatcaaaggagacgtttgatttaaccgtcttctcttctcgtaatcgntgtcgtcatccttttgggaagaggaagatttgtcgctgtcgtagtagactatctccttgatgcgccttggtctcttcttcctctag

SEQ ID NO: 76761 - DNA, 346 bp, Zea mays
  unsure (1)..(346): unsure at all n locations
actaacttctagaggtcaaatgtgcccttgctagcctcgaagccatatagccgagtgatcattgacttaagaagggccttatgggaattatgttcttcttggacctctacaagagaatatagtgactcagtacactataatctggagatatggagagacaaagagctcacccttcttctcagcttgngtacaagccttggttttgttggtagattctagctcttttgatagaatttctacagcagccttaccctgatcaatggtgttcttgcagcaatccgggccttttatgtcaacaatttatattctagnttcatttctcattctaaagattttaactacttat

SEQ ID NO: 76762 - DNA, 446 bp, Zea mays
  unsure (1)..(446): unsure at all n locations
cgtgagctagtcgatgatgccagagccaacccatgttagtcttatcaattaagcaagtattgagtttagctctattaanatcaactaagtatagctgaccctctaatagtcccttaaaagctactgaatcatctcttcttctaaagacaataacacctgtatccgtaaaaagacagttgtaacccattttgcataattgagaaacagaaagcaagttgtagtctaaagaatctacaagagaaacattggaaatatagtggtcaggtgaatatagcaatttacccaatcctttgancaaaccttgagttccatccccgaatgtgatagctctttggggatcttggttnttctcgtaggaggagaacattcttttctccccagtcatgtggttggtgcacccgctgtcgatggtccaacttngagccccggatgcataaacctacaaa

SEQ ID NO: 76763 - DNA, 245 bp, Zea mays
  unsure (1)..(245): unsure at all n locations
gagaaagacagagtttgtagcgcatgtcaagcaggaaagcaagntgtgcccaccatccacacaagaacatcatgacaacggataggccactggagttactccacatggatctattcggcccgatagcttatataagcattggcaggagtaaagattggcttggtattgtggatgagtattctcgcttcacttgggtattctttttgcaggaaaaatcatagacccaagagactttaaagggattc

SEQ ID NO: 76764 - DNA, 462 bp, Zea mays
  unsure (1)..(462): unsure at all n locations
attccttgatggcatctangacttgtctaacctagttgggataaccgccaacaaagcgagtganaaagcttaactcgggtcanacctgacaagtcttagttnntaagctttagcacttaaattcttactttntatgcaaatattggttcttgaaatatgcatgaggtactgcacttanggggagtattcaaaactcaaatcactcatganaacccctagtgcaagccaaaatgcaaatttcaccatttgcctattntctctaaaaattatctagcctatnggcaaaatatttgaaaagtatatgagggtgccaatacctgtcccaacaagtgttattttgtgtgattataagttgggaatttggtttggtgggagtagatagaaaaattcaaaattntcaaactcccctctgtctgggctcaccggacagtccagtgtgcaccggacactgcactgtgcaat

SEQ ID NO: 76765 - DNA, 414 bp, Zea mays
  unsure (1)..(414): unsure at all n locations
tctgcttcggccaaacgggtgcttcagccactccagatgaggccgcatcgacgagcataatagtgatagtccttacccaccggccacgctatattgagccggccgtggtgcctgagnttggcggngaaacttcttcagctactaaaccaaaggagcccattcctcctacgcagaaggctgaagatccggctacgatgccgaaggtaccttcatccaagctagctgagtcanagaccgataagaataaggccgaagagccaaaagttgaaggaacaaanatgttagaaattntaagcccttcagcagaagtaacagtgccgaaggcacanaaaagctttgcggcaactccgaaaagaagaaagatggcaaatgtactatatgtgctagaaacagtaaaggctntaagctctactt

SEQ ID NO: 76766 - DNA, 360 bp, Zea mays
  unsure (1)..(360): unsure at all n locations
cgcttgcactggcccagtatcttcacacagtggtcgtcatcccagcagtccataacatgctgaanattaaattattccatatgcttatatatatatagctaggtcactctctagctactaatgtgtatgtaataatgatgaggaatatataatacacgcatggatatgtacgtacttacccttatgagaacagcgtctgcaggtggaatagactcatacatgtcaccggcgacgaactgcaccgtgctattgatgatacgatcagtacctgctggcgcagctggcggcaccttgtcgatcacttgtttgaggctagcacagtgcatctgatgtgcggaaaggcgttagcgatgggcatag

SEQ ID NO: 76767 - DNA, 274 bp, Zea mays
  unsure (1)..(274): unsure at all n locations
tggatagcaatgggtccctgatccgaangtatcttcatgcacagataggcatgatgaangattgcttcnaatgcattaagggtaccacgaccaataattgcattgtaagggtattccatgtcaacaatgtcaaacacaacttgctcagttctaagtgtgttgatgaacccgaaggtcactgacatggtgatcttaccgagtgctacaatctgtctttcttcgaagccacatagaggatgtgtatcatcatgaatcctatcttctgcctcttgat

SEQ ID NO: 76768 - DNA, 291 bp, Zea mays
  unsure (1)..(291): unsure at all n locations
tctaggacgactggaccttcacgtactantactaccatggattggtagcctatcgcctatttggagttcgataatctatacagcatagcataagagagtatgggccaatgacgcccctctcgtttttggtatagtgcgcactntgttggattatcacacacacagaaaggctactctgaacgggaactccgagtcgagattctagaacgattgcgaattggaagatgctatagatgagatgataaatgtgagtaaagtgtgcgtggaaaagtcatgtgaacaatggaccat

SEQ ID NO: 76769 - DNA, 501 bp, Zea mays
  unsure (1)..(501): unsure at all n locations
aataccagggcgtctcccactatatagtatgcttctaacacatttaaatttctcattttctaagtcatgctcacttaatttggcactaagntgagctatgtgatcattttgttgtttaattaaagctaggtgatcatgaatagcatcaacattaatatctctacatctagtacaaatagtaacatgctcaatggaggatgtagagggtttgcaagtatttaattcaacaatcttagcatgcanaatatcattctcatctctaagattggaaatagaagcattgcaaacatctaaatccttagccttagcaatanattttcattntcaattctaaggttggagacaatgtcatggcaagtgcttagctcactagttaaattttcaattttctctacctcttgagcataagcatntttaactntaacatgctnttttgtttctttaattaagaaatcctcttagctatccaagagctcatccttctcatgagtagcactaatc

SEQ ID NO: 76770 - DNA, 535 bp, Zea mays
  unsure (1)..(535): unsure at all n locations
tgcgaggaacacgtcngtgggtctcggctcgaagcangaatgaactctggngacgccttccttcaatnggtacctcaggcagccaaaattggcgtaccgtcggagagggaacggtggcacctggtctccaggggcagcgaagggatgatcctggctatgttggcgttaggagtcgtcaatggtgatgcttcttcttgtgcattgttctctgactgcctggaagccaccatcgtccagttgcttgctgcagcctgcatgtggacttaccactgaaatggagtacatgaggaanaaatcagttggaattatggtacangtaacaacagagaagccaagttcagtagctagatgatgatggtactcaagttattaccatctgatcaggaatcattcaatgaacattaccactgtaatcgatcgcanagccaagtttcagtagctagatgatgatggtactcaagttattaccatctgatcanngaatgatcaatgaacattaccaatgaaatcgatcgcattgcangtcactaacact

SEQ ID NO: 76771 - DNA, 480 bp, Zea mays
  unsure (1)..(480): unsure at all n locations
tttgtaagggcaaagctcccatgcctctttatatctagggttatantttgtatcctggctggtatcttgaggataagaatatgaaaattcatgctaagaagactcattctgttcctcaccatgcttntatttataagaatgaggcttctagctctatgcgttctacacatgttataatgcctaagaagaaaactcctattgcaatgatcataacatatcatttaagactttngatgcttcatatgtgcttactaacanatcangcaaagtagttgccatatatgttatgggcacagaccagggcttcaagacttgttgttggtacccatgtacttgttctaatgtnaaggacccaagaccgntatgtacctaagaacaggcctaaatttgtttataggttatngcatcggggctaagtggatcatcacagcggtgccaaacacatgatgggagaaaaatgtctctctacagaaaacaaat

SEQ ID NO: 76772 - DNA, 446 bp, Zea mays
  unsure (1)..(446): unsure at all n locations
tgtagatgaagctgtcaaagctcagctcagccaagcggatgctgtaagtgacattgtctattgctggtaaaacatcaaaaaagcaaanatggtggacatggaccaaggggccagaactgagaactagactgattttgcatgtaaagttccactgagaactagactgatttgtatgtgaccaccgattctggtatctgatctttgaattattgtcgngttgttgcagacggaaggaaatcaacagcaccaccagcaccagaaacatccatgtggatcttatagagcttctttggcacatttatttggtacatttcttggataagctcctatgatgctatacattcttttagattgatgttntagctttgtatgatatgcagatacacactcannggataagctctacgatggtttcattgcttctttctttcgatcattntaactat

SEQ ID NO: 76773 - DNA, 251 bp, Zea mays
  unsure (1)..(251): unsure at all n locations
atgtcctacttacttatactntattgtcccgcattacttaattganacctaaggattgactagctntatatntaccttgtccttgattaccttctgggttataatgtttagctttatgctattgctttaacttaatcaacgaacatgatgtgaatatttatgtgtcgggtaccataattaggggtacctccaacactcctaaacacgactggtaaccaccatcagcacaaaccgcatagactgatgtgcgc

SEQ ID NO: 76774 - DNA, 418 bp, Zea mays
  unsure (1)..(418): unsure at all n locations
ctctgcattgtcccaaatctggcaacaaatgggccccttggtcagaaacaatggtctgaggtaatccgtgcaaacacacgatccggtcaatatacaattctgcatacttctgagccttatcagtggtgagcacaggaagaaaatgtgccacttttgtcagtcggtccacaataacccacatcgaatcatgatgacgagaggtgttgggcagacccacaatgaaatccatgctgatgtcatcccacttccacgaaggtatagacaangggtgcanagctcccagctgattcaagtggctggcctttatcctctgacaggtgtcacattctgatacatactgnngctatctcctcttcattttggtccaccaatacaaaggcttcaggtcatggtacatcttggtgcttcccggatgcat

SEQ ID NO: 76775 - DNA, 330 bp, Zea mays
  unsure (1)..(330): unsure at all n locations
ttatctgtgataatcaccatttaactatctnctgatgaagtatatgatgataactgcttggcaagaacgaaacaatattggtattcgcctatgatccatcttcaacaacagataatactgctctcatacgaagaaatcattcggagtagagaggatacaacaggtctctacaagatcttcgtatttctatcacaaattatcatcactagtagtctagtgggtaagacatatgaactttctggcttcgaggaccaaggacatgttaatgtctaacttatcttcaagcttcctggtgatgtgggattcaaagttatttgtctactcttctca

SEQ ID NO: 76776 - DNA, 490 bp, Zea mays
  unsure (1)..(490): unsure at all n locations
tttgaacgtactaagcacatgccgggaanaattgtaaccggtaaacctagtacctgagtgtaagccggcgtggactntatctctcatgcgacctgagactgngtctcccatgctagctatggtgggacaagtgcggtcactgcacggcggcagccggggtcagtggagcattgtatgccaaggcggtgaggcctggacgccaacggngaatcnatggtgacggttgacgtgtgtggggtcagagtgctctgacatgtagtgtgtttagaattaccttgcaaggataaaactcgattcgaatcgtctgcttctcgtagctaatgagactgttngaccncttgtactgcatcgagtaagaagtgaaatganggtacataagacaattgttgattgactaaatgcttgtaccatgtatgcttagaaggagcanacctagctaagataatgatgctagaatttgaaagctaacaaataatttagaaacagctag

SEQ ID NO: 76777 - DNA, 200 bp, Zea mays
  unsure (1)..(200): unsure at all n locations
gctactcctccctgngaagggtcgttcatcatcgccaagattttgaagcccggaacatacaagctggccaactatctatgcgaggtctacagcaacgcttggaacatccgacagctacgtcgcttttacccttaagatgttttcaagtcgttcatatacctcgttttctatacatacacaaataaagtctaaccgtcaag

SEQ ID NO: 76778 - DNA, 492 bp, Zea mays
  unsure (1)..(492): unsure at all n locations
tcccgagcgacgcccanagcctgngcgaggtctcattcgcggtcgatggtgctggctacacgattctctctcctttctctctcacgntaacaacgcgtttctctctccctctcgtgggcaacggcgatggtggcggactggataaggtgagaagaagaggtcgcggtgccccgattatagcacgaggaacgtggatttcaggcttaaatggaatccgcactatccggttgtgagccatggtgggtcctagtttgctacgagctcatccgtgaaggaaggaggtgaccgacttcatgcgcgcgacacggcaagggatccggcacatggccccacgcgccggtcatgcatatgaatcggaacaccggcgacacaactcatgcgaggatcagctggttgctacggccgaggtccgcggagttcgccccaactaccacncgcgaagcgagaggagaatggagggaagaagatcacctgactgaccaggatccacac

SEQ ID NO: 76779 - DNA, 338 bp, Zea mays
  unsure (1)..(338): unsure at all n locations
ttcactttgagaaagacaggatttgtagcgcataccaagcaggaaagcaagttggtgcccatcatccacacaagaacattatgacgaccgacatgccactggagctactccacatgaatctattcggcctgattgcttacataagcatcgacgggagtaagtattggcttgtaatagtggatgattattctcgcttcacttgggtattctttttgcagganaaatctcaaacccaagagaccttaaaaggattcttgagacgggctcaaaatgagttcgccctaaggatcaagaaaaatangagcgacaatgggacgggagtcaagaactctcaaatt

SEQ ID NO: 76780 - DNA, 494 bp, Zea mays
  unsure (1)..(494): unsure at all n locations
gcttcacctagagaanattcacttgagtgccgctaanagaatcctaagatatttgaagtatactcccaatattggtctatggtatcccanaggtgctcactnntgaattaatggatattcggattcgaactatgcggngtgcaaagttgatagaaaaagcacctccggctgttgtcaatttcttggtagatctcttgtttcatggtcttctaagaaacaaaattcgngtgctctatctaccgccgaggcggaatatatatcggccgganattgttgtgctcaactattatggatgaaacanaccttattggattatggaattattntcaagagtgtgcctctcatgtgtgataatgagagtgcggtaaaattggctgccaatctcgtccaacactcaagaaccaagcatattgatatacggcatcacttcttaannggatcatgtggcaagggagatatctctatntattccatcggcacggatgatcaattag

SEQ ID NO: 76781 - DNA, 253 bp, Zea mays
  unsure (1)..(253): unsure at all n locations
tctaactaatgttctattctgataagatagaccttgtgcatctcgtcaagcanggtaacaagtgggaggagcacatcacagcaagaatgtgatgaccacttcatgacctctggagctgctgcatatggacctcttcagacccgtcgcctatctgagcatatganggagtaagtatggtctacttattgatgatgacttttcccgcttcacttgggtgttctctatgcacgataagtctgaaacccaanggacc

SEQ ID NO: 76782 - DNA, 397 bp, Zea mays
  unsure (1)..(397): unsure at all n locations
cagcttcttgacttccatggacagcaatgggcccttgntccanaggtatcttcatgcataagtatgctgggtgaagtattgcttcaaaggcattaagtgtccctcgaccaatgattgcattgtacgagtattccatgtcgataatgtcaaaaacaacttgctcagttattgtgttgtgaacatatccgaaggttactgacattgtgatattgccaagtgccacaatctgcctttcttcgaagccacaaagagggtatgtagcatcatggatcttgtcttctggttcttgcatatgcctaaaagcctttgcaaatatgatgtccgctgcactgcttgtgtcaaccagaacattgtggaccagaaatcccttggtgacacaagatataaccatagcatc

SEQ ID NO: 76783 - DNA, 471 bp, Zea mays
  unsure (1)..(471): unsure at all n locations
tagtgcgtncactctaacatgatatcaaaaccagaggtctctagtttgaatcctggcagaagctctatntgtgcatgcatccatttatttccaccgttgcgtctttccctatggctgcacgtgagtgggggtgttgaagtgtatatgtggattgactaccttctcccattagcaagcatttgtgttgaactggttagtgcgtccactctaacacaaaagactagactagggcatgtttgggacagcttaattctgaagagcttttttataagaaactagctntctggataatccagctgtcatgagaatctactggatgtattatatgagtgtttgcgatctttgattttngtaagagactgtctatgctgagtgagaaatgacctgaatgcctctagaccctgtcaatgtcatctctttgagctacattattactangtagcactttacatntttcgctattactaacta

SEQ ID NO: 76784 - DNA, 438 bp, Zea mays
  unsure (1)..(438): unsure at all n locations
ccttcggattgtatttccatcttgtcataagagaataccttcatcccgaagccgaagctccactctataataacccatatcacactaganacatatggttagtcgtgtntttgaggaccttcggaggaagaaggcccgcaacagtagcccctcgcaatattaatctgtttctttgtgacaaatctagactgcgacgtgaacgaaggcctttagtcaaaggtccgcaaaaacaccttcccttcgctagaatagcgaatgacactgacatgcangacccaccaaaccgtggggcgctggacatataaataggagcttgtattgaaagcatttctttatgccattcagttgcttgcattgtgcttgtcattttaaactatattgctttgtcgagtttaattgaatntcaagcttcngcatttcaacgaccatcatcttaat

SEQ ID NO: 76785 - DNA, 453 bp, Zea mays
  unsure (1)..(453): unsure at all n locations
tgatctatcaattgagaatgttctttgcanaaggacatcaccaatcacttcaccaacatataagaaagtaggataattcgtagatctaattntcatcttgatttaactctgatntcatagntttctcataggttataacttccaacaatctatgccagaatttccaactaccggtcaaaagttatgggccaaacttgaaacttttgaccttattgctaatccactattttaaatngatatttagaaattttcattatgcatattcactcatctagaatattgaggtcctttcacctaacctatgtctttcaaaaacatctctaaggaacattccgatggaaaacaagcctttgggtctctaaagaaatcgtatgaaacccctctttgccctataaatgagtacatatatgggaagtggtgacattggtagcatanaaaagattcaaaatactt

SEQ ID NO: 76786 - DNA, 471 bp, Zea mays
  unsure (1)..(471): unsure at all n locations
ctagtggctattggcgccggcaagatgataatgcatttgttgaggtggagtntgctattacgatgctcacaggaatttgtctcatggtagagtttgtgatccaaattataaagaaggtggccaagttggcgagcgaaaaagcgtagttacctcatttttacggattgttccctactcagtttaggttcacttctattaatataattgtaagccacgaaagatagttatctcattgtaagtcttctacgatcttgtaaccacccaaaatagtgagaatgttgcttgacgacgccccgtgttttcccttccgctttgagagattntcacgttaatatatgtctctctttgttgactacttgtgtcgattgatcatacatcgccgcctgctcttactgatgcttctcatttatatgccttacataatacaacatgatacttaaaagcaaaaagtgctgatttagtgcgtaaaat

SEQ ID NO: 76787 - DNA, 275 bp, Zea mays
  unsure (1)..(275): unsure at all n locations
atcattttatcttcatctcatgccttagataccagcattntatcgtcgacttatgctttacagatcagcatattgtcttcatctcatgctttcaacagcgaggtctgatcatattctggtaagtttgaaattatttgatcggcgacagattggacgtcttggagatggctcttgactgggcgtcatttcgctatgcgctccaatgcttctgctgaatagacattgcagtcagtacctatatttggctcttctctgatctctatcaataacttctt

SEQ ID NO: 76788 - DNA, 510 bp, Zea mays
  unsure (1)..(510): unsure at all n locations
gcatgagcgcttncccttggtcttggtcttgcttggcttgcccttgcgaccatattagcgccgcttgaacctcttgatgatgagagccatctcttcatcgntgagtccggccgcctcaatntgtgccaccttgctaggtagcgccttcttgcttcgtgttgccttgagagcgagaggttgcggctcgttgattggaccattcaaggcgtcgtccacatatctcgccttcttgatcatcattcgcccgctaacaaatttcccaagaacttcttcgggcgacatcttggtgtacctgngattntcacgtatattggtcaccaagtgaagatcaagaacggtaaatgaccttagcattaggcggacgacgtcgtggtccgccatcgcgtgtcccgtacttttatcttgtgataagggtcttgagcgattgatgttgcgttggctctcgcccttatattggaaccgtncagctcgccttcacaactcatctgggagtagggacgcgtccctatg

SEQ ID NO: 76789 - DNA, 225 bp, Zea mays
aatatcaagctttccaagaatgacatgagcatacatcaagagaagaaagccacagctcatgacaagtgtctcaaccacgcctccacatgctccacacaaggtaacaaacaagtcactcttccaaataagagaagatgcgcttagaagtgtatcaatgtcatgagaagggacatgagattaagtcatgtccctacacacaggatagtggcttaactttagaaagaa

SEQ ID NO: 76790 - DNA, 230 bp, Zea mays
  unsure (1)..(230): unsure at all n locations
catcaaacaataccggcccatctgtgttctaaatgtagatatcacaatcttcactaaagtgctcactaatagtcttgctacagcggccaagggtctcatgcgtgggaaccacactggtttcttgtaaaacagaaacatcttataaggggttgtcatattgcacgaagttgtgcatgagttgaaaactaanaagaagaagggtctcctgttgaaaatcgattttgaaaaag

SEQ ID NO: 76791 - DNA, 290 bp, Zea mays
  unsure (1)..(290): unsure at all n locations
gatagtgagtaccctaaccatgtgtataaactctctaatgcgctttatgggctcaagcaagctccaagagcatggtatgaatgccttagagatttccttatcactaatggattcaaagtcggaaaagccgatcctacactctttaccaaaacacttgaaaatgatatgtttgtatgccaaatntatgttgatgatattatatttgggtctactaacgaatctacatgtgaagaagttagtaggatcatgacatagaaattcgagatgtctatgatggggggagtgaagta

SEQ ID NO: 76792 - DNA, 506 bp, Zea mays
  unsure (1)..(506): unsure at all n locations
atctccttaactcggcgtatgtgactctcttaccaaaaaaggctgaggctgtggatgtaaaagacttcagaccgattagtttaattcacagttntgccaagattctcaccaagattctggccaataggctngctgcaatcctccctactntggtctcccccaatcagagtgcattcatcaagggaagaagtattcatgacaattttatgatggttagagaaactgcaaaagcgattcacaggcagaannatcctagaatcttgctgaagttagacattggcaaggccttcgactcagtttcgtggcctttccttcttgaagttctggaaacatgtgngatttggtctattctggcgtaatttaattgctaagctattgtgttcctcctctactcgagtgctagttaatggngaaccaggagatctcatttgtcaccagcaaggcctgcggcagggagatcctctctccccaatgctctntatattagtaatggatgtgctgaactc

SEQ ID NO: 76793 - DNA, 516 bp, Zea mays
  unsure (1)..(516): unsure at all n locations
tgagaaagacagggattgtagcgtatgtcaagcatggaagcaagttggagtccatcatccacacaagaacatcatgatgaccgacaggccgcttgagctactccacatggaactattcggctcgatcgcttatattagcatcgttgggagtaagtattgtcttgtaattatggatgattattctcgcttcacttgggtattctttttgcaggaaaaatctcatacccaagagaccttatagagattcttgagacgagctcaaaatgagttctgattaagaataaagaagaatagaagcgacaatgggacggagttcatgaactctcaaattgaaggatntcttgaggaggagggcatcaagcatgagttttcttctccctacacacctcaacanaatggtgtagtggagaggaagaatagaactctattggacatnggcaggaccatgcttgatgagtacaaacaccgggacaaatttggcggaggaataacaccgctgctctcatcaccggtata

SEQ ID NO: 76794 - DNA, 348 bp, Zea mays
aacgcccgtacgcggcgataacatacagttcggccaacgccaatggtaacgtctgctcccgcgtagcctggtcctcaccaaaaatttataacatgtagctactggtaccgcattatttatgcccggccatcgtcgtcgccgattgcttgcaccgcatgaacagctatactcttggccgccccacacgcatgcctgcgatcgatagacgatgaactctcgtcgggaggaggagatggtccaaacgatgaaacgatcgacgatctcgatggcattaggcgtgaactgctggtgtctgtacttggtcagtttcacgggggtgcggtcgatgccggccggtcatgtgcactc

SEQ ID NO: 76795 - DNA, 285 bp, Zea mays
  unsure (1)..(285): unsure at all n locations
ctgagatcaagaatatntagttcattcctcaacatgcataagcgggtcttatcaagaggcttagtgaanatatccgctaattgatcttccgacctcactccttctaaaatgatatctcctttagcaacatgatctctaaggaagtgatgacggatatcaatgtgcttggtgcgagaatgtngaacaggattattagcaattntaacagcactctcattatcacacaacanaggtaccttttctagaactacgccatagtctagaagagnnttgttcatatataaa

SEQ ID NO: 76796 - DNA, 517 bp, Zea mays
  unsure (1)..(517): unsure at all n locations
actcagctgnngacccgtaacctatacactggagttgccacctcacatgtcagcagttcacaatgtgttccatgtatctcagctgccganatgtgtncgcctacccactgaagtgctgccagaactagatattgagatataaccagacttgtcctaccaagagtaccccgtccaggtattagatcaaaaggaaagatcaactcgggcgatgtcgatcagaatgtataaagttcagtggagtcaccattcagcagaggaagctacatgggagactgancgatttctacgctctcgctttcccgactttctgcccaaaggagtctgtacgtaacctcaaaacctcacccccaccttgctcttttgaatcaattataagaaaaacttagataacaaggatagtctaagttgtggatttaacttaagaagggcttccttctgaagttgcaaagagaatgacattcgaagagcagttaataagagagacttgagtataaagaaagggtagaacacccacaca

SEQ ID NO: 76797 - DNA, 442 bp, Zea mays
  unsure (1)..(442): unsure at all n locations
ggattacgtaccgactcctctgggcagaaagtctgggaagcgagaacgtataatatcctcagtcttccacgtagcctcctctactgaatggtgactccactgaaccttatacatcctgatcgaccttgcccgcgttgatctcttcttttgatccaataccttgacgaggtgctcttgataggacaagtctggttctatcttcaattctggttcaggtagcacttctgtgggcaagcggacacactttcgtagctgagatacgtggaacacatcatgaactgctgacatatggngtgtgcacttcaattgatatgctacaggcccacangtttctatgatctcatanggtccaatgtagcgagggatgtaacttgcccttgattccaaatctctgaacaccttttgtgggtgacaccttatgataaacatgatctcccacttc

SEQ ID NO: 76798 - DNA, 455 bp, Zea mays
  unsure (1)..(455): unsure at all n locations
aactacttcatacttcgcctgcgctgcgaatctncacatcatatcaaacggcagaaccaagtccgcgatgcagcagtcgtttggtgaggatggaacattgtcaaatagcgatcttctgttggcatatacattttactctctattctaaattatacatttgttagatgcattgtctttactaaattaaaatatcttataagttagaatgcatcttgtccaacaggtagtcaataatggcagacgagttatatttggnccaattacatttgactccgtgtcccgagaactcgtttttaagaatcctctattgaccaggaatctttttctcgtaattgtggcactgttatttctatagtcatgagaatcccttcatttntanggctagtttgggaaccctattctaccganggattttatttntctatnggctacttagtacatcaatctccttcgga

SEQ ID NO: 76799 - DNA, 429 bp, Zea mays
  unsure (1)..(429): unsure at all n locations
ctcagctantacttctctttgcaaacatccgttcagaacgcatgtgcatgtgctctntgtttttntacttattatacatggaacanatgaatgatgagttactctcgtcgaaaagtgccccaacagtaaggtagatcaagtgcactgcatatacatgcatgagaaataatcttactacattagctattgcttgatgccatactctaaacaattgactcagaacagtttaatctaattcaaattgttcagtctttgagctgtggaattaaaggcgaggattccatgtaacattctggagggtcaggtatacgtagtgtctgaacctgaacctcatcacttgttttcgagcatctgcaccaccttgatgcgtggtgggtcgcaacaacaggttctgctcgatgcaccagagcgccacgcgcgcgaaccggt

SEQ ID NO: 76800 - DNA, 357 bp, Zea mays
  unsure (1)..(357): unsure at all n locations
ctactactctngctggctcggtcactctataggtcagngatcctagtgttgatgatctgctgcacgctcgtgaagctaaggtcccactatgtgtcgccttgtgcatgagatataatcctcctctagggctcaagtctgctctcaatattgcctccaccagtgtctcgtcatttgatggcacctcagcacctncggctttgggatttcctttgttcctttctaaccttcaggtgagttgatccctaccctgttttatcttcgtcaatagatgattcctttgctaattcttgtattggcagaatggtctgagctctatgtcagctcaagtgaggtcgtgtggtgcccctgtccccaatc

SEQ ID NO: 76801 - DNA, 327 bp, Zea mays
  unsure (1)..(327): unsure at all n locations
ctcagcttgtatggatttctgctcttcacggtntctcatgcaagctcacaatgagactantttttcacggagtntttaacagtatatcaacatattctttcctcacatgttttactacatggcttttgagaaattaatattatgctgtacctncagatgaggnttttagaggagctaccaaagacagagtggttcattaatcacaaattcacaataagatattccacaatccttccattntttctccattattctcgtttacatttcagtttaacagcacgttcgtggagtctgccgcccggcggcgatgactactatggatactat

SEQ ID NO: 76802 - DNA, 264 bp, Zea mays
  unsure (1)..(264): unsure at all n locations
tctcagctgccgctgtcatggtccttctctatactgacaatgtggaccgtggcatctttcttcactacctgaaaacttgctggtgtacataatgtggtccatgtgtctcagntgaagaagtgtctttcggttccagaccgaaccatttgaagtacagatgttgtcctatagccagacttgacatattcagagcaccctattcgagtcttggatcaaaaggacaggattgcctgaatgaaaactctcaagttntacaagatacag

SEQ ID NO: 76803 - DNA, 186 bp, Zea mays
tgagtttcttttgatcttaaagagggaatgcattagtatagtgttgataatgcttatcacgatcttattgttgattatttggtaataaaacattacgtgtattaatggtgctgatatggtataattgtcgatgcttgtgctttaattagtatattattggtgtagctgacagggaaatgtgccctt

SEQ ID NO: 76804 - DNA, 393 bp, Zea mays
  unsure (1)..(393): unsure at all n locations
ataatacataaacctcattgtcgcacctttaatctattatacgccaagctatcggctaggtcgtcttttgatagcaccgagagcccgtttctagtgtgggaatccgaagctcttgctcatcatccgacaaacagaaatctccttgtggtcagggagacaatacataaagtcttcttctccactgccgtctaatatcaacgccccctctggatatttcagtattgggcgtanaacagggtctcttgctgtttttttcagtaattttctcccgaacatgacgtaaatgtatccaaggttcggagatgctcggggcggcaggcagtttttagccaaattgtctgctatttgttcttcgttcaagattacctggggcttgaagctacttagtcatat

SEQ ID NO: 76805 - DNA, 226 bp, Zea mays
aagatagtgagttccctaaccatgcttaagaactctcaaatgcactctatgggctcaagcaagcctcaagagcatggtatgaatgcctgcgagattttctaatcactaatggctttaaagtcagaagagccgatcctactctcttcactaaaactattgctaaagacttgtttgtatgcaaacattatgttgatgatattatatttgggtctactaacaagtcaac

SEQ ID NO: 76806 - DNA, 336 bp, Zea mays
  unsure (1)..(336): unsure at all n locations
ttagcataagcagatcgagatagcttataaaataactaagatagctgacccctaatactcccttaaatgctactgaatcatcacttcttctaaagacagtaacacctaaatctgtgaaaagacagttgtaacacatcttgcataattgagaaactggaagcagattgtaatctaaagaatctacaagaaaaacattggaaatggaatggtcaggtgatatagcagatttaccaagtccttngaccaaaccttggatttcatccccgaatgtgatagctctttggggatcttcgttcttctcgtaagaggagaacatccttntctcccctctcatat

SEQ ID NO: 76807 - DNA, 287 bp, Zea mays
acattatatatgctggctccttgtgacacccgcggatccacatacatcctataatgctactaaactacacatctaacatttatatataaatattccacagcatgctctttgaaaaatacataaacggcgaaagaccaaattataaatagatatcatgattacaacacataatagacattaattatctgcagccatggaagaccaccataacgacatgaactgaataaccagggcgcacaactagttagaaacaaacatcctttgacaagaaagttctaattaaatca

SEQ ID NO: 76808 - DNA, 399 bp, Zea mays
  unsure (1)..(399): unsure at all n locations
gcgcgagggtaccgtacagttgcgtgcatgcgcatgcgctgtaccaacggaaccgatgaatagtccttgcgtacgtggacctcaatcgcgatcgatacatctggcgcatcgtgcgatgtggctttctattctggttcaggccggtccgtcgtcgttggctactatctagctacgtaccggccatagcatgtgattcagtttaaccttgcttatgcgacgaccgaccatatatgcacgagagccctactatcttctatctcacggtgaaaacaaaagcaattatatttaagcaatntcagtagtgatttaatcgacatcaagaaaatanaatatacgtgatattaggcatgtggatggatatatgagatctaagtgtgatgagtacgtagataacactaa

SEQ ID NO: 76809 - DNA, 379 bp, Zea mays
  unsure (1)..(379): unsure at all n locations
cagatcgagatgcgcacgaagaaaaactccaataacaggaaacactattactgcttcaggcctttagtttcatacaagaatgcgctatagcagtacaaatgattgccgtgaatgaatctttaatccagctacgatntagttccccaaagacaccgacagtgatgtacagaccatttatggaaggtatttcataaaaacgactgtccaggccaccagattcatcataaactcgtanactgccgaactanngctgtccctgctctaacgttcacagtgaacacatattagaaccacatattagatgatagatatggttctggattgtttcagaaatataccttctagaacttcttagctagatagatagcacatatcatgg

SEQ ID NO: 76810 - DNA, 295 bp, Zea mays
  unsure (1)..(295): unsure at all n locations
ctcagcttgccatacctgtcnaacaacaacatctgtcagcacaacaactgcagaccataccagtnacttggcctttcgcatgctggggactggatatgattggacctttcaagaaagctcaaagaggatacactcatgtattggtagcaattgacaaattcactaaatggatagagttcaagcccattgcttctttaacctctgctaaagtcgtggaattcataccagacataatattcagaatcnggataccaaacagcatcataactgacctatgatccaacttcacaagttc

SEQ ID NO: 76811 - DNA, 136 bp, Zea mays
  unsure (1)..(136): unsure at all n locations
cacgtgataagaataactaatgtgcaattcgaaaaagatagaccttgtgcagctngtcttgcanggtaacaagtgggaggagcacatcacaacaagaatgtgatgaccacatcaagacccctggagctgctacata

SEQ ID NO: 76812 - DNA, 196 bp, Zea mays
  unsure (1)..(196): unsure at all n locations
ccttcgacttgtgaataacccttggctacaagtcgggctttntccttgtcaccacaccatgctcatcttgcttagtgtggaattcccacttggttcctaccaacatttgattangacgtggaactaaatgccatacctcattcctagtgaagttgtngagctcctcttgcatcgccaccacccaatccgaatcttg

SEQ ID NO: 76813 - DNA, 445 bp, Zea mays
  unsure (1)..(445): unsure at all n locations
taagataacacacaatgggagtggagagatggcgagagtagcgtgtaccctccgtggcaagaggctggacggcggtgtatctgtgctctcggttggcgtgaacctgatctggtcttaagaaccccggtggcgagttgacatatgcaagggttgagtgctacatatgtcgtgtgattggagatcctcagctgagtataatcgattcggatcgccgtaacttcgcggacatgaagacttggtcactgacttacacgtagcattccaatgaataagaagggttgaatagaaattgcaagtataagtcaagtgattgaactanggtagaaagaaccctatatacatgtaactntacttaacttgactaataaaactggatttaaggatccactattagtaagcatttatgcagacaaagtctttgattattgataagccataccttgat

SEQ ID NO: 76814 - DNA, 453 bp, Zea mays
  unsure (1)..(453): unsure at all n locations
ctcaagcttcaaagcctncacatgaagtaactaaccacaagacagaggaataaaactccttctgtatataacaacaagcgataaaacccgaagggtgcaatcactcagcatgacttactggactaaagaaaagactctcaaaggtatgctagctgatcgggaatcaaggtaaaagttatcaacgatcaaagactcctttttgcagaaaagcttgctacgagttgatccttaagccacatttatttcactagttaagtattacctgaatctatatttgcctggtctagttcaagcacttgggctataccaactgcatttattcatttctcatattcacttgctaactacaatgatgcgcacacggatgagtctgcataaccaaagagcaacgacgaatcgaaccgattatacccagctagggatctctaaccacacgacatatgtagcacttaa

SEQ ID NO: 76815 - DNA, 499 bp, Zea mays
  unsure (1)..(499): unsure at all n locations
ctcactgactgcttgccttgcaagacatcttgcgtgcctgctataatttctgaagtgtgagaattgttatttggaaatnntataattttgaatcattcttttattcttatactaattctttgtcatatagggtttaatactgagcaacgctttgagagcgcaaaagaatgtcgaagacgagagctacaatattgctttcaacaaccttcgaacagaggttattaagctgaggaacgaagctctggaaaaagataaaattctacttacattggtggataaaataaaggaagacgaagctacctctaaagctcaagctgaagcccanaaacgcgaaattgaagatcttcggaaacagctagccagagctaaagaagaacgcatacttgaagagacaaaacgagaacttagtgatcaatgggcaaatcatttgaaataaatgttaagagcttctgcatttcagaaagtgtatgacaatcataaatgtgtagaaataaatcac

SEQ ID NO: 76816 - DNA, 302 bp, Zea mays
  unsure (1)..(302): unsure at all n locations
ccccccccccagagagtgacgcgagcccccnccgaaaccccaacgcgccacagaagaaaccactttttaccccaacccagcgcgcgaaccaaccccccacccgaaccacacccgcaaggcgcaggaaccccgaccaccagggcgagaccacaagcaacgcccaaagacaggagcaaacaccacccaccggaagacaaaccccccgcgccagacaaaagacacccaaacagaaccaaaaggcaacgaaaagccaagacgcccgaaccaccacaccggaacacccagcgagaccccccccccca

SEQ ID NO: 76817 - DNA, 316 bp, Zea mays
  unsure (1)..(316): unsure at all n locations
tcacactctctcaagtcactaatcactaatgatcactggtcataattatggaacttggagagnattggagtctttggttgaagtgaatgctcttgtattgaatgagagtgaatgagaggcttgggatgtatgaatggacgtggttggggttgtatttatagcctccaaccacttcctagtggttgctccaatctgccgactgcggacagtccgcgcttcttgtcttgacaggccgcttctgcacataacgactgaaatcgcatggtcagctgaacggctatataacggctatagagcattaatgcatcgttggatg

SEQ ID NO: 76818 - DNA, 149 bp, Zea mays
  unsure (1)..(149): unsure at all n locations
acaagaaatgatgcctcagatgacttctgacttagcatncaatggcccacaaccctttcccacattcatgcaccgaagatccatttttggttaacactttttatctacgatgttatactctaccctacttaanagaattcatcctcaaa

SEQ ID NO: 76819 - DNA, 304 bp, Zea mays
  unsure (1)..(304): unsure at all n locations
gcagcgtgtcaagcaaggaagcaagtgggaacatatcatctaagcaagaacgtgatgacgacatcaagacaactgcaacttcttcatatggatgtcttcggacccatgagagaacctacaggagggtgaataggtgatcctgtataaacaactcaacacaacagactttgactaatattggatagtgaaacagacgcaagttcgaatgggagtatagaggacaaacttttccttaattctcttcctaagtgagattaacttnagcaatatgtagtgagtgatagaagaaatccatttataaaat

SEQ ID NO: 76820 - DNA, 443 bp, Zea mays
  unsure (1)..(443): unsure at all n locations
gagcacagtatgccgcgcggcatgggcgcactgtntgtcaatatactggtcaagcgcgccgtctagtggatgaccctgacgctgtctgccagcggattggataggacgctgaaaagatcacgatgcccaagaggggggtgaattgagcttttctaaaaatcaacactaattaaaacctaagcaagagctaaacaagagcccaacttcaccccaacaactagcactaagaacataatactataaatgcaacaaagctaagataatgcttcanatacttgctaaacacatacacaatgtaaagtgcttgaataagtgcgaatgtaaacanagttagaaactcctcaattttccgaagatcgaaagtcgactctcactatctcgtggacaccccgcagggatcgctccctggcctccagaccaatgctatacaatatcttgcactc

SEQ ID NO: 76821 - DNA, 150 bp, Zea mays
agagaggagtaccacgtttgtgcaacactctcgacagccatgatgaaagactttgccatgaccgctgtattgtcaccatacgaagatatgggtgcttcatagctcatcaagaattgcttccggtctgaatgaccgtcatacatggagagc

SEQ ID NO: 76822 - DNA, 390 bp, Zea mays
  unsure (1)..(390): unsure at all n locations
cttctttttctccatagtaagaaccttactggaacactaccccacttattaagaatgagggtagatctctggaatctcggagatttgaactccttgaggtaccacataacaaaggtgttacggagccttcttctgctattgctgcttgagcagactgcagagagatgactgacacagggttgattctgggacaaccttcttcttatcttctcttcactatcttcttttcactgaccctttctttctctntagctcttccactggaggattctatcaaagagtattactagcatacactagaggaaaccaaagactatgaaccatgtgcaacagtcttcaacccaagtatcaccaagcattgtgatcttaggggcgaaggagtggaaaatg

SEQ ID NO: 76823 - DNA, 244 bp, Zea mays
caccaacttgtcaccttgccaattgagtcaattttccatgttacacagtgggagtcttcatcctggatactaagtggctgttacaatccagctgcacacctctaagcacatggcacaagtacaacgcaagtcctccccttattataaacatacttccttaatataaagccgcagttactatgttaacttaactgtcacaatgaaccgttactgccactggcagtaactatttgagtctccattg

SEQ ID NO: 76824 - DNA, 537 bp, Zea mays
aaactcagcttaatagactaccttatcttagaagatactctattactgtagtagactcgtcttatcttgaatagactctatctcaccttaggagagctaactgacctcataagaatctaccttatccttatgaattcatctcgccctaattagcatatttatgccactctagaataacaaccatgagctaatccaaaatgtatctagatcctgtctagtctaaaatagtcatatcaatgtattctagatccgatccaatctaataggtcaatctaacctaacgaagtctaaacttaagtcgagctactctaccgtaagtcacttaacatgaataggtattactagtgagatagattataccctctggccctgtttaactcaaagtatgacagtagaccacaccacccatgaacaaataacctaccaccatattcatggtgaccatccatcccatcctagatgaagccataatacacttatcttaagccaccaacctgttaaccatctgtccttacctacaacttatcctaactacat

SEQ ID NO: 76825 - DNA, 292 bp, Zea mays
  unsure (1)..(292): unsure at all n locations
actctactctatcggtattatctancccttcgacatcactccacaatgtcttctatctttggttaatcttcactcatatgtcttattggccaaaggggagaaaatagttatgagagggacttatatctcactcaaagtatccgtgtctggcgattcatgccanagggggagaaagtatgagcccaaagcacaaagaccgctccaccatcctacatttataattaatgatgttcaattggaaaatttcaaattggtatctctttgtgttctaaagggggaacaagtagtattt

SEQ ID NO: 76826 - DNA, 325 bp, Zea mays
  unsure (1)..(325): unsure at all n locations
tgattctagcctatcttctggtgcataggtttcaccanaatccaaaccttcgacttgtgaatatcccttggccacaagtcgggctttgttccttgtcaccacaccatgctcatcttgcttgttgcggaaaacccacttggttcctacaacattttggttaggacgtggaactaaatgacatacctcattcctagtgaagttgttgagctcctcttgcatcgccatcacccaatccgaatcttgaagtgcttcctccaccctatgtggcgtcatagaggaaacaaaagagtaatggtcacaanaatgagcaacacgagatcgagta

SEQ ID NO: 76827 - DNA, 480 bp, Zea mays
  unsure (1)..(480): unsure at all n locations
ctcagctctgggtgcttgagcggtntaactcaattcttatctcaagctatcaatcttacattgtctatcctttaagaaagacccacagatgaatagagttgttatatcactaacttcatattcatctctagcaaaaacttgtgttgtagtgaataaagattaacctctgtgggaatcaagcagaaggcctacaaccaagcgatatccaaaggatggtaacatttaattcttaagtgcacattgcttttaattggtatattcctttgtgtcttttgtagccacataggaaaaatgaagcacttgagaatgaacttaacagaatnntaccttgctttggaaaggatctanatatatggtagatcgcaagttcatatctttatattgtgacaatctacatgctctanattgattgatgtatcttgtggatatttaagttatcatcatattattgcatgacctaaatataagattatccatgtc

SEQ ID NO: 76828 - DNA, 289 bp, Zea mays
ctcagcttgccatacctgtcaaagcaacagcacatgccagcgcagcagctgcagaccataccagttatttggcctttcgcatgctggggactggatatgataggacctttcaagaaagctcaaagagggtatacccatgtattggtggccattgacaaattcactaaatggatagagttccagcccatttgcttcttaacctctgctaaagccgtggaattcatacaaagcataatattcagattcgggataccgaacagtatcattactgacttgggatccaacttca

SEQ ID NO: 76829 - DNA, 226 bp, Zea mays
  unsure (1)..(226): unsure at all n locations
tgagaaagacagggttagtatcgcatgtttagcanggaagcaaggtggaacccaccatccacacaagaacatcatgatgaccgacaggccgcttgagctactccacatggatttattcggcccgatcgcttacataagcatcggcggtagtaagtattgtcttgtaattggggatgattattctcgcttcacttgggtattctttctgcaagataaatctcaaacc

SEQ ID NO: 76830 - DNA, 189 bp, Zea mays
  unsure (1)..(189): unsure at all n locations
ctcgggcggctctggcgggtcgcggagaggtcgccggactaatggcgggctctgggaagtcaggcgtggtaccgaggaggcaacggtgaaggcagccgagcactgggacgagctntatagccgtggcgcgggcgtggtcactggcagccgcgggcgcgcggaggttcgcgcacaggcgtgctctgagcg

SEQ ID NO: 76831 - DNA, 394 bp, Zea mays
  unsure (1)..(394): unsure at all n locations
gagttcagctctatcaaaatctaccaagtatagctgaccctctaacactcccttaaatgctattgaatcatcacttcttctaaagacagtgacacctacatcagtgaatagacagctgtagcccattctacataactgagaaacggaaagcaaattgtaatctaaagaatcaacaagacaaacattggaaatagaatgggcaggagatatagcaattttaccaagtcctttgaccaaaccttggtttcatccccgatgtatagctcgttgggactttgtttctcataaggagaacatcctttctccggcatgtgggtgtgccccgctgcgagtatcaacttgagcgccggtgcataacctacnaacaaattagttcttgacttatgacccaact

SEQ ID NO: 76832 - DNA, 319 bp, Zea mays
ctcagcttctcaccatgtcgctgcttgccaagttagtgcagctaccgccatcaatgatcaaacgacatgaacgctccttaatgacacactctgtgtgaaacaacgtatgtcgctgattctgctctgccttctccatttgtgcactaagcacacgctgtacaatgaggctctcataatgctctgcatcatctgcaccaatctgttcttcgggtgggtccttagtgtctgcatcatcagccgcaagcaaagcaagtgtagcttcatccaaatcactagcagaggaatacccaccatcgtcttttaccaccaaaacacgctg

SEQ ID NO: 76833 - DNA, 387 bp, Zea mays
  unsure (1)..(387): unsure at all n locations
gagttcccttttcgagtcatgtgaacatctttctaagcggcgaataatgacaaaccgctcatactgtgattctcttattcaagcagaatggttagcacctacgcgaccaatgacaacgatcttgcattatcacgtgcagtcatttgtgcctgtagagatgcagtgcccaatcatgcaaggaagcacgcagacgtatgacaagctttctatgttgcagtcacagataggctacttaaatcaaaaatgagtgataagtcgagctgcacataggtatcgatactgcctattcttcactgattcacaaaaagttncttatctcanaccaacaatgtagagcataataatgtatgacctacagttaacaagataaatcaaacagcatggaat

SEQ ID NO: 76834 - DNA, 234 bp, Zea mays
  unsure (1)..(234): unsure at all n locations
aagatatagcagagcagaaagtcgtgctggagtctcaattgtctgaagagcaagagaanaccttgacaaggtttctgttcaacaacaaagatgtcttcgcatggtcggccaatgatctctgtggtgtgaacagggatgtaattgagcactcgctcaatgttgatccatccttcagacccaggaagcagagacttcggaagatgtttgatgacaaagtctaacgtgctcaaaatg

SEQ ID NO: 76835 - DNA, 375 bp, Zea mays
  unsure (1)..(375): unsure at all n locations
tctagactatgatgtcatcgatgtaggcctcgaccgtccggccaatgtgttcgccgaacacatggttcatgcaccgccggtacgtcgcgcccgcatttctcaagccaaacggcatggtgacatatcagtacatgccgaaaggtgtgatgaaagaagtcgcgagctggtcggactctttcatcctagattaggtgataccctgagtaggcatcgaggaaagacaaagtttcgcacccagcagtggaatccacgatttgatcgatgcgaggcataaggtacggaaccttcggacatgctttngttataccagtgtagtctacacacatccgccatttctcttctttctttctcacaagcacaggggtagctaagcca

SEQ ID NO: 76836 - DNA, 182 bp, Zea mays
aacagcgcaatagcgatgaaagctatggtaacatcacacctacccgtctgttatatagtgccgcaagtgggaaggtgaatcgtcaaagtcttctgcatctgacaaacagccacccgcactcactgaacggtgagccacagagtccgagaaggagaatcgtcagtgcgtgcataactgctgca

SEQ ID NO: 76837 - DNA, 432 bp, Zea mays
  unsure (1)..(432): unsure at all n locations
gcttgngaactatgcccgtatccaatctgcctgagccggtactataagcgcttgccatgttccccgttcttggtcgaccacgaccaacacccaacataagacttccctagttatttatccaagaccagagccatgatagttctcatggtagcactgttttcccagttggtcactccacgttccaattaatatgcaataatcttgtgtaaccatctggttaacaacaataatgtaaacttaccatttggaacattaataccatatacaggagtgactgcataaagttaaagtgtagcaatagcatagctactcgattagatcataatcccatgttaaacaaagagtatagttgaaaagttaggggtatctaaataggtaacccatcacattatgcatatattcatcgaagaataaactntattaaatgtattg

SEQ ID NO: 76838 - DNA, 359 bp, Zea mays
  unsure (1)..(359): unsure at all n locations
acaagtgggaggagcacatcacagcaagaatgtgatgaccacatcaagacccctggagctgttacatatggacctcttcggacctgtcgcctatctaagcataggaagaagtaagtatgggttagttattggtgatgactcttctcgcttcacttgngtattctttntgcaggataagtctaaaacccaagggaccctcaagcgcttcctaaagagagctcataatgaagttgagctcatagtgaagaagataaagagcgacaacgggtccgagttcaagaaccttcaagtggaggagttcctagaggaggaatggatcaagcacgagttctccgctctctacacaccacaacataatg

SEQ ID NO: 76839 - DNA, 309 bp, Zea mays
taggccttgaactcactttaaggaaacaatttggactacaatgtcatttgagaaaacaggttgtacgcatgtagcaggaaccagtggtgttatatctaccaaaacatatgagactgcaggcactcagctctacacatgattattcgccgatgcttactaacatcacggagtaagactgctagtattgggatacattctccttcactggggtcttttgccgaaaatctcatacccaaaaccttaaggatttgaacggctcaaagtgtcggttaggataaaaatataccacacgaacgattagactacaat

SEQ ID NO: 76840 - DNA, 358 bp, Zea mays
  unsure (1)..(358): unsure at all n locations
tcgtcttgaccatgcttctgtatacccgcaacctgattccgaagatacctgcttgcatacttataanacattatcaaaccacgtttttgaagacctttggaagccgaaggcccncaacagtagcccctcgcaatattaatttgctgtaatgggtaattcatattgcgatatggacgaaggccttaagccgaaggtccaaaaaaacaccttctctttgctagaatagcaacagtctttgacaagcgggacccttcagtttcaacgctctgggcgtataaataagagctcatcccgagttatttggtacgctctcttgccactgctttactcactcaactttagcctgcgcgcaacaaca

SEQ ID NO: 76841 - DNA, 511 bp, Zea mays
  unsure (1)..(511): unsure at all n locations
tcggaagaagatacggagatcagcccangagactgttttgtttgttctgcggtgaatatatatgtctaccacaagaacgtgccaagtcacgattcataagcataaagagattgccgaagctgaagcactgcagaatcacccgaagaaaggcctacatactgctttatgctattctccctacgtnccaaagtacgtatgtaatcaacagcctacgacctcggtcgtttatgcaagccactcttaagcttcctgttgccagcttccaccaacaccaccgttagcacctactctggcatgaaggcagcaaccataagggcactcacacgcntagcagcagcgtgattttcggaggagtgcgaagctcgcacagtcaatagcactgtgttcaaatcaagcacgtctataaagaatatctacctctggtgcattttgttctctgccatttatttcttgatgcaaacattcatgaggataaattccattcatgtaaatatcgactctatatcgaggg

SEQ ID NO: 76842 - DNA, 372 bp, Zea mays
  unsure (1)..(372): unsure at all n locations
aagagctaaccaagctttctaaaaataagagtattctatatgaagtggacgaagacttcagaatgtctcggtctggcaggaatggtaggaagaagttatgggatgacaatgagtttatataagatgaggaatctgagatggaggaaaagagtgggctaaagaaagctgattcacctcaagatgtgaagaatgaaacccctggtcttacaacaagacagcgagcccttcatagcaagggtgggaatggtgaaagctttattgaatttcccgatggattaccagcagcttcgtcaagaaagtaaatcttagcttatgttntgagaggttttgttgcattaacattttgcttttgcaaatgcagaactaattatg

SEQ ID NO: 76843 - DNA, 203 bp, Zea mays
  unsure (1)..(203): unsure at all n locations
cattccacanagttgtgaaacggacaacacattatagcttaaggaatctacttattaaacatttgaaagtgattggtggtcagagatacgaattttaccaataccaatcaccttacttttgccactatctgcaaacacaatttcttgtgcttcttgagttagttgcaatggatgaaacatgtctttcttcccggtcatgtgat

SEQ ID NO: 76844 - DNA, 494 bp, Zea mays
  unsure (1)..(494): unsure at all n locations
ctcagcttagaaaatctggatgaatctggcgatatactcagctagtccacagaaactcctgtcttggtgaacagtagttgggggttgccactccagaatatcttngaccttgctaggatctaccgcaattcctttagccgataacacgtgccccananattgaatttcttccagccagaacgcgcacttgctgaactnggcatacagctgatgttccctcaggcgcgtcaatacaatccatagatgctgagcatggtcctcttcatttttagaatatatcaagatatcgtcgatgaagactaccacaaatttgtgcaactcaggcatgaacaccgagttcatcatatatgtgaagtgggaggagcatttggagcccgaagacattacatgattcaacaatccgaccgcgtatnacgcggtctcggatatctcggccgatcggattgatgaagccgactgaacaatntggaaaacctgcccagcagtgatcaata

SEQ ID NO: 76845 - DNA, 324 bp, Zea mays
  unsure (1)..(324): unsure at all n locations
cctccttctcgaccagatatgggctatatgaattcttggtgatgtcttttgggctgactaatgcaccagcatatttcatgtatctgatgaattctgttttcatgcctgaattggacaagntcgtagtggttttcatcgatgatatcttggtgtactcgaagaacgaagaagaacatgccgtgcatttgcatgtagtgtttaacgtctgcgagagcaccatcttatgccaaattgtcaaaatgtgattttggctaaggagacanatcttgagtcacactatctttatgangatagtcgtgacctgatacccaaaagtgtaactgg

SEQ ID NO: 76846 - DNA, 446 bp, Zea mays
  unsure (1)..(446): unsure at all n locations
gtgctagtatcgaatggatgaattatactagaatgaaccttcatcagctctggtgtatacaagcttctacaaagtcgacccanatggtacaatgatacagacgccatagatcacatcacgagcgatcttgattacctagctaagcgagatcagtatcatgtgacacggtgcaagtgggcaacanggcaagtttgcaaaataaacacattggntcctattatatcaatactatacatgacctctcgctcttaacaatgttctttatgttcccaaaaattctaanacaccttatttagctcatagaataatctatataacaatatcnttttgaaattcatcttggtatatctcgttaaagattgggaacacanaatctactcatgacaagaaattgtgaagctagcctttatcaccttaagtcatctaatatttgagtcaaagcactt

SEQ ID NO: 76847 - DNA, 468 bp, Zea mays
  unsure (1)..(468): unsure at all n locations
acctagctagtcctcctncagaactaggaacaccctncagccacaggaacgcttatagtactcctcatcacctacaacaacatgggttcgaaaacccagagtacggagtgtactttcgcaagtcttacccgactaaagaaaaagactctcaaagatatgctggatttatgaatcaaggagaggcttttagcaagaatcaacttagatacttttgcagaaatagcttactaaagtgagtccttactttcaatattntaacgccagattaaatattaatagactctggttgacctagtctaattcaccatctaatcaatacacatcattgtactcataatgttacatcctgacttaagttganggcagcancaagtctcactctccgngattaacggcgatcgaatcattactcactgaggatcttaccacacacatatgttcactaacccttgatatgtaatcattcca

SEQ ID NO: 76848 - DNA, 515 bp, Zea mays
  unsure (1)..(515): unsure at all n locations
tggcactgtgccaggactgtcngcagccactacgtggtcaggccaacgtcgcacatgctgttgctgatgatgangccctgctcctggcacatgcaaatcatctacctgatggaataagtcntgagcatctagaggacagcctgcttttgactgtgctctgtagccctttagcatctataggacagcttgactagcctctgtagtctctttatcatctagaggacagcagtcgtctttgtgacttgcctctgtagtcgctttatcatctacaggacaacagtcgcttgtgactgtgctctatagtctctgtagcatctataggacgattctgttgtgagtgtgtgtgagaaagtgtggtantgcactccctacggctgataatatgtgtgctcacccctctaaaggatggcattgtgagtggttgaagaataaacagaaaagtgctcaactcatattgtcatctcttgatgagagtagagtctcttacttacattgagatcgagccgaactatctg

SEQ ID NO: 76849 - DNA, 443 bp, Zea mays
  unsure (1)..(443): unsure at all n locations
ctacccgaaacattgtctgctgtgcataatgtgttccatgtgtcgcaattgaagaagtgtcttcnggttcccgatcgaaccattgaagtaatagatgttatccttgaaccagacttgacatactatgagcaccctatacgagtcttggatcaaaaggacagggttacccagagaanaactctcaagttttataagatacagtggaaccagcatttcgaagatgaggctacatgggaaactcaagactttttagataaaaaattttcaggctttttagcctcttgtaattgtaagcctgttaactgtgtatanaaaagtgccttccaccatccctgcttatccaagaataggaataaaattgacacattctttcatactatctagacttaattcgggacagattttatggggaagagtacacctgtgactgtactaactgacta

SEQ ID NO: 76850 - DNA, 282 bp, Zea mays
  unsure (1)..(282): unsure at all n locations
ctctcatactcagctgtcaagaaaagaaaagcaacacgcgcgcaagcgcgcgcgtaatgcgtatantantattattatatgggcggcataacgaggcgagcgaaggcatatcctgcagaacactcgaaggcatacattaacacctttctttgtttgtaacactaacatccttttatagtttaaaagaaggtggttggaatagaacagcattcattttcacacacacaattaaccaccacacaagactctttcaagctatgtacaaactagcaatcgtcttac

SEQ ID NO: 76851 - DNA, 393 bp, Zea mays
  unsure (1)..(393): unsure at all n locations
catacttctagcanacttgaatgtgttattttctaagtcatgctcattatatttagcactaagttgagctatgtgatcattctgttgtctgattaaagctatgttatcatggatagcatcaacattaatgtctctacatctagtacaaatggaaacatggctaacaatagatgtagagggtttgcaagcatttaattcatcaatcttagcttgtaacatggcattctcatttctaagaatggaaatagaatcattgcaaacaattaaatcttagcctagcaatanattatcatctcaatcttaggctagaaatgattcattaacttgcaatttagaaataaacttcattatatttttaagtgacaacaacattaactttaacttagcataatt

SEQ ID NO: 76852 - DNA, 298 bp, Zea mays
  unsure (1)..(298): unsure at all n locations
ctcagcttctaagggagaacacgtgataagattaactaacgtgcaattcgaaaaagatagaccttgtgcagctngtcaggcacggtaacaagtgggaggagcacatcacagcaagaatgtgatgaccacatcaagatccctagagctgctacatatggacctcttcggacccgtcgcctatctaagcatatgaggaagtaagtatgggttagttattgttgatgattnttcccgcttcacttgggtgttctttttgcaggataagtctgaaacccaagggaccctcaagcgccttcta

SEQ ID NO: 76853 - DNA, 262 bp, Zea mays
  unsure (1)..(262): unsure at all n locations
ctcagcttcagtattatatatacattttgtccctgagcccacatgtcagagctcggtccctttgtgcatgcccnctttagctataaaaggggaggcacacgacgtcagacccaactctatgcagacactctcaagttcatacaagctcccaagcaatacatcacacagtggagtagagtattacgctccggcggcccgaaccactctaaatcctcgcgtgctctcgtgtgttgatccaccagtctcatagcaagcaaaacgc

SEQ ID NO: 76854 - DNA, 207 bp, Zea mays
ctagttattcagacagtactccgaagcggcgaacaatgttttgccaaaagaaattctgtgcagtctttgatgttattgtggaaacagccctcgcctctatccatttgtgtaagtactcaacagtgacgaaagtgaacttgaagttcccctgagccgtgggcaggggcccgacgatgtccaggccccagcgctggagaggccatgtgt

SEQ ID NO: 76855 - DNA, 409 bp, Zea mays
  unsure (1)..(409): unsure at all n locations
actcagcttgtgccacagcaactactttctaccccgatgtgctcttcatcggaggaagagtggtatcatctcccatctncgatgatgagccaaccatgcctgtggaagaaccttctcaacgagaagctcgccgacggaggaaccaacaccgaaatattattagacatcacaaagcaggggaacacgacccgacgcagcctgtatcccgagatgaaattntggaggtgggagaaactcctgacgaatgagtctntatagagaggaggaactctcgccgacgtgatcgtcggcaggctcaagagcaagctgagcaggatgcgaggcaacaccgagagaaccctctcttcacgcanaacctgaaccctgacttcgcccgagccatgaacacaccgagtgaagtcgatggagt

SEQ ID NO: 76856 - DNA, 339 bp, Zea mays
  unsure (1)..(339): unsure at all n locations
atctgctcccgggcggacccgctgcatggctgtatagatgtctattaaatgctctgctgcaaggagccatgtcgcgttgtgatactgctgatatatccatttgccatttaattaaatatatatattctataatgtaaatgttctgcgagcattntgtcttagtataatgtaaatgcagctcgatagttatactagaggcctacaggcctgcactcatgcttaattagcttgattagattaatcaacgactacctgagcctactagtatacacatacacgattatattgcattaatctatatgcgtagttcgagcgacgacacacatgcacatatatatg

SEQ ID NO: 76857 - DNA, 238 bp, Zea mays
  unsure (1)..(238): unsure at all n locations
aaatctaccaagtatagctgaccctctaacactcncttaaatgctattgaatcatcacttcttctaaagacagtgacacctacatcagtgaatagacagttgntagcccattgacataattgtgaaacggaaagcaaattgtaatctaaagaatctacaagaaaaacattggaaatagaatggtcaggagatatagcaattttaccaagacctttgacaaaccttgatttcatcccca

SEQ ID NO: 76858 - DNA, 426 bp, Zea mays
  unsure (1)..(426): unsure at all n locations
ttattaactataggtataaattctctctcaaaattataatacctaanaatgttgcataaattgatacccaatttcatatcggtatgagtaattgggtaaaccatgggcaataataaaacgagctggactatacatctctgcatataaaaatctatgcttggcagcattggcctgatgccgtgcactttaccaccattatctacgcacatatntctctatgtgcttaaaagcaaaatgcaaccagtgaatgtccttgtgagcactataccctgatggtcatttacttngtgatcggaagtcaactacaggcttccaatgatgaatagtatgcatgaagccctgaaggacccttatggataacgtagtggtgtgcatattagtctaaatctgaatgaaatgactatgtgttggtataataacaataag

SEQ ID NO: 76859 - DNA, 313 bp, Zea mays
  unsure (1)..(313): unsure at all n locations
ctcagcttaccctgagtctggactataagtggtacgggaggtgtgccttatgcagntngactcatttcagcatntgcgtaatgaagactctaaggagaagcctcttantgaaaccctggccattcaccttggaagtgaataccggtctagctgacccgggctagaaaggaatcgcgactcatggtgtaagatgtgccacctctgcagagtgtaaaactgatatatcacgcgtgctcaccagtatgaagcacctggactcctcacatgataatcgaacttgaagatggaaataaatcgagaatcgatgatctgc

SEQ ID NO: 76860 - DNA, 383 bp, Zea mays
  unsure (1)..(383): unsure at all n locations
agcactcggcaaagaagctttaccggtgcccaggtttttcttctctaccgagtgctatagccttgacactcagcanagcacctctttgctgagtgttacactcggcaaagtgaccagtatacaccttttcaatttgtttttgctattccatcccaacaaataaaagatatcacatatacatcacagatatcacataatcatcatagctatcacatatctcacaaacaccataaatcagacaagttctcacagcattaccaatatgttctgacacanacataagtattcaacagtgcagaacataagtctcaagtatctcacgaagcattaccaacatctaacaagttcanactgtgttatctcacanagtatgaacaacacta

SEQ ID NO: 76861 - DNA, 336 bp, Zea mays
  unsure (1)..(336): unsure at all n locations
acagtgcatatagcaatgaatgttgtggtaacttcacacctactcgtctgtntatatagtactgcaggtaagaaagcgaagcgccaggaattttacaccatgcgaacacccgctcgcactcgctgcgtggtggaccgcagagaccaaacagtaactctgcaaggtggtgccgctacgcgctgggaaattgaatcgtttctcgacaacgagctcaaggaaagtgttgtttagaccttcggcgctccgaagcttaagagactntnttcatggatcacagctcgtacgaanaacgatctatcaccacgaaaggggctactgttgngtctatgcttcgtc

SEQ ID NO: 76862 - DNA, 396 bp, Zea mays
  unsure (1)..(396): unsure at all n locations
atttcgaaaaagatataccttgtgcagcttgtcaagcaagtaaacaggtgggaggagcgcatcacagcaagaatgtgatgaccacgtcaagacccctggagctactgcatatggacctcttcggacccgtcgcctatctaagcatatggggaagtaagtatggcttagntattggtgatgattnttcccgcttcacttgggtgttctctttgcaggataagtctgaaacccaagggaccctcannacgcttctcaagagagctcanaatgagtctgagctcaaagtgnaaaagataagaagcgacaacgggtccgagttcaagaaccttcaaagtgaggagttccttgaagaggaagggatcaaacacgagttctccgctctctacacaccacagc

SEQ ID NO: 76863 - DNA, 198 bp, Zea mays
  unsure (1)..(198): unsure at all n locations
gagaaagacatggtttgtatcgcatgtcaagcanggaagcaaagtggtgttcatcatccacataagaacatcatgacgactgacaggccactcgagctcctacacatggatctattcggcccgatagcttacataaacatcaagcggagtaagtactgtctaantattgtggatgattattctcgcttcactttgggt

SEQ ID NO: 76864 - DNA, 232 bp, Zea mays
cgccagcgacctctgcagcagcagccatggtcccaggacagactctgttcccggaaggctctcgttcgcgtgcccactcaaaggacgcgaaccacatattaaagccaaagagccgagggtcggtccgtaagcgacactgacgacctcgacggtggggaagctttctccagctgccaccacatcagcaccgacggcggcgtccgcctctccaccaacgtcgcaccggcgagca

SEQ ID NO: 76865 - DNA, 156 bp, Zea mays
  unsure (1)..(156): unsure at all n locations
gaaatccaaacgttcgacttgggagtatcctttggcacaagtcgagctttgtccttgtcaccacaccatgctcgtcttgcttggtgcggaagaacccattggttcctacaacattttgattangacgtggaactaaatgccatacctcattcctag

SEQ ID NO: 76866 - DNA, 325 bp, Zea mays
  unsure (1)..(325): unsure at all n locations
gattggtcngactcatcacaaagaatatgtctgtacagatagatacgagaactatgccaagaaaaggactcctacagaaggctggaccaatccgatgaagacgtctatgaggagactatcttgacatatcgaaaactttattttttctatacttaacgatagctataatagattttaaaanaaaattgacagagatcatggcccacttgtgccctttgtggccgttatagaatcagtgtgagttgattggatctctgtatgcctacaannatatatttcatanatagtactcccttcattcataaatatgatactgttgactgtt

SEQ ID NO: 76867 - DNA, 234 bp, Zea mays
  unsure (1)..(234): unsure at all n locations
ctcagcttcccatcctcgttatttcgtagttattcctgattcaacatgatactattttgtaaactccgatgatgttgtaataaattaaatactccttaatgtatgggtntatgctntattgtatttgctctgtgcctcaccttcgagtgagtacgtggtacttgatcctgttaatggcctcgtcggactagatccaaaggactatacgtttattcctatttaagtgtagtctaa

SEQ ID NO: 76868 - DNA, 359 bp, Zea mays
  unsure (1)..(359): unsure at all n locations
tctataaatagatgaacagtactcccgtactgttcacgctgacttggcatttgctnttcgcatcacacctgtacctttacctttcgtcattagaaagacatttataatttgtattatgaatttgataatgcacaaaaaaataagttgatataatatcggagtattattatatctatatatgtatctcttcatcatcggcgagcttacgaaagcttttcctcataccttcgtcagaatcatatatcgaaggacataatgtttcaagacaagacttaacattacactctttatgtgcttgtttaacttacattgaaacagcccaacaaatgtgtcatatatggatgatatttcttcaatat

SEQ ID NO: 76869 - DNA, 338 bp, Zea mays
ctcagctctgacgtgtcttggaatgaatcctctgctcttgtattgagtgtggagagtggatttctcggataccttgaatgttggtggtgaggggtattataaccccactattatttaccattggtgggctttctgtcgatgggcgcaccagatagttcggtgtgcaccggacactaactattcattgtctggtgcctgccatgtcagctgacccgtggggtttggagtagtcgaccgttgacttcgcctatccttgtggcgcaacagacagttcggtggcccaccggacagtccggtgtgacctaacgtcgctgactgcttccgaacttctgactgtt

SEQ ID NO: 76870 - DNA, 414 bp, Zea mays
  unsure (1)..(414): unsure at all n locations
gtatcgtggtggatttgagaacgcatcaagatgcccagtttgcaatgtcagtcgatacaagaagagctacaatcaagactgtgttaaaaaaattcccgaagaanaataanaacaagaaatccactattggacctgaaagtgacgatgacactttggatgacatggatgggaaaaagaagtcaaagaacccagctntggtgatgtggtatcttccagtaattgatcgcttaaaacgtttggtctcaaatcctagggaggctgagcttatgcgttggcatgctgaanatcgcaagcagataacaaacagattcgacaccctgctgatgcatcacaatggaaaaatttcgatcttatgtatcctgagtttgcaaagaaaccagaaatgtaagaattgctttgggtacagacggaatg

SEQ ID NO: 76871 - DNA, 285 bp, Zea mays
ccgagaatgtctgctttctgccatgggctgcgtacctatttaggccaatggggcgcgtatcaagttagggtcattaaggacgcatcctatgagtgcagcacgaccccaatacccttgtggtcgcctcccatgtgataaaccctctagccgccaccaagaacagcgggtttagtttagatcaagtttaactctcgctacttgcttgcaagcgcgcgtgctatttcaaccgcgccgtcttcttgtgcttcgaaccccaccatattgtaggttgatctttaaacctac

SEQ ID NO: 76872 - DNA, 323 bp, Zea mays
  unsure (1)..(323): unsure at all n locations
acatgtgctaagcggcgatgccatagccagcccatgcttttcttatccattaagcatgcatcgagaccggcttcttcttttgcaaaatcaactaaataaagtttgccgtctagtacacccttaaaagctagtgaaccatcacatcttctaaagacagacacatctacatttgtaaataaacaattatatcccatgtgacataattgactgacagatagcaaattatatccaagactctccactaagaatacatttgatatagaatgctcattcgaaattgcaatnttacctagccctcttaccttgccttgattccatcaccg

SEQ ID NO: 76873 - DNA, 146 bp, Zea mays
tgcgccatgtttcgattcaaagcacagatagcctctacatcaccccaagaagctcaccgtgccattggattggactaagtcgccgaggtttggccggcacacccgccgccgacgaagacaaccgcctgcgcacgtggaccgagcga

SEQ ID NO: 76874 - DNA, 304 bp, Zea mays
  unsure (1)..(304): unsure at all n locations
ttaatttcattttatctatgctcttaatttacttggtagtgngctatgtgaacattttgtcgttaattaaagctaggtgatcatgaatagcatcaacattaatatctctacatctcatgcgaatagaaacatgatcaacagtggatgtagagggtttgcaaacatttaattcatcaatcttagcatgtaaaatagcaatctcatttctagatatgaaacaatatcantgcacacatttaaattcttagccttagtaattagtttatcattctcaatcttaaagctagaaatagattcattcaac

SEQ ID NO: 76875 - DNA, 161 bp, Zea mays
gtataccactcacaggtctcacataagtaagggttaactctatctaactctagtagaccgtacaccatcaaaagttgaaattactaaagcacaatttatatcatgcatatatcttacgcattgcattcattagagtgtaatctctgcgaccgagagtatgt

SEQ ID NO: 76876 - DNA, 495 bp, Zea mays
  unsure (1)..(495): unsure at all n locations
ctaccgcatgtcttacttgacgtaacatattgattnttatgcttctcttgtaccctaaggggcaccatacatccaataaaaacatgttgaaagcctcaactaatgatattctattcgtggacttcaatccatatggctcaacaagcatattatgtagcttatcaaacacatttctattcagcctaaacctattgtagcacgatgtcctatgtcctatgttttccatgacccaactacaaccagattctatagctactttgtattatgatatgttcatgtatgtttcatagtggtacatattgatcaagggcacaacactagcaatatggtgcttctctttcacatcactcacatattgtagatccgagcataaaacaacatcatttcctgtcaccattaaaatgacaccatataacagtagagagaacttcacctctttgtctgcatttctctcatcactaaacctgctcattatttaaattgacaaacttctga

SEQ ID NO: 76877 - DNA, 205 bp, Zea mays
gagggatatgataaagctcccgcaaatgaagggggaggtgcatacggcaaaccgataagtccttgctctatgtgacttctggccattaactgcggctgggttaccttatggtccgtcgtgttcgctcttgctgtccttcgtttgggggccgagttatcggtatctactccactctgaaaagctgtgggtgagactcaaacaccaa

SEQ ID NO: 76878 - DNA, 246 bp, Zea mays
  unsure (1)..(246): unsure at all n locations
actatactactagtgatgataatttgtgatggaaatatgaagatactgtagagacctgttgtattctctctacctctgatgatttcttcgtatgaaagcagtactatctgtgtgtgaagaccgatcctatgtggatatcggtcttgtgttccttctgccaagcagntatcaccattttgttaatcacaaacttagcaatcatgtgatttttctcagataaaatgaattcttggctttgctgtctat

SEQ ID NO: 76879 - DNA, 378 bp, Zea mays
  unsure (1)..(378): unsure at all n locations
tatatgcacgaatggngggccccgcgcanggacgttggtgctatccaatcgagagatgtctaaagactattctaaagaaatgtagaaataaatgcacaatcaacgcttccattgcagaggcatacattctagaggaggtctcacacttcacaacaacttattatggtgacaaactgccgagcgtgcataatccaccctctctgtacaatgatggcgacaatgaatcgaaccttatcatatntcgaggccaactcggaagcgcaagtggctcgaccaccaagaccctgacacatgaagagtggcggcatatcatgctatacgtattgaccaaccttgaagaggtgacgccatacatgtgaacaattcttcatgaattct

SEQ ID NO: 76880 - DNA, 472 bp, Zea mays
  unsure (1)..(472): unsure at all n locations
atcatgcacaagtgtggacaatcttcattatactaatactnntaagagaggaagtacaccacattcgggcaaaggtacaaaggaagtatgatcttttgcgtatatgtaccttaactctcctccaaatgcttgtggtgcatttgttgaatgagtaacggcgagtattgttagtgtgtgtntacctactaaatacccttgctgtccattgacatcattctatgtcttgcttgatatggtcttgggttgatgtcaagggggaaatatgtgattaaagctatctcacctgagaggacgcttatcctaaggataatgngctactggcgtattgtgtattgtaatnatatatatgcctttgcagatatatgtgtgcatatatgactagtgttccctgctataattattgcattatagtgtattctgaaagatatcatgggcaatgggcttaaattacgggcttaaaatgttaaatata

SEQ ID NO: 76881 - DNA, 322 bp, Zea mays
  unsure (1)..(322): unsure at all n locations
ttagtcccttacaactcactgagagcacctcaggatgaatgattcataaagcagctagctacatgctgtaattactgataaagtngaagtcctgactctagacaaccaacaattgaagaattactcgactgatcaactactagatgactagtgctattgagaaccatgatttcaacaatgagttggcagtggataatcaaaggcctaataatgaggtcaagaaactaaaaagtgaaaatgaacatcttgctacaagtgtgcacaagttaacaatggtcaatacctcccacatgagctgcttatgaacacttgtatgaaaaat

SEQ ID NO: 76882 - DNA, 281 bp, Zea mays
  unsure (1)..(281): unsure at all n locations
ctgacgacaacatatcatcgggagcttattttattctaattttattggtaagttctctcctcaactctttattgttgtacgatgaagcacagatntctgatgaaggttatnttgtacagagtatgctactaagtaaagccttgaggatgcaacaggaccttgaagataagaaaaatgaggttataattgaaggcttagaaaataaaatcaaagatcatgaagctgctcttgaaaagacagactatgttcttcatacaatagagggttcactggcagaagcc

SEQ ID NO: 76883 - DNA, 277 bp, Zea mays
  unsure (1)..(277): unsure at all n locations
ctctgcaagactactcttcttatgccactttccactacgaaccatgtaattgttcgaagcgaggtgatttgtccaagctctggatgtatgcactccaacctcgtgcacccatctgtgtacagatgccgaagggcaatcgtgtgcttcattcgctcangaagtctaatgagactgctgcanacattccatagcagaggaaacatatggaacaattcaagtcagtttgcagaggaaacatatggtaggggaacacagctccagtacctgtgactgaatg

SEQ ID NO: 76884 - DNA, 400 bp, Zea mays
  unsure (1)..(400): unsure at all n locations
ccctgcgagaccttntnccgtntctttctaaccataatgaatgcgatatctatgtcatacttgatgcatactcacntctattngtcccttgtatgatgtactgctctgttcccaatatgaatggatgaatgtatgtatgcttgcaatcgcataaagaacgatccggtcgaagagcccgaggaactcgcaggagaagtccctgagcagcagtctgttggtggaggcangtgtcctttgacctatctctgtcctattcattatnntaattcacctccgcattacacatttatacctaaggagtgactcagctttgttgcccatgtccttgttacctatctgngttggataaatatatttatagttagcttatgctattgctcactcttatcatgaacatgat

SEQ ID NO: 76885 - DNA, 370 bp, Zea mays
  unsure (1)..(370): unsure at all n locations
acgacanatattcacgaatatagaggtagtatcaagttaagtaactcagaacacattatatcatatcactctctctaaatccggccaccatgtcctatactaacaaacatgtacaatacatgccatcaattctttatatagttctctcgtctaaatataaggtcttctaacttttctgacacaccttctagtattaacaaacatgatctttcgcaggagacacatgattagacacattgggtgtaggcttcaagtgagaatcacctacatcatgtggacgtggcattcttatgaaggtcatagaaacctgcctcttgcggtgtcaaccctcttttatagccatgatgagtcagtacatgttgatcgatac

SEQ ID NO: 76886 - DNA, 482 bp, Zea mays
  unsure (1)..(482): unsure at all n locations
ntctcaccatgtatagcatgcttaatgaaactccntagagtgatgcagattaataccatatcttggttatcaagctgacttggtgacctatctgaccagtctgcactaaagtaggtcgactgcctctctagtagatgtgcgtaagtcggctttagaatcattggaaactagacttcaagagctttccacaaaagacttatgggccttcatagcttttgggaatcaaaagatatgactgtttcttctggacggctcatgtgcgctggactgactcngatatagctcttcttgtgattcgccttgatatgttatgtcctcctctttggggacctaagtatatcaaatacacgacttaggtgcatacaatctcataatgttaaatgaattcataagcacgcggcacctttgctgagcttctaactcgctagtgtattggccatacaactacgcgtgcactctgtgtacgttttactcggtacatg

SEQ ID NO: 76887 - DNA, 301 bp, Zea mays
gcacagtgcactctaactattcttctgagaaactcgacctcgctgcagacatgacacctctattgttcttcttatcaagcaatgaaagaattcataattattgcagagcatatcagtacaagagacctggttcatgagtctttggctctcacagatgttcctagtttgaaagaatgggacatgccgaagctaaatgtggagaagaaagaaggtgaacttgtacgttaccttactatttcaagtttaagaaatactttaaaacgccttgccaagagtggctagacacaaatgaagtaatgtg

SEQ ID NO: 76888 - DNA, 537 bp, Zea mays
  unsure (1)..(537): unsure at all n locations
ctcagcttacgcctttcgcctgngacatcggaatgtcacttcaaggtcggaaaggaggtcngttgcttttctcgtctngactacgatgtcatcaacgtaggcctcgaccgtccggccgatgtgctcaactaacacatggttcatgcaccgctggtacgtcccacccgcattcctcaagccgaacggcatggtgacatagcagtacatgccgaanggtgtgatgaaagaagtcgcgagctggtcagactctttcatnctgatttggtgatatactaagtaggcatcgaggaaagacaggtgttcgcacccagcagtggaatccacgacttggtcgatgcgaggcagagggtacggaacctttcgacatgccttgtttagaccagtgtagtctacacacatcctccatttnncctctttctntctcacangcacagtggttggcaagccattcgtgatggaatacctctnttgatgaaccctgccgcattagctntnggatctcctcgcctatggctctgcacttttcttcgtcgaatc

SEQ ID NO: 76889 - DNA, 399 bp, Zea mays
  unsure (1)..(399): unsure at all n locations
tggggtctccactccaaaatattcttgactatgctgngatccaccgcaatctccttggtagataatacatgtcccacaaantgaatctcctccagccacaatgcgcacttactgaacttagcatataaatgatgttcctttaagcgtgccaatacgatccgcatgtgatgagcatgctcctcttcattctcggagtatatcaagatatccgccatgaataccaccacagacttgtccaacttgngcatatataccaagttcatcagactatgtaagtgggcangagcaatttgtantctgaaagacataaccacatatataaataatccataccgcgtggtgaatgcgtgcttatgtatatcttccggtcacatacggatctgatgataacctgacctg

SEQ ID NO: 76890 - DNA, 300 bp, Zea mays
  unsure (1)..(300): unsure at all n locations
cctatggtcgaattggagctggcatatatgagtataactntgttacagacagaatanggactcgccacataanaatatgtgagaaacacccctaaagatgctntgtcagacaggctaatgaaggtcctgatggtacagtagcctgaccaagatcgtcagatacatcgcacctcaccgacggtgatccccgtgcctggatttgcgcangccgtcacgattcgtgcttggcgcacagtggataaccgtgggggagtaaaagatccagtggngagacgtattgtgtcgcggacagtaacttat

SEQ ID NO: 76891 - DNA, 212 bp, Zea mays
  unsure (1)..(212): unsure at all n locations
gtcagtctcacgctgacgccttgccaccttatgtatatattatatatgntgcgcacatagaganaaacgccgcanacccatggaccaagcgagcacccattcctctgctactacctcgaccacgaccacgtggcatgggagatccactgtcatgagagggatgcgaggcatcggctgtgcgagaggaagatggatgatggtgaggccgggga

SEQ ID NO: 76892 - DNA, 396 bp, Zea mays
  unsure (1)..(396): unsure at all n locations
acatgtgctaagcggcgatgccacagccagcccatgcatgtcttatctcttaagcatgcatctagaccggcctcttctttggcanaatcaactaagtaaagctggccgtctagaatacccttggaagctagtgaaccatcacatcttctaaagacagacacatctatattttgtaacaaacagttatatcccatatggcataattgactaacagatagcaaattatatccaagagactctactaanaacacattagatatagagtgctcatttgagaatgcaattttacctaacccttnntaccttgctttgantcccatcaccgaatattantggaattctgggaatcctttatcttgacgtaggaggtgaacatcttcttctcccccgtcatat

SEQ ID NO: 76893 - DNA, 263 bp, Zea mays
  unsure (1)..(263): unsure at all n locations
tgagagagaattgcttgggttctttcgagctctagcgctnggattgttttttttttctngaatctttcttgcgaacaaactcacttgtaattgaggcaagagacaccaatctcgtggtggtccttgtangaactctgtgttccaagtgattgagaagagaaagctcactctgtccgagggaccgtttgagagatggtaatggttgaaagagacccggcctttgtggccttctcaacggngagtatgtttgcgagaaccgaacc

SEQ ID NO: 76894 - DNA, 223 bp, Zea mays
ttctgatctatctgaatcggcggctggttatatctggactgaaactgaagtctccagtggtgtactactaagtctgtacatattcgcgtatatgttgatatatatataatggaatctatctaccaagagacgaagacaggccgctgtgcccatgctctatttgcctctctcttaattatagacgggcaagctaatcgtgttaaatggacttaactagtgaacg

SEQ ID NO: 76895 - DNA, 310 bp, Zea mays
  unsure (1)..(310): unsure at all n locations
ccgacttcatgatattgtctggtatatattggtgtgatctttanaatcgaccattttaatggtctggttttagtagatccagacacctgatccncagcggagtcaccaaaaagtgtgttggcgccgacttgggtgccaaacattgtgagatgaaccatctcgcggtgctctctacagaggcgcggatggtccangactctatgtcggacggtctgcgacctgtgcgcaagaccgacttcttcttgtgcacattcaaacggtccgcactggnggctcggatggtccatgatgacgcaaagggtcgtattct

SEQ ID NO: 76896 - DNA, 363 bp, Zea mays
acattgtcgccgatgtcatggccgcgcctgatgccgcaagccgctcatcttctttcgctgctcctgcaaacgatgctatctgcaagaatactccagcacaatgatttgccttgaaaacacttgttcattgagttagcacttttagagaaaacgtgtcatgtgagttctgcatgcgtgtcactattatgtttgacctgatttgtctgtccgcagggtgctaaaaactgtcctaccctgtaagtgagaatttctctttcaagactcccgattggctggtatttgtactcggatatgacacctaactggtacttgacagtcaccactaggtgttcactaactgtatctgtagaggatatgacacct

SEQ ID NO: 76897 - DNA, 354 bp, Zea mays
aggacctaaaactagctatcactcctgaaggttgactatcacaaacctgagagcccatgctattgataatagcgtccaaagtaaagagtaagcacccttactgacaagtggaaaaccaagggaaatgcaaactcccaatgaaggggatggctactccaacctatgaagtctttctctatgtgacttttggtcttaactgtggctggggttatctttatggttccgttctgttcgtctcttgcttgttccttctgtcttgggtgactctagttatacggtcatttacctaccacggctggcaaaagcttgtgtgtgtgtgtgtactgtgctctaatgtaaagctcttgtatgata

SEQ ID NO: 76898 - DNA, 320 bp, Zea mays
taccctgcctagaattacttagactcaaaacctaattccgggaccggaggaagtaatcaaacctaataatattttatatttgcattcatagctacatgagcatcagatataatgtatattaaaacgagagaataagtgagaacgagactcccacccactgaaacctagcggaactgttacttgaattgggagaagctgatactataacaggcacccgggattgcacccctgtattaaactttaatactgtgcataggaagagtggtgaacattgtgttcttctggatgtatttataatccgttacaaagtttagctactg

SEQ ID NO: 76899 - DNA, 511 bp, Zea mays
  unsure (1)..(511): unsure at all n locations
aacacataatattaaaaaaccatcaaacttgcacaaggatntactttatatgatacaacgtgcttanggccacgcttcctaaatngcaagnttttatatacaataagcccaaagcacctaatgattccacgacatttctttggcaagttcttcgtggctgccttatctgcgtcgtcaaccaaacaattgctcgatttttgtggcatcgcctcgattatggcgtggagtatatagccttgaaccaaactgtctctacatacgttagcanagtgcttcacctatgaaacactcgtacgagtgaagtatgttcaagagtccaagattaatgtaccactgtngttgtatctggttctagactaataaatcatgagtcattaaatgacctagtagtatataagtttatcactggagtcgtaagtgctcataccttaagaacanagcacacatgcangctacatnctcatgaatctagtaccatacacatacacattcgatgcaacgataataagta

SEQ ID NO: 76900 - DNA, 189 bp, Zea mays
acatgccaagtcacgatccaaaagcagaaggagatcgctgaagccgaagcatagtataatcagtccgaagcaggtcttgcatactggctcatgctatttgccatatatcattgaatatgtgggcaaccagcacaccacgacatcggttgctttggcaagtcaatctcatgctactggggcttagctacc

SEQ ID NO: 76901 - DNA, 185 bp, Zea mays
  unsure (1)..(185): unsure at all n locations
gtatgacatccgatatggctctaggcccgcatatcaggactcagcactcttatacttgccctccttgagctatataaggggaggcatgcaacgttacaaggcagacttatacacacttagacgctcacaagttcatacaagctcttcagctcaatacatcacacagtggagtanggtatactctt

SEQ ID NO: 76902 - DNA, 287 bp, Zea mays
  unsure (1)..(287): unsure at all n locations
gagtacgtgtgcatgagtgaggttgttgtgatttttatttttctatcacaacctcatgagcaacgtttaatatgatataatcatccataagaattttatgagaatatagaagcatatcatatttatattgaccagatagatnttcaaatattagcttttctacttggtccttaagcaaggtattcatatttactaattgagcaatacaatgtanagcgttatcttgctcaatngaaatagtttcatacctttggacaacatgagagcactttaactcctcatgttct

SEQ ID NO: 76903 - DNA, 281 bp, Zea mays
  unsure (1)..(281): unsure at all n locations
aaagaaatggagctatggtcaagttccagaggggtctccaaacagcctcacactacaccatcacgtgtgagctcctccactcctgtggaaagggcatgtcttactatagatagtangncagctcaatcactttcatcaaattcccttgcttaagtacaanagcagactactcacgttcaaaagcaactgccatggtgtcaggtcactatactcgtcaacgatgtcggaggtctgtgagtcataccactgttggactggcacttnttaaactgagactcact

SEQ ID NO: 76904 - DNA, 292 bp, Zea mays
  unsure (1)..(292): unsure at all n locations
aaaactaaacccccttnccccccccccaagcatgaccatcatcaacacnnaatacagcaacccaaacccaacgaggcctttatttcaaccaccgccgccgcagagcagccgaagacacaacaaccaaagggggcgcctccaaaccaaggactacaccatagagaataaaacccaaaaaccctcactgcacaagactgccaagccaaggaaacacccacaaccagagaacgaaaacactgacggccagcctcaaccagaagggccacaccatcagcaggacacaaacagaacg

SEQ ID NO: 76905 - DNA, 289 bp, Zea mays
  unsure (1)..(289): unsure at all n locations
ctcagccgtgccatacgacngggcgccgttccgacccagtttcgaaccctgactacttatcttctagtactctggggagacaaggacggaactgtggctcgcggactaccggctggtctgtcaactgggtggaacggacgatgacaacctcatcatccgcaaccttcgcttgttcctctcttacaccgcccgagcctgtctagagcatctgcctcctgcgcagatctccaactgtgacgacctggtcaaagtcttctgccggaacttncagtgcacatacgtgcgccct

SEQ ID NO: 76906 - DNA, 529 bp, Zea mays
  unsure (1)..(529): unsure at all n locations
gctngtgtcacagtagtgaggttctctacaggaagagtgttcttcggttcantataagcatttaacttccaaccttangtgttgcttcagcacacatgacatgagccccacatattggcttgtctgactattccttctagagggaatgctgatataaaagaacaagatgcttanggcaggtgcagtccctagcaaagtggcccttactaccacanttgtgcaaactntattgcccttaggtggtggaggctngcctttaccctttccttttcctctcttatggaatttgcgcttgttgaatatgcgacgtccagtggaattctttgaaattttcttgaatcctctctattatctgacttataacattgaaatanaccgcagtggacataccccgagggcgctgtgacatatttaaagaactcatgatgttttctgctgagcaatgatgctagctgaaatatttagaactatagagcattactgggcatatctatcttaaacatgtaataagcttctttttattgcttag

SEQ ID NO: 76907 - DNA, 498 bp, Zea mays
  unsure (1)..(498): unsure at all n locations
ctcagctgtctgtgcnnagacacatgctattgaaatngagcactgcaatagaaatgggactatgttttttttacatgctggtgatgactaacatattacagtaagggaatattaccttatttccaagatacccatcagtcctctacccacacaagagactttcacatcgtctcttatttcattctgcacccaaactgtgagaaatatgccaaccatttgtttgctggcaactcagcaatacctganagaagccacatgcgtacccanagggttagttttaaagggagtgaatcccaaacaagtggtacagtaaatgcattatgangattcacaatactagaagctgttgattgacatcaatttgtcacaaggtgagatgcactgactatagggacggtgaattgtcacatactcctttgattcatgtatctataggcatcatgcaggcaatccataaatattcgctagacatgtgggtggctatgcttgttcaaatga

SEQ ID NO: 76908 - DNA, 288 bp, Zea mays
  unsure (1)..(288): unsure at all n locations
tctcccactataangcatacttcgagcaaatntaaacttttcattntcaagttcatgctcggcacatttagcatctaattngactatatgatcattctggtggttaattaaagccatgtgatcatgtatatcattaatatcaacatctctacatctagtacaaatagaagtgtgctcaacggtagatgtagagggtttgcaagaaataagttcaactggtgggggccttcggcttctgaaggtcctcaaaacatgaattaacaactgttcttgagtataatgtgtgac

SEQ ID NO: 76909 - DNA, 300 bp, Zea mays
tatcgctaactgtcccgataatgaaagtgaccaggacaaggggaacacattatattataatatgcaatacacgaaggcaaagggcgaggcgcatctatgaaaggagtggtgactcggatgtcctcctccgactccgacaacgaaggactcgccgccactgccttcaacaaatcggctctcttccccaacgagcgtctcacatgtcttatggcaagggagaagaaggtgagtactcaagactccacttatgcttcttctagtgatagtgagtctagtgataatgacatagattattcatac

SEQ ID NO: 76910 - DNA, 390 bp, Zea mays
  unsure (1)..(390): unsure at all n locations
acttcacccagttctaacatagatgcaagaatgagttattgttgaagtaaactcggtatgaagcacgggtaatgcatgaacatgctttctctttctttaaaaggaagatatatgtataaggtaaagtgaaatgaagttattttacccttttgtaccttcacatagagacgctcccttcattgtgctttgtccttagtcttagtcgcttatgacctatactcaagacaatatatggaacatatttgcacaagagagagttctacaactagtgatcctttgtagtcattgttancatatatcacaatggatcacacggtgcataattgtatcatgaatcttcagtaacttagtgcacatcaagagagatattgatttgacatgatgaacact

SEQ ID NO: 76911 - DNA, 328 bp, Zea mays
  unsure (1)..(328): unsure at all n locations
tctttggtatgttcttaatctttttcagaacagcgccataacctactaatagttgtttatcacgatattctttggttccaatcattccttgtagtttactatggagttntggtgctggtaggatattggtaatagtccatggtggaaaaagttatagcagacaaagctcttatttcagttttccatcgaacatcattntgataggttgaagagccacggctggcatatntgtctaacaatgagaattatatatgtcaataaatattgctttactagcctgaaatagccgaaatgtcacactacaccgtaacaaagaacagagcttaac

SEQ ID NO: 76912 - DNA, 269 bp, Zea mays
cgccttgagacaccggaatgtcacttcaaggtcggagaggaggttatgatccttccgtgtcttgaccacgatgtcatcgacgtaggcctcgactgtgcgaccgatgtgttcgccgaacacatggttcatgcaccgctggtacgtcgcgcctgcattcctcaggccgaacggcatggtgacgtagcagtacatgccgaacggcgtgatgaaagaaggcgcgagctggtcggactctttcacccggatctggtgataccccgagtaggcat

SEQ ID NO: 76913 - DNA, 210 bp, Zea mays
  unsure (1)..(210): unsure at all n locations
ctctaaagtaatgagacaatcangcctagttgtgtcagagggtgcttctgaccaangtgccctgctgcgaaccgacaagctgacattgataagtgagctgatgaaaaatataatatctgtctgcattaacccacccctgaattggaagctatgctccaagccatatgccatgatgacaagctggtacttcggaaccgaaaaactatcttt

SEQ ID NO: 76914 - DNA, 500 bp, Zea mays
  unsure (1)..(500): unsure at all n locations
aatgccatggcgtcttctattatatagcatgcttctagcanaattaaacttctcattttgcaattcatgctcatcgatttagtagtaatngagctatatgatcatcttgtcgtttaattagagcacggtgatcagttatagcatcaacattagcatctctacatctactacaaatagaaacatngttgacagtagatgtagagggtttgcaaataattaattcatctatcttagatttaatatgacattcttcattttaagatatgaaatggaatcattgtannatattaaatgcttaacccttagaaatatactancattttcatctctaaggctagaaatngtatcatggcaaatactaagctccttagatacattntcacaattctctacttnctgagcataagcatttntactttaacatgtntntcatttcttaataaggagttctcttggctatcagagtcatccttctatgaaagctctatagttattaattt

SEQ ID NO: 76915 - DNA, 274 bp, Zea mays
  unsure (1)..(274): unsure at all n locations
gtcgagcatggcgtctactcctcaattgtctttgtttcttgttcctaagcaattatctttttgacccttcaacttgtttctcaatcaaagaatggcctttcttggngcagtggaggtcagcacatgataatactttaactaattgatcacttgtgcaagaacaaggttcacattgagttaaactagtaattactacctcatgagcaatatcgagcatgatatggtcatcaactaattcactatgagaatacgacaacatatcatacttttcact

SEQ ID NO: 76916 - DNA, 307 bp, Zea mays
  unsure (1)..(307): unsure at all n locations
tttcgatggctggactgggctgganatggcggatctgtccggtcgactgtggcangttgtactgtttgtctctgacngctgcgcacgggccaacgactgcgaaacaaactccggcgatggtcgggtgggtgcggactggtaaggtcgactctcgggaggcgtatatatgcgcggacgcggaccaaggcgctggcttatgctctggcgcggcgccgggctctcgagggcacgcgcgggcgtgctctggctcggcagaacgcgtcgaacacgtggcgcgttgcttctgaccgtgttcttcgctctgctg

SEQ ID NO: 76917 - DNA, 210 bp, Zea mays
ttctgttcaaatggaacgaaattttcttaggaattttaagacaactttcagagatagagacttcttgttgtaaggatgcacagggtggtcgtgtaagtatcaacgagatagagagaaactccgtggggatatgataggtctgaagttcgaggtaggcagattgtgcaatgtaaggaagtgaaagtaaacaacctgctaccgttcacatgc

SEQ ID NO: 76918 - DNA, 241 bp, Zea mays
  unsure (1)..(241): unsure at all n locations
gatagtcctcatgtgtagcactgtttcctgngtggtcactccatgttccaattaatatgcaataatctttgttaaccatcgggttaacaacaaacatgtaaacttaccatttggaacatcaatatcataaagcggagtgaactgcataaattagagttgtagcaatagcatagctacttgcttagatcataaatccaggttaacaaggaataaggttggaaaggtatctaaaattgtaact

SEQ ID NO: 76919 - DNA, 194 bp, Zea mays
ataactgccctcttagatatgttaaagcaatctcgcttttgtttcgctcagaaggaggctatcaagtatttatcaaaagcagggaaagttcaaatgagggccacaaatgatgtaggttctgcacattcaccactgtcgttatggtgaaacaagcctcagtattgcatgtacatgttctcaacacaaagaggaca

SEQ ID NO: 76920 - DNA, 221 bp, Zea mays
  unsure (1)..(221): unsure at all n locations
ctatcctaagcacaaaattagaaagattcatgctaagaaatgtcattctatttctcatcatgcttatatgtacagtaatgaggcttctaactctatgcatacaactcatataanaatgcctaagaaaaggattgttaatgcatgaattgccatagcatttatttaaaactttngatgcttatttgtgttactaacaaatcangcaagtagttgcaaatatg

SEQ ID NO: 76921 - DNA, 455 bp, Zea mays
  unsure (1)..(455): unsure at all n locations
tgctcgcgaccaatttatactattctgttgatcccctggacctgcgggttaggacccacacacgctatcgtcacgccacttcaatcttgttggttgatgctgatcgcattgtcttcatgtcacacactggatttatgggtccaaaacccgggcgcgaacataatcaccaggtgtgctgggaccaagtctcacacatatgatgaatcatggcacaggatcgaatgtcacatctttactacataacaggagttctatacaaaataattaagtaattacattataaggagacaacggtccaacaacccaaagttgactgggagacgacgacctagatcactcacgaactcatcacagcatcctccatgcgcctcatcctgcggtacctgttcttgacctgtggnggggagtgtgagacagcaagagtgagctcacatacgttcatcgctcaacaagtt

SEQ ID NO: 76922 - DNA, 371 bp, Zea mays
  unsure (1)..(371): unsure at all n locations
taccacacaaccggaacatnctacacatagttaggcctagcgatgtgatgggacctggtgcctgttatatagaggcctaagaaccgatacgagccaattcccggaacaatccccgcccaaaccgatcanagtatccggcaggtcaccggaacatctaactctcatgcaagggcctagtgtatggatattaaacagatctttgataaccaaagactaaccgtgacagatcggatctgccaagcggagaacaaacaagatgtcgccctcgcgcttaggaactcgcgagaaggagacagatcgcttatgaatgaaagataacatatgtacataancgatctaccgatacacccatacatatnatatgataacta

SEQ ID NO: 76923 - DNA, 348 bp, Zea mays
  unsure (1)..(348): unsure at all n locations
atntgagcataatgttgaatacataaacatatcatgtatagtacctgtgtaaggcatgtcttcttttgttcgcttgcaatatacatgagcataattgtagggcttccattaccattacaatagataacaacatctgtcatccttgacgccttcanaatgccgtggacttataagttatttcatatatgggttaattcaggaatcacaaactcataacgcaatggcttcaaaatgcaagaggatgggataactccctgtngtatcacttatactactctgattcaaggccagtgcanaaaaacacgaacttgataatgctttcacggtatctgaaatgatggaacaaaa

SEQ ID NO: 76924 - DNA, 198 bp, Zea mays
  unsure (1)..(198): unsure at all n locations
aacgagagatatggtccaagagcatattgccttcagagtatggccgcttgctgagaaatgggaaatgccgcacgagaccataaaggaggctgacgaaggtggccttatcatgctgaagtatactttcaagttttggagataattcgttgagccagatgatgactggctaacaagtattganacattaagtgatgagct

SEQ ID NO: 76925 - DNA, 291 bp, Zea mays
  unsure (1)..(291): unsure at all n locations
atcaaaacgcatactccttttctatttgaagttgtgcctatgtaccacagcttgaaaccactatatgtccacctctttgccctctggccattccatttagtctcttggatgcataagacatatacacgtttcctagtcactgtctcaattaactcccttacctctaagtgagcctacanttcaactaccaaaacggttcctgggntggttgactaacttcttaccattcgcacccatcgatgatgtgaanggtcttacacatttttcactacacccgaacgccgatgtaat

SEQ ID NO: 76926 - DNA, 518 bp, Zea mays
  unsure (1)..(518): unsure at all n locations
tctacttgcctctcaagcatggcatattccattntaagttgatcaacacaagatanaccatcatcattatttctttgctcnaataanactgaatcatacccgtggaccaaatcatcatgagagcactctagcttctcatgttctttggtcatcttctccaggctgtcattggttttgatgagagtctcctctagcctgagaagcgtctcgccttggtccttgntccttctcaatagcttaaccaagagcgctttgtcttcttttgtgagatgggtgtagaaacggcgaatctcctcttctttcacatcgtcagtctcaatttccgtgtcatttatatcagtggaagcaaaacatgaaaatgtaccttgtgatgatgtagactcctcanntctcatattctcctcctcatcgctttcatctncacttctcatcgtagcaacaagacatgtataactcagtgggagatgaacctgttggtgaggtagatccatcgtttggtgtcatcgttcttgtcttct

SEQ ID NO: 76927 - DNA, 483 bp, Zea mays
  unsure (1)..(483): unsure at all n locations
tcaattcttatctcaagctatcaatcttacattgtctattctctaagagtgacccaaagatgaatngacgtgttatatcactaacttcatattcatctctagcaagaactcgtgttgtanggaataaggaataacctttgtgggaatcaagcaacatgcctaccaccaagtgatatacaaacgatggtaacaaataattcttaagtgcacattgctttcaagtgggatattcctttgtgcatttgtagccacataggagaaatgactgactcgagaatgaacttaaaagattgtaccctgctctggacacgactaattatatggtacactgctagtcatattctatattgtgacattacatgcttagatgatagatgtatttgtggatatccacgtaatcatatattattgcatgcctaacataggagatatccatgtttaatgatacaggtagatgaatcaatctatgcctaccaagggatg

SEQ ID NO: 76928 - DNA, 307 bp, Zea mays
  unsure (1)..(307): unsure at all n locations
ctcaagcttcatgaacttcatctngaacaaaaaagaagagccgcgcagctgcacgctcttctataccttatgctcacactgagaccacaccaccaccaccactaccagttgtaagaagcaagaactgcacagcacagcagcactatcccatacttgtccgcagcatcaacggcaaacggcccatagcagcgaagtaacagtgcacaagaacaagttgctgctgcgccgagaagacccaatattacaacgtgccggagcccggccaggagagagatcgctcgtacaacgaaaccaaacaaataatggg

SEQ ID NO: 76929 - DNA, 263 bp, Zea mays
  unsure (1)..(263): unsure at all n locations
actccaaaatgtccttgactttgctgggatctaccgcaatccctctggcagatagaacatgttctagaaaatgaatttcctccagccaaaatgcgccattgctgaacttagcatacaactgatgtttcctcaggcgcgttaacacgatccgtanatggtgggcgtgctcctcttcattcttggaatatatcacaatgtcatcaatgaagaccaccacacacttgtctagcttcggcatgaacaccgagctcatcanatatgtg

SEQ ID NO: 76930 - DNA, 405 bp, Zea mays
tcaagctgaaacggacgatttattccgacatgcagtgatatatctgctttgctacaacattcaagttaagacatcacacctcaaggaaacaattagacatgcatacaaaaaagctcgtttatggcacgcgggaaagaaacggatcgcgaactacggctagaagtatacgttacccacccagtatagcaggaatttattcgaattataaatataatatactgtatgagttgatcaattgctcctaatactatcaataatactatatatagccgaaatctaacaggtagttacatgccaacacacgtactgcaacacacccgaaacggcacaataaaaaaggcttacatactggaagaaccacagcagagtacggttcctacagatataaaatagtcaatatatata

SEQ ID NO: 76931 - DNA, 303 bp, Zea mays
  unsure (1)..(303): unsure at all n locations
ctcagctttncaccatgtcctgctaccagttgtgcagctacctgcacaatgttcaactatatgaacgctcttaatgcacactctgttgaacaatgatgtcctgatttgtctgcttctccattgtgcctaagccacgctgacaatgggctctataatgctctgatcatctgcccaatctgtcttcggtggtcctagtgctgcatcatagccgcagcaagcaagtgtacttcttcaatactacagaaaataccacatctctttacacaaacacctgattagacatcacctgactggcataccctt

SEQ ID NO: 76932 - DNA, 250 bp, Zea mays
  unsure (1)..(250): unsure at all n locations
caagaaagcgngccacataaacctcgggngagctcttatatatacacctagtgcgtngaaaactggagggtcccgcttgtcaatgacatgtgctattctagcaaagggaaggtgttttttctgacctttggcttaaagcctttgtccatgtcgcaatatgaatttatcattctagcacattaatattgcgaggngctactcgttggggccttcggcttccgaaggtcctcacaaacatgaattgacaatg

SEQ ID NO: 76933 - DNA, 246 bp, Zea mays
  unsure (1)..(246): unsure at all n locations
acacttctttgtactcagcagaggtctncgttggctaaagtggactanctgtatgtggagttaaggttaanaaagtgcttttagttggtcaagtttttttactataagtagagccaacgtttagtaataacctaattattacccagaggcactctctccaagaggaaataccagagatcacgattataatcaccattgttaatcatcatcataaaagtaaccaaggttcttctaatcgaagaggat

SEQ ID NO: 76934 - DNA, 393 bp, Zea mays
  unsure (1)..(393): unsure at all n locations
acatgtgctaagcggcgatgccacagccagcccatgcatgncttatccattaagcatgcatctagaccggcctcttcttttgcaaaagcaactaagtaaagcttgccgtctagaatacccttaaaagctagtgaaccatcacatcttctaaagatagacacatctacatttgtaaacaaaccagtatatcccatattgcataattgactaacagatagcaaattatatccaagagactctactaaaaacacattagagatagagtgctcatttgagattgcaattntacctaacccttntactcttgccttgatttccatcaccgaatattatngaatcttgggaatctttattcttgacgtaggaggtgaatatcttcttctcccccgcata

SEQ ID NO: 76935 - DNA, 330 bp, Zea mays
  unsure (1)..(330): unsure at all n locations
tcagctctgcagaactccgaagaggttctttacttagcacgtgaaatactggacagaaccgcccgattattccacttaagtgcctaagtccgcttagaggtagactacacttaatacgaatacacatcagtcctccgatctatccgacaggccactacangatcagtaccactactactcgatgtgaggncagagccattccataagcttaaacatacttaggagtataaattatatatctcatggagttagcaaagagtgatattgtcggatgagcaaataaactacataataaggatggtagctgtccacactctatgctctctcact

SEQ ID NO: 76936 - DNA, 384 bp, Zea mays
  unsure (1)..(384): unsure at all n locations
gcatgcatctagaccggcctcttcttttgaaaatcactaagtaaagttgccgctaatacacccttaaaagctagtgaaccatcacttcttctaaagacagacacatctacatttgtgaatagacaattatatcccatattgcataattgactaacagataacaaattatatctaagagactcaactaanaacacattagatatagagtgctcatttgatattgcaattntgcctaagnctttcaccttgccttgatcccatcactgaatatgaatgaatcttggggatccttngtcttgacgtaggaaggaaacatcttcttctccnccgtcatgtggtttgtgcatccactgtcgataatccagcttgaacccccggatgcat

SEQ ID NO: 76937 - DNA, 268 bp, Zea mays
gctctaaagggagagcacattctaggactaaccaatgttcagtttgagaaatacatgatctgtatcgcatgccaagcatgagagcaaggtggtgcccatcatccacacaagaacatcatgacgaccgacaggccactggagctcctacacatggatctattcggcccgatcgcttacataagcatcggcgggagtaagtactgtctagatattgtggatgattattctcgcttcacttgggtattctttttgcaggaaaaatctcaaa

SEQ ID NO: 76938 - DNA, 315 bp, Zea mays
  unsure (1)..(315): unsure at all n locations
tgcctcggtggaccataccagaaggccaccacgcaatangagtggatagattgttatattatcgtgtacccttcgtggcaagaggctagacagtggtgtatctgtgctctcggctggcgtgaacccattctggtcttgagaaacccggtggcgagttgacatatgcaagggttaagtgctacatatgtcatgtgattggagatccctggctgggtattaattgattcggatcgccgctacttctcggaaatgaagacttggtcactgacttacacgtagcaatccagtgaactgaaagggttgataaaagacagc

SEQ ID NO: 76939 - DNA, 368 bp, Zea mays
  unsure (1)..(368): unsure at all n locations
cttcgatcatcaatggagaaggcagctntggcctgagtctttgtttaacatgctcgcaacctgacgtctgcaaaatagctgcgactccgcttgcaccacagaaggcacagacgtccccgcggtcactcaaaatctcttcaaaggcttcggcatcagcgctgatccactcaattacgccctcatgatcgcccagtatgaagttgtctacgcttgagaacgcgcctacattggcgaagctagtctttatcttttttacacactccaaagatntttaaaacatctttcttttgatgaagcgaagtctgcaactggtttttcacaatcaatttttcaataatcactggcatctcgttcagcttcggcaacag

SEQ ID NO: 76940 - DNA, 414 bp, Zea mays
  unsure (1)..(414): unsure at all n locations
cactctgagatgtactgtgcttttcttcaacaaccgaacactaagcanaatagaatttggcagcgtctcctttgtaattacaaccacaataagttgtataacacttccctgcgtcaacaatattcgcaaatatcacttcaatgaatgcatgtgaatgcaatgcatatgtnctctgccttcatacctctaagggtatgaaaccgcatcgtacccctccatgggcaacatacgatggtaagttgtaccggtacgtcggaccatatgtcacgacaaaacttcagatgcacatgaattatgcaatgcatatggcatgctgcattattaatatacttcactctcctcacatacaatacaaacctccaacaatacttcattttccttcagatacagacagacctcaaataatactttacc

SEQ ID NO: 76941 - DNA, 405 bp, Zea mays
  unsure (1)..(405): unsure at all n locations
atctgaccgtggtgaccgtctcttgttggtgttcttctgcagtccgattccagcatgntcaaatcctttccctgtggcttctcctggtcctaagcaaaacaagagtgcacgggtctccatggtctaaataagatggacatgaactcaagagtgtaatcacctgatggttgagttgacgagcacgagcgcgagtaatgggaccagaaattggtacttgtattagcatagatgtatcagtagtgtggatgtcttcatcaattctcccttcttgcatttgagtcggcctcgactcaagctcaacttcctcttccaagtagggctttaaatctacaatgttaaatgtggggctaaccccaagtctgaggcagatctagcctatatngcattgtcgtaatttctctagca

SEQ ID NO: 76942 - DNA, 351 bp, Zea mays
  unsure (1)..(351): unsure at all n locations
accgcacaaangcgcgctccgtgcgcggcactatgccattttattttttgcctggaagatgtgttccatggcaacagcccattggacacactcacacacactgggtggaatcgcacagaatggtgcaggtcgcgcacagtcacaactgagggcttctaacactgtggatgtggtcatcaaagggtgagaaatgttggctttctacaaatgatccctcatctctctagagggcgtagactcctggaggacagcgctatattttgcaattgtaaactgtcttttgctttggtctaataacaactgtttcagaatatggtctcttgaagagattgaaaagtttttgaaattcat

SEQ ID NO: 76943 - DNA, 321 bp, Zea mays
  unsure (1)..(321): unsure at all n locations
tcatcttttataatcangaagcgaagcttcatcaaatgtggtcctgcataataaatcataagatacagcgatcagataaggaaaatacaccactacaaccttcaagggatcgtaatggcatggcaaaagataattatttaagttcacatctaanagaacataaataagttgaaccgcataatgatacaccagatatttgcacaatagatgactggattatttgtcagtgtactgaataaataaaccaacttctataagcatatacatatagacgataatcacgtattttcatctaaagtangtaacacatgtttgtttact

SEQ ID NO: 76944 - DNA, 243 bp, Zea mays
  unsure (1)..(243): unsure at all n locations
gtcttccacctggaagcctcanggcctatatcctcgggcatgggagcgtcgtagagactgcttataccgcgctgagtgtagtaaggccacgttctgagcctcttcgagctggtccagtgagtcttctcggctggtctggttgcttcggtcgtcgtatgtctttgccctcggggaaccgtattctaagtctgtgggtaagatagcctcagccccatagactagaaagaacggcgagaaacccat

SEQ ID NO: 76945 - DNA, 244 bp, Zea mays
tatccacttcctactagcattatttaccaataactaatgtgaatgccgttgattaaattagaactttcttttggcgaggtggtgttaataaaaaaaaataagtattgtctgatcagatggaccacaatctgtaagagcttgaaaaaagggatcttggtatccaagacatcaaggatgggccggtttgcactgtgaaacatatgcaaactgactcgcccatttggccagatgactcagatctact

SEQ ID NO: 76946 - DNA, 428 bp, Zea mays
  unsure (1)..(428): unsure at all n locations
tactcgcaaatctgatggatctaaagacccaaatctatgtgtacttctacaaacacaaaataattcgctctttgttgaaggacttacaaaaataagcaaataggtgcaatggtcacactttaaataataattgatcactgaaaggataattaaatgcacaaatgcttacctcaatatatgagggctgcacatctgaatgctctctcgttagttttgctatgaatatatcccaaaaaacgaccaccactcgaaaagaaagcaccaggtgatcaattgctgaaaatagtttggtgagaaatatactcngacaacaacaagacatagactgaagaactaaatataaatactctaacaaaataaccatgtaatgaattcctctcattttgcacatctagtctaaaattttgtgttcagtatgcacacagcat

SEQ ID NO: 76947 - DNA, 290 bp, Zea mays
  unsure (1)..(290): unsure at all n locations
atacatgaaaagacaatctcgcactgtgagtggatagattgttattgtgtcacgtacccttctgtcaagggatcgctaanaggggtggtgtgctcttcggtggcgcggacctgttcatgcagtggaggatccgtgggaatggtagacatgctaggtttactagaaacatatgttgtcngtgttttgggtccgaccgcacacccggtgttgcccctcaaggtgtttctatgagtangacggtgtcgacgactgtagcaaaatggttcgtgcggatcgcacgaaggactatg

SEQ ID NO: 76948 - DNA, 346 bp, Zea mays
  unsure (1)..(346): unsure at all n locations
atgtttaaatactngtattgcatctatggctcgtctaacctatttgatatatctcgtcaacanagcgagtgagaaagcgtaactctggtcaaacttgacaagtcttaagtttaagctcttagcacttaaattcttactctntatgctattgttggatcttgaaatatgcacgacgtactgcacttacggggagtattcacaactcacatcactcataaaaacccctattgcaagccacaatgcagatttcaccatttgcctattgtctctcaaaaatatctaccctatggcaaaatattttgaaaagtatatgaaggtgccaatatctgtctcaacaagtgttatt

SEQ ID NO: 76949 - DNA, 267 bp, Zea mays
  unsure (1)..(267): unsure at all n locations
tgtatctgggttttcagatggccgggaggcatcggcgtggtcataatgagcgcgtttcttcaccgncgncaccgnctnccactctgcangagctgatggctcagcagaatgagatcttgaggcagctagctcagcgtcagccaccacctcagcactatggtggtggagaccatcagcatcaccccgcggcagctacctaccaggagttcctcagtacccagcccccattgntcacaatggcagaggacccacttgatgcagatgtgt

SEQ ID NO: 76950 - DNA, 184 bp, Zea mays
  unsure (1)..(184): unsure at all n locations
gataagcaaaatatagcaaccaaaattgcatgcaatccatcttttctagccttcgtctgatagtgcagntcgtggaactcgacaaagctggtcgcaaacggctccaccgcttggcttcggagggcccagatataaacactaagcctaacaatagcgttaggagtcaactgatgaanatagatac

SEQ ID NO: 76951 - DNA, 378 bp, Zea mays
  unsure (1)..(378): unsure at all n locations
gggtgtcaagagactgatggngnattgatattctctgttagtcatcagncatattaacaaggaatgggattgttcaagtgattcaatgggaagatacttgcgccgccgtcccgaaagctagaagaataattcgaaggtttggagtttcatcatatataaagagatcggaacacggcggccgatgtactgtccaagctcggatccggtcggactcangtcccgcccggggtcttcgtgcaagaaattctccagccgagcgtctcgactgatcanatataagaatgcaacatcatagatcaccccgagtcagactctgatgactggaggcaaccaantattaagtatataaagaatgaagaagaaccagatgacaagaac

SEQ ID NO: 76952 - DNA, 199 bp, Zea mays
gaacaacgatggtgatgttcgtcttctagatgaagtatgtgtgccatatactggtaatgatcgcgaccttgatagactgatagatgacatttaccccaatctaaatgaaaacatgtctaacacaagctacatcacttcaagagcaatattgtctacacagaatgactgggtggatatgataaatatgaggatgatcgat

SEQ ID NO: 76953 - DNA, 276 bp, Zea mays
  unsure (1)..(276): unsure at all n locations
gactccaagactccaacttcgcgcagttgattctntgagatattgactngagctccatntgagtngtgaactccgtgcgttgtgttttgagctcaagttgtgacttgtgtgcgttattgtgctgtgattngagtcttgtgtgttgttgggggccttctgcttccgaaggtcctcacaaacatgatataacaatgtttctggagtataatgtgtgaacaggtatcttccgacttgaatcagaaagggagaagctcaaaagatacgaatggtgacaca

SEQ ID NO: 76954 - DNA, 319 bp, Zea mays
  unsure (1)..(319): unsure at all n locations
gagttcatcatccacacaagaacatcatgacgactgagaggccgctngaactactccacatggatctanttggccctattgcttacataagcatcggcgggagtaagtattgtcttggaattatggatgattattctcgcttcacttgggtattattttttcaggagaaatcacaaacccaagagacattaatgaaattcttttgacaagctcacaatgagttcagaatgagaatcaagaaaattgaagcgataatgggatggagttcaagaactctcaaattgaaggatttcttgatgatgagggcatcaaacatgag

SEQ ID NO: 76955 - DNA, 314 bp, Zea mays
  unsure (1)..(314): unsure at all n locations
cgcggtcactcaaaatctcttcaaaggcttcggcatcagcgctgatccactcaattacgccctcaggatcgcccaagatgaagttgtctacgctcgagaacgcgcctacattggcgaagctagtctttatcttttttacacactccanagattttcaaaacatctttcttttgatgagcgaangtctgcaacttggttttcacaataaaattttcaataatcactggcatctcgttcagcttcggcaacagcgcattnntaattggcttcagccaggtggctttgaaggtttcaatctcattccttttggattt

SEQ ID NO: 76956 - DNA, 333 bp, Zea mays
  unsure (1)..(333): unsure at all n locations
gatatgatgaatctatgatagattctaaaatttcagatcattaatgaccatcagtaatgaattgtaatttccaactggntatgtgtggaatcatgaagttgtgcacgctcctgacttgtgattaactgcatgtacctgatgtacaagtgtccctatggttattagtacgtgggaatccgtgaaagatatcccatgcgtacattgcgtatgttcccnatctcaccaccgcagcgnacatatatgggcacacaaaagactggtgatctatgtgagaatncattctccgtcgatcataagttttngaatctcttcatgagaatctatctatggccc

SEQ ID NO: 76957 - DNA, 286 bp, Zea mays
ctgcatatttgccgcccttacccaatctgggcatgaatctatttcaatgctccggcttgcctggatatctatcgatctgatgctgacagctgaagttggtcgttacaatgttcatgcggcaccagcttcaaaagcagtgtgacccgaaactacaggcgaaatcgggtgccacaatactggcaaggctacttgcctcaatatttagtctggcaatttactgaaggaattccaactgctcacaaggacactcttaccgtgccatcgtgcgactacatttctgatttaa

SEQ ID NO: 76958 - DNA, 213 bp, Zea mays
  unsure (1)..(213): unsure at all n locations
ccaatatgttcagacgcaattctaaactcatacacagcatctgtgcatggatccnccggtgtcatgtngcactgaggcctattcagatcgaagattagcttcaacgggctctgaactagcttctcctttttctcatncaatttaacatanaactattcagatttccaaccggtcgcccatttagtacgatagctgaccaccgatgtcttcata

SEQ ID NO: 76959 - DNA, 280 bp, Zea mays
  unsure (1)..(280): unsure at all n locations
gagaagaagaagctcactcggttcgagggaccgctcgagagatggaaatggtgatttagacctggnctttgngaccagctcaacggngagtatgtttgcaagaaccgaacctcggtaaaacaaatacacgtgtcacactccttattcgcttgcgatttgttttgcaccctctctcgcagacttgtttatatttctaacgctaacccggcttgtagntgtgattaactttgtaaatttcagtttcgccctattcacccccactctaggcgactatcaattg

SEQ ID NO: 76960 - DNA, 374 bp, Zea mays
tgtgtctttgtcacattgtattggtgttatgatttcttcataaactcatgttctaggcccatatttataatacatctatctggatgcctaagtaaagagaatatatcatctatgcatttggatcattgatatatctgacatgacctaaaaagatactattgcaaactcttttggcaaaatttcatgagatggtttaacgactaactaggacaacacatgaaagcgtttatgaagtcaaaggtaacacttcttatttactgccaacttttttatacttttgtatttgataaagaaaaacagtatactacctgtttactattaatttaactattttgtttgtaatgggaagattatgcaaactaactactgacagt

SEQ ID NO: 76961 - DNA, 283 bp, Zea mays
  unsure (1)..(283): unsure at all n locations
accctcagactgatggtcagtcggagcgaacaatccatttcttggaagatatngtgcatgcttgggttctgtcatggaagggtagctgggaggatcatcttgcattggcagagtgtgcttataacaacagctaccaggctagcatcaagatggcaccatttgaggctttatatggcatgcggtgtatttcccctctgtgctgggagatattgggagagagatccctgcgtggtcctgattgggtttagcagacttctgagaaggtcanganatcgtcagaata

SEQ ID NO: 76962 - DNA, 384 bp, Zea mays
  unsure (1)..(384): unsure at all n locations
catgtgctagacggcgatgccagagccagcccatgttattcttagcaattaagcaagtgtcgagtgtagctctatcanaattcactaagtatagctgagcctctaacactcccttaaatgctattgaatcatcacttcttctaaagacagtgacacctacatcagtgaatagacagttgtagcccattttgcataattgagatacagaaagcaaattgtaatctaaagaatctacaagaaaaacattggaaatggaatggtcaggggatatatgcaatttacccaatcctttgaccaaacctttggttccatccncgaatgtgatagctcgttggggatccaggttnttctcgtaggaggagaacatctttttctcccctgtca

SEQ ID NO: 76963 - DNA, 521 bp, Zea mays
  unsure (1)..(521): unsure at all n locations
gcgccatctcctcngtgtcgagcttggaggcgtcgatggggagccttcttgacgtanactcttctttattctcctctgggcgcttgaatgcgacaggttgcaccatcggtgtggaggtggcgcctcgctcaatgatttgnttggagcctttgatcatcaactcaaagctcacaaactttcctataacctncttgggagacattagcttatatctaggatcaccacgaattaattgaacttgtgtaggattaagaaaatcgagtgatcttagaataaccttgaccatttcatggtcatcccattttgtgctctcgaggttgcacactttgattcaccaanggtcttgagccgggtgtacatggctngtggctcctccccttggttgagcatgaatcgaccgagctccccctcgatcgtttcccgcttggtgatcttggtcacctcatctccttcgtgcacggtcttgagcacgtcccanatctctttggcactcttcacccttgcanccttatatactctct

SEQ ID NO: 76964 - DNA, 260 bp, Zea mays
  unsure (1)..(260): unsure at all n locations
ttctagatagtcaactcataatatttgtagattttcttatgcacctgagatatgatcaactaggcgaactacttagtccataaggtgtgtggtggttatcaaacacccagaatcgattataggaaatgtntaagtccatttccctttcactgttttccgagtggtcgctccatgnttcaattaacataatgatcttgtcatgaacacgtaataacaaatggataataaaagtatgatcataaattatgtgtatcttaaca

SEQ ID NO: 76965 - DNA, 399 bp, Zea mays
  unsure (1)..(399): unsure at all n locations
tgagactactacatganataatcttgtattctatgtttaactncaaagacttagatngtagagtgacctctctctgaaagtgtgcatacaacgtctgaatacttgtangagacatgcactntgatntgatatccagatggacaanatttctataatccaagcttttggcacatataaatgtaaatgatacaaattgaggcataagtaaagcattataccatttgtagtatatgaacatatcaattgatgtatcattctcttatgaatgtcgaataagataatgtgtgtgcttatcatctcacaccatgtaggttcgctcaagaatattaacttgaagtgagcaatcctaccatatgattgacctagtatgcatgcattnttaatcaaagtatataccaa

SEQ ID NO: 76966 - DNA, 231 bp, Zea mays
taaaaatttggacagatattatattctcacttttagggctatcaggggaggaaaatcgtatgacttcacccctccttaaagaatctcttccaacatatctgaagaaggagacgtatatggctgggcgaaggtgacagtattacatttacagactctattgccacacaagactttttaactacccttctaaaagatgaacacctaagggggaaaggatcggaaaactaacta

SEQ ID NO: 76967 - DNA, 348 bp, Zea mays
actggatcgatgatctatgcatataatcaatgctgaattctttgagttcgcactccactatccaaaccttctagtagcttctctggtgctcataatatctatcacaggctgagatgaacgaaccattatatggaatgcttgagagaagtgtctaagcttccttgaggccattaagacagcatacaacaccttctccaattatgtataattgttctgtgataagcatagaacttccgagacacaagatactgtggctttgcttttgacttgatctttcaatttctcctgcacaagcgccgcgctcactgtagagtgcacagctgccacatataatagtaacggagcccc

SEQ ID NO: 76968 - DNA, 435 bp, Zea mays
  unsure (1)..(435): unsure at all n locations
agagggatggttatcngaagcctgcattctctgccacctcatatctggctagagctgngaaaaaacccctgagtgcccaacttctggaacatggtaatcggttttttcccatctttngttgcattcgatcgaacaaaggcttgcttaataatccgagatgtactcaggtttacataaaagctactgnggagcagagcgcagagatggttaccgatgagggagcaatctatgttacctctaaccgtggatacaactggaaggctgccgtgcangagaccgtttcagctactctgaacaggtactgctcatncagtagcagtgcatagacagacatgagacacctnctctccntctctcttctcaagtgcaataccttngtcctgtttgtgatgcagaaacagttcaagtggcattagcggtgcaagctactacact

SEQ ID NO: 76969 - DNA, 488 bp, Zea mays
  unsure (1)..(488): unsure at all n locations
tcatatcgcccaagagcgattcacccatcacgcagacatttatacatagtcggagcaaagaataagcagaagcggattacaataacttaatntacattcataaaatatagggagagtatntattacaatatcgaatgtctgagtgcataacataatattacatatcagggaggtaaaacatcatcccaccaacaagtttactgatttgcctcctcctttggcaccaccttcgagcagaaatagcaaaactcggctgtttcatcacctacaacatgggttcgaaaaccctgagtacggagtgtactttcgcaagtcttacccgacaaagtacaagactctcaangatatgctagcttgtgggattcaaggtaagcttatcaagaatcaatgaatctatntgcagaaatgcttactaacagtggatccttataaatccaattntattatcangttaagtcattacatgtatctagaaagtcttctatcct

SEQ ID NO: 76970 - DNA, 386 bp, Zea mays
  unsure (1)..(386): unsure at all n locations
cagcgctatcanaatggagtaagtatagctgaccctctaacacacccttaaatgctattgaatcatcacttcttctaaagacagtgacacctatatcagctaaaagacagttgtagcccatttgacataattgagatacagaaagcatattgtaatctatagaatctacaacataaacattggaaatagaatggtcaggagatatagcaattttacccagacctttgaccaaacctcgattttcatccncgaatgtgattgctctttggggaactcggttttctcatatgaggagaacatcacttttctccctgcatgtggttgtgcacccgctgttagtattcaattgagcnccgtatgcattacctacaaacaagttagttctg

SEQ ID NO: 76971 - DNA, 407 bp, Zea mays
  unsure (1)..(407): unsure at all n locations
ttgggctaacaaggcagganagccataacaagacaggccactggtgtggtggcccagaacccaacgcgacgactcggaccgcggggcgctaagttccgtgacgattacgtacctgngcagcattactatattctcggttgtgcaacaaggggaacaagccggaggaggaaacttttaccggcatggccggacaagctcaatgcggacaaggcgacaggcggatcgactgcgggggagatatgcggattcgccaggccactgacgacgtccgacctgacgactcgccaccaatgatcggtcgaagtcgtggccattaagctcacccgtcactcgcggtaacctctcgtgcaatcgggctgtagatctacaaagcagagaggtcggaaacgcgcgtcttatccccccgc

SEQ ID NO: 76972 - DNA, 288 bp, Zea mays
  unsure (1)..(288): unsure at all n locations
ttggtacccatcgttngatgggtccgttaaaggtagtaaacaattatctatgaacccaagtgtgctttgtgctagcgcttgatanactcgntacctttctagcgcaagttgcaatcttgggttgcttagttacatatgaatcaattgacaagttaggagtggaattgtaccaatgggacaatccttgcattgatgtcccttctttcggcatgtgtagcatatgcgttgttcaagttttgaagntttcttctttccttgtttggtgcttgctacatggntagtaaaaac

SEQ ID NO: 76973 - DNA, 439 bp, Zea mays
  unsure (1)..(439): unsure at all n locations
actttcaaaaaagatagaccttgtgcagcttgtcaagcangtaaacatgtgggaggagcacatcacaacaagaatgtgatgactacgtcaagacctctggagctgctacatatggacctcttcggacccgtcgcctatctaagcataggaggaagtaagtatggactagttattggtgatgacttttcccgcttcacttgggtattctttttacaggataaatctganacccaagggaccctcaagcgcttcctaaggagagctcanaacgagtttgagctcaaggtgaaaaagataaggagcgacaatgtgtccgagttcaagaaccttcaagtggaggagtatcttgaggaggaanggatcaagcacgagttctccgctccctacacaccacaacanaacgatgtggtagagaggaagaacangacgctaattgata

SEQ ID NO: 76974 - DNA, 442 bp, Zea mays
  unsure (1)..(442): unsure at all n locations
aatgttgttattctgcctcgatgcattatcagctaaagcaagtgttcattctgtggagccatagtgaagagtttacttcttcggccgaagacctgcctggtgccttcgagcacattgaatgtgaaattaatgaccttgacgaagttatagctgggcatagcgaacttttgtctctgcagcttctcggggcacaactgttgctttttgaagtctggctgtgaacacngcaagaatgntaataaacccaacttcagcctgtcaccggcagacttaaatgatgttccgaatctggctcgaagtattgcanacagatttataaagctagtatggacaaagggtggtcggagcanagctggtgacgaagctcggagccacctcaagctcgtaacanaatcataccttatgcttaccttntccttngaagtttgaattatctataata

SEQ ID NO: 76975 - DNA, 361 bp, Zea mays
  unsure (1)..(361): unsure at all n locations
aatgacaatctcattgggcactgttggcgcttgtgccctcaaacgcaagaaccttcgaacatatgcctgaaggtattcctcgtgatcctgcgtgcactggaacaaagcttgagcagtaactggctgtgtctgaaacccatggaaactagtgattagcatgtgcttcagcgtctgccatgatgagattgtcctggtcgaagagacgataaccaggtttgtgcaacattttttactgccatgacgaaggattttgccatgactgcaactgtgccaccatatgaagatatgattgcttcgtagctcatcagaaatngctttngatctgagtgtccgtcatacatggtgagctgatgtggtttgt

SEQ ID NO: 76976 - DNA, 205 bp, Zea mays
  unsure (1)..(205): unsure at all n locations
actccgaagcggaaacaatgttttgcaaaaaaccttgggcagttttgatgttattgtggaacaacccttgcctcgatcccattggtgaagtactcgacagcgacgaaggcgaacttaaggttcccctgagcggtgggcaggggcccgacaatgtctatgccccagcgctggagaggcatgtgtgggcgatcagctntgtatactg

SEQ ID NO: 76977 - DNA, 421 bp, Zea mays
  unsure (1)..(421): unsure at all n locations
ctcacgaccgcgccggtattaacactaccttacattcttctagttncgncatcttctgtgatgcttcaaggaagggttacgatgtgtgcttatgcacaatgagaaagtcatcgcatatgcatcacacctactcaagctgcatgagtagaactatacaacacatgatttggaattggcagccatagtgcatgccctacaaatatggaggcactacctgattgngaacaaatgtcacatcttcacagatcataagagcctaaagtatatgttcactcagccagacctcaaccttcatcagcgaagattgcgtggaattgattatcgattacgacattgagatccactaccaccctataaaggccaatgttgtagcagacgctctcatccgaaaacctttcacggagaaagcaaccaacttaat

SEQ ID NO: 76978 - DNA, 273 bp, Zea mays
  unsure (1)..(273): unsure at all n locations
cattttgagaaaacaggattttgttcgcatgccangcatggaagcanggtggagtccatcatccacacaagaacatcatgacgaccgacaggccgctcgagctactccacatggatctattcggcccgattgcttacataagcatcggcgggagtaagtattgtcttgtaatagtggatgattattctcgcttcacttgggtattcttgttacaggagaaatctcatacccaagagaccttaaagggattcttgagacgagctcaaaatgagt

SEQ ID NO: 76979 - DNA, 446 bp, Zea mays
  unsure (1)..(446): unsure at all n locations
ctctcatgacagagcacacagaagcattatggagcacgtattcgccaaccacaaagcctgatacttctgttctaaataggctcattaacgctggtgtgtcatcaacgattgaggagtccatgtcagtagtcaacaatgagatattgcggcggcactttcttggagttgacgaccaacttccttgcgccttttgggccttatctgagaactacaacaccatcagaaaggacttcaccttttgttgacccaccaattgtaccngcgttcatgcagatgaagtcatcaatggtttggcagctgaggtccagggaagtctttgtcanaaggatgatgtccatttgttggacctatatanngtagctaattgtctctatttgtgaagaaagttgttaggtgtcttctttgattactggcataataatgaagcatgatgtgtgttcctcata

SEQ ID NO: 76980 - DNA, 344 bp, Zea mays
  unsure (1)..(344): unsure at all n locations
tactacaagcaccccgatgcaagataatataatcctcatnctccctatgtgtttcatcttgcatcaatcgatccggacagggacacgcagcatanaattcactatgtcggtgagggtccccgtgggtcccaaaacaccgacaattaaatacttgcaaaccctctacatctaccgttgagcatgttactatttgcaatagatgtagagatgttaatattgatggtatcatgatcactttgctatgantaaacaacanaatgatcatataacanaattagatgctaaaattgccgagcatgaatanagaatgaannaattaaattgctcgtagtattgcttatagt

SEQ ID NO: 76981 - DNA, 144 bp, Zea mays
  unsure (1)..(144): unsure at all n locations
acaagtgggaggagcacatcacagcaagaatgtgatgaccacttcaagacccctggagctgctgcatatggacctcttcggacccgtcgcctatctaagcataggagggagtaagtatgggttagttatnngtgatgacttttc

SEQ ID NO: 76982 - DNA, 372 bp, Zea mays
  unsure (1)..(372): unsure at all n locations
cactataaagcatgctacgagccaaattaaatttctcattntctagttcatgctcggcaattgtagcatctagtttagctatatgaatcatttgttgtttaatcatagcaaggtgatcatgaatagcatcaatggtaatatctctacatctagtacaaatagaaacatgatatacgctagatgtagagggtttgcaattatttaattcaacaatcttagcatgtaaaatagcattctcatctctaagaatggaaatagaagcatngcaaacatctaagtctttagccctcagcagtaatnttcattctcattttaaggctagcagagaggcattncaattttaatctttcaattaaactncattatcatttt

SEQ ID NO: 76983 - DNA, 419 bp, Zea mays
  unsure (1)..(419): unsure at all n locations
tcctcaatggacctatcaaggaagagatctactgtgagcattcttctggctttgaagatagtgagtaccccaactattgttacaaactccaaaaggcgctgtatgggctcaagcaagccccaagagcatgatatgaatgcctaagagatttccttatcactaatggcttcaaagtcggaaaagccgatcctactctctttactaaaacatgttgcaaaagtnttgttgtatgccaaatttatgttgatgatattatatttgggtctactacaacatatacttgtgaagagtttagtaggatcatgatacacaaattcgagatgtctatgatgggtgaagtgaangtatttctaggatttcaaatcaagcaactccaagatgcaccttcatcancaaacaatgtacattcaagacatact

SEQ ID NO: 76984 - DNA, 370 bp, Zea mays
  unsure (1)..(370): unsure at all n locations
tacaagagacattctaagactcccagactccgcctncacgcattngattgattgtgttatgtgattgagctccgcttgagttgtgaactcactgtgctacatttcgagctcaagtcttggcttgtgtgcgtgtgtgtgctgctgatctgagtctagtgtgtgttgctcttccaaccttactctgtgctttctttgtgatctctattgtaagggcgagagactccaaattgtggagattcctcgcanacgggaacaatactctaagagaaagaccatggtattcaagttgatcatcggatcacttganaggggttgagtgcaaccctcgtccattgtgacgccacaatgtggaagtanggcaagtgtactt

SEQ ID NO: 76985 - DNA, 136 bp, Zea mays
agagacaaggtgttggtcaaaacccttttgtgccaaaataaaagtcgcagcaatctgatgagccatcttatcgcttttattctccggaacctaaatgttcagactgaacacatatggggacaaatgaaatcaatgc

SEQ ID NO: 76986 - DNA, 297 bp, Zea mays
gacaagaatacataaatttggttgctgtctaatatacattgaaacaagtccaattgggccactcgggaactaatcatgtgactgaggttcgtaaaataactgaagtgttcgtacaagtgggctccaaaacgcggtatgctaaataaccacagaacaaaaagagctaagatgacacatgtggggagggcttataataaatgttacatcatacctcttagagacttactaaatatctacatgagttgctattgtgatcagatttgtatatgttataacggcggacaattaattgtagct

SEQ ID NO: 76987 - DNA, 191 bp, Zea mays
  unsure (1)..(191): unsure at all n locations
cagctctatcaaaatctaccaagtatagctgaccctctaacactcccttatatgctactgaatcatcacttcttctaaagacagtgacacctatatcagtgaatagacagttgtagcccatttgacataattgagatccgaaaagcnaattgtatctaatgaatcaacaagaaaaacattggaaatggaat

SEQ ID NO: 76988 - DNA, 119 bp, Zea mays
atctaactacaataaggccagactaaatgagtagcgggagggtggcagaagctgcaaatgtttgcggatggcgattatacctccggcgtgcaagtgaaagaccccacttgcattgaatg

SEQ ID NO: 76989 - DNA, 275 bp, Zea mays
  unsure (1)..(275): unsure at all n locations
gcaagaacatatgatgatgtctatggacaacanggtataatgcaacacactaacattactcncccttacacattatacatatgtagtgatccttgatgcaccataactcttaactcgatcaaccttgtgagagcacctagagggggggtgaatangtgatcctcgtaaaacttgaaacttaatgccacacaacttgattatgagttatcacaataaagccaagtggctatagaggagttcttgccagacacgataaccacaagaaaatcaacaca

SEQ ID NO: 76990 - DNA, 204 bp, Zea mays
  unsure (1)..(204): unsure at all n locations
gcacaggcacatacatatatatcnttttatgtatgtatatcttcttaacctttaaaagatactaacaagaaggggacgataattaatggttctacatctcaatatattttatgattatatgttgactccgtagcaacgtaccgacatacacctattaaataaaataaatatggtcttgagttttggaagcgagacctgtcacca

SEQ ID NO: 76991 - DNA, 308 bp, Zea mays
  unsure (1)..(308): unsure at all n locations
actcagctctatcagcggacgtactggctttgatgtccctatgcacgatccctggcgagcaattttggtgcanatatgccaggcctcgagccgagccaagcgcgaatttcatccgcgcgttccagntcaatggctgctnctcttgttcatctcctgcattcgtaggcaccacaacatgtaatgcatgcagcaggtatagcaaggcatcacatcggtggtaaatgcaagaaagaatgtatgcatncttaccatgaaagtagcaatccaagctgtccagctcaacgaaatcatatacgagtagcttcgct

SEQ ID NO: 76992 - DNA, 263 bp, Zea mays
  unsure (1)..(263): unsure at all n locations
acatagcttgaaacgatataagcaatggtaatagatatctggtatcagntagattgtataatcaaagctagacagcagaaaaagggaaataatntaacaaagcagtgatgagcatggaaataggtatcacaaaccacanaattacctgaaataccctaagcaatggtgcagctctcttggacctcttacttgtccaatatttatacacagcatgcacgttatcatcctttcctaaagcaggaatatctataaaaaactcactc

SEQ ID NO: 76993 - DNA, 299 bp, Zea mays
  unsure (1)..(299): unsure at all n locations
atctgctcggatatattcatccatcttctgaagctttttctctanggtctgacgggggttcctggcgaagtattgngctatatgtcctggccgaagccncttaatcatggcctcaataaaaatttcattaggcatcgntggcgcctgtgccctcagtcgtaagaaccttcggacatacgcctgaaggtattcttcgngatcctgagtgcactggaacaaagctcgatcagcgactggcttcgactgatatcactagaagctggtgatgagcatgtccttcatcttttgcacgatgtaat

SEQ ID NO: 76994 - DNA, 293 bp, Zea mays
  unsure (1)..(293): unsure at all n locations
atgcatcacaccttggacttggatgtgtgctaatgcaagaaggaatagtgatagcttatgcctcaaggcagttgagatagcatgagaagaattatcctacgcatgatntggaactatgctgtgtagtgcgtgctctgaagatttggaggcactatatgattagaaacaagtgcataatcttcacggatcacanaagctngatatatatattcactcagaacgaactcaatctaagacagagaagatggcttgagttgnataaggaatatgattnggaaatatatatcacaccg

SEQ ID NO: 76995 - DNA, 285 bp, Zea mays
  unsure (1)..(285): unsure at all n locations
ctccatctatattatggatngccttggaatcagtccagcttccttctgtccttctgtgcagcttctgactcccatgaatagcaataggcccttggtccgaaggtatcttcatgcagagataagctgggtgaagaattgcttcaaaagcatttatggtaccacgaccaatgatnggcgtgtangggtattccatgtcaacaatatcaaacacaatttgctcagtccttgtgttattaacaaatccgaaggttaccggcatggtaatcttcccgagtgccacaatct

SEQ ID NO: 76996 - DNA, 349 bp, Zea mays
  unsure (1)..(349): unsure at all n locations
aaaactactgtctagtacgaccgacgacggactatccattttttttttcgccagcacaactatattctatacatccctgccaggactataatatcaaacaataaggcttctacgctccagataaaaactgntcgactcgtcaaatatccgctcctaagagataatctcattagtgactgtaataacatttattaaagactaagcacccatttataatgacacatacacttttaaaagaataataactacacttatcggacattcgacaaaaaactacctgaatacgacgcggtccctattggggtaaatttctcatccaatagggactctttactctacttttttttct

SEQ ID NO: 76997 - DNA, 339 bp, Zea mays
  unsure (1)..(339): unsure at all n locations
tactcagcttctaagggacatggtangctacaatgtaattcaaaagataacctgtgcagtggcaaggggtaacaggggagcttatatataaaatggagacactcagacttggagtacttattggcctttcgacccgcgctactacatcgggaaaagttggttagaattgtgagattttccacttacttgggattttttgcggataattgaaccaagacctcaccttctagaagtaaagattactcaggaaaaagacaacggcataactaggagactggagagataccattcgtttcaccaaaagggtaagaacggtatctgagcactgagtaaccacgt

SEQ ID NO: 76998 - DNA, 56 bp, Zea mays
  unsure (1)..(56): unsure at all n locations
cactgaacagatgaacatcttcactgatntccaacatatgcttacacaacttctca

SEQ ID NO: 76999 - DNA, 287 bp, Zea mays
  unsure (1)..(287): unsure at all n locations
gacgcctagactctgcaatcacgcaaatggatcatcgctcttgagaattgagctctcgtttgagttgacactcnctgcgtcgtgtttgtgtgctcacttcttcacttgtgtgtgtgtttgctgagaatcgagtctagtgtgcgttgcttttccttccttactcttgtgcttctttgtgatctatattataagggcgagaggcttcaacttgtggagattcctcgcaaactggagaagaacactaaacacaaagaccgcggtattcaagttgatcattggatcacttg

SEQ ID NO: 77000 - DNA, 272 bp, Zea mays
catgtgctaagcggtgatgccacaggcacgccatgcaagtctttccatttatcatgcatctagaccggcctcttcttgtgcaaaatgaactaaataaaggttgccggcttatacatccttaatagctagtgaaccatcacttcttctaatgacagacacatgtatatttgtaaacagacagttatatcccatattgcaccattgactaacagatagtcaattatatcctagtgactctactaagaacacattagagagtaagtgctcattat

SEQ ID NO: 77001 - DNA, 279 bp, Zea mays
  unsure (1)..(279): unsure at all n locations
ctcagctacaagtggttcatatggataatgtagtaagtattcacataatcacatgacaatgggggatgaagagtaatgtttactccattcatntttggtcattggtntaccttgttatgggtgttatatcttgtctgtcatgataggaatttgtggagagacatagcaacatgtntatagcatatntaatatttactctcgtgtttggttaacatttaaacttcctaaggtctagcttcttcagcaccaacagtgctccaactgccaaaaagtttcatg

SEQ ID NO: 77002 - DNA, 312 bp, Zea mays
  unsure (1)..(312): unsure at all n locations
gatgtcagttatgttcttcacattctcntttccttataaaaagaanataaaaaagaaatctcaatcacatntctgttttgggtctcactctgactgtactctatatagaaggggcatctattgactgttagtatgataattactttctnctagctttgcctgtaaataaatggtaagaagggcatctttggtgctacattcctagtatcatctttgcttgtaaatcgaatgaattctctcttactctatctttggacctcactttgacgttgagtanaaatagatgtacatacaatacgccacantgggact

SEQ ID NO: 77003 - DNA, 325 bp, Zea mays
  unsure (1)..(325): unsure at all n locations
tgctcaagcttcataacaagatagagtctcggcanagnntaaaaatntcaacttcataaaacatcaagatattcaatcatcagatggctagggtatgctcaacaactaggtttactcgcgacggagaggaagccgaaggtgcagaaaccgctccaatctctgaattgatgaaacggtcagggctggtagtatcggaggatgcaccttccgctgaagctgagcaggttgatgctgangaaattgaatctgaagatgatacagcatcgtgcatctaacccaccacctggagttggaaatccacattaccgaaggattgctaactgat

SEQ ID NO: 77004 - DNA, 272 bp, Zea mays
  unsure (1)..(272): unsure at all n locations
tatctcaattctcaaccaggtatttcgctcgagccaacaatgtgtttgcgccttcagtgtgacttcatgtcgaanatgaatcaccccaaagcacccttcatatttttgcgaatccgggtaaagcagttggaatagggagtatacgtcacattgaaggatcagatntgaacacgctaatgctatatatgtatagcaatattgacagcacacaggaagcgttcgagtaagtttcctcatatttacgtcgattntctcatctcataanttctata

SEQ ID NO: 77005 - DNA, 190 bp, Zea mays
tctagaacaagcagagctgccgctcaacacagggcagctaccagcattagttctggatgtacgagccagtaaagggacggaattcttggtatttacaggacaatcgccgccggcacacaccccgattcaagtgcgttgtctgtcagttggctacccgtcccgccggtcctctctgctgcgcgacatgacg

SEQ ID NO: 77006 - DNA, 229 bp, Zea mays
cttgatctcgcttacgctctgcggactagcgaacctggtggctgaggggtgattttgccaggcaacttgcgctgcgcgatactccactaggagtggtgcgaagtatcggcaaagcccggagttagcgcgccgcagctgcccggctacgcccggacccccgttgcacttgctctaaggcacactgcccgttgcaattgcgggcgttcatgttctgaggcaactttctctc

SEQ ID NO: 77007 - DNA, 134 bp, Zea mays
ccaaaaccgcgtgcccatcgctcctgccaagcctagtttttttttcgcccaagatgcgcgatcggcgacactgccggggctcacagaactgcagtgcacaccaaactgggctttcctatacgaaaaaagtacca

SEQ ID NO: 77008 - DNA, 220 bp, Zea mays
atgcatctagaccggcctactctgtttgcaaatcaactaaatagagattggccgctaatacacccttataagctagtgaaccatcacttcttctaaagacagacacatctacatttgtgaatagacaattatatcccatattacataattgacttacggataacacattatatccaagcgactctactaagaatacattagaaatagagtgctcatttga

SEQ ID NO: 77009 - DNA, 312 bp, Zea mays
  unsure (1)..(312): unsure at all n locations
ctcagctcgtactccaggctgggatagatggaaattatgagatgtgatctgatgagatactgaagatagatntgggtagaatatcgctgcatggtgagacaaaatgcagcgatcactttgagaggatgttcacaaaagagagcacatcggtatagtcccataatggatcacgactattaaccgcgataccagcgcgtgccgagcagctcaaccatgtgtgcaccatagtatgctctctgtctcgtcgcggcaccatcatgtcgtagtcgtaacaccattaccaaacgcaaccaatgagaaatcacatagcac

SEQ ID NO: 77010 - DNA, 188 bp, Zea mays
  unsure (1)..(188): unsure at all n locations
tactcagctngcgccgtcactggcccatcggccggtcaatagctcgccggagcttctccgtgcgctgccgtcgtctgtgtcctatccgngcgaagaaaagaaactggagaccttttgcaagtgtcagtgccttgtaaacagtaagagaacccgttcgcagataatcagaaacgcgagggcccctgtgc

SEQ ID NO: 77011 - DNA, 343 bp, Zea mays
  unsure (1)..(343): unsure at all n locations
ctcagcttaccnanggacgtgaagagtgccttcctcaacggacctattacagaagaggtctatgttgagcaacctttctgctttgaagatagngagtatcctaacaatgtttacaaactctctaaggcgctttatgggctcaagcaagccccaagagcatgatatgaatgcctaagagaatttcttatcactaatggcttcaaagtcagaaaagccgatcctactttattcactaaaaccattgagaatgatttgtttgtatgccaaaattatgttgatgatatcatattngggtctactaacaaatctatttgtgaagagattagtaggatcatgattcaaa

SEQ ID NO: 77012 - DNA, 219 bp, Zea mays
aagtataagcagaatcgaactcgaaatattagcacggccgaagattggactcctttgaaggtttctgttaaatatcctcggagaaatgattgctattactactagcacgacacagggtgcatacttcgagatttttgaatcataaagcccttcggtgactcttgaagacagcctcacatatcctcgtatatgagactgaaactggatcattcttcttca

SEQ ID NO: 77013 - DNA, 311 bp, Zea mays
  unsure (1)..(311): unsure at all n locations
tcgtcgtacttcccttgatctatgtcgaagctnttctggtaacgaagctcctgtaatgcttaataatatactagaaataaatgggtagccgtgtntntgaggaccttcagaagacgaaagcccnccaacacttattacaagccaaatgttcaaagtcataaaccaactaanaaataaagataatacttcaaatccccagctcacttcctaaactctccctctttttggcaccaagcacctaanaggccagaananaacagttcacaacctactatatggatcaccaccagacggcagcgtgaagatctggt

SEQ ID NO: 77014 - DNA, 363 bp, Zea mays
  unsure (1)..(363): unsure at all n locations
cttcattccacatgtgctaagcggcgatgccacagccagcccatgctagtcttatctattaaacatgcatctagaccggcctcttcttttgcanaatcaactaagtaaagttggccgtctaatacacccttataagctagtgaaccatcacttcttctaaagacagacacatctacatttgtaaatagacagttataccccatgtngcataattgactaacagatagcaaattataaccaagagactctactaanaacacattagagatagagtgctcattagaaatggcaattnttcctanaccctttaccttgccttgattcccatcaccgaatacaattgaaacttgggaatccttactc

SEQ ID NO: 77015 - DNA, 388 bp, Zea mays
  unsure (1)..(388): unsure at all n locations
ctcagcttcatcttcactgcaatacaagaaatccgccctacaagatgtgccaacacataagcattttgtgcacgagaaatagacaagggtcacagagaaataaactacaagcagtaaattggcaagtattaatagggagttaaccagtattntagcgtattaaaagggaactgactagtattagtgaaacatcatgctttcagataaactaccttcgtcggttcattttcttcaggtataacatatgcagttcccacacagtaataaacattactatcatccgcanacgaacagctaatgatggagcagccacattcatattgatctagaggatatacacacagggactcanacgtctgatgatctagcagacgtattaaatgagtct

SEQ ID NO: 77016 - DNA, 307 bp, Zea mays
  unsure (1)..(307): unsure at all n locations
tcagcttggcttttttaaaacagttttttagcgcttccgaagatgtctgaagctgctaanattgttgcttgtgagatgaagctgagtcttgatgaagagaagaacctatggtttcttatagcgatgtcgaagtccaacacagaaaagattaccaaggaaattctggaggggctgtctgaagatactggtgacagtgaaaagtatgatatggacagcggtggcgaagactccgaagatcgcccctggcgaccaagccattcagtttatggtanatcaactatcanagagaatcatcttgntaatatga

SEQ ID NO: 77017 - DNA, 357 bp, Zea mays
  unsure (1)..(357): unsure at all n locations
tgacacatcnattcttctttaccacatngagatcacgtctcagttntgcattatcttttcatttaccgtaccaatcagtaaactccctgcctnctccagcacatggcaaacccaanatcagatgaaccgtgtcctttgntatcttcagttccttgccagcccctgagcgtatggtcatgtcatgtggatccaatntatccatcaaccacctgatgagtgatctgctctctaaggcatcagttcgcaaatcaaatatactagaaaatcccaacctagcgacagcatcgcgctgccgatcgctcattatccaagatgatacaatagcatcatatggaatgcagcggatattcaatttct

SEQ ID NO: 77018 - DNA, 384 bp, Zea mays
  unsure (1)..(384): unsure at all n locations
ngtcttggtacttgcgtgactatggctngccatgattattacagaagtttctaaaaacatgactatgtttgcatgggaaatactngagtggaagtntttcttacatattntcacactcctnctcaagcataacttctattaagtgttatactgcagaccatgctaangnggtgtttatgaagcaaagtattttgaagttntgaggtaaaccacggtattggagaataccatagtatttttggtgaaaggtgtttggctacaaggcacaaaactttgtttttgaataccatgttttgtagatacaatggtatttctggagtatttaanantctccaacccaagtttttgtctatgactagtctngcanatgtataccctcataca

SEQ ID NO: 77019 - DNA, 276 bp, Zea mays
  unsure (1)..(276): unsure at all n locations
cacgtgataggtctaactgatgtttcttttcgaaaagatagaccttgtgcatcttgtctatcacggaaacaggtgggaagctctcatcatgccaaaaatgtgatgacaacatcaagacccctggagttacttcatatggacctcttctgacccgtcgcctacctaagtatangaggaagtaagtatggtcttggtcatagtgatgatttttccgcttcacttgggtattctttttgcangataaatctgaaacccacgggaccctcaagcgctttc

SEQ ID NO: 77020 - DNA, 61 bp, Zea mays
gctacgtagtgatgccctgctgggtcaccttggtagtgatcacatggagagtcatgatatc

SEQ ID NO: 77021 - DNA, 364 bp, Zea mays
  unsure (1)..(364): unsure at all n locations
cagctntgagccatggtaagtagcataggccaataatatacgaatggactcaagcctagctacgggtgcatatggtttaccgaaatccaaaccctcgacttgggagtatcccttggccacaagtcgggctttgtccttgtaccacgccatgctcgtcttgcttgttgcggaacacccatttggttcctatcaacatttgattaggacgtggaaccaaatgccatacttcgttcctagtgaagttgttgagctcctcttgcatcgccaccacccaatccgaatcttgtagcgcttcctctaccctgtgtggctcaatagaggaaacaaaagagtaatggtcacaaaaatgtgcaacacgagatct

SEQ ID NO: 77022 - DNA, 211 bp, Zea mays
gatcatgggctcaatgagtaattcattgggcactgtaagcgcttgtgctctcagacgtgggaaccttctgacatacgcctgaagatactcctcatggtcttgcgtgcattgaaacagagcctgagcaatgactgtgcttcgttgaaagccttggaagctagtaattaacatatccttgagcttctgccatgatgtgattgtccctggctga

SEQ ID NO: 77023 - DNA, 302 bp, Zea mays
  unsure (1)..(302): unsure at all n locations
ctgacatggatgccacgcgtgtcggaagggaatcactctagtggatcccgcgcctggccctatactgactcgtcatanatagcagaccgcatttaaccacgtntagcaccgagccacagcgcgagcgctggagccttgccgtcgaaccaagacttagctaggactccaccctgtagcttctaagctcaacttacatcccgaanaaagacttgggagcctcnntctccctctctcgcccgcttgtaacccctactatgagttntgatcatcaatggtgccaatagcgcaagccaccaatgact

SEQ ID NO: 77024 - DNA, 321 bp, Zea mays
  unsure (1)..(321): unsure at all n locations
ctaagctgagctgctcccgagcacagagactgagatggtgccccatatttgggatgttggctatatgatcacagctgnatgcatgacctgcttctgctgagcttggtgtgctgntgcttcaacttatatcttttgcttctgaatagagacatggcacattctggagtatggctttggttcccgctaataagcaaagattttctcggtgatcgctaatcttctccgagccctggcgccttgctcttgagctggagtcgaaagaacttgttgtgcctgaacctggaggagattgggcctttgtgtgaccccttatatcattct

SEQ ID NO: 77025 - DNA, 294 bp, Zea mays
ctcatggtctacgctttctccctggattctagtccatagaccgacataaatgccattatcacgatgaatgcaatctatttctgacctcgcgcgagtgctgcgaaaattactcgagctctagcgagatcctgattatcaagcagatactcgagctatcatactactgttcatctcagaaaggaatactgaagacatgcatgtagatgcttcaagcctactctacacttaagtgcacattgctatcctacaagcattacagtggagtacagagcatataataacatgggtatgcat

SEQ ID NO: 77026 - DNA, 142 bp, Zea mays
ttctgagtagttccctacttgtatttatatcactttgtgttcacgaagctgacatattatgattcttttcttattcaaggagtatcatatgatcttataacactatttcctgaaacattgtatcatatgtgttcatgtatat

SEQ ID NO: 77027 - DNA, 500 bp, Zea mays
  unsure (1)..(500): unsure at all n locations
acaccctgaatagggatacctcctggatgtattaagggcctacgggttctctcagaaatggcgcaattgggtggcggacantttgggatcatcctcctcaagaatagntatcaatgggcaacgttcanatgcaatcaatcacaggtgtggggtgcgacaaggagacccactatccccctaccttttcattntagcgatgggtccattacaccggatgattgagaaagccgctggcgagggatngcttggacaggttttacctataggggctaagttgcggtgctctctctacgcggatgacgtgggtgtgttcattaaagctgacaggtcagacattgagggtgctcaatggattctcaacgtgttcnaggggtgctctggctaggatcaactatgacaaaacagaaatctacccaattcgtacccgacacattatggatgcgctatggngtgttctaggcaatactctacctccncggaagacctcggggtacccttca

SEQ ID NO: 77028 - DNA, 228 bp, Zea mays
tcagcttgacttgcctatctgcatgtcaaagataacttgcaaagtctgctacatttctaaggtcggttcagacggggtctaccacatgattcactgccaccaatggtcaccaccaccaagggatagtgcgaatggctaaagtgatcccgctctgttcccccatcgtcctgtaggtcactcccgaacgcacgctccacctgtttcttccgcgcactttaaggctgcctc

SEQ ID NO: 77029 - DNA, 330 bp, Zea mays
  unsure (1)..(330): unsure at all n locations
tcagcttcttcgcgccatagcaaggtttatgattgccaaaggtgttcaacactcatagagtggaagtgagttcatctgatgtgggcgccaatggtggggacttgntctcaaatgttataagtaaagaacaaggcaacaccacaaatgttaaacgttaaagtccttcgtccttcgaagcattatttcccttgngatataatgattctcggacgaaggttatgaaggacataccttcatcaacacaacatataataatgaataaggaatcatatggaatataacgtaaacaattatgtataattatcaactcatttctatattattattatg

SEQ ID NO: 77030 - DNA, 238 bp, Zea mays
  unsure (1)..(238): unsure at all n locations
atgccagagagccttcngagttattttctcttttattggaacgagggatctggtccaagagcatattgccttcagagtatggccgctcgcggaanaatgggaaatgccgcacgagaccatataggaagctgacgaaagtggacttatcaagctgaagtatactttcaagatcggagataaattcgttgagccagatgatgactggctaaaaagcattgagaatgaagtgatgaactac

SEQ ID NO: 77031 - DNA, 294 bp, Zea mays
  unsure (1)..(294): unsure at all n locations
gcttgacatccagccgatgggaagcagtggcaagaattcaatgagaaccaccgagactctgccgatgaaccaatatatgttaggttcacactgagtactgatggaatgaaactatttgctgaaaggagcagcaagcatagcacatggccagtgatcctcaccatatacaaccttccttcatgggtgatgcagaaacggaagtacattntgctaaccatacttatttctggacctacacaaccttggagtgatatggatgtatntntagagcccttaatggaggatatgaaaata

SEQ ID NO: 77032 - DNA, 395 bp, Zea mays
  unsure (1)..(395): unsure at all n locations
cagcttcaacttcacacttgcaactagagcaagaagcaactnctttgatcctataactggatcttctatatcttagggctagcgcattatatattntatnnttgtgctatttgacttgtcctggaacacatattnntagtatttactgtctactagagtattattttgcanaccttcttagttggctcggctgtaatggctttatcagactgctagtctggcacaatcgaataagctgttctttttcttggttgctggttggaattattcttgtttgtggctcggctgtcatgaattaactggtagcctataacaatgtcgggtgtcatgttgctgctgctggacatgaatatttcttgattattggttgtatgttgatgctganataatactta

SEQ ID NO: 77033 - DNA, 371 bp, Zea mays
  unsure (1)..(371): unsure at all n locations
gattcttcatcccaacatgaactagtcggcggtgccagagccaacccatggtggtcttatcaattaagcaagtgtcgagttcagctctgtcaaaatccaccagatatagctgaccctctaacactcccttaaatgctattgaatcatcacttcttctaaagacagtgacacctacatcagtgaatagacagttgtagcccatttggcataattgagatacggaaagcaaattgtaatctaatgaatctacaagaaaaacattggaaatagaatggtcaggggatatatgcaatttacccanacctttgaccaaacattgatttccatccccgaatgtgatcgctcttgggggatcttggtttttctcatat

SEQ ID NO: 77034 - DNA, 205 bp, Zea mays
  unsure (1)..(205): unsure at all n locations
catgaaagggaagtttaaagaactttgagatataccttcatcaattgacatccaatgctattgntaggctcagtgtttntatatgggctctctgaagccagggtatggacgctcatgctgatagcttttgccgggtacatgaactgcactatcagacgaagtccagagcagatggtcttcataagaactttggctgctacaacat

SEQ ID NO: 77035 - DNA, 180 bp, Zea mays
  unsure (1)..(180): unsure at all n locations
tattcagaggagaagaaacttgcaatggcatctcttgagtntgaaggatatgctctgatttggtgggagcaacttcttcgtgatcgtgaagacgatggagaggaccctattattacttatcaagagatgaagcgagaaatgagaannttgtttgtgccgaagcattatcggcgtgatctt

SEQ ID NO: 77036 - DNA, 388 bp, Zea mays
  unsure (1)..(388): unsure at all n locations
tactcagcttctaagggagaacacgtgatatgtgatagtcgcctagagggggggtgaatatggcgattctganatntacaaatataaacacaactacgagccgggttagcgttagaaatataaacgagtccgagagagagggcgcataacaaatcccaagcgaataagcaagtgagacacggagatttgntntaccgaggttcggttnttgcaaacctactccncgttgaggaggccacaaaggccgggtctctttcaaccctttcctctctcanacggtcccacggaccgagtgagcttctcttcttaatcatagccggaacaaaactttcccacaaaggccaccacacaattggtgcctctgccttgttacaatggagttgtgatc

SEQ ID NO: 77037 - DNA, 244 bp, Zea mays
  unsure (1)..(244): unsure at all n locations
tttatatcctgctaattatcctgagcacaagattatganaattcatgctangaaacctcataatatttctcaccatgcttttatgtataanaatgaagcctctagctctangcattctacacatgttaaaatgtctaataagaaaactctcgctgcatcaaatgagcataacatttcattcaagactcttgatgcatcttatgtgctgactaacaaatcagacaaagtagttgccaaatatgtt

SEQ ID NO: 77038 - DNA, 298 bp, Zea mays
  unsure (1)..(298): unsure at all n locations
ctatgaagatcttcattccacatgagctantcggcggtgccagagccaacccaagatagtcttagcaaccatgctagtgtcgagntcagctctatcaaaatctaacaagtatagctgaccctctaacactcgcttaaatgctattgaatcatcacttcttctaaagacagaaacacctacatcagttaatagacaattgtagccatttgacataattgggatcggaagcatattgtatcttagaatctacaagaaaacattggaatagtatggcacgtgatatacaatttacccatcc

SEQ ID NO: 77039 - DNA, 242 bp, Zea mays
ctagatgcatgcttaattgctaagactatcatgggcttgctgttgcatcgctgcttagcacatgtggagatgaagaaccttcacaagcttctatatggagaacacgtgatatggttgactaacgtacaattcgaataagatagaccttgtgccgcttgtcacgcaggtaaacacgtgggaggagcgcatcacagcaagaatgtgatgaccacatctagacccctggagctgctacatatgga

SEQ ID NO: 77040 - DNA, 277 bp, Zea mays
  unsure (1)..(277): unsure at all n locations
agtctcggtcttagttagtcttatttagacagggcagaacgctatattctgtcatttattgtntgcatgaagaaccacagttgggtcggatctttgtaatgattgtcaccacactgtgagaccccctgcttattggttacatactatgtcaatatagttagatatatatgtgggaaacccattattctcctctcctctgtatctgagaagctgtgtgggctgtgttggagatcagtgaagatgctcacttgtcagagctgcaggagaatctatactc

SEQ ID NO: 77041 - DNA, 148 bp, Zea mays
  unsure (1)..(148): unsure at all n locations
cagcaccgtgccagagtcaaagcacatctattgacgaatatcctaccctaatagcaatcttttctatccacgttctgtcttctggaataaaggatatcgattaggnttcatataaatacctttcgtgattcccacaaagaaaatatat

SEQ ID NO: 77042 - DNA, 193 bp, Zea mays
  unsure (1)..(193): unsure at all n locations
cttcagttcagcttatcacccgtagacagacgggtatactgtattatcttatcanatcctagaagatatgttgagagcctgtgcgttgcaagacaggtcaggatgggacaaaagattaccttatgcagaattctcctaccacaatagttaccacgccagcttgaagatgtcaccgtttcaagcactctatgga

SEQ ID NO: 77043 - DNA, 464 bp, Zea mays
  unsure (1)..(464): unsure at all n locations
gacaaacaaaccagaaaccttatatatgacactcaatatgtgcgccgtgcggagtgtaatgacagccaagttacttccaactttggcacgcactgtccactcgttatgcgaattgtacaatntggatgggtagaatctccagcaggctctctatncacatctctatcttatctttctatttcaaactacactctgcanacagtntaattacaatatataatagttctttgcacgatcatttacacgatatgttgaagatggcttatactctgagagcagcaccaaaaaacggtcatacttgngatggttcccggttcaccctcagcgnggagctgtagttataatatcaacttaatagtttaaacatatttaatctaataatcacaaatgattatctaatgtctataacgctaaagtctacttacgatttctgacattaatacctgtcaccactcacaatttct

SEQ ID NO: 77044 - DNA, 244 bp, Zea mays
gaataattgatgctcaaaaggataatctgggtatgaagttctttctatagaagataaaggctggagtagcccaatgtttcaaggaagacgatcaaggtgtgatataggttaaaaaccgcatagtagtgccaaagaatgaagagctccgccagcaaattcttgatgaagcacatcttagtcgttattctattcattccggaagcactaagatgtatcaagacttaaagcaacactactggtggac

SEQ ID NO: 77045 - DNA, 380 bp, Zea mays
  unsure (1)..(380): unsure at all n locations
gtagaatacactggtnaatagttgaatgagacataagacgagagacagtcttacaggtctncagtctatattaccaattcgattttttttctgccaataaagttaagtactatatgctntntatgtgctcaaaagtntttntaacaataataacattgaccataagccagccggtctacgtgtgtgcagtcttcctatactctncaacaatagctctaaatttcgtcctctaaaanaatattctctaaattttaccaaattctnntaaaaagttcatcctatacatnnttttatctccaacaaccgttctctaagtaggtcttctatgtctacagtggtaacagactttattaagggcattgggtttttcattttcgtac

SEQ ID NO: 77046 - DNA, 282 bp, Zea mays
  unsure (1)..(282): unsure at all n locations
ctcagctaagcccaaactngattagtgtagcacagngaaatcaagtggctaaagatcgagctcttgtgaaactcaatagtcacagtgagaacaagcacaagagacacgatgggttatcccatggttcggccaagtacaacacattgcctactctcacgttgtggcgtcccaatggacgaagggtgcactcaacccctttcaagtgatccaaagatccacttgaataccaccgtggtttcctttctttactatatcccgtttgcgaggaatctccacaacttg

SEQ ID NO: 77047 - DNA, 255 bp, Zea mays
gccgagtaagccactggagcaccaacgttggagacattacctctgaggattatttctagtcggcttaccaaatcaacagaaggaattctcctattggtaactgcggttgagtccgccagccctcggtaaagatatgccggataagccctgtctttcagcggctgaatagatttgaaaacgaaatctgtgaccacagcttcggcagtcagacctctctctttcagtaatccgacttcagtaagcaacacgccttgc

SEQ ID NO: 77048 - DNA, 313 bp, Zea mays
  unsure (1)..(313): unsure at all n locations
tnctttacagtctatgttatactgaagaacatgttagttaagtttttgaggaccttcgtaagaggaaggcccccaacacatggttataacctgaataaaaatacagcctataatcaagctatatatcannataaangttaattagttctcacatgatttatattaattaacatataatatatctcttattggttaatctcctaaatctttggaaaatcatatcctcttcaccggaactctngaattagtggtctcgaacctatgacctcatagctacgcctagaatattcttacgtggttgggtgcatgtttg

SEQ ID NO: 77049 - DNA, 359 bp, Zea mays
  unsure (1)..(359): unsure at all n locations
tctanagggagaacacgtgataggtctaaccaatgttactttcgaataagatagacctttgttctgcttgtcaagcaggtaaacaagtgggaggagcgcatcacagcaagaatgtgatgaccacatcaagacccctggagctgctacatatggacctcttcggacccgtcgcctatctaagcatagggggaagtaagtatggtctatgtatcgntgatgactnttcccgcttcacttgggtggttcttttgcaggataagtctgaaacccaacggaccctcaagcgcttcctaaagagagctcatnaatgagttgagctcaaggtgaagaagataaggagcgacaacgggtcccgagtc

SEQ ID NO: 77050 - DNA, 322 bp, Zea mays
  unsure (1)..(322): unsure at all n locations
tatcatctntcatagcanaagaatatactcattcaagactatgcaatgtntttgctcttggacattggatgtgccatcatggagctcatngcaatttagccaaatctcattagcagttctcaaggtaaatacttgattataaatatccatgctaagagattcatancaagcaattttggctctagcatttaaatgaatntctttttcctcactcgtggtgggtttctcgggattcttgagaggtttcatcccgtcacgagtgactctccatacacctagatcaacggcctctangtaacaagccattctagcactataatat

SEQ ID NO: 77051 - DNA, 358 bp, Zea mays
gcccataaactcagctgactcttcagtgatctatcgtgactttcctcttcttaccagtagcctaaaacaccgtctcggtctacattaagggtcgctctcccgatatgctaacgtgctctaaacttttgtactatatataaaaattgcacgcccatctctatttgcaattagacctccctactatttatattattacttagtgccactgtagataagcaatgggacatatgctaaatggcgtctcaaatgatcatgcgcccgcaccttttggatctcactgatcacatgtatgctaccccgggcgttcagaaagctttggacgcattaccaaacaactacgcagatccaaactctattc

SEQ ID NO: 77052 - DNA, 257 bp, Zea mays
  unsure (1)..(257): unsure at all n locations
tanagccatggtaagtagcgtaggcaagtaatatgcanatngactcaagcctatctatggtgtgcataaattcatcaaattccanaccttcgacttgtgaataaaccttggccacaagtngggctttggttcttggcaccacaccatgctcatcttgcttggtgcgaaatacccacttggtacctacaacatttngattaggacatggaactaaatgccatacctcattcctcgtgaanngtgtgagttcctcttgc

SEQ ID NO: 77053 - DNA, 237 bp, Zea mays
gctcttcgggtgagcaagggtaattaggcccacatgaactttcaaccccaccccaagtagctgaatttcacccacccccattaaagttattcaaggtttaagggtttgtttggccaaatagaatatgaattgattgggagttaatcatattcacatggggcatctgctttacagtaagcttttcataaactgttattctgtttgtggtgctcatacaaagggaattgagaatgcccg

SEQ ID NO: 77054 - DNA, 211 bp, Zea mays
atatgggctgtgccccgtgcctataaatatgtgaacagtgcccccgtactggtcacgctgacttggcatttgcttttgcgtcacagcttgtcatttaccttctttcaagccgaagggacatttgtaaattgatatcatttctattcttccatataaataagatagaaatgaggtgagaatgagatataattgggtatggtatcccttatat

SEQ ID NO: 77055 - DNA, 268 bp, Zea mays
  unsure (1)..(268): unsure at all n locations
tacaattccagntgggatgggtacaattaaactatattggtgggacagcatcatacaatcaggcagnggaatagtgcatgcaagtggaggcttggatggattgggccttctgcacaaaaacaggtaacaaaggccagtgatcatttgtcagtcttacgccagatcacatgcaagtggatgtctggatggaatgtgctttctgcacataaacangtaacataggccaatgatcatttgtcaatcttacaaacagatcagttaagaagta

SEQ ID NO: 77056 - DNA, 437 bp, Zea mays
  unsure (1)..(437): unsure at all n locations
cttaagagtgcatgatactatctgccatgcttcgganaggcctttctantgtttaagaacgagaagctcaacattatgcccaagaattgaaatatccgaggggagcattagtgctcaatggcagcggggaggaagatntnnttgaccgtcttccgaatagtanagagatatccgtctgccgagagatgggtagaagcttcngatntccgaaactagaagatgggctctcagtattatcaaatggatgaatggctgacaatntagcatataatatcataaaggtataaaagttaattttgtattttgaaaatgagttgtcttatttgttggtgttaatcccgcctcttcttgcanggctaatcttagcatgccctagagacagaaaacattgagataagggttacatgctctgacaccttcttgagtgatgactaaga

SEQ ID NO: 77057 - DNA, 394 bp, Zea mays
  unsure (1)..(394): unsure at all n locations
gcttagcacctgacantaaaatacttcactcagttanacaagatgtggaatgaatattttgagaagtaaacttggtcgaagcagggtaatacatggcatgctttcacttctttatacaagatatgcaaggaatgtaggaagatttacgtacatgtatgaataagatcgaatagtntacccttttgtaccttcacatacggatgctctcttcattgagcttngtccttagtcttagtcccttaagacctatactcaagacaatgtaattgaaaatattgtgcacaagagagagttctacaactagtgatccttttctatgtcatggtatcatatattaagtagatcacanattgcataactatatcatgaattctncctttacttagtgcatatc

SEQ ID NO: 77058 - DNA, 202 bp, Zea mays
tgcagcccataaaccgctgcctgctgctacaaacaattcgaagagaaatcctttttttgaggaccaaacaggctaacctaccaagggcgcgcaacagggatgccaaatcccaacctgcaaacccccatccacgggccccccatgaacgagaaagcaagagaccacgtaaacccccaaccaagggagggcaagacgcgataaa

SEQ ID NO: 77059 - DNA, 135 bp, Zea mays
  unsure (1)..(135): unsure at all n locations
acttgtcgggtcacttctgtggtgcccacctgcaaacangtcagcttcactaggcacctctttatcttgatacatgcatcgacgatacttcaccttgtcctgacaagtcccgaagcttactatcgccgacaatgt

SEQ ID NO: 77060 - DNA, 339 bp, Zea mays
  unsure (1)..(339): unsure at all n locations
ctcagctngacgcctctctgcctgagacatcggaatgtcgcttcaaggtcagataagaggtcggaagctnttctcgtcttgactatgatgtcatcgacgtaggcctcgaccgtgcggccaatgtgttcgctcgaacacatgtgttcatagcaccgctggtacgtctgcgccccgcatttctcaagccgaacggcatggtgacatatcagtacatgccgaaaggtgtgatgaaagaagtcgcgagctggtcggactctctcatcctgatttgatgataccctgagttagcatcgaggaaagaacacggttcacacccaccagtggattcacgatttgatc

SEQ ID NO: 77061 - DNA, 318 bp, Zea mays
  unsure (1)..(318): unsure at all n locations
tactcaagctctccaggcgtctcgagcccgncttcgctcacaggcccgggccttctccgcgtccttcttcttcttcttctcctccgcggcgacccgncgcgctgctcggtccaccgcatcttgcgggacccgtggcanggaaggcttgtgccaccccacctcctgaagaagggggaanaccccaaccgtaagaaccaggagcaacccgatgcaagaggaaagaagaagcggacactcaccagagtcacgcacccttggtctgggcgcatcgaaagctgggagtatgcggtggggtccgggcttcccaacgcgatggac

SEQ ID NO: 77062 - DNA, 338 bp, Zea mays
aaaccactggagtgtatccctggctacggagccagcccctctttttacttaacagctcagacggtttttttgaaacactaataagtgcgctataaccctaaagtgggaaccatattctctaaaacagaacattacattgtaataacagtatcccctgtgctaatgactacaatacaattatttcaagactcactaacacattaaatgggccattgaatgcatttacctacctttacctgctgatccataccaaatgatgatttgggacctattctgacgagaggacattttttccccgctatgggtggctcgttaaaatcactgaccccgagctaact

SEQ ID NO: 77063 - DNA, 283 bp, Zea mays
aatatctatatgcctaaagtatattatgagtggcgataacatgtttatgactatagtaattcacctattaaagggggaacatgcctacgctcaagttctggtagtgcgaaatgtgaatcttttgtgtatctagcttcttctaacacatgaatcaatactttgtgtaatgcacaataaatgccctaacattagcatatccagaaaacgctaatgtgtataaaccagaaattcctagtacaaacatatctctattgctctgtcataaatgaaactatcagatctc

SEQ ID NO: 77064 - DNA, 103 bp, Zea mays
  unsure (1)..(103): unsure at all n locations
gacggaaatcttttgccgagggaaagcaaaaagtcaaaatatcataataaaaaccaccacaaaatatgcgaccgcacacaccctatgtntctggagacaatat

SEQ ID NO: 77065 - DNA, 229 bp, Zea mays
accacttggacggctccaactgtcagctttttttttcatgaagaactttggacctcccccttaagaagaggagactccgatttgggttgaccctgaaacctatacaaagtaccggctctctgtatgcgttgacaagtgcgagaaaactggccaggtgatcaggaaacctctctatctccctcacacttttcctttactttactttactgccttctttttgcctccatga

SEQ ID NO: 77066 - DNA, 126 bp, Zea mays
  unsure (1)..(126): unsure at all n locations
acagtgcaatagcaatgaatgttgtggtaacttcacacctactcgtctgttatatagngctgcaggtaagaaggtgaatcgtcaagtcttctacaccggacgaacagtcgctcgcacccactgaac

SEQ ID NO: 77067 - DNA, 283 bp, Zea mays
cgcggggttgtcgtgttctttttaacatgaatcatttgggtggtatgaaagactcgcaatctcaaaatttcggaaaagccacttaaaaaattagtgaacatttaacaataatgtgcaacttttaaacccctcttaaaatatcagaactgtgtatattctcaccatggcagtccgggttggaaagtaaaatttctggcattgctaaccctggggtgggagacaccattgtggagctagtcatacatggccctggtttttattattctggggatgatgcggaaga

SEQ ID NO: 77068 - DNA, 116 bp, Zea mays
tgcatgggattacattcagtttcagacagaattcagtccacatgacaccactgatgcgcaacagaccgagaacacctatcgctatcactatatataatgaaggaactgagcatcgg

SEQ ID NO: 77069 - DNA, 193 bp, Zea mays
  unsure (1)..(193): unsure at all n locations
tttaacacttaaattcttactttttatgcaaatggtgatatttgaaatatgcatgaggtactacaattatggggagtattcaaaacttaaatcactcgtgaaaacccctattgcaaagcccaaatgcaaatttcaccattttgctattntctctaaaaattatctagcctatggcaaaatattttgaaaatta

SEQ ID NO: 77070 - DNA, 306 bp, Zea mays
  unsure (1)..(306): unsure at all n locations
acaagaatagcaccaccgagagcgtgggtttggtagacatcagcaccaatctcgtgcctcggtcaagtgtacgtatcagtcgaatccatagcctcgtgatacttctggcatgagtcataattnntgattgggaggataatcaggaagcaaatagagggggtcaaggtaatttgcctctgattaatttcccgcagttcgatggtgataatccacagctgtggaaatcacgatgtgagagntacttcgacatgtattaagtagagagacgcaaatggattaaaattgcgtatatgccatttggaggac

SEQ ID NO: 77071 - DNA, 227 bp, Zea mays
  unsure (1)..(227): unsure at all n locations
gatcttcgggtcacatatgtcttggctggttgggagggttcagcacacaatgctctattactaagagatgctttagagcgaaagaattgcctctgtgtaccataacgtanatatatgagggtcgaaagttatacttattaataatatttgttggtttgtggaattgtgaccaacttgtatatcatatattagggaaaatntatatagtggatgttggatatagagac

SEQ ID NO: 77072 - DNA, 317 bp, Zea mays
  unsure (1)..(317): unsure at all n locations
tcttggcctcagctcccatcgccaccaccactgcaacctacttattcgcgaagccagcattcatattgtttctctcactcncaacaacaacgtgacttcagggaggtgtatgaagctcgtacaatcaatagcactgtaccagaatcaaagcacatatattgaccaatatcctgttcctaaaatactnttatctcctatcctagctctttgttgtctgaataaggaacaagcaatagaaatctaagttatatttcttgtaatgattctgctactatcagaatggaatacatcttcttcacagatttacgaagctcaaa

SEQ ID NO: 77073 - DNA, 284 bp, Zea mays
  unsure (1)..(284): unsure at all n locations
ctaagctatctaacctggagganagctaccctaaagggttctccttgagtcttacggaagaattatatgtgcattaaagctcatctcaacctgagaggaaagcttatcctanaagggtgttccttgagtcttanggaagaatgtgtagntttggtgatactacttatgcttcttattgtattatatggtgataatgcaaaatcagtgtttccgtcgatatgaatcatttagtatcttctgtgttatcctgtaatagaaattcatgtggttctggtgctttaaaa

SEQ ID NO: 77074 - DNA, 276 bp, Zea mays
  unsure (1)..(276): unsure at all n locations
tctgtanatcatatggccaatctaatatctgtcttcctcaagttatgcataaagaataattcaaaagccatatgttatcttggtcacaatctggacatcatanacccacatggtgaaggtggctgatggctgaagctctcanttctgaaagtgacaaagcatttgactaaagtagaattagacatgcatatacgtcattgtggcttatagtggaaagtaacaagcatcattttgcctttggccaaattctaattgccatttgtattgcaaacattt

SEQ ID NO: 77075 - DNA, 238 bp, Zea mays
atcaattaaacatgcgccgagttcagctctatcaaaatctaccaagtatagctgaccctctaacacacccttatatgctatcgaatcatcacttcttctatagacagtgacacctacatcagtacagagacagttgtagcccattttgcataattgagatacagaaagcaaattgtaatctaatgaatctacgagacacacattggacatagaatggtcatgagatatagcaatttta

SEQ ID NO: 77076 - DNA, 260 bp, Zea mays
  unsure (1)..(260): unsure at all n locations
tctattgtcactntgatgctcgtgtgcagagagcatcgcggcattgaccactctcctgtgtgttggctgtaattggtgtctgcaaaatgcaaatgtattcactgagatctatagaattaatgaacttatcttttgacgaaggggcagaagcccctatttcattatgaaatangataagtgacattacagtccgaaatgatgagatacaacccatcaccaaaagaacacctagtggaactaacccctacatactatcatac

SEQ ID NO: 77077 - DNA, 486 bp, Zea mays
  unsure (1)..(486): unsure at all n locations
cactgctccggaccaccccatgttatgagctcctgttctttanaaccggcccccatgctaccagaccccctgctctcgtataggggtcctaaactgcangcctggctactcaattcggatgtcattatgccaggacagatgggaactgtacgggtgggctatgtaaaaaataatatccggaacctgcangataaaaccatggaggcaggaggataatactgtcatatgagcacatctacgtggtaaatcttctctttataactcgacatgcatgggtgcaggccaacaggccgggcttatgatggcggacctcacccggctggcgtacacgtatgcacaacctattacaaagggagaaaactcaaccctagactgctttatggatagaattacggtgcccatgggtangagaggactctactatagcatgcggttactctgggctgccattttgtcactgagggttctccactgtggggttatgaa

SEQ ID NO: 77078 - DNA, 264 bp, Zea mays
  unsure (1)..(264): unsure at all n locations
ctgatcttgtatgtggatgtcatattatntgattgcgaatgacattcctatgctggagtccgccaaggcttcacttgaaaagagtttntctatgaaggacttatgggacgcagcatatattctgggcataaggatctatagagatatgtcgaaaaggcttatacgattaagtcaagaaacgtacatcgactagggtgtgaaacggatcaacatggaacagctcaagagaggtttcatacctatgtcacatggtaaacaccttag

SEQ ID NO: 77079 - DNA, 288 bp, Zea mays
tcgagcacacatgcgaacacgttacataacatcgggcctagatgctgtcatatatatgttactaccacttatcgagcgataaaggttatgatcgaccatagtacttccttcatctaagtctagacgaccatgtgccgccataggagtctagataggcgttgcattatctaagccgaacttcttgagcatgtccctcaaagattctgattgacttatcataattgcatctttcaattgtttgatctgaagaccaacaaagaagctcaattctcctatcatagacatttc

SEQ ID NO: 77080 - DNA, 298 bp, Zea mays
  unsure (1)..(298): unsure at all n locations
tcccatgaggtatattgactttcactagaacatcagctgttataacaaatnncacaaaacacaagtnaagaaatttagaacacgaacctttacatanggcaagcagttctgatattcatggactgtcccaagataataagaataagggcgccgncagccaccacangatacttgagccatctatatatatagaagataanaagttgaactgctgatagatgaaccgttgatctgactgccaattcatatgctacatgtgttctgtacctttgttcattctcaaggtccanatgataaa

SEQ ID NO: 77081 - DNA, 341 bp, Zea mays
  unsure (1)..(341): unsure at all n locations
tgtcatgganagaataatagagctagctagctangtggtctcanattatatacaacagtatgtgcgcactctgtgcagctagcctcatcagctcgaagttataggtgtggtggcaacanaaaccattcaatttccatgcatggacgactatgctaatagtccacaaaattatttgtctcatgaatcttctttttctggtttactgntatgaatgggactgatataacttaagctgagtgcaagtaccaagcaagttgtagatcgaagaaatctacagtctaatctattggcctttccttacatagcatagagccatctacacagagttagctaaattggtt

SEQ ID NO: 77082 - DNA, 282 bp, Zea mays
  unsure (1)..(282): unsure at all n locations
gaagtcttggctgtcaaactgcttgtcgtctctactgntatttctgactgtactccgaagcggcaaacaatgttttgccaaaagaaccattcgggcagttttcgatgttattgtggaaacagcccttgcctcgatccatttggtgaagtactcgacagcgacgaaggcgaacttaatgttcccctgagcggtgggcaggggcccgacaatgtccacgccccagcgctagagaggccatgtgtgggcgatcagctntgtatactgcgaggggctgcctgaccg

SEQ ID NO: 77083 - DNA, 325 bp, Zea mays
  unsure (1)..(325): unsure at all n locations
cactcagcttctaagggagaacatgtgataggtctaaccaatggtcatcttcgaaaagatagaccttttcttcttgttttcacggaaacaggcgggaggagcgcatcacagcaagaatgtgatgaccacttcaagaaccctggagctgctgcatatggacctcttcggacccgtcgcctatctcagcatanggggaagtaagtatggtctagttattgttgatgactnttcccgcttcacttgagtgttctttttgcacgataagtctgaaacccaagggaccctcaagcgcttcctcatgagagctcaaaatgagtttgagctc

SEQ ID NO: 77084 - DNA, 312 bp, Zea mays
  unsure (1)..(312): unsure at all n locations
cactcaagcttagtgatagngagagagatctgcttgtgctctttcgagctcttgcgctcggattgcttctttcgttctttcttacgaacaacncaatcgtcatcgaggcaagagacaccaattgtgtggtggtccttgcggcgaattattgttcccgttcgattgagaataanaagctcactcggtccgagggaccatttgagagatggaaagggttgaaagatacccgttccttgtgaccacctcaatggggagttggtgtgtcagaaccgaacctccgtaaaacatatccgtgagtcacactctttattc

SEQ ID NO: 77085 - DNA, 307 bp, Zea mays
  unsure (1)..(307): unsure at all n locations
gcataccttatatatttttggttgttaaatctaaagntcctgatgtgtatgttgatactattatggaatacgtgatgctacntctttgaacacattttcaatgaaagatttacgtagcaattctagatactcttctgagataactcctgtacataatacacctgcttgggattttgaacaaccacatgagattntcctaaaggatgatgacaatgatgctccgattaagagtaagagatagagggctaanaatcctttggtgataatttcattgtgtacctcgtggatgacactcctactaccatta

SEQ ID NO: 77086 - DNA, 283 bp, Zea mays
  unsure (1)..(283): unsure at all n locations
ctcagctatgaaactctcatccaacatgggctagtcggcaatgtcagagccaactcatattagtattatcaattaagcaagtatcaagttcaactctattaacatcaactaagtatagctgaccctctaatactcccttaaatgctactgaatcaccacttcttctaaagacagtaacacctatatccgtaaaaagacagntgtagcccatcttacataattgagaaatagaaagcaagttgtaatctagagaatctacaagataaacattggaaatagaatg

SEQ ID NO: 77087 - DNA, 460 bp, Zea mays
  unsure (1)..(460): unsure at all n locations
ttactcgcgggaaataaaccatggaaacaagtgatggaatgcatattctttcaagtgacggaatggtcaaattggttgcttttgttagctggataagtgttcagctaatttgagttaacgtgctctcattctatgagggaaaaagtacatattacttcctttatctatggacaatgtctatatagccctctaaagtaatnnttctggggttaatttactcctncgctcaattgagttggtttagtttagcccttaacaaaatttgtatcttttaattcttatatagaaactgacttcttagttaaccgttgttggttagagctactgatataacttagcatagaacaatatattatgatcttctaataatatctttatagggtatgaataagataagatatacattctaatggacaaactaaattgaatatgatgaatatctaacatatttataatatat

SEQ ID NO: 77088 - DNA, 498 bp, Zea mays
  unsure (1)..(498): unsure at all n locations
agatggcgctcgtcatcaagagcttncaccacatcctctatcttaggttgtggaangactacacgtcccgctccaagaagggttgctacaagtgtggtaagcccggtcattttattgctaaatgtcctatatctagtgacagtgaccgaggcgacgacaagaacgggagaagaaaggagaagaaaaggtactacatgaagaagggcggtgatgcccatgnttgtcgggaatgggattccgacgaaagctcaagcaactcctccgacgacgaggacgccgccaacatcgccgtcaccaatggacttctcttncncaacgtcggccacaagtgcctcattgcaaagaccgcaaaagaatgtaaatctnatcctccactaatatgaacctctagtgatacaatgctagtgataggaagataattgcgtccctttttgcaacttacatactcaaaggaaaatgatgaatggtagtgtatcatgaaaggatgacttttgatcc

SEQ ID NO: 77089 - DNA, 385 bp, Zea mays
tactcgctatgagatttatccacatgactagcggggccaaccattagttttttattttaacaaggcgagtcagcttatcaaattacagatagctgaccttaacctccttaatgcattgatatcatcttctaagacaggcccatatcagttaagacgtgtgccattgaataatgaatacaaagaagtgtattaagaattcatgaaaacttaaatggatggcagaaatacttttacagacttgccaacttgttccatccgatggacgtttgggatctgtttttatagagaaaatcttctcctgcatgggtgtgaccgtgcagatcactgccccgagctaactcaaattagtttgatagaccaaggttggcttgctaaaaaacttggc

SEQ ID NO: 77090 - DNA, 341 bp, Zea mays
  unsure (1)..(341): unsure at all n locations
tactcagccttgctcatagcatgctctacatacacacaaccttcgtcatacatgtntntattagaatcaataaaagtgcacggacaagacatctaccttgaagttggagtataacagactaccaacgacatgctgtcgtctgcagcggctgatatctgcttctagcttcaggaatccaatactcttggacagagtactgataactntggcccctgtttggtcccgaatacactctaatntctcatcatcaacacctngcgaagaggagtgcgccaggtttgtatccacaggagtaggcatactctataagctcttctatttcagcttgtggtagatgctct

SEQ ID NO: 77091 - DNA, 312 bp, Zea mays
  unsure (1)..(312): unsure at all n locations
tctcgntgctactctttctctacaaagtgataatctatctctatatgcttcgcncttgcatgaacaacaggatcagctgataagtaagtcgctccaagattgtcacaccataatactgtagctggtggagatcgtatgccaagttcttgtaacaaggactgaatccagataatctcggcagcagcattagccattgccttgtactcagctacagtgctggatctagccactataggtcgcttccgtgcactccatgagaccaagctccttccaagataaatagcanaaccacctgtgggccgtctatcatca

SEQ ID NO: 77092 - DNA, 466 bp, Zea mays
  unsure (1)..(466): unsure at all n locations
ttcttctatgggtgctacctctagcctaatcgttccaaactcgaccactntcttgtatgtatataaatccaacgcaacatatccattgtcgcaacgccgaatctgtgaatatgtcantttttgtatgctaacattctgcaccatataacatagcaggttttgtcctataaaacctgcattttatctttcgtggttccctcttgtcacatagaatgccagtgttctatcttgtcacatagaacgttagatgctnggcgccacttcatccaccctgtcatggttctatagctaatggtttcatcagtacctagcattgatcctaaatactgaaagctatcccttctgggcactaacttgactttcaaaaactatcatcctcttcctcatatgtagtagtacaaaagttacatttcatatattcggctntagttcttttgagtctaannaccttggattctagagtctc

SEQ ID NO: 77093 - DNA, 315 bp, Zea mays
  unsure (1)..(315): unsure at all n locations
ngccttcgcttcagtctatcatccgcagtccaacggagttgtggagcgtgccaatgtgtttatcttctcttccatcatgaagatgctcctcgacgagaaaaaaggcagatggaccgacttgtaccggagcagtctgngcgctaaacacaaccgaatgcagggcgaccgggttcactcctttccgccttctatacggatcagaggcaatgactccgcaagaaataaaacatgggtctccgcacacagcttcgtcagccacccctgacgtcgatgagccaacctccaaagatctcattgacggagaccgggtcttcg

SEQ ID NO: 77094 - DNA, 423 bp, Zea mays
  unsure (1)..(423): unsure at all n locations
gacctgtaaaaaagaaaggagggatgagtacagagtattatgtgatgaaattgttcaatgacatagcggagcgtgctccatagcttgacattgtggtcacaaacaagcttgctatgcttcacggcgacgactaatgtgcaatcaggccctatgtgcaagcgtgcaagtgagcattctggtcctttagatcatgaatcatgatctaactagccaagaagattagatgactatatgatgtagtaaagatcgcaagtttggttaatttgtctgtaggaaactgccctgattgaagaattcctttcccccctatgatanntttgtgtatggattggantgagctcaccatanagcagctacaatccgaatgatgctctgcgacggtgatgtcttgtatgaacctgaactggtcttcgttatgtattt

SEQ ID NO: 77095 - DNA, 385 bp, Zea mays
  unsure (1)..(385): unsure at all n locations
tttataatgggcatacttgtaatttctcacaggctgcgtcctgtgcctataaatagtgaacagtattcctttactgttcacgcatcctgataattgcaatagcatattctggaatccaacctctgccaaggcagaggtattattgtattcaatgattcaatatattaagtaaatatgatataattcgtctatgatttatctaccccttttattccttttattntatgncatcttacaatatctattgaaattgtattacgaagacttacgcctccgaaatatactgtcatcaaccttcgtccaagttcattatcttaaggaataatgttcgtggaaaangacgtaacatttaacacttatgttccttgtcttaatcatagatttg

SEQ ID NO: 77096 - DNA, 487 bp, Zea mays
  unsure (1)..(487): unsure at all n locations
tcgtcgtctgaaagaaaatatcctgaaggagagagatgatctcagntcttcttcttctcttatacagggganatgttaaggattgctctntcaagaagctcgaccgaaggtgcctttattgtttcgaanaatacttccgaaggtatatgcagcccctgggctgctgacttggccaatagaatcagcatattcatttctccacgaggaatatntttgacagagaaaccttcgaaggaagcgtcaatccttcggactgtatccagatatatttcaagcttcgggtatcttgctgtatagctcttgtcaacatgaccagacataacttgagaatcagttttaagaaatgcnccttctgattcccattgcctttaatttccgaagacccaagagcagagcttcatactcagcgatattatttgtgtaactaatatcaagtcttgccgcatacaagtctaactttgatggcgaaccaacacacagccgttct

SEQ ID NO: 77097 - DNA, 425 bp, Zea mays
  unsure (1)..(425): unsure at all n locations
gctgcggagcattcaatgctactttctcactgtctataatattttcctccttttagaancatcnggtgagatataatcgtcttccctttctgcagaggtgaacanaatgctggcctttctacacagattggcttctcagtcgaagcaccaccaattcaagggtctaattctgtagttcctgacatgttatgggctacaaaccaaatggttcataagatgttgtattcaaagggtgagattgcaaaggacggccaagatggatcacttacatcataatggaactttgcacagagaccacactcaaatagtcccagtatgaacacggttcaaggttccnatggctattcaagtactaaaaacgaggtgatcacattctgctccataataaacaccgattttactaccctgngtcaccacaatcactc

SEQ ID NO: 77098 - DNA, 269 bp, Zea mays
tctctttgctttgaatgggattggccattctgttattgccttgcgcaccacaaaaacagagactttagctgacccaatctctccgaaccctgggcctctgcccttggactggggtttgaaaagctctgtgatgccccgaagattgtgaggtgtattgtgacctctgaggctgacttcctttgccgtcactctgagtggaattatggattgacctcacatgcctccggtggattcttcctccgaaagcccctgtcatttccgagaatctg

SEQ ID NO: 77099 - DNA, 279 bp, Zea mays
tactaagcttgatctgaccaggcaactcatgttgagcgcggagcagctgtgctacgatctccgacttctcttattgtccatgagggagcaagtcgaatcggcccagctgaaagagatatgtaccctcgcgacatctctataagactttggtgattaagtgctccacacaaatgctgtgagtaatatttgtgctcaagacttatgaagtgcacatcaagagtaaaggtatgtttctaagacttaatacattgttttggagactaatgtattgtgtctaag

SEQ ID NO: 77100 - DNA, 93 bp, Zea mays
ctcccaacgcgttgaccgcaaatgccgctgctgtacaggggcttgtgtgcactagattggtgttggaaccgtcaacacccttgcgcagtatgt

SEQ ID NO: 77101 - DNA, 268 bp, Zea mays
  unsure (1)..(268): unsure at all n locations
ttatgttcatcaacttacccctgaagcaataataagaatgggagtctttgtctgggccgngaagagccagagcctgtaaccaagtgcgaaaagcttttgcaatatacatgagttaatatatgagacatagccctgcggtaatgagcaatatcataacaactttggttgtacagcttcagtgctcgctctggatcaagctgtctcgtgccaacctttctgaagagatgtgccggcgaatggatgatagaatgcgtctatgtataaaatg

SEQ ID NO: 77102 - DNA, 321 bp, Zea mays
  unsure (1)..(321): unsure at all n locations
tcgcaggaccttgtgactcgattggcggcgcagatcattgtctgccagtttaacccttgtcggatcaccttagcagccagggcccttggccccgcgtgcgagccgcatgttccactgtggacctcgcgcaagatttggatgccttcggtctcggtgacgcatttaagcattggctgactgacccncttcttgtataattggccctcgattagtgcgaagtcccggctccgatgttcgaggcgcttcgcctcactgacgtcggttgggtgatagtatccctgtagaaacagggttattgggggcccgcagtcttcggtcatg

SEQ ID NO: 77103 - DNA, 318 bp, Zea mays
  unsure (1)..(318): unsure at all n locations
gcttgtgtcgcttctgtttctgcatgcacagtgttagctcccgctgtagttgtggcagcttcacgagttatatttgcgggagcagggctcgaagcctctgtagtctgcatcacagcatccagcatgttagccattctcctcttgtgagttgcggcagaagccttttgcatcttcgataagtttgcctctactcctggactcangatttctagcctttgtactaccttctccacctgtggctcttcggccttatcatctttagcttcagctggcccgactgtaggcaccttcagcattacagtcagctcttcaacactc

SEQ ID NO: 77104 - DNA, 444 bp, Zea mays
  unsure (1)..(444): unsure at all n locations
tctactcttctcacttctggtagatctgttgtatattatggtaagcatgccaaagggtggaattcagtgtagttcggctacataaaccccaggtatgtgtccattcaggaccgacctttatcatttagtttacagtgtataccaaacttgtcaaaggactatcccgagttaattcagcgactataagtatatacaattccgagagatgtatgcgacacaagcatagaggttctagatagaacgagtaaagtggttcgacgggaacacactatggttttcacaccaacatagtgaaaactttctcagaataacctctcggatactcgcaacttcttggtgctggaattacatgtcctttatctcatagttggcttatatcattancgacaaaggaacaatgtgtaacatctggtgacaatgatgactgaattatagctagatatt

SEQ ID NO: 77105 - DNA, 266 bp, Zea mays
  unsure (1)..(266): unsure at all n locations
cttcaccaactcactcccgaatcaatcataaggatgggcatcttcgtctgggccgtgaggagccaagggttggaaccaaatgctaaaatgttttgcaatatacatgagttgttgtacgagacgaaaccttgnggcaaagagcagtatcacaacaattttggctgctacagcttctgcgcccgatctangtcaagtngccccgtgccaacctttcggaaaagatggcccggcaactggatgacagaatggttttatgtgaagaatga

SEQ ID NO: 77106 - DNA, 233 bp, Zea mays
  unsure (1)..(233): unsure at all n locations
tgtatcatgttctgatgacggattaacgccaaacgagcantgtgatatatataagtcaagcttaagttgctatatctaagaacaacaaggttggcaaggggtcaccaagttaataaagatccttactcngtgatcaaagacacatntggaaattcatatatactataaatgtttcagggtgatattcttctaagagcaattaatgaaagatagttttgtaaataattctaact

SEQ ID NO: 77107 - DNA, 215 bp, Zea mays
  unsure (1)..(215): unsure at all n locations
gcgaattgactcaagcctanctactgttgcatatgtttcaccgatatccacaccttcgacttgngagtatcccttggccacaagtcgtgctttgttccttgtcaccacaccatgctcatcttgcttgntgcggaaaacccatttggttcctacaacaattngattatgacgtggaactaaatgccataccttatttctagtgaaggtgttgagct

SEQ ID NO: 77108 - DNA, 395 bp, Zea mays
  unsure (1)..(395): unsure at all n locations
tggaactgacgacacagatagtgacggcgacatccgtcttcctgacgaggtatgtgtgccttatagtgggagtgacaccgatcttgacaacctaatagacttcgttntcccaaatctcaacaaagatatgtccgattcgacctacatcacttcaagggcgatactgtcaacgcggaacgaatgggtggatatgataaatgctaagatgattggatcgtttcaaggggaacatatggtgtaccatagtttcgatagcaccatggatgatcgccattactactacccacccgagtttctaaacacactgacgcttaatgggctgccaccacatggtttgaagctcaagattgggtgccctggtatatggcttcggaatatagacnctgcgaatagac

SEQ ID NO: 77109 - DNA, 462 bp, Zea mays
  unsure (1)..(462): unsure at all n locations
gcttcgtntaatgggcactgaaggcctagcttcgacttcagcttgagactctgtatctntttcttcagcttgaacacatttcttcgcaggggaagggctcagcgccttcgtagtctccagtacaacatctagcacattggccatccttctcttgtgggtcgccacagaagatttttgcgccttcggcaaacttgcccctgtcggagggctaaagattcttggcacttttacttcaactttcggttcttcagccttttcaaccttatctttgattatttcaattgtatgcgtcttcgccattacagtcggntctacagtgctctgaacaatcagaacagtctgtngcttcgactgcttgagaaaccccgcaccaaatcattgaccacagccggttcaatgtatcgtggccggtgggtcagaaccttcatctttttgctcttcggcgcaggatcaatttggatg

SEQ ID NO: 77110 - DNA, 436 bp, Zea mays
  unsure (1)..(436): unsure at all n locations
tctanagggagaacacgtgataggtttgactaacgtgccaattcgaaaagatataccttgtgctgctngtcaagcacgtaaacaggtgggaggagcgcatcacagcaagaatgtgatgaccacttcaagacccctggagatgctgcatatggacctcttcggacccgtcgcctatctgagcatatggggaagtaagtatggtctagctattgttgatgaattttcccgcttcacttgggtgttctttttgcaggataagtctganacccaagggaccctcaagcgcttnctcatgagaggtcaaaatgagtttgagctcaaggtgaagaagataaggagcgacaaccggtccgagttcaagaaccttcaagtggaggagttcttgaggatgaaggacaacacgagttctccgtcctacacaccaagcaaatggtgt

SEQ ID NO: 77111 - DNA, 290 bp, Zea mays
  unsure (1)..(290): unsure at all n locations
cacgaagactcnaagtgtaagtgagttcaccggaggtgggcgccaatggtggagacttgttctcaaattcttcaagttaagaacaaagcaacataaaaagtgttaagtgtcagggtccttcgtccttcgaagcattatatcccttcgggaaataatgagtctcggacgaaggtcatgagagacataccttcgttaacataacaagtaatgacgaatgactcacataaagcatgaaatatgatataagcatcaccaaagaatcatttctattttattaacatgtgaaaaca

SEQ ID NO: 77112 - DNA, 303 bp, Zea mays
  unsure (1)..(303): unsure at all n locations
attgctaactgtcccgacaatgatagtgatcaggatcaatgaaacaagttggagaagaatanaaaactataagaaggcaaagggcgaggctcatcttggcaaggagtgggattcggattgctcctcgtccgactccgacaatgaaggactcgccgccaccgncttcaacaaatcattcctctttcccaacgaacgtcacacatgccttatggcaagggagaagaaggtatgtactcgagactctacttatgcttcttcaagtgaggatgaatctagtgatgaggatgaaatagaatattcatg

SEQ ID NO: 77113 - DNA, 292 bp, Zea mays
  unsure (1)..(292): unsure at all n locations
tctaaggggagaacatgtaataggtctaactaatggtcaattctaaaaagatagaccttgtgcagctggtcaagcanggaaacaagtatgaggctctcatcacaccatatatgtgatgacgacatcaagaccctcggagatgctgcatatggacctcttcggacccgtcgcctatctgagcataggagggagtaagtatggtctagtaattgtagatgattnttcccgcttcacttgggtgttctttttgcaggataagtctgaaacccaagggaccctcaagcgtttcctc

SEQ ID NO: 77114 - DNA, 253 bp, Zea mays
  unsure (1)..(253): unsure at all n locations
gtttcatgttgntacataaccatgcttcatataaagctctagatttccctcatcacggtatagcgcctaatgttcacgtaactgngctcttgaggtctgtgagcactatcaccttctttaacctcttcttcatcgcctaactctttntcttcaagatcgacatcttcctgtgctaaatcttctctcctctatgacccatggaggactattggcaacttctttcatgtcctctttgtctttggtgatgctgctc

SEQ ID NO: 77115 - DNA, 452 bp, Zea mays
  unsure (1)..(452): unsure at all n locations
tctngatatcatatcnaagtgcatgtctcctacaagtattcataacttgtatgcacactntcgtggggaggttactctataatctaagtccttgagactaataccactntcaagtctattatttgtagtagtctcattgaaaggaaaatggtgtgcccagagatagacaacaagcttccactgcaaatctacaagaattcttatgtctcacaagcctgtcattggtctgccattgactntcaattggtatctntgagactacatttagtatcatttacatgtcttctccaatatttgattagactatatttcatatctcatacatagactatatttcatatctcatacttcccatgctgctatanatgcatatattggtgactcatatntagttacctatgcataagggaagtagtcttttcaaattatgtcttgcacctccatttctcgca

SEQ ID NO: 77116 - DNA, 317 bp, Zea mays
  unsure (1)..(317): unsure at all n locations
tctnagggagaacacgtgatangggttgactaacgtgcatttcgaaaagatagaccttgtgcatcttgtcaagcaggtaaacaagtgggaggagcgcatcacggcaagaatgtgatgaccacttcaagacccctggagctgctacatatggacctcttcggacctgtcgcctatctgagcataggagggagtaagtatgggttagttattggtgatgactnttcccgcttcacttgggtgttctttttgcaggataagtctganacccaagggaccctcaagcgcttcctcangagagctcanaatgagtttgagct

SEQ ID NO: 77117 - DNA, 243 bp, Zea mays
  unsure (1)..(243): unsure at all n locations
gaaactggggctactgattagtgaagaaaactcaccgctgacctcccggaacgcatgccttccactcaactgcttcgcattcatcaaaagtttggggtctcggcggatgtaaatcatgcgcatgaggccccacacacagcccacattgtcagcgtcttgtgatgcagaccgcctgtggcctccgtttcccattcctgatgagttatnttctgtancggatatggccctttttgtctcttctat

SEQ ID NO: 77118 - DNA, 216 bp, Zea mays
  unsure (1)..(216): unsure at all n locations
ggaagcaagntggggttcatcatccacacaagaacatcatgacgactgacaggccactggagctcctacacatggatctattcggcccgatcgcttacataagcatcagcgggagtaagtactggctagttattgtggatgatatttctcgcttcacttgcgtgttctttttgcaggaaaaatcacaaacccaagagaccttaataggattcttga

SEQ ID NO: 77119 - DNA, 342 bp, Zea mays
  unsure (1)..(342): unsure at all n locations
tcagcttgcctcgnctcagatatcacccgcagnccaacggagtagtggaacgcgccaacggtatttatttatctttatcacacagatgctcctcgacgaagaaagggcaagtgggccgatttctacctgtgcggtctgtgcgcttaacacgactgagtgcatggcgattgtgttcacccctttccgccttctatactgatcggacgccacgaccgcccacaatacataaaacatgggtccacgcgaacagtttcgtcagccgctctcgacgtggacgaacccacgttgaaggaccttatcgatggagactgagtcttcctcttcatgctctggattaatatc

SEQ ID NO: 77120 - DNA, 484 bp, Zea mays
  unsure (1)..(484): unsure at all n locations
gtgacantcgtcntctcgtgccgggcttttgatgccgacttctctgntttgtccacctncacaggcaccaccctcagcatgtactcgcgcaccggcctggcgcctncacgcgccttgcgcggcttgccgtatatgtggcctcgtgtcgaggagtctcccttcttgtcaccctggcatgcctcccactgctctngagtgagatgtanctttccgccgatagtgataggcccagagggagcatgtggttcgtcgccgtcgaccaccttgagacgacctatcgcctcttcgattgtcatcgttgagaggtctaacagagactcgatcgaacgaacaatctgcttgtactcttcgggatgcaccgaagagctctcacagctctctctcatataggtgtcgcgccaactgaccatctctgcacagagtgngatgcgagaganagcatcacatctccctgctngaggcaggtctccactcctgtgagtgc

SEQ ID NO: 77121 - DNA, 335 bp, Zea mays
  unsure (1)..(335): unsure at all n locations
taagtagcataggctaataatatgcgaatagactcaagtctatctacntgtgcatatgtntcaccgaaatccanaccttcgactngngagtatcctttggccacaagtcgagctttgntccttgtcaccacaccatgctcatctttgcttgtgcggaagaacccattggttcctacacacatttggttaggacgtggaactaaatgccatacctcattcctagtgaagttgttgagctcctcttgcatcgccaccacccaatccgaatcttgaagtgcttcctctaccctgtgtggctcaatagaggaaacaaaagagtaatgttcaccaaaatg

SEQ ID NO: 77122 - DNA, 366 bp, Zea mays
  unsure (1)..(366): unsure at all n locations
tcagctttctgaagtattctgactttccatgttccctctttgctcttgtactctgatgctacgatgangctgaaactgtgtgcaagtgatagtccattcatcaatgtaacactcatgtgtttcttcttggggctgggcatccttgtgatgtntcatttntggaatactctgcaattcatcaactggcagtgcattaggtatgagagactctgctattagttgntcagggggagacatctgtctttttatgccagaaaacaaaatccggttctttccattttgcagttcactttcatttgcattgaattagcgaccagggaattcatagtactcacaacaacaacatggttcaccggcacttggctg

SEQ ID NO: 77123 - DNA, 270 bp, Zea mays
ctgacttacatgaatagcaatgggtgcttgatccgaatgtatcttcatgcataggtaatcaggatgaagaattgcttcgaaagcattgatggtgccacgaccaataattgcattgtaagggtattccatgtcaacaatgtcatacacaacttgctcagttctggtgttggtgatcaatccgatagtcactggcatggtgatcttgcccagtgctacaatctgtcttcctccgaagccacagagagggtgtgtagcatcatgaatcttatc

SEQ ID NO: 77124 - DNA, 235 bp, Zea mays
  unsure (1)..(235): unsure at all n locations
tattgtgtaccctccgcggcaagaggctggacggaggtgtatctgtgctctcggctggcgtgaacccggcctggtcttaataaacccgatggtgagttgacatatgccagggttaagtgctacatatgtcgtgtgggtggagaacccagctggatattaatcgattcggatcgccgntacttctcgaatatgaagactcggtcactggcctacacgtagcattccaatgaactga

SEQ ID NO: 77125 - DNA, 484 bp, Zea mays
  unsure (1)..(484): unsure at all n locations
tcttcaccatgtttacagatatcttgagggaagtgagcatggcgtcttctccttaattgtctntgtttcttgntcccaagcaatntcctttttgaccctacaacttgttgctcattcaaacattntgcttcctttgagcaatangggttagcacatggtgatatattatctaaatgtgcacatgtgcaagaatggngtttacataagtttaaactagtaattactacctcatgagtaatatcgagcataatatggtcatcaactaatttattatgagaatatgacaacatatcatacttttcacctagagcaagcttttctaaaattagcaantctacttgcctctcaagaatgcaattttcatttttaagttgagcaacaagataaatcattatcattatttctttgctcaattaaaaactgaatcataccgtggaccaaatcatcatgagagcactntagctcctcattttctttgtcatct

SEQ ID NO: 77126 - DNA, 180 bp, Zea mays
  unsure (1)..(180): unsure at all n locations
aagtgtcgagttcagctctatcaanatctaccaagtatagctgaccctctaacactcncttaaatgctattgaatcatcacttcttctaaagacagtgacacctacatcagtgaatagacatgtgtagcccatttaacataattgagaaacggaaagcaaattgtgatctaaagaatcta

SEQ ID NO: 77127 - DNA, 311 bp, Zea mays
  unsure (1)..(311): unsure at all n locations
cactcaagcttctnagggagaacatgtgatanggttaactaacgtgcaattcgaacaagatagaccttgttcatcttgtcaagcangcaaataagtgggaggagcgcatcacggctagaatgtgatgaccacttcaagacccctggagctgctgcatatggacctcttcggacctgtcgcctatctgagcatangagggagtaagtatgggttagttatttgtgatgactgtttccgcttcacttgggtgttctttttgcaggataagtctgaaacccaaggaaccctcaagcgctttctcaggagagctc

SEQ ID NO: 77128 - DNA, 293 bp, Zea mays
  unsure (1)..(293): unsure at all n locations
tactcagctntgtggagattcatgcaccctgaggaacaattctacttggttgcggcaggataattgccacactccatgaacatgtcatcataccattaacaagaaagagctggcttcatcagtcatgcaaccctcacagtcaacagacatgttgaatacatactcatattgttgatcttacatcccatagtatatccagcctcagtcgcaggagccaatgctaagtttgccttcacctcaaatgcctcaagtaacccagcaatgagtgtgtgctcaccatttgattcctttgt

SEQ ID NO: 77129 - DNA, 492 bp, Zea mays
  unsure (1)..(492): unsure at all n locations
tgagcacccgtccgggtcgagctgactctactgtccaccaaacagacattctctggtgttatatcttagatagccttcccatccaaccatntatcanaccaaaagagagtgctagttccatctccgaccacatgaaagaccgaaagaatgaanaactgcctcacttgctgctgaataggagaattcattctctgccaaggtctagacggatcggttctttgcagccataaccatatcacctgtaaagcccaactcttgaattgaaatnagaaactccaagaccgccatactntagaggcctggttacctatctccaaggaacaaagacacttccaccattaacattcctccttccttttcatagaagaacctctcctgagnttatcaatggactcgatcacccacntgtgaacactcatggccataaggatataaactggaattgccgaaagcacatgcctcactaacgctgtcctaccagccagactcagc

SEQ ID NO: 77130 - DNA, 412 bp, Zea mays
  unsure (1)..(412): unsure at all n locations
agctcatgcctaagtctgtgtaaatatttttcatctagtggctnggtaaagatatcggctaatggatctttagtattaatgtaagaaatctcgatatcccncnntttgtggtgatccctaagaaaatgatactgaatggctatgtgcttagtgcggctatgctcgacgggattgtcggccatcttaattgcactctcattatcacatagcanagggactntggttaatntgtaaccgtagtcccgcagggtttgcctcatccaaagcaattgcgcgcaacaatgtcctgcggcaatgtactcggcttcggcggtgaaagagcgaccgaatttgcttctttgaagccagacaccaaggatcttcccagaactggcagtcccgatggctcttctatgatttgaccccgccaatc

SEQ ID NO: 77131 - DNA, 383 bp, Zea mays
  unsure (1)..(383): unsure at all n locations
gtccactcgaattaatcttctgagagacccgacctcgctgctttatgactctttaangtccaacacaacaagcaataaatgaattcagaattattgcagagcatatcagcacaagggacctggttcaggagtntttggctntcanagttnttcctattgtaaaggagtgggaaatgccgaagctgaatggggagaagaaagaaggtgaactcatacgcttaccttactacttcaagtntaagaaatacttcaaagcaccttgccaagagtggctggatacaattgaagtgatgtgcaatgagatacttggcaattattctaanaaagaagatcagttgatgaccgcagcctcggcacccgtccgaagcgaaactaaaccgagt

SEQ ID NO: 77132 - DNA, 264 bp, Zea mays
  unsure (1)..(264): unsure at all n locations
ggcatgtgcgcagctgtgcaantatgtaaatgtgaatgtgatatgaacctttattgtttgtttacactcacatctatctagccaacatgacacccatatattgtcgtttatatctcatactccaggataatatagacttttattatagaagggacaaaattaaaaccgggtcgtgtgcctgccaaccgtgatactttcttatgtgagtatgctacatcgatgctctggatgatctcctttgcggtaatatcaattatcactatg

SEQ ID NO: 77133 - DNA, 304 bp, Zea mays
  unsure (1)..(304): unsure at all n locations
tactcaagctgggaagaactctcgtcngtcgatcatgtgatgagtggcgccggngtctatgcaccattcttcgatcatgtctttggtggagacatcgccgaggaaagcgcgtgctttcgactcatcaaggtggaagagtgccgctgcggccggtgccgctggagatagctcgatgcttgcatgtgctaagagcagagccttctccgcctccgcctgtgcgacgttggcctggccacgtcgtggctgtcgacagtccctgtcccattggccaagcttgccgcagttgtgacagatgtcgtctcgt

SEQ ID NO: 77134 - DNA, 453 bp, Zea mays
  unsure (1)..(453): unsure at all n locations
tcgcatctctgaactaactcggctgcatcgntcttcgccgtctgccaatataatccttatctgtaaaccttctcgactagtgttctggatgctgcatgtactccacactggcctgcatggacttcctnncagaagtgcttcccggtggacgggagaatgcatntcatgaggacgcctgacgcgcccctcctgtataatacctncccaatgagtgtatagtgagccgattgtctggcaatacgctgtgccgagttcttgcatctggtcttcttattcttataacttaaaatcgccgtctcggtcatagagctgactcgggtgactatgacgtggactctttcgtgatcattgagatctggttgaggattcttgacgagaactcggtggacctagtcaccgacccacctgacgacatggtgcggtccactctttactgagaatcaacctgaatat

SEQ ID NO: 77135 - DNA, 378 bp, Zea mays
  unsure (1)..(378): unsure at all n locations
gtctcaaccacttcaggccattcaacggtacgggccttaatcaacacagacaggcgactctgtctgctcagcgcctggtctatatatattaacacatttcccatctttggtacccggcacgggtactctcttcggatgatgaacccatccggagccctgatggactcatcatcataagtttgctttcacttttgaatcaaaatcccataaccaatgttacacatcattctttngaaaaacaaatgaattttgagttctaaccgactaacagtataattcttttatgacacagggattangaattntcaaggaatggaatgcatcaattggtatcacacaactcctatcacctaatgcatcatatcangtgataaagca

SEQ ID NO: 77136 - DNA, 320 bp, Zea mays
  unsure (1)..(320): unsure at all n locations
ctatagacactcaagctttctcgactaagtcgaggacagggcctcatggacgggtgatagtacgcgtaagcggcatggtcgactgatccgagggattcccacgcctctgngatacggatacctcactcgtcccttccgcgagaagcaactctcgctcgcacaaacatccctattaccgacaganagtccagatgctcggaacaagaggaaaaaagacgcagcttcgcaagcacggcgaggggtgtgtttctggcctcggcggccgcagaaggcacacgctacaagacgatctgatcctgtaggctcgggtcttcacgctg

SEQ ID NO: 77137 - DNA, 451 bp, Zea mays
  unsure (1)..(451): unsure at all n locations
actaacaaatgttcattgtgagaaagacaggatctgtatcgcatgctaatcantggaacangctggtgttcatcatccacacaagaacatcatgacgactgacaggccactcgagctcctccacatggatctattcggcccaattacttacataagcatcggcgggagtaagtactgtctagttattatggatgattattctcgcttcacttaggtattctctgtacaggataaatctcacacccaagagactttgaaaggattcttgagacgggctcataatgagttcggcttgaggatcaagaacatacgaagcgacaacgaaacggagttcagaactcacaaatagatagctctcttgggaggagggcatcaagcatgagttctcttcttcctacacgccacaacacaatggtgtagtggagaggaagaatagaactctattggacat

SEQ ID NO: 77138 - DNA, 112 bp, Zea mays
actcagctgacggaagctgtcgtcacacgcagcagtcccctacctggcgcgccaactgtcagtgttcctagttctgtgggtccctgagccgacgagtgaatgtcgccgcgtg

SEQ ID NO: 77139 - DNA, 295 bp, Zea mays
  unsure (1)..(295): unsure at all n locations
agtggcttgtccttaatagttgtgttgagtgtgaaactacctatcttcttcatatatcaccccgaacctaataagatggattttgctagcagtaggagccaagggctagagccaagcgcgaagtgtttctgcaatatgcacgaactactatatgagacgaaggccatgggtaaagaacagtaccacaacaactttggttgggtatggattatcgcccgtcccaacgcangccatccagtaccaacatttcaaaagagatggcctggagcttggatggaagaaatggtttacgtga

SEQ ID NO: 77140 - DNA, 163 bp, Zea mays
  unsure (1)..(163): unsure at all n locations
caagtgggaggagcgcatcacagcaagaatgtgatgaccacatcaagaccccttgagctgctacatatggacctcttctgacccgtcccctatctaagcatatgaggaagtaagtatggtctacctattgtttatgacnttttccgcttcactggggtattct

SEQ ID NO: 77141 - DNA, 283 bp, Zea mays
  unsure (1)..(283): unsure at all n locations
tcttaatagttcatggtcacgtccattcaaaggacgaggcacttacataaaagatacaccaaanagcgaaagctgctcaccanaacggccggctacatacgtagctacactacgcgtgttcgtgcggatgcacgtactcatgcatgcagaggtagcagagctagctagtaagcacgtacgtacgtagcacatgataagaaaataagaaggctgcattgagacnagtagacgaagaatggcatgcagaagagcacgtcggcatgctccccgcggcttatagctt

SEQ ID NO: 77142 - DNA, 332 bp, Zea mays
  unsure (1)..(332): unsure at all n locations
tatgactatggtgatgagtcccttgagaatgagcttcggcatgacacgattattgtgttatatgcaactcanctnnccctgctagttagccgaagtggaatttatggttgntgcggagcatattantactcgggaattggttcaagaatacctggccaataaaacttttccaatgtatggtgggtgtggaatgccgaagaacaaagtacaacggaataaatatgaacttgtatgacttccctaccgcttcacatttagaaaagttcagcatgcccgatgtcgaatggttagaattaatagaaacaatgtgcaattagatgctttggattata

SEQ ID NO: 77143 - DNA, 164 bp, Zea mays
  unsure (1)..(164): unsure at all n locations
acacgcaatgcgagtggatatatggctatagtantgtgtaccctccgtgggcagaggctggacggtggtgtatctgtgctctcggttgcatgaacccaggctggtcttgagaaacccggtggcgagttgacatatgcaagggttaagngctacatatgtcatgt

SEQ ID NO: 77144 - DNA, 395 bp, Zea mays
  unsure (1)..(395): unsure at all n locations
acatgtgctaagcggcgatgccacagccagcccatgctagtcttagctattaagcatgcatctagaccggcctctntcttttgcaaatcaattaaataaaggttgccgtctaatacacccttaatagcaagtgaaccatcacttcttctaaagacagacacatctacatttgtaaatagacagttataccccatatgacataattgactaacggatagcaaattatatcctagactctctactaanaatacattagagatagaatgctcattagaaatttgcaatttacctaacccttttacctagccttgantcccatcaccgaatataanttgagtcctgggaatccttattcttgacgtaggaagtgaacatcttcttctccccgcatatgg

SEQ ID NO: 77145 - DNA, 329 bp, Zea mays
  unsure (1)..(329): unsure at all n locations
aagattcttcatccaacatgggctagtcggcggtgccagagccaacccatgtttgtcttagcaattaagcaagtgtcgagttcagctctatcaaaatctaccaggtatagctgaccctccaacactctcttaaatgctattgaatcatcacttcttctaaagacagtgacacctacatcagtaaaaagacagttgtagcccattngacataattgggaaacagaaagcaacgtgtaatctaatgaatcaacaagaaatacattggaaatggaatggtcaggtgaaatagcaattntacccaaacctttgaccaaccctttgatgttcat

SEQ ID NO: 77146 - DNA, 442 bp, Zea mays
  unsure (1)..(442): unsure at all n locations
actatgacactaagctatgaaattcttcatccaacatgggctagtcggcggtgctagagccaacccatgttagtcttagcaattaagcatgtgtcgagttcagctctatcaaaatctactaagtatagctgaccctctaacacacccttaaatgctattgaatcatcacttcttctaaagacagtgacacctatatcagtgaatagacagttgtaacccatnttgcataattgagatacaacaagtgactataaaaattagcatacaaagatatatatatatactattgttaagatgatatcattatttctagctaataagttcataaatcatataataatactatcacatattaagagcttcntatattntnnggtataaagtcctattcgagtttaaagggtaggaaccgaacccgaacccatactccgaaatatagcac

SEQ ID NO: 77147 - DNA, 214 bp, Zea mays
tgctggagagtaatacgaacatttcatttctattgaccaaccagaacctgtcatacatattaacctctgctcagatatttgcattacatcaagaacagccagtacataaccaagaatgataagttgtaaatgactgcaaacctattaccaacaatacacctggatatgtcatcactaatttggggccatcaatggaaatcactattacggtact

SEQ ID NO: 77148 - DNA, 380 bp, Zea mays
  unsure (1)..(380): unsure at all n locations
tactcaattcctagagtcacattctaacagtaaactgttatgcanagtctatacttgtttatcattacttggggatccagngtaagaacatntgaatagagcttctgttctgagttttcccatttttggttattaattactaaatggagtcacattggaaaaaagaaggaattatactaaagggaagtttaggatgtgtctggttaaggaatgaagtgatccatcttcttcttactcctcactttcttatttggtttgtggatagaatgagttgatccatcaccaccacattccttttatagctaataatagtatatacatgaggagtgagttaattcacccaaattgatggaatgaacttatatgcatcacctgataag

SEQ ID NO: 77149 - DNA, 190 bp, Zea mays
  unsure (1)..(190): unsure at all n locations
tgagatagacagggtttgtatcgcatgtcaagcangaaagcaangtggtgcccaccatccacacaagaacattatgacgaccgacaggccgcttgagctacttcacattcttattctcaagtgctttgtaagcgatgcaagagacatcaagtgtgtggtggtccttgcngggtcttagtgacccgtgaga

SEQ ID NO: 77150 - DNA, 256 bp, Zea mays
  unsure (1)..(256): unsure at all n locations
cataatagaattcatntcactccttactgcttccttccataagtcagcatcaggagaggaatatgcctcactaatggtagttggtgtgtcttccacaaggtacactataaagtcattaccaaaggatttngcaaccctctgtctcttgctctttcgagtgactatagtgtcatcctcctcacggatgtgcatgtgaaaatcctcagcatgatctatatgaatagacagttcgtgctgatggggaaatatagtctca

SEQ ID NO: 77151 - DNA, 348 bp, Zea mays
  unsure (1)..(348): unsure at all n locations
ctatgntatggatggctntcgtgtcagtccagtntccttctttccttcttgcancttcctgactgccatgaatagcgatgggtccttgatccgaaagtatcttcatgcaagataagcacggtgaagaattgctctcaaagcattgagggtgccacgaccaataatngcattgtaagggtattccatgtcaacaatgtcaaacacaacttgctcagttctagtgttgttgatgaacccgaaggtcactgacatggtgatcttgcccagtgccacaatcttgtcttcttcgaaccacagagaggatgtgtagcatcatgaatcttatcttcttgcttcttgcatttgtct

SEQ ID NO: 77152 - DNA, 412 bp, Zea mays
  unsure (1)..(412): unsure at all n locations
tactcagctatgagattcttattccaacatgggctagtcggcggtgccagagccaacccaagtttgtcttagctaccaagcaagtgtcgagttcagctctatcaaaatctaccaagtatagctgaccctctaacactcccttgaatgctattgaatcatcacttcttctaaagacnagaacacctacatcagtaaatagacagttgtagcccatntgacataattgggatacggaaagcaaattgtaatctaatgaatctacaagaaanacattggatatagtatggtcaggtgatatagcaatnttacccaatcctctgaccaaatcttgatntccatccccgaatgtgatagctcgttggggatctcggttttctcatatgaggagaacatcttcttctcctctgtcatg

SEQ ID NO: 77153 - DNA, 322 bp, Zea mays
  unsure (1)..(322): unsure at all n locations
acgtgaagagtgccttcctcaatggaccaatcaaggaggatgtctatgtttatcaatctactcggcttgaagatagcgagtaccctaaccatgtttataggctctctaaggcgctttatgggctcaagctagccccaagagcatggtatgaatgccttagagaattccttattgctaatggcttcatagtcggcaaagccgaacctactttattcactataactcttgacaatgacttggttgtatgccaaaattatgttgatgatatcatatttgggtctactaacgaatctacatgtgaagaaattantatgatcatgac

SEQ ID NO: 77154 - DNA, 182 bp, Zea mays
  unsure (1)..(182): unsure at all n locations
actcgctctgaaaggtaccatgcctgtggacgtccctgtaccacattcacagccccgctgtgatgacttaccccctgcacgatggacagaccattaatgctgaaggccgtngccatacgcatggcagcgccgtctctctcataatacagggtgccggtttattagctcgccaaggtatgtat

SEQ ID NO: 77155 - DNA, 430 bp, Zea mays
  unsure (1)..(430): unsure at all n locations
gaattacagctatccaccagaaccgctcaggcgtcttgtattccccaagcattgttctcgccatgtcgatgagtgtcatgttctttctctctactacaccatattgatgtggtgtatacggagcggagaactcatgcttgatgccttcctcctcaagatattcttctatttgaaaattcttgaactccgatccattatcgctccttaccttcttcaccttgagctcaaactcattttgagctctccttaagaagcgacttaaagtgccttgagtttcatatatgccctgcagaaagaacacccacgtgaagcagggaaaatcatcaacatttacaagagcatgcttactttcnccgatgctaagataagtaatgggcccacagagatccatatgtaggagatctagtggtcctgatgtcatcatcacgtt

SEQ ID NO: 77156 - DNA, 268 bp, Zea mays
  unsure (1)..(268): unsure at all n locations
atgctagtcttagctattaagcatgcatcgagaccggcctgctcttttgcataatcaactaaataaagattgccgtctaatacacccttaanagctagtgaaccatcacttcttctagagacagacacatctacattggtgaaaagacaattatatcccatattgcatagatgactaacagataacatagtgtaaccatgagactcaactanaaacacattagagatagagactcaactaaaaacacattagagatagagtgctcatt

SEQ ID NO: 77157 - DNA, 495 bp, Zea mays
ctaagcttctcctagtatttatttttctctgcactcgatggtgcatgctcatattttacattacatattatgcggatcttgctctcgaggagctgaataagataggaataattacaaactatggccccattaaaaacctttctccctttttggaaaggaaaagggtgccatattaaaatgaaaaacattacatcaatctatacataataccgtcgaagctcatccgcgttccatgatctaggaatgtcattgccatccatatcctttaatctgtaagaaccgtgccttgacgaagataccaccataaaagatccttcccacttcagttgtagtttgactactgtgtccgggttagccactctccgaagcaccaaatgccctgttttatattcttcaccagacttttctgtcgcgccatttattgttcggctgatattattgaatttccacagctgaagctcatccttctatgtattttggcacgtgataataact

SEQ ID NO: 77158 - DNA, 330 bp, Zea mays
  unsure (1)..(330): unsure at all n locations
tacctaagacccaagcctaaagttgccttgcaggtttatgcataccggggctcaagctggattatcgacagcggatgcacaaaccatatgacggcggagaagaagatgttcacctcctacgtcaagaataaggattcccaggattcaatcatattcggtgatangaaccaatgcaatcgtgaaagggttatgcaagattgctatatccaatgagcacactatctctaatgtgtgtttagttgagtctcttggatataatntactatctatcagtcaattatgtaatatgggatataactggctatctacaaatgtagatgtgtctgtctt

SEQ ID NO: 77159 - DNA, 429 bp, Zea mays
  unsure (1)..(429): unsure at all n locations
acattgtcaaatcacgttattgaggaccttctgaagctcgatgcctccaacatcgcccttgtggaagtttgccctctatgaccatgcctttctatctaaacacaagaatgagctgactgatggcatctaaattggcgcatggctgcgccacctcgatggaatctctggattatcatgtgggtgttctcatccaagcgaatatctagaacaatatgggtcttcccatcaattgttagcccagtaatgtccatattgatttcctcctagtggtttcttttagtccgtgtaaattctgactcatagcagaatcagcgggttttcttctatagtcattcattggtggatcgactagtgctttcanagtgcaatttctttcagaaagggtatttctgttctggttcattcaaagaaagtgggtttcgtatatat

SEQ ID NO: 77160 - DNA, 427 bp, Zea mays
  unsure (1)..(427): unsure at all n locations
gacagggtttgtagcgcatgtcaagcaggaaagcaagttggtgttcatcatccacacaagaacatcatgatgaccgacaggccgcttgagctacttcacattgatttattcgacccgatcgcttacataagcatcggcgggagtaagtattgtcttgcaattatggatgattattctcgcttcacttgggtattctcttttgcacgaaaaatcacaaacccaagaaactttaaagggagtcttgagacgggctcaaaatgagtttggattaagaatcaagaagataagaagcgacaacgggacggagttcaagaactctcatattgaaggctntcttgaaaagagggcatcaagcatgagttctcttctcccaacacacccaacaaaatggtgtagtggagaggaagaatagaactctattggacat

SEQ ID NO: 77161 - DNA, 312 bp, Zea mays
  unsure (1)..(312): unsure at all n locations
agatagaccttgtgcagctggtcaagcaggtaaacaagtgggaggagcacatcacagcaagaatgtgatgaccacctcaagaccactagagctgctacatatggacctcttcggacccgtcgcctatctgagcatatgaggaagtaagtatggtctagttattggtgatgactattcccgcttcacttgggtgttctttttgcaggataagtctgaaacccaagggaccctcaagcgcttcctcaggagagctcanaatgagtttgagctcanagtgaagaagataagaagcaacaacgggtccgagttcaa

SEQ ID NO: 77162 - DNA, 405 bp, Zea mays
  unsure (1)..(405): unsure at all n locations
catgggctagtcggcggtgccagagccaacccatggttagtttagcaattaagcaagtgttgagttcagctctatcaaaatctacccaatatagctgaccctctaacactcccttaaatgctattgaatcatcacttcttctaaagacagtgacacctacatcagtaaaaagacagttgtagcccatttggacataatgagatacggaaagcannatgtaatctaaagaatctacaagaaaaacattggannatgagtggtcaggtgatatagcaattntacccaaaccttgatttccatccccgaatgtgatcgttctttggggatcnntggtnttctcgtaggaggagaacatcttcttctccccagtcatatggtttgtgcacccgctatcgatgatccaac

SEQ ID NO: 77163 - DNA, 423 bp, Zea mays
  unsure (1)..(423): unsure at all n locations
tcttggctgtcgaactgcttgccgttgtcaactggtagctcggacggtactccgaagcggcaaacgatgttctgccagaagaatatttgggcagtctctgatgtgaatgtggaaacagccctcgcttcaatccatttggtgaagtattcgacagctacgaaggcgaacttaagggtcccctgagcggtggtcaggggcccgacgatgtccaggccccagcgctggagaggccatgtatgggcaatcagctatgtatattgcgaggggttgcctgaccgangggagaacttctggcaggcttcgcaggacctcgtgacccgatttgcggcgcagatcattgcgggccagtaaaacccttgtcggatcaccttggcagccagnggcccttggccctgcgtgcgagccgcacgtgccactgtggac

SEQ ID NO: 77164 - DNA, 473 bp, Zea mays
  unsure (1)..(473): unsure at all n locations
tctatagggagaacatgtgatatgtctaacaaatgtacatttctaataagatagaccttgtgcagcttgtcaggcaggtaaacaggtgggaggagcgcatcacagcatgaatgtgatgaccacgtcaagacccctggagctactgcatatggacctcttctgacccgtcgcctatctaagcataggagggagtaagtatggtttagttattgttgatgacttttcccgctttacttgggtggtctttttgcacgaaaaatccgaaacccaagggactctcaaacgcttcctcatgagagctcanaatgagtntgagctcaaagtgaagaagataatgagcgactacgggtccgagttcaagaaccttcaagtggaggagttccttgataaagaanggatcaagcacgagttcttcgctccctacacaccacagcataatggtgtggatagagaaaaacaggacctcatcacat

SEQ ID NO: 77165 - DNA, 333 bp, Zea mays
  unsure (1)..(333): unsure at all n locations
gatagtgagtaccctaaccatgtatataaactctcaaaggcgctctatgggttcaagcaagccccaagagcatggtatgaatgcctatgagaatttcttatcactaatggtttcagagtctgaaaagccgatcctactctctttactaanactatngcacaagatatgtttgatgccacaattatgtcgatgatatcatatgtgggtctactaacaaatctacatgtgaagagtttagtatgatcatgattcacaaattcgagatgtctatgatggcggagttgaagtggttcctatgatttcaagtanaacaactccaagagggcaccttca

SEQ ID NO: 77166 - DNA, 473 bp, Zea mays
  unsure (1)..(473): unsure at all n locations
ctcagcttcctggtcctggagccaggatgtctctatggaaaagactatattgtggatggcctctnttatggtccatgttaagtcccaagtcccactagaaaaatcgtgtgatggcattaagactttcagactttgttattgggtttgatgcatgtaaaaaggattccagtgtttctgttgctcttgcgatcctgtgaggacacatatgagagaaatatttagtctgctgatggcaaatcttgtcctatgttcatgcctatgcctatctgatcaagtgttatgatatgatcccatgtgtggtattgtgttctttagagatgtacttaattatgtttctcttgcatgtcatgttgctttgtctaattgttacccgccattaagaatttattataatcttaattttatatgcctcatcatagccatggatactgtagggcgcacgaagtgcgcctcctaatctagtatatataaaa

SEQ ID NO: 77167 - DNA, 358 bp, Zea mays
  unsure (1)..(358): unsure at all n locations
cctgaatactatgtcttgtatgaaatccactgccttagctgaagtcaaggaagcaatgggtttgaattctatccacttagtgaacttgtcaatagcaaccagtacatgagtgtatcccccttgagcttttttgaaaggtccaatcatatccaatctgcagcacacaaatggccaagttacaggtatggtatgagatgctgcgccggtagatgctacttgtttgacaagtattggcaggcctcgcacctctgaactaacttggctgcatcactttnnttgtgttggccagtaaaacccgacctaaagaccatcccaaccatggtcctggatgctgcatgcactccacatttgccagcat

SEQ ID NO: 77168 - DNA, 396 bp, Zea mays
  unsure (1)..(396): unsure at all n locations
tatgcttcgtgtggcattaacatatagattttagtagttaaatctgaagttcctgatgtgtatgttgatactattatggaatcatgtgatgctactttctttgaacatatatttccaatgaaagacattcatagcaattctagatactcttctgagataacttctgaacatagtacacctgttgaaagttctgaacaaccacataaaattggtctagaggaggatgacaatgatgctcctaaaatgagcaagagacaaagggttgaaaaatcccttggtgatgatttcattgtatactatgtggatgatactcctactaccattgcggaagcatttgcatctncagatgcagatgatnggaaagaagcagntcataatgaaatggactccattctt

SEQ ID NO: 77169 - DNA, 399 bp, Zea mays
ctaagctggtgccacctctgtaagctccccgagcaatgaatcggagttcctttcttctgagaagccagtccgcgctcgccggagttctcacccacgtcggagcacgtggaccgggtaagccactccaccatccttcaattccttgagcacacagtcgttgcgtgaccccgtgatgctcaccgtgcccttggattgcgccagttcgccgtagtttggccggtatactcggcgccgacgaggacactcgtctgcacgcgtggaccgggcgattccggccacctacgacgccgagccgtaccttgacgtgaccgccagagtctccccaagccgaccccacccttcgccggacctccctcgccgtcggtagccgcgccgccttttcttcccgcggtactgttc

SEQ ID NO: 77170 - DNA, 153 bp, Zea mays
  unsure (1)..(153): unsure at all n locations
tctttcaaaagcaagtttgaaaattgcaaagtcttggatgcgcggaccgtacgggcctttatggcggaccgtacgcgatccaccataagggtccgaagactgaccacttcggngtccaccttgttactttgcactacggaccgtccgggcatt

SEQ ID NO: 77171 - DNA, 339 bp, Zea mays
aggtctgagtcaatgttgaaagctattataatgcgcatacttgtaaattctcacaggctgcattctgtgcctataaatagtgaacagtattccgtcactgctcacagattctggtatttgcaatcgcatatctgggaatacaacctttgtcagcgcatacgaaatattgcgatttaatgattcgatatattaaaagaatacgatttgatgtatctgtgagacatttatccacttgatatcgtctatttagcattatcttacgatgctcattggaaggtcagtacgaaagatcaacttcttaatgagactctaatcaaccttctgtcaggagccattatt

SEQ ID NO: 77172 - DNA, 334 bp, Zea mays
  unsure (1)..(334): unsure at all n locations
tatggctcatgataacgagggttacattttatatcctggtggttatcccgagcataagaataggagaattcatgctacgaaatctcataatgtttcacatcatgctcttatgtataaaaatgaggcttctagctctaggcattctacccatgttaaaatgcctaaaaagaaatctcctattgcatcaaatgaacctaatgtttcatttaagactattgatgcttcatatgttttagctaacaaatcangcaaagtagttgccaaatatgttgggggcaaacacaagggctccaagacttngtgttgggtactcaaggtacctgtttctaatgtc

SEQ ID NO: 77173 - DNA, 438 bp, Zea mays
gtgactgcacgtcatggttgacgtggattattgaatgatacatgcgcgtatgctgctgtgcaataaatgttcagacggatttcctgagggaaatagcatgctggtttgattataatccccgagtttaacattctcttttgtgcctttccttatttttgttacagtggcgatcacaccaaactcacatacagatggagatggcagagaccttgcatgtattgcccgatgatggcaatggaagtgctgcagttcagactgagccttattgccatgaagacgccattgaggacatggaatctttcttggatgaagtaaacgacagggttcatgtttcaggaattgtgactggtgctatcatcaaggcgatcctaagtgatgtgcggcaagaagctgctagccaaatggctctcaatgatgcagagatatcatcactgaacc

SEQ ID NO: 77174 - DNA, 306 bp, Zea mays
  unsure (1)..(306): unsure at all n locations
agcgcatgccaagcaggaaagcaagttggtgcccatcattcacacaagaacattatgacgaccgacaggccactggagctactacacatggacctattcggcctgatcgcttacataagcatcggagggagtaagtactgtctagntattgtggatgattattctcgcttcacttgggtgttctttttgaggaaaaatctcatacccaagaaacattaaagggattcttgagacgggctcanaatgagttccgcttaaggatcaagagaattagaagcgacaacaggacagagttcatgaactcac

SEQ ID NO: 77175 - DNA, 417 bp, Zea mays
  unsure (1)..(417): unsure at all n locations
cactacaagcattaatgtcataatctttacacctagtacaaatttcaacatgttctacacaagaattggatntatntgctacttctaatttagcatttaaatcattgttgacacctttcaaagtagaaatggtttcatgacaagtagatagttcaaaagaaagcatttcatttcttttaacttctaaagcataggatttttgtgcctcaacanatttatcatgctcttcatacaacaaatcctcttgcttttctaaaagtatattcttttcattcaaggcatcaattaactcatntaatttgtctatcttagatctatctaagcccttgaacaaacatgaataatctacttcatcctcatcactagattcttcctcacttgaagaagcataggtagagttgcgagtacataccttct

SEQ ID NO: 77176 - DNA, 358 bp, Zea mays
  unsure (1)..(358): unsure at all n locations
tcggcgatggttaanaaatttggcagganaacagtgcaaatagcattgaatgctgtggtaacttcacacctactcgtctggttatatagtgctgcaggtaagaaggcgaagcgccagaatttntacaccatgcggacacccgcttgcgctcgctgcgcggtggaccgcanggacaaacagtaactctgcaaggtgggaccgctacgtgctgggaaattaaatcgtttctcggcaacgagctcattggaaggtgttattggaccttcggctctccgaagcttaagagacttttttcacggatcaagctcgttacgaaaaacgatctatcaccgcgaaggggctactggtgggtctatgc

SEQ ID NO: 77177 - DNA, 368 bp, Zea mays
  unsure (1)..(368): unsure at all n locations
gcggacgttctgcagcaactgggagagattgtctctccacttgtagaactacagctctnttgtggtcagaatcttctctgaaacctatgataccaggagcacatggtaatgtgttaaatgatacgagataatggangaacaagtatatttagacttctgaactgcccacatcagcaacgaaaggtaatcatattcctaaccagaagtgcactgtagtatcgacaaagaataaacgcacaaggaatcatattcaatatagaatgcatatgcatgcttggcatcagacaccagaatgtgccaatgctgtgtaattatgcttgcctaacaatgttgtgacatgagccatgtactactaatattttgcattt

SEQ ID NO: 77178 - DNA, 443 bp, Zea mays
  unsure (1)..(443): unsure at all n locations
gcgagaccttttcccgtatctgtctaaccataatgaatgcgatatcgaatgtcatacatgatgcatattcactntattggatcccttgtatgatgtactgtttgtctccccatttgaatggatgaatgtatgtatgcttgcaatcgtatatagaatgattctgtcgaatagcccgaggaactcgcatgagaagcccctgagcagcagtcggttggtggaggcaagtgtcccttgacctatctatgtcctattcattatttaattcacctcccgctttacacatttatgcctaatgattaactagcttttgttatccatgtccttngttacctatatcgggtggattattattgtatagctctatgctattgctcaaactctaatcaatgaacatgatgagagtatctatgacacgctgtttcccttctctattatgatgtcgt

SEQ ID NO: 77179 - DNA, 397 bp, Zea mays
  unsure (1)..(397): unsure at all n locations
tactgcaagcacctcggtgcaagataatataggcctcatccctactcttgtgttccatcttgcatcaacccatctggacaggggctcgcggcacanaattcactagtcggtttggttgagggtcccccggatccgaaacgccgacagttggcgtgccaggtaggggtcgctgcgtgtagacaatactttcccgttgagttccagatggacaatcttcagtagcctcttcagcccaggacagtgctccgctttgggagcctcgagttcgtgtcccccgatggcagctacgacatggtactcctccccccgcaacacgacaacaacggcagtcgtcggctcgcccagcggaggtgaactcggcgacgacatctccccgtggcggaagaacacttgggtc

SEQ ID NO: 77180 - DNA, 413 bp, Zea mays
  unsure (1)..(413): unsure at all n locations
ctcagcttatagtcgacccaggtcttccccagtaggtcgtcttcctccattgttgttggcacgttgatggaggcgtcctggtgtggtgcggatggtctggactcangggtcggacggtccgtgctttgtgcagatggtccggcgtattcagccgggctgtctgccatacctgttggcattattatggtcgtttgcttttcctcaacgacctttggtctccatttcttttgtggtggcgggtattgtggatgtgtgtcattgaatatctattccgcttccttatcctggttctctttcgctcttaggcgctgtaattttcgctattgagaccgtgtcaatcccgatgggcgccatcggngcatggagtggtttggatcggctattntgatgatagtcgtatcttcttctttttt

SEQ ID NO: 77181 - DNA, 193 bp, Zea mays
  unsure (1)..(193): unsure at all n locations
gattcatgcacacacatgtgttctacactagcgctacttgatgttgtgcgtggaatccttgccattggcggcagcaatggtgaacgttaagctaatcgaccacatctatatggctatacatatgacggcagctangtgaatgttagtgctagcgtatggttgtttgtactatagatcttgtgatgttgaagct

SEQ ID NO: 77182 - DNA, 426 bp, Zea mays
  unsure (1)..(426): unsure at all n locations
ctaagcttttgaagctggttgcattccnctgagcagcttcgtcttggttgtgttgaaaatcttcgaagtctatcttcatcaacttactcccgaggcaattataaggctaaatatcttcgtgtgggccgcgagaagccaaggtctgaagcctgacgccagaagcttctgtaatgttcatgaattattatatgaaacaaagccttgnggcaaagaacagtaccataacaactntggctgctacagcttcgtctctcggtccggngcaagctgtctcgtaccaacctttcggaagagatggcccggcgattggatgacagaatggttntatgtgaagaatgacttatcagcacgagaagacatcanaggtataattatgcgtcctatntggcaaagcttctgccttcggaggccgaaggttgaaatgaa

SEQ ID NO: 77183 - DNA, 375 bp, Zea mays
tgagagctagtgagcaagagctaagaagtttaatattataactcatatagtggaaatagcgtaccaaatgatgtcgctatggtttacatatatatgcccaatgcgctgcaacttggtgggccatgtctgtcattggctattgctattctagcaaagggaaggtcgtttttcggacctttggcttaaggccttcgttcatgtcacagtctgaattcgttgttataacaaattaatattgcaaggcgctactgttggggccttcgtcttccgaaggtcctcaaaaacatgactaacaatgtttcccaagtgtaatatatgttcacgaaccttctgacccgggataaagctatacacaatatgaatagcacggtcatg

SEQ ID NO: 77184 - DNA, 477 bp, Zea mays
  unsure (1)..(477): unsure at all n locations
tctaaagggagagcacattntaggattaaccaatgttcattttgttaaagacagggtttgtagcgcatgccaagcaggaaagcangttggtgcccatcatccacacaagaacatcatgacgaccgacaggccactggagctcctacacatggacctattcggcctgatcgcttacataagcatcggagggagtaagtactgtctagttattgtggatgattattctcgcttcacttgggtgttctttntgcaggaaaaatctcatacccaagaaacattaaagggattcttgagacgggctcaaaatgagttcggcttaaggatcaagaaaattagaagcgacaacaggacagagttcatgaactcacaaattgaaggcttccttgaggaggagggcatcaagcatgagttctcttctcctacaccccacaacaaaatggtgtagtggagaggaagaatcgaactctattggacatg

SEQ ID NO: 77185 - DNA, 185 bp, Zea mays
  unsure (1)..(185): unsure at all n locations
tcgtctctgttgtaggtgctaccttagaagaaggttatgtttgctatcgttngagagtatctaanacatatttgattgataatacaatgcttggaagaccttctgcaatggaggcccccaatagtagcccctcatgggattagttacgtatcataacgagctcatgccacgaaatgtacttggga

SEQ ID NO: 77186 - DNA, 390 bp, Zea mays
ctgatgtgtgggtgcgttctgcatatgtcagataacacgcgcagaggaggaaggcgtgctcagcaggagcaagccggtcagcaagatgaggcgccccagcagcagcagctgccgcccacgcccccgatgtcgattgagcagatgtttctgatgcagactcaggcagttcaagccatcggtcagactctggccgccattcagcagcagcagcagcagcaggctccaccccagcctcagatgcctcagatgcctagagataagcgtgctgaattcatgagaggtcatccaccaacgttcgctcactcttctgaccccatggatgctgaagaatggctgcgcactgtggagcgagagctgcataccgctcaatgtgatgacagggagaaagtc

SEQ ID NO: 77187 - DNA, 323 bp, Zea mays
  unsure (1)..(323): unsure at all n locations
gaaagcaagagctaatatatcaagcaaagcaggcgtaccaaatgtgctcggggtgagttcttatttatacgctcagcgcgctccaagttggagggccccgtctgtcattgactgttgctattctagcaaagggaaggtgttttttcggaccttcggcttaaggccttcgtccatatcgcaatatgaatttcgtattctaacaaattaaccttgcgaggngctnngtgggggccttcgtcttccgaaagtcctcaaaaacatgaattaacaatgtttctggagtataatacatgaacaggtaccttcagactcngatcagaacc

SEQ ID NO: 77188 - DNA, 375 bp, Zea mays
gatcgagcggatgatgacagggaatggttcgtacctcggcggctctggcgggtcgcggagaggtcgctggagctatgggcgagctccggggagtttggcgcggggcaaaggatgcaacggtgaagacagacgggctctgggacgggctttatagccgtggcgcgggcgtggtcacaagcggtcgcgggcgcgcgggagttcgcgcacgggcgtgctctgagcgcgcccacgagtgtcagcccgcgtcgaacacgtgggagcttgcttctgccatggttcaacgacggatttgagcaccttagcgtgcatatcttggcaaaaccactgtgtacgggctcttcccttgcaccatatcctacctttttatgtgagttc

SEQ ID NO: 77189 - DNA, 414 bp, Zea mays
  unsure (1)..(414): unsure at all n locations
gactcgcatgtggctcactgacctattattataatgtgtagtgacgtcggctgttccccangctgcatcagatgattctgatgatgcagcgaaggccgccgcactatcggagaaggccaagtgggacgaagccaatgaggcatgcttgtctcgtctgctgaacgtcttgtcgaaccgcttatttgacatgtactctggttntacctccgctaagggtctatggactgaacttgagaacgagttctctgaagtttacaatggcaatgaatcattcacaacggagaactacctcaactataaaatggctgagggatggtctgctatggagcagctacaggagattcaactccttgttagggacttgatccaatatggctgcgtcctaccagatagttntcaggtgaatgcaatact

SEQ ID NO: 77190 - DNA, 480 bp, Zea mays
  unsure (1)..(480): unsure at all n locations
ctaagctctaaggggagcacatttanggatgacanatgttcattntgaataagacaggatnntgagcgcatgccaagcaggaaagcaagttggtgctcatcatccacaaagaacattatgacgactgacaggccgctggagctcctacacatggacctattcggcccgaatgcttacataagcatcggcgggagtaagtactgtctagttattgtggatgattattcttgcttcacttgggtgttctttntgcaggaaaaatctcatacccaagaaaccttatagggattcttgagacgggctcanaacgagttcgacttatggatcaagaaaattagaagcgacaacgggacggagttcaagaactcacaaatcgaaggcttccttgaggaggagggcatcaagcatgagttctcttctccctacacccacacaacataatggtgtagtggagaggaagaatagaactctattggacat

SEQ ID NO: 77191 - DNA, 527 bp, Zea mays
  unsure (1)..(527): unsure at all n locations
actcagctatagagaaaattatcgagtggacaggcgtatatgttgtattgatggcctcaacgaagcttcggcattatgtccaagcatatcatataattgttccttcgtcacaacctctaaaggacataatgaggaatagagaagctactgtgaggattggaaaatgggctgctaagctcaatgaattctctattgattatgtacacggatcctcaattcagtcccaggcgttagcggatatcatcgctgaatggacgccaggggcccaagaagaagtaacaaaagacaccgaagcctgaacagttttctgtgacggttcttgttgaaccttctgcgcatgagccactgctgtcctagtagcgccctctaaagttagaacatgctatgcagcaagactggactatagttgtacaaataacattgttgaatatgaagcccttctgttgttgcttcggaagcataaggcantgcgagtaagaacgggcgatcctttaaactgactcccaagtcatctctgtgtatactca

SEQ ID NO: 77192 - DNA, 415 bp, Zea mays
  unsure (1)..(415): unsure at all n locations
tgcgtagtctacttcatcatcactagactcatcatcacttgaagaatcatatgttatagtacttcgagtatttaccttcttctcctttgccatgaggcatgtgtgatgctcgttggggaagagagacgatatgttgaatgctgtggcggcgagtccttcgtcgtcggagtcggatgaagagcaatccgagtcccattcttttccaaggtgtgcctcacccttagacttcttgtaaaccttcttgnnnncactcttcccattctttccttgttcctggtcactatcattgtcgggacagttagcaataaagtgaccaaccttaccacacttgaagcaggagcgctttcccttcgtcttgctcttgttgggatgctccttgcgacctttgagcgtcgacttgaaacgcttgatgatg

SEQ ID NO: 77193 - DNA, 388 bp, Zea mays
  unsure (1)..(388): unsure at all n locations
atgaagttggtcgacgaatggtctcctatgcccgacagtgaggctactaagagtgataagaagtatgaatagtagttgtagaattagtagtgttattgtataatgggtactgcactcctgttgtaaaaattcgagtctgtaacattactatttttagtaatgtaaattggatggttnttctttgacatattatatattgttccaaatggtttgtgccacagatgtcgtccaagacccgatcacaggatgcagccggaacctccagtgggagggaatccaccccgaattctccttcagtcccttccacacttgccgaggctaacgccgccttggtaaatgcgacagcggataatacccgtttcctatgggaaatggcgggtcagcaatt

SEQ ID NO: 77194 - DNA, 342 bp, Zea mays
  unsure (1)..(342): unsure at all n locations
tctccaagaactctcatgtctcacaagcctaccattgttcttcaattggtccgccattgactntcaattggtatctttgagactacatttagtatcattttcatgtcttctccaatatttgattagactatatttcatatctcatacttcccatgttgctaaaatgcatatattgttgactcatatcttgttacctatgcataagggaagttagtctattcaaatcatgtcttgcacctctatttctcacatgctntatcctaagtagaagatctctgtcaggngagtatttcttcgtctctaaagggggagaaatttctttctaaaggagaacactcattt

SEQ ID NO: 77195 - DNA, 411 bp, Zea mays
  unsure (1)..(411): unsure at all n locations
cgacgagagtangcgtatcttggcgattagaccaagtgaatntctctccatgcagagccaattcttttaaacccagatcattaataaaccttctgaatctctccattagctgtctgttaaaattgccagagctcttgtcttcatctctgtagatgagattaaaatcccccataagaatccaggggccaggacacgcagatctcacatcccgaagttcttgcataaactgaatattgtactgtcgccttgaggtccatacacgcaagtcagccaccaaggaggatgatcacttggactaaactgaattgacacgctgtgctgatccacccgagaagcgctggctgaaccaatttcattcctccaggccacaagaatcccaccactatttccaactganggaagacacaattt

SEQ ID NO: 77196 - DNA, 364 bp, Zea mays
ccggagatcaagaacattctggttgtatatgagtatccagatgtatttccggaagattgcctggactgccctctgaaagagatgtagaattcgtaattgagctaaagcccggtacggctcccatctcccgaagatcgtaccgtatgccccctaatgagttggtggaattgaagattcaattacaagatctactgaataagggattcatccggccaagctcgtacgcatggggttgtcccgccatttttgtaagaagaagatcaaaccttgcgaatgtgcgtggattatcgacccctgaatgaggtcaccatcaagaataagtaccctctttcagcgatcgacatcttatttgatcaactgactg

SEQ ID NO: 77197 - DNA, 283 bp, Zea mays
  unsure (1)..(283): unsure at all n locations
atctatatgatttgagagctagatcggttgagagggagcgagggagtgcctttgtctcangttatgtgagcaataagtgtgtgggcgaccagcagttatgaggagagagatgtgaggggtatttatagactctcctcacaaagagtcgttgtgctcgaaattctgtggaggacctgttgaaccgcacctagggccggtttaatcgctcatggctgactgtcagtttgtttgcagtctgactggcagaatgctggacagtctgatcaaattgacctgacactgg

SEQ ID NO: 77198 - DNA, 427 bp, Zea mays
  unsure (1)..(427): unsure at all n locations
cttcactttcttgccttgtatgcctttaattaacctttntacatgttgattatattctccataacagtgtctgtatcattgcagttacctttactttcaaaagtgcctttcttgaatggtcaattgaagaaaattctgaccaagaagaatgcatcatcaaactaaatgacattcctggggtgccaagtcatatgagctagttgcaaggttctgctatgggtgtgaaaatagagcatcacaagctactatagtgaacaaatgtctttgtgactgatcagctctggagcagctagagtgatgtagttgtgggctattgaacaatagctggagtgatataaaacattagtgatcgtagtgtgggcttatgaactacttcaagctggagtgatgtcgctgtggtgcttatgtgactgatcatctctggagc

SEQ ID NO: 77199 - DNA, 482 bp, Zea mays
  unsure (1)..(482): unsure at all n locations
gtatgaaagtgatggtttcctcccaaccaaattctcataggggttgtctatctattattgcatggaattctattaaaaacatgacaccaagttaataaagccttccgcaccatacctcagagaaactagttgtgcctaacttggcattcaccaagttagtcactaagcggtttttgctctcagcaatcccatttgcttcaagtgaatatggaaacatcctctcatgaatatattgtgttgctcttagaattcatcacataatcctagaaaatgctcatcacaatgatctaaccttaaacacttaatatttctttctagttagttctcaatattagccttatagtttcaatgtagtctagcattccatgtttagatngaagcanacanacatagcanaatatagntgtatcatcaattaatgacatgaaatatatctttcaatcatttgtcagaagcatattgcaagatcttttgtggacatg

SEQ ID NO: 77200 - DNA, 489 bp, Zea mays
tctcttggacaagtgctgcacttaccgctgagtgcgaagctgccacatatatcaacagaggagcccctagcgttggtggagttagtgctgctaggtctatcaaatattgcttcagctcttcgaaggctctctgctgaactggtccccattgaaaaacttccgctgacttcagcacttcgaagaatggtaaatttctctctgctgatctagatatgaatctgttgagagatgccagtcttcctgtcaatcgttgagcccccttctatgtgcttgcgtggtccattcgaaggatagcttcgattttatttggattagcttcaatccacttggttgaaactaggcagccaacgaaattccccttcttcaccccgaaaacacatttttctggagtcagttttagaccagcctgtctgaaaatagcgaaagtctactgcaaatcaacaatgtgatgttcttgcttcgtgcttcttacaatgatatcatcaacat

SEQ ID NO: 77201 - DNA, 307 bp, Zea mays
ctcagctcggcagaagaggaagagtctttatgttctgcttgttaagtctttgccgacagaagaagagtgttttatgttttgctatatgaagaaaagctttgtgaaacagaggaagcggccgtatacgcttccttgtgtacgataagaaaggaaggtgttatttcgccttcggctcagaatactgatatcgtccacatcaaagcgactcaatctaagtggaaagagtatattacaaggcatgttcaaagatcctcgagaacagctctattgtatttacaaaacttgttacaaaagaatcctgaggttt

SEQ ID NO: 77202 - DNA, 520 bp, Zea mays
  unsure (1)..(520): unsure at all n locations
ntacgcgacacaattatntgtcaaacatgaacacagttgcaacaatgcatgtaacatggcatnttatcaaacatataatataaccacaatgtgcctgtgctacagacaagatattcgtcacataattttgcatcaaaattctagacctcaacccctaactccactactttataattctaaaaataattatatcaccacaaaacagcacaccgacacaacaacggatctagccataatcactaagcgcacctatgctaaataaaaggatcatcgcactaacccattaatttattcaatgatctaattatcacgaataacccatccgctcaacatgaccaaaacgacttgataacccatccgctcagaataacccattcggtacaaattagacgaaaatgactcagttcgttaaatgtcatgtaggaatatattagacatttaacanatganaacaacacataccatccaatcanatannattangggttttagtattctggaagagagtgagaagatatat

SEQ ID NO: 77203 - DNA, 449 bp, Zea mays
  unsure (1)..(449): unsure at all n locations
tcacccagggtcttcaatcatcatactaagcctacctgagaagttttactattttggagttactaaattatttctaacattctaaagggcttggtttgaacacctttaagggctacataattctaggtttggaataaaaatcttggaactatctttattaaatactagatgattctaggagtctagcaaatntggtctcataattntaccattttctactattttctacaaatttcctaatctgacagtaaaaagaaaagganaaagaatgaattgtgatgggccaaatctggcccaagccagttcatgaacagaggaaacacgcgcgcgctcgcgcncacgctggcggttntgcgcagaggcccctaactattttaataaccagtaaagagccnctaaatactattctgatgtctcactaacaatcgcagttaagcccgtggacatct

SEQ ID NO: 77204 - DNA, 451 bp, Zea mays
  unsure (1)..(451): unsure at all n locations
gctatagtgaacgtcctcggcaccatgagtgaggctgacctagtgtttatcgacaatccaaaggctcggagatacatcaagtcccttccctatacccctggtgttcccctcgtaagtatgtacccacacgcgcaccctcttgccattgatctgttgcagaagatgctcatcttctactcgaccaaaaggatcagtgtcaccgaggctctcgagcacccttacatgtcccctctgtatgatccaagcgcaaatccaccagcccaagtgcccatcgatctggacatagacgaanacatcagctcagagatgatccgggaaatgatgtggcaggagatgcttcactaccaccctgaagttgcacagcaataatcatgtcatgagagagtccacagcctccaggacatcatgcggggctcacctcttctttttttgtctttgataaaagcctact

SEQ ID NO: 77205 - DNA, 356 bp, Zea mays
  unsure (1)..(356): unsure at all n locations
atgaagatcttcatccaacatgggctattcggtggtgccagtattaatccatgttagtcttagcaattaagcagggggtcgagttcagctctatcaaaatctactaggtatagctgaccctctaacactcccttatatgctattgaatcatcactatttctaaagacagtgacacctacatcagtataaagacagttgtagcccatttgacataattgagaaacggaaagcagactgtaatctaaagaatctacaagacaaacattggaaatagaatggtcaggagatataacaattntacccaatctttntaccaaaccttggtttccatccccgaatgtaatagcgtcgtgggg

SEQ ID NO: 77206 - DNA, 359 bp, Zea mays
  unsure (1)..(359): unsure at all n locations
tctaaagggagaacacattgtgggactaacaaatgttcgatttgataaagacatnggttgtagcgcatgtcaggcagggaagcaagttggtgatcatcatccacacaagaacatcatgacgactaacaggccactcgagctcctacatatggatctattcggcccgatagcttacataagcatcggcgggagtaagtactgtctagttattgtggatgattattctcgcttcacttgggtgttctttntgcaggagaaatctcatacccaagagaccttaaagggattcttgagacgagctcanaatgagttcgacctaaggatcaagaaaatagaagcgacaacgggacggagttcaa

SEQ ID NO: 77207 - DNA, 456 bp, Zea mays
  unsure (1)..(456): unsure at all n locations
gagtcgtcccctggcgggaccaacgccagagtcgagttgtcgaggccacgagccgggctggcgtcctcggnggacagctggctgaggcttcngagcggatggccgagccgtctgctcgggccaggttcctagaggagtccctagcggcgatggcccgggcgtggtgctgacgtcgtccttcggagcggagatcccccgaccatgttgccgtccgaggctcggtcgggcttcaccgatggtggagttgacgccgagggtgctgctgctccccctccatcgacgtctgatcctgcaggatcggttcgcctgtagtatgcatatgttttttgcggccgccgaggcccaaacatattttcatcgcgttgtaaagctacgtttcttttccccttgtttcgagcatcanggacttattgtcggtaacagaattggtttgtccgagcgagagtacttctcacg

SEQ ID NO: 77208 - DNA, 452 bp, Zea mays
  unsure (1)..(452): unsure at all n locations
tatatgcgaattgactcatgcctatctacgggtgcataggtttcaccgaaatccaaaccttcgacttgtgagtattctttggccacangtcgtgctttgttccttgtcaccacaccatgctcatcttgtttgttgcggaagacccatatggttcctacaacatattggttatgacgtggaaccaagtgccatacctcgttcctagtgaagttgttgagctcctcttgcatcgncaccacccaatccgaatcttgaagtgcttcctccaccctgtgtggctcaatagaggaaacaaaagagtaatgcttacagaaatgtgcaacccgagatcgagtagttacccccttatgaatgtcgccgaggatggtgtctacggggtgatctctctgtattgttggtggactcttggtgtggcggcttggtcttctcatctcttttttgacaatgatctc

SEQ ID NO: 77209 - DNA, 379 bp, Zea mays
  unsure (1)..(379): unsure at all n locations
aatcaacgaaatgaagagaaataaaacaacatatatgagaataaggtaactaactaaactaatatgtctgcaattactacatacactnttatgatgtgttttattactaaaggtcacagatactattttgcaacgcatgcttccctttccatggcataaccaattccagtgagtcacattaccctatcatatgaactcagagttcactcattctccaacccacaacacgaaacgttcaatccattggtattcctctaatggaggcaccatctactcggtgatcacccctgaatctgtgaaatctcttgaagcaccagtctcctgaaacaattcacagcacanaatcatcgtgcacttgtgcagcacccaccagagcacc

SEQ ID NO: 77210 - DNA, 490 bp, Zea mays
  unsure (1)..(490): unsure at all n locations
tctaaagggagaccacgtgatanggctaaccaatgttcatttcgaataagatagaccttgtgcagcttgtcaagcaggtaaacaagtgggaggagcacatcacagcaagaatgtgatgaccacatcaagacccctgaagctgctacacatggacctcttcggacccgtcgcctatctgagcataggaggaagtaagtatgggctagttattggtgatgactattcccgcttcacttgggtggttcttttgcaggataagtctgaaacccaagggaccctcaagcgcttcctcaggagagctcanaatgagtntgagctcaaggtgaagaagataatgagcgacaacgggtcggagttcaagaacttgcaagtggaggagttccttgaggaggaagggatcaagcacgagttctctgcttcctacacaccacagcaaaatggtgtggtagagaggaagaacaggacgctaatcgacatggcgaggactatg

SEQ ID NO: 77211 - DNA, 418 bp, Zea mays
  unsure (1)..(418): unsure at all n locations
cagacgactgtccatgctatgtcttcctctgtccctgaaataagaagttgatcgtgtatttcttaatatgttggcccaattcactcttggctctaactggatcacatcagtagttagataatgctcagagtnttctaaaataactattctccttattgggttgcatttacttgtgtacttctcattgcctaagcatatcttcccttgtatgagtagtcctttgatgatagacgttcctcatggttgggtatgtaatagcagtagttatcagttctcttcattgacgttagaccaatagtctctccaatctttggcatcccactcttttctgatttaatttgtaaaaattgtggatatgtctaagagtgataatttggggggcaaagaatcattttgccccaagatcattggatacaca

SEQ ID NO: 77212 - DNA, 373 bp, Zea mays
  unsure (1)..(373): unsure at all n locations
tgacatgcttggagcatctacttggggaatataatggtgaattaatactcacaaatagctatgcacgtccatgctgaaatatttgtttgtacaatacaacttgaacattaatctagaatatagtttgacttggtcttgaatttgaatttacgaataccacattaacatgaaagataaggtgaagcttgtgcctgtgggccaaaatccccagaccccgtgccatgtagccatgtacgctattcaaacccgagcactgacaggctattcccacgtgtcagtttccacacgagcgcacatgtgcgctgactggtgggccgttctggtcagaccctcactacacagcaacgcaaccatctgttcangtcactgttgt

SEQ ID NO: 77213 - DNA, 310 bp, Zea mays
  unsure (1)..(310): unsure at all n locations
agcggatctatgattctctggagccctacgccanaattaacataacacaagtacaatacaaagtaatatacttcaaaagttaaaaaataaaacattacacaaaataaataacatacgaaacacattgttatagagtaatatcttcactcttcatcaattattctgtgggcaaattaaagaccatacataacaacatgaaataaacaaattagatgacacagcgcgaaagctttggttattactagtgatttagtggaaaacaatagtcttcttattttctgatttcaactcttaaatataatataaatac

SEQ ID NO: 77214 - DNA, 471 bp, Zea mays
  unsure (1)..(471): unsure at all n locations
tacaggctactggcggagctagccgaagcactggctcgacttgatggtggctggagtgggctggccacggtggccgaagctctggcggcaatggcgggcggaattgagctcgccggagctaaggaaaggtggctggccggtgagggtgagtgcgaggcgaagtgaggtgcgcccggtgaggctatatatgcgcgggcgggcatggacgaaggcgtgggcgcgcggcggacttgaccggacgccatggtgagcgcgcgcgcgggttgtgcgagctctggcgtgccgaccagggtcgaacacgtgtgcccgtgcgttctacccaagttctggcgcgtgtggtcgctcatacgagtctgctctcgccttggtcagtgcacaaaacctcttctccccctacaagctccattcttggtggggtatangatttgcctctggtgcagnatatggagcaggaaatcggtctgtctccta

SEQ ID NO: 77215 - DNA, 419 bp, Zea mays
ctcacggtccacacgattatattcactcttatgatggcctcggcggttagttggtgaagatagacttcgaagatattcagcacctccacgactaagctgctcaagggatatcgcaacccagctttcataaagcttcggtacactacgacttcattttcttcagggtgtggacaagtcttctccccttcttcggccctcacaacggacaaatcccggaaataccttcctctcatgtctgcaagatgattctctttgatagttgatttaccataaactaaatggcttggtcgccaggggcgatcttcggagtcttcaccaccgctgttcacatcataactgtcgctgtcaccagtatcctcagacaaaccttctagaatctccttggtgattatctctgtgttggtcttcgacatcgctat

SEQ ID NO: 77216 - DNA, 423 bp, Zea mays
  unsure (1)..(423): unsure at all n locations
tcacgggctactggcggagctagccgaagcactggttgggctggagggtggctggagtgggctggccacngcggccgtagctctggcggcaatggcgggcggaaatgacctcgccggagctaatgaacagtggctggccggtgagggtgagtgctgtgcgaatagaggtgcgcccggtgaggctatatatgcgcgggcgggcacggactatggcgtgggcgcgcggcggactagaccggacgccggggtgagcgcgcgcgcgggtgngcgagctctggcgtgccgaccagggtcgaacacgtgtgcccgtgcgttctgcccaagctctggcgtgtgtggtcgctcatccgagcctgctctcgccttggtcagtgcacaaaacctcttcttctcctacangctaccattcttgtgtggaggcat

SEQ ID NO: 77217 - DNA, 259 bp, Zea mays
gttagaagcatgtgggtgtgtgagatgagaatcttagtatgatctcaaggttagtggagatgttcaagaaatactaaacttagagaggttgagtgccacataatccttagtacactcaacaccctaatagaaaccctaaaaaccttaattagtgctctatgaggtgacttcaatttctatgcacttttggaccaaagttcatatatgaaagtggtagagtaacaaaaactaagcaacttttacatttgaagatttccat

SEQ ID NO: 77218 - DNA, 470 bp, Zea mays
  unsure (1)..(470): unsure at all n locations
tgttcattttgagaaagacaggatctgtatcgcatgccacgcaggaaaagcaagtggagctcatcatccacacaagaacataatgacgaccgacaggccactggagctcctacacatggatctattcggcccgatcgcttacataagcatcggcgggagtaagtactgtctagttattgtggatgattattctcgcttcacttgggtattctttntacaggagaaatctcanacccaagagaccttatagggattcttgagacgggctcaaaatgagttcggcttaaggatcaagaaaataagaagcgacaacgggacggagttcaagaactctcanattgaaagctntcttgaggaagagggcatcaagcatgagttctcttctccctacactccacaacanaatggtgtagtggagaggaagaatcgaactctattggacatggcangaaccatgcttgatgagtaca

SEQ ID NO: 77219 - DNA, 315 bp, Zea mays
ctaagcttcttcgcgcctaacaaggttatgatcgccgaggtgcgctattattatagtgtgaagtgagctcaccggaggtgggcgccaatgtttgggacctgtgtcacacccggtttatataacgtgaaccgaatgcgaaccatgttcgtgcccatgatcagttatctacgtactcagcagctacataacatggacattatcacacatcgctcacataatattaatacgggagaaaatagtcgattacatcatacgtctgagacatcatatagttcttacgataaatcaaagagcgaaaacgaaacgagattacac

SEQ ID NO: 77220 - DNA, 354 bp, Zea mays
ctttgaacccagttctttgacaactaacatgcttggtgtgatttatttcattattgaagcacaacaaacgtagtctcaaacccaagcgttaaataacaacctacaagggataaaagccatcccatcattatatactacgccgcgagcgtgtaccacatacagcactgggagaacaaaagactgttgtaatacttacctcccagagaaaatcacgggaaaactcaggagacaaccggtgcaatcaagtatacggatataccctacatgagcactcccccttagtcatgcaaggagaaagaaaacgacactgctaattggtcataaaacgtaaagtgaaaatctccgtgagaaaca

SEQ ID NO: 77221 - DNA, 447 bp, Zea mays
  unsure (1)..(447): unsure at all n locations
taactcttaagagaacagattctgcacagaattatgagactganaaactgctataatcaaactgtcataactttctgttctgatgtccgaatgaggtgttcttcacggccacggaaagatctacaaattatctaccactcatatatagactntttttatttttttgaggccactaagatcacggaaaactggtatgcacagaaactgtcgaatctgccattctgcagaaattaaattcgaaatcaaaacctaaccccacacctaatccaacctctaatccttcaatccacatgatccacaacctccaaaagcacataattatatggagaaacaaggatcctatccttacctanggtttccctaaaaaaatctgcaagagatggggagcacatctncttgacctctctcctcttcaatcatcttgtccctctcttctcgatccttgtg

SEQ ID NO: 77222 - DNA, 414 bp, Zea mays
ttgtaacgcatgccaagcagggaagcgagttggcactcatcatccgcgttagaacattatgacgaccgacaggccactggagctgctacacatggatctattccgcccgattgcttacataagcatcggcgggagtaagtactgtctagttattgtggatgagtattctcgcttcacttacgtattctttttacaggaaagatctcatacccaagagaccttatagggattcttgagacgagctcaatatgagtttggcttaatgatcaagaaaataagaagcgacaacgggacggagttcaagaattctcacaatgaaggcttccttgaggaagagggcatgaagcatgagttctcttcttcctacacgccacaacacaatggtgtagtggagaggaagaatcgaactctatt

SEQ ID NO: 77223 - DNA, 245 bp, Zea mays
  unsure (1)..(245): unsure at all n locations
gtattgcgtcacgtgaatatgcaaaatgattgtcgtctctttagtggagttaacgatgtgcgctcgacgatatgtagttagctaacgctagtgtgtgtggctgcttgtgatgtctcactacttagtgtttaattcgctagcgtgtacttaaagtatcttgtgctctttcattattntcattcatatgcatcttgcatctcatttatgaccganagatgatgatcgatcaactgatgtggtgccac

SEQ ID NO: 77224 - DNA, 395 bp, Zea mays
  unsure (1)..(395): unsure at all n locations
tgtacgatcaacagtactatgccagaatcaaagcacatatactgatcgatatacttttatgttctatgccattatgctgtttaataaggaacaagcaatgtaaatttagttttaatttcttgtaatgatcttgcttctatcagaatggaatatatcttcttcacagacttacgaagcttaaaagttacgaagctcaaaagttacgaagctcaaaagtcgttcctaagggaatgcagagctaatattgccgaagctacaaaaagtcattcctaatggagcgcagcgtaagttttctgctcaaaagtcgttccaaagggaatgcagagccaaataccgccgaaatataaggcgaagaagttcanaagtcgttcctaaggggatgcagaacttatacc

SEQ ID NO: 77225 - DNA, 491 bp, Zea mays
  unsure (1)..(491): unsure at all n locations
aggggaaagcacattttacgattaacaaatgttctttttgntatagacagtgattgtagcgcatgccaagcagggaagcaagttggtgttcatcatccgcataagaacatcatgacgactgacaggccactggagctcctacacatggacctattcggcccgattgcttacttaagcatcggtgggagtaagtactgtctagttattgtggatgattattctcgcttcacttgggtattctttttgcacganaaatctcatacccaagagaccttaataggattcttgtgacgagctcaaaatgagttccgcttgaggatcaagataataagaagcgacaacgggacggagttcaagaactctcatatctaatgctttcttaaggaggacggaatcaagcatgagttctcttctccctacacgccacaacacaatggtgtagtggagaggaagaataaactctatggacatggcaaaaccatgcttgatga

SEQ ID NO: 77226 - DNA, 446 bp, Zea mays
gtagtatgagacatatacatgtcgcgtactgtgtttgttattactgtttaccttataccgcattgatgtgtgcacgaggatgacaccgcagattgatactctgaagcatgttccgaagactgaagctatatttaggccttgctgcatagaacttagaagtatttcgtattatctttgtataagacattggtatcgagaattgatcatttgtatatttgtccataccttgcaaatattattaccttttcatccatgtgaaaattgcattgttgtggacgaaacctgtatcttatgagccgaacgcgaacaacaccttcccttctttttcgtcacaacgaagcatatctatgcttctttgtgctcatcgaagcattgatatcacagataaagcattcatgtgtgggcgtcatgttatgataacgatgaccctatgaatgtctacatga

SEQ ID NO: 77227 - DNA, 341 bp, Zea mays
  unsure (1)..(341): unsure at all n locations
gcttcgcacagtgatatgtctcaagacgaaggtgtgaaccgacttatagatgaaatgacttanagacccataatattctgtgtcattattgtagatcattgtaaagggtataaatgtaattatatacaggctgtgaactgtgcctataaataggtgaacagtacccctgtactgttcacgtgcttttctgtaatcacgcattgngcattngtttatgcttcacgctggtatttttgctttcctttaagtcgaaggtacattngtaatttgttatcatttttacaataatgaaatagaaataagttaatgataataatcatgtgtttaaattaatttatata

SEQ ID NO: 77228 - DNA, 310 bp, Zea mays
ccttgatctgctgctgctgtcgagagcgcaagctttacctgaattctggtcaactcaatgggttaaacttatgctttgcactaatcgtcttagtgccatatttcattatattgtcgccaattattctcattaattttttatttgtactgatttatctccgaattattgttttgttattaaactctggccatactgttccaggagacttgggaagcctccactgcctcggttcgagaccaccgacaccattcatgcattctcctttttttttcccgacatctgactgacttatattcacttcggtcaaact

SEQ ID NO: 77229 - DNA, 397 bp, Zea mays
  unsure (1)..(397): unsure at all n locations
aacacacaggggttagaaaacattgacgtaagcatatgttattntaaggtttcactatggaaccactagattgtttggagaaggcggtctttttatgggcaaatcacgcaacaatatttattggcaaaagggttgaacaatagcaatgccacctatatagcatgacaagagaaacacattacacgacctacatgacttactcaattgatacgaggtaaggcatttctaacanagcagtacatcacattattcacaagttnttattattggaataaaggtgagagaagcatgttgatgcaccacagacaattataatgagacaatcatgatgcatgctcattctagtcgtcttctcagacctaactaattttcnggtgctttacagcatccttcctat

SEQ ID NO: 77230 - DNA, 496 bp, Zea mays
  unsure (1)..(496): unsure at all n locations
ggcggagctagccgaagcactggctcgacttggtggtggctggagtgggctggccatggtggccgaagctctggcggcaatggcgggcggaattgagctcgccggagctaatgagaggtggctggccggtgaatgtgagcgcggtgtgaagtgcggcgcgcctgnggaggctttatatgcgcgggcgagcacggtcganggcggtgctctgacatgcgctctgggcgtgcgcggcgaacgccagtgcacgctctggcacgtggcacagcgtctagcacgaggcagcgcagagagaggtcaagttcaaacgcggattgtgcccaaatctttgagattaatgccacgatcccgttgaaagatctctttctctcaggtccctttgtcgatagtgtgtggaggctagcaagtttctctgactggattacgagatagagaggggagagatcatgtttgtctcactgtcacacacaacgagaanattccttggttgacgtgt

SEQ ID NO: 77231 - DNA, 451 bp, Zea mays
  unsure (1)..(451): unsure at all n locations
acatgtgctagtcggcgatgccagagccagcccatgttagtcttagcaattaagcaagtgtcgagttcagctctattgaaatcaactaagtatagctgaccctctaacactcccttanatgctactgaatcatcacttcttctaaagacagtaacacctatatccgtaaaaagacaatttgtagcccatttgcataattgagaaacataaagcaaaatggtatctaatgaatctaccagaaaaacattggaaatagaatggtcaggtgatatagcaattntacccaatcctttgaccaaaccttgatttccatccccgaatgtgatagctcgttggggatcatggttnttctcataagaggagaacatccttttctccccagtcatgtgtgttgtgcacccgctatcaatgatccagctngagcccncgggatgcataaacctacaaacaa

SEQ ID NO: 77232 - DNA, 503 bp, Zea mays
  unsure (1)..(503): unsure at all n locations
tctagaatactccaaaaatactcttgtcccatattctgcctataatttccgtgtttagactaagtcagacgattcattcaccactattctcacaaacagtgaactctaatgtactaaaccacatgtacccagctataaatacacccagctaccatcttcctctccacacactcactactagagatatgcttatttaagacacgcattttaagacggatatcaatgcatcttatagaagcgtctcttatcatatggtcatgagtaagggaagacagttggttggagagccgtcttcaataaagaagtgtgttaagacagtcatatcgtaagagatgtcttatattgatttaagacggattgttcttgacaaccgcctcaaataagtttatcttttgagtcattaagaatgcaataattgtcttagattntcggtaatatattatacacctctatatatgaaaccatctcagataaaaatattattagagtcgtatagaatataa

SEQ ID NO: 77233 - DNA, 408 bp, Zea mays
  unsure (1)..(408): unsure at all n locations
ctagaatcaagaatattgagctcatgcctaagtttgtgtaaagtntgttcatcaagaggctcggtaaagatatcggctaattgatctttagtattaatgtaagaaatctcgatatcccccttttgttggtgatccctaagaaaatgataccgaatggctatgtgcttagtgcggctatgctcgacgggattgtcggccatcttaattgcactctcattatcacatagcaaagggactntggttaatttgtaaccgtagtcccgcacggtttgcctcatccaaagcaattgcgcgcaacaatgtcctgcggcaatgtactcggcttcggcggtggaaagagcgacccgaatttgcttctttgaagcccaagacaccaaggatcttcccaagaactggcangtccccgat

SEQ ID NO: 77234 - DNA, 397 bp, Zea mays
  unsure (1)..(397): unsure at all n locations
cgtactaagcacataccgaganatatggtatatcggtattcctagtacctgagtgaacctggcagtggacatattctctcatgcgacctgagacgaggactcccattccggttatggtgggtacaagtgcggtcactgcacgacggtagactgtgtcagtgaggcatcgtacgccaaggcggagagccctgatctgctgacggggaatccatggtgactgatggtgtgtgtggggactgaatgcctcnccacatcgtgtgtttaggtttccttgcaacgataanaactctattccaatcgctgcttctcgcactaataaactgcttgaacatgctgctcattgataacaagtggaatgtgatgaatgatcaagacatgtttgctaatatgttgatcc

SEQ ID NO: 77235 - DNA, 362 bp, Zea mays
gctcgccaagcacgaaagcaagttggtacccatcatccacacatgaacatcatgactaccgacagactgcttgagctactccacatggatctattcagcccgattgcttacataagcatcaacgggagtaagtatcgcattgtaatagtggatgattattctcgcattactcgggtattctatttgcaggaaaaatctcagaccctagagaccttcaggggattctcgagactggctcaaaatgagatcggcttatggatcaagaacattataagcgacaacggtacggagttcaagaactcacaaaatgaaggcttacttgttgaggacgagatcaagcgtgagttctcttcttcctacac

SEQ ID NO: 77236 - DNA, 523 bp, Zea mays
  unsure (1)..(523): unsure at all n locations
tctgcattgcataccgacttanagatagaatgaccttntagcccataaaggtctgagtcaatgttgtaagcttgtataaggtgcatacttgtaattcctcacaggctgcgtcctgtgcctataaatagtgaacagtattccgttactgtggacagattctggtatttgcaatcgcatctctcggaatacaacctttgtcaaggcataggtattattggtatctaatgattcaatatattaaatgaatatgaattgatgtatctgtgagacatttatccatcttatatctcttattttgcattatcttacaatggttgttggaagttcattacgaatgttcaacttcgtaatgaaactctcatcaaccttcgtacaagatccattatcctcacacgaataatgcttcatggacgaaggatagtatcatctaacatgttatgttgccttgtactcattcatagcatttgagaacaagtcctcaacactccccatatatatacagtttgaaatactattccaaata

SEQ ID NO: 77237 - DNA, 502 bp, Zea mays
ctcagcatggtattcctattagagaagctgcaactctgcatatatttaatttcttcctaccatgatagaaggaatgtgtttttgccactgctcataaatggtatgtatgccaaatttcatgcatcgttgagaattgatctataaatagattatatattacattcgacgttacacatgtttacacatgttacattccaaacgtctttacaatagcacttaatcctccttacgaactatctctgcacattcttttatcagctggtcgacaaccttgtccatgatggcttcagccatctttctaatgtcatcgtcccacttacagtggtggcccggagatgctatcgcacggtcttagggtggagaagatacgactatattactattatacaccgagaacacagcctggaatagatatacaatataatgagaccactaataatacctatttgcctttggctctgactgtctcagcgcccgtgtattttctagcatcgggtgcctt

SEQ ID NO: 77238 - DNA, 383 bp, Zea mays
ctcaactataagttactatatatggatccggaattataggcatatctgttctgacgtcgccgcaatcataggcttcgtaccgagacattttctgccttttctgcccatggtgctgcagaacactattatggcccaatggggcgtgtatcaagttaagtccattagggacgcattctacggttgcagcacgagctcaatacccttgtggtcgctcttccatgtttataaaccccctaaccgccaacgagaacagcgggttttgttaacataaaattagctgtctctacttgcttgcaagcacgcgcgctaacacagccgtccgtcttcgtgtcttctgaaccccaccatattagagttcgatcttttaacctacatttacatct

SEQ ID NO: 77239 - DNA, 256 bp, Zea mays
  unsure (1)..(256): unsure at all n locations
cacttcttctaaagacagacacatctacatttgtaataaagacaattatatcccatattgcatagttgactaacagatagcaaattgtaaccaagagactcaactaanaacacatttgagatagagtgctcattagaaattgcaattttacctaacccttttaccttgccttgattcctatcaccgaatataattgaatcttgggaatccttattcttgacgtaggaggtgaacatcttcttcttccccgtcatat

SEQ ID NO: 77240 - DNA, 202 bp, Zea mays
  unsure (1)..(202): unsure at all n locations
gaacttaatataaaacttgaagccgaagctctacataattcagatttgaaaaaactattgtcgggccttcaagaaaatgttggaattatcaacagatgcattcaacgattaagaanaattttccacttcagtggagccagcagtgaaaaattcaccccctcagctgaagatttaccgaagaccttcgaacatattggggatg

SEQ ID NO: 77241 - DNA, 258 bp, Zea mays
gatctaatcctatccttctacaacagatccaacggcaccagccaagccgcgacgcttgatctcatcccggccggtggctgggtaatctacgaccacagagtgccttcccaacctttccttccaccaccggcatcagagcggcggagcacacggcccccgccgtgcgaagtcaccggagatgcgagaaccggcgaagcaaggtaccaatctatcatctaacgtttgctacgcgatgcggagtggttataggagcttctg

SEQ ID NO: 77242 - DNA, 256 bp, Zea mays
  unsure (1)..(256): unsure at all n locations
catggagtntgttcaccactcctcagatgtgtatcaagagccgaaggtatgaaattaatgaaagagatacatgcaagtctgtgtggatcccacattggatctaggcccttattanngaaaagtttccgacaaggattntattggccgaaggcagcttctgatgcgacagaattattccaaaagtgcgaatgctgttataatgtgcaagagatcagaagcaaccttcatctctcactcaattaatacaacccacttg

SEQ ID NO: 77243 - DNA, 361 bp, Zea mays
  unsure (1)..(361): unsure at all n locations
tgaacagatgagntccaaaggtaccaagtaaaatcttatcacgatcactgaccatggactgtggcaacccatgaagcttaatcacatgatctaacaggagctgagctacttgagcagctatgaatgggtgtttcaaagccaagaagtgagtatattttgtgaaacgatcaacaaccaccaaaattgtatcataactttcagatttgggcaacttttcaataaagtccagtgtgatatcctgccaggcacctgtangaacaggtaaaggctgaagcagccctgcanggtggattctttcacttttggcctgctgacacacctggcattgcttgacaaagntcttcacatctccttttaatcc

SEQ ID NO: 77244 - DNA, 518 bp, Zea mays
  unsure (1)..(518): unsure at all n locations
accgatcatcatgtcgcacatatgcctctcgggaacattcaccttcttctcgtcactctggtannttgggctctctgtatggatggtgaacatagaangtgatcctattgacaaccgtactataagcaagtctgagttgcaattaattctagatgggagaattggatctaaagctcaaggcagtaaattcccatccgtaagggaattggtctcaaacactcaattcttggctgtcactttggccaatgtggtcaacaactatgtaaggatgggtctatgggcaaaatgacaattngaccatattgtgtacanatatgaatttaacagctgcanattcaaaatactgggcannggctattttttctattgtcatggatgcccgtgtatttcaaaacgggtatgtatcaaaggcattntgacctgtacccactcacaaacactaaaatgttttaaccgtaattctacaacagggttataacgtcaatctganacaagcagcatggtttagtactatgagt

SEQ ID NO: 77245 - DNA, 384 bp, Zea mays
  unsure (1)..(384): unsure at all n locations
cgtgaagagtgccttcctcaatggaccaatcaaggaagatgtatatgtttatcaacctcccagctttgaagatagtgagtaccctaaccatgttnttaaactctcaaaggcgctttatgggctcatgcaagcccaagagcatgatatgaatgcctaagagattttctaatcactaatggattcaaagtcggaaaagctgatcctacactctntactaaaactattgcaaatgaatttgttgtatgccaaatntatgttaatgatatcatatnttngtctactaacaaatctacttgtgaagagttagtaggatcatgattccacaattcgagatgtctatgatgggggagtngaagtattcctangattcaagtcagcactcca

SEQ ID NO: 77246 - DNA, 322 bp, Zea mays
  unsure (1)..(322): unsure at all n locations
tactcagctgctgttagtattttggtgcggctagctntagatccgtcggaattgccgtgactggatcattcatgcgtgggttgctgggagctgaagttgtgaattttcttggccgcgcgatctgtttgtaaagatgacacaattcgtttgctgtagttacttggatccatggngatcggtttgtgtaccgcgattttaattgatgtgaggtggccatctgcgcgttgctccttggttctcttttgcgaagatcgggatatctatggaggttgttagctagccatttgatggttttcattnttagtaagtggttgtttttaag

SEQ ID NO: 77247 - DNA, 377 bp, Zea mays
  unsure (1)..(377): unsure at all n locations
acacctaattatgtggagacgaactgtaccatgctaaaagcatgacgccgacttgagcccccaagataatagagtnactgtgatgacttaaaaactttgtaatatgactaaacttgcttaatgattctgtcatacctgaatatgctttaccctgcttaatgattanagtgcttgatgggacaaatatcttttgagcgaggcgaaaaaacacctccttctttgtccatcgacataaaacactttcgagctcttttctcacacgagacaagacagtttctttgcgacaccctatgttgagaggtatctatttgctaagatgtatgatgcaagttgagatatgaggcaagatgtcacctatcaagctaatcacgtttcta

SEQ ID NO: 77248 - DNA, 300 bp, Zea mays
  unsure (1)..(300): unsure at all n locations
taaagaattctaagatatttgaagtatactcccaatattggtctatggtatcccaaaggtgcctcaattgaattaattggatattcggattcggactatgcggngtgcaaaagtgatagaanaagcacctncgggtgttgtcaatttcttggtagatctcttgnttcatggtcttctaagaaacaaaattcggttgctctatctaccgccgaggcggaatatatatcggccggaaattggtgtgctcaactattatggatgaaacaaaccttattggactatggaattattttcaagaat

SEQ ID NO: 77249 - DNA, 258 bp, Zea mays
  unsure (1)..(258): unsure at all n locations
gaaagtacactctgtacttaaaggtttcgaacccatgttgttgtaggtgatgaaacatcagagttttggtgtttctgctccaaagtggtgccaaaagaggaggccaatcagtaaactgtttggggaggatgtgttgncttctgtttaaaacactaagcctttgtgtgggaggatgtntaccttcctgtttttaataataagtatgcactctacacctggattgtataagtcactcttttatttatgtatgtaattatg

SEQ ID NO: 77250 - DNA, 311 bp, Zea mays
  unsure (1)..(311): unsure at all n locations
cagcttgcntgtaggattatcgaacgacgaggaccctgtgaaatttagcgcaccttntagcgtctattgctatagatgttaatgaagtcaccgcccgctcaatttatgagagaggaccctttacagggtgtgctagagacagcctaataccttaccatagactcttctagacaagatgcagccgcttgagaaaaaaatcggtgaaatatgaatagtttctaaacagcagagtaagagtttgcactttgagttatccctaattacaaanaagaaacatataacatttcgatcttttgggatctctgctctta

SEQ ID NO: 77251 - DNA, 221 bp, Zea mays
tctcacttctacattggaccttcgcacgtcttggaaagattacaaattggtttttcacactcatgttaatggccgagaattcaaatgtggatgttggtcaaccactgtatcgagttgttcctgattatacatatctgtactgttctacgtctgtaaaacaaaccctgctataaatgagggggtcatgaatcttttgatagttttgaacattgcattttatg

SEQ ID NO: 77252 - DNA, 370 bp, Zea mays
  unsure (1)..(370): unsure at all n locations
tccgattgctcctctctcgactctgacaatgaaagactcgccgccaccgccttcaacaagtcatccctctttcccaacgagcgccacacatgccttatggcaagggagaagaatgtatgtactccaaactctacttatgcttcttcaagtgaggacggatctagtgatgaggatgaaatagattatccatggttattaacgggctagatagaaccangtagattaaataatgaattgatgatgcctgaatgaaaaataagctctaaaaacaagggacttgttgatgagaaatgacaatttgtaaaaccaaaatctatgcttaaagtaaagaataaagcttctgtaatatctctgccataacatttctact

SEQ ID NO: 77253 - DNA, 335 bp, Zea mays
  unsure (1)..(335): unsure at all n locations
tggaggcgtctattggttgtcgactnggggtagactcctccttcttttcttccgtcgccttgaatgcgacnggntgagcttcggatgtagatggatcatcaagctcgttgatcttcctcgagccttcgatcatgcactcaaaacttacaaaatgcccgattacttcctcggnggtcatcttagtatatctaggattaccacgaattaattgaacttgagtggggttaaggaaaataagagatcttataataaccttaaccacctcgtggtcgtnccactttatgctcccgagggtgcgcacttggttcaccaaggtcttgagccggttgacatat

SEQ ID NO: 77254 - DNA, 420 bp, Zea mays
  unsure (1)..(420): unsure at all n locations
tgtgcttctctgcctaatggtatgggcctgacactcacccaagaggtccttggcgagtgtaacactcgacaaaatgaccaatatacaccttttttaatttgttttttattccatccaaacanacaaaagatatcacataatcatcacagatatcacatatacattgcatatctcacagagaccataaatcanacataagtatccaacacaacattaccaacaagttctgaagtctcaaagtatctcataagttcaatactaanaacataagtctcatcgaggtgggcggctgaactggtgcgacgatgggctgngcgatccatganggttgtggatgccacccagattgccctgccagagaagagatgatatgtatatctgtgcatatcaatattactacaatttgaacttacagatata

SEQ ID NO: 77255 - DNA, 283 bp, Zea mays
  unsure (1)..(283): unsure at all n locations
tcgatatctggctaaagaaacacgcctattcctgtctctgcgcacgtttcacagagacttctgctgattctaatacactnttttcttgcaaacgctcctgtttctggaaggaagaggcggcaagcccggacgttatgatgcgctgcaatggcatcaagtgatggcattggttcagccagtaaacctaaccggcttatttctacagacagtgccggccgaacttcgacgtcatcagcgatctggtcgtcgccagaagcctcggcagtgaccatagtgaccatga

SEQ ID NO: 77256 - DNA, 297 bp, Zea mays
  unsure (1)..(297): unsure at all n locations
cactcagcttgactatgaatgttaaagtgtgaatactgaatctgtccagttctggacagcaacgtcttctagtgtcttttattcttagntaaatattgaatcaccttgagatgttataaatgatatgtaggaatttaattatctttccagaaagtctaggataaacttatttggatgtctgaatctttagttatgagattttaaagtcacaagtctgaatctgtccaaatctggacagcgctgctgtaattgcactttttgaccttgctaagtgatgaatcatgttaaggtaaaaat

SEQ ID NO: 77257 - DNA, 295 bp, Zea mays
  unsure (1)..(295): unsure at all n locations
actcagcttcctgatctggtatggccaatgtagcgaggagctaacttgcccttaattccgaatctctggacactctcggtgggtgataccttaagatanacatgatcttccactttanactgtagaggcttccgcctctcgtcatgatagctcttttgcctgggctgagcagcttctaaggtcttcttgatgattctgacccttgcctctgcttcaagtaccaaatctggcccaaaaatatctctctctctcctacttgagaccaattcagcggtggtctacaccctctcccata

SEQ ID NO: 77258 - DNA, 255 bp, Zea mays
  unsure (1)..(255): unsure at all n locations
ctctgattctcgcacttatacaaacatgttagtacacacnaaccaatgttctttgtctagaatcataccttcatattgatgtgcaccttatccacaatttggcatattgtatcacttaagcacttgtgttggacactcaatcaccaaaatacttataaatgggccaagggcacattttcctttctaaagcacacaagagaaggcaattttatcccctggtttgatcaagcctctaatgctcgcctactccacgtt

SEQ ID NO: 77259 - DNA, 434 bp, Zea mays
  unsure (1)..(434): unsure at all n locations
tctatggaangacaaccaataagcaggacatagtatattttgatgcaatgattactcgtttccagaatatggaaacatatgacacgaactgacatacgcactatcagactacatgtaaatgcactaactccatcaatattcagtgtctccatagattngcagtaactccatgtcatgctggccaccacccaataactaagttaaataaacaaatgtcaggaactaagataaataaacaaatgtgaaagaagagtgacacaaagtaatcaaacctaagttgaaagtgtagctgcatttctcgtgatcctaacccgtaagcccatgtagtatgttcttagctcttctgggatagcagaaagatctacggtcataattctctcttcatccttatgtttctgcaatcaacctcttgttatgcagttcgacctcttctt

SEQ ID NO: 77260 - DNA, 248 bp, Zea mays
  unsure (1)..(248): unsure at all n locations
tcttggctgtcgaactgcttgccgttgtcaactggtatctcggacggtactccgaagcggcaaacaatggtctgccagaagaattntgggcagtctttgatgtgattgtggaaacagccctcgcttcaatccatttggtgaagtattcgacggctacgaaggcgaacttaatgttcccctgagcggtgggcaggggcccgacaatgtccaggccccagcgctggagaggccatgtatgggcgatcagc

SEQ ID NO: 77261 - DNA, 277 bp, Zea mays
aaaataactttctttgcacaggacaggggactatatccaaaggaacactagacctgagtctattgactttgaccgcgctttactagagagattggttgatatgaacttccgttctggattctttgagaaattaaccaggacctacctctagaagtcaacattactaaggaaaatagacacaggcagtcaactcatgggatttagagagataccatttcgtctcccaacaatgtggaaagaacagcctttacggagcagtgaagagaccacattgcga

SEQ ID NO: 77262 - DNA, 344 bp, Zea mays
  unsure (1)..(344): unsure at all n locations
tctctactntcatctgtactaattgcagcgggatacagtaagtggggatcatattgttcgttttctctctattaanagtgcagcaatgtttcttgtttggctattacaagtgtgaactcctccctataagttatataaacttctgaaccagtgcctgtgcgttgccatttctgaattgtgacattntacagccgagagttcagtcatcgtgtaaaatcagtatcaatggctaaattcacttcccaagaagtttcggcacttctagcaaggggcaatgagggtcgcctaatattttattaatatattagaaacgtctgtgtgatcnttacaagtacctaatattc

SEQ ID NO: 77263 - DNA, 325 bp, Zea mays
  unsure (1)..(325): unsure at all n locations
cgtcgatgggttgtcgactnggtgtagactcctccttcttctcctccgttgtcttgaatgcaacgaggtgagcttcggatgggtcgccaagctcgttgattntcctcgagccttctatcatgcactcaaaacttacaaaatgcccgataacttcctcgggggtcattttagtatatctaggattgccacgaatcaattgaacttgagtgggattaagaaaaatgagagatcttaatataacatttaccacttcgtggtcgtcccacttctcgctcccgaggttgcgcacttggttcaccaaagtcttgagcccggtgtacatgtg

SEQ ID NO: 77264 - DNA, 345 bp, Zea mays
  unsure (1)..(345): unsure at all n locations
actattacctagatggagtcataaccagctcgagtgccgggtagaccgactataaagtccgtcccaatctcatcccatttccactgaggaaattgcaacagctgcaacaaacctgcnggtctctgacgttccaccttgatcctctngacactgtcgcatctgggcacatactcttctatctctcttttcataccgtaccaccagaatctcttcttcaggtcttggtatatnntctcgctaccaaagtgtatagaaatatgtgtctcaagagcttccttgagaatcagttcccgggatcgattgatgtcnggaacacacagcctatccttgaaccatatcacttct

SEQ ID NO: 77265 - DNA, 301 bp, Zea mays
  unsure (1)..(301): unsure at all n locations
ctgagagtgcaaaccttgcttttaatcactatggaaaccctatagcangcactaatgaagtggactaactaactaataatttcgtaaagcatctacactaatcactgagtaaatccttaaacacctgtgatgtctaaagctatatcaataaagtctcaatcatatggaaatgtttcttatcccccatacccncaaatggtcggttgggtgggtatatatacccnccaagttcaaaactagccattagaaacgatgcagaaatttggcatactcaccagacatatctagtgcatacacgtca

SEQ ID NO: 77266 - DNA, 159 bp, Zea mays
  unsure (1)..(159): unsure at all n locations
taccgacttcaactacnccgaacattgtctgctgtgcataatgtgttccacgtgtcacaattgaagaagtgtttccggttcccgatcgaacccgtgaagtgacagatggtgtccttgaacccgacttgacatattctgagcaccctattcgagtcttgg

SEQ ID NO: 77267 - DNA, 238 bp, Zea mays
  unsure (1)..(238): unsure at all n locations
gcttgtattcctgatgtanaacagtgaacagttaccattcacaagctatcacaacctcttagcattctcattacattggcttcnttcgttcaattacaatatttgcagcttggtaccgtgcaaaactataatatgcaatagcatgttgttgatcttttctgaaggatcagagtgcaataccaaatctaggactgtatgccaaaagaatgtgttgtatgcttataactgtctcacattg

SEQ ID NO: 77268 - DNA, 259 bp, Zea mays
  unsure (1)..(259): unsure at all n locations
actcggactgcttctcttccgactacgacaatgaaggactctccgccaccgccttcaacaagtcattcctctttcccaacgagcgtcacacatgccttatggcaatggagaagaaggtgaatactcgagactccacttatgcttcttctagtgataatgagtctagtgatgatgatgacatagactattcatgcttattcgagggcgtagatagatctaaaatagataaaataatgagntgattgatgctttgaatgac

SEQ ID NO: 77269 - DNA, 355 bp, Zea mays
cttaaaactcagcttcttcgcacatgacaaggtcacagcttgccgacggtggcacatgattctacctgttgtgggcgccacatgtggcgacctgatctcatatgcttccgctttatagaacgcaaatatccacgtgtgacgtgctagtgaatacaagtcagcgtgtacagtacagtgctactgtcatctatttatggccaggacgcagctgtgtaatatacatcaatgccctttatatgtactatcgtactaaggacaatctatgaggactagaagcctttcctcttaagcgactcatttccacgctagccaagctctgccgcgaacttcggaactgtcatcttctccagacatg

SEQ ID NO: 77270 - DNA, 302 bp, Zea mays
  unsure (1)..(302): unsure at all n locations
tgtgaagattcttcattccaacatgtgctagtcggcgatgccagagccagcccatgttagtcttagcaattaagcaagtgtcgagttcagctctatcaaaatctactaagtatagctgaccctctaacactcccttaaatgctattgaatcatcacttcttctaaagacagtaacacctatatctgtaaaaagatagttgtagcccattntacataattgcgaaactgaaagcaagttataatctaaagaatctacaagaaaaacattggaaatggagtggtcaggagatatagcaatttta

SEQ ID NO: 77271 - DNA, 273 bp, Zea mays
tctgcccaggactcacggatcttgctcttgcatctgtttcctatttcagcccaagtttgaagcttgttaacctcaagaagtgcagcaaggtctcagaccgatgtcttaagaaattacataatcatctaacgtcctggagagtttgcaaatcgaggaatgtagcaaggttactcttacgggcattattgctttcttcctcaactgcagcccaaagttcaagtccctctctctgtccaagtgcatcgagatcaaggacatatgctccgcacctgc

SEQ ID NO: 77272 - DNA, 317 bp, Zea mays
  unsure (1)..(317): unsure at all n locations
cgcaatntaaatagagcaactcctaaagatgagtatcccatgcccatatccgacacattaatcaataatgcataaggaaatagaattattagctntcttgatggtaatgccggatataatcagaatttcatggccgaagaagatgcatctaaaacgacctttatatgtctaggcttcattggtttatttgagtgggttgtcatgacatttggtctgaaaaatgccggtgctacttatcagagggctatgaatttgatctttcacgagctgttgggaaacactgtgtaagtctacatttgataatattgtagtaaaat

SEQ ID NO: 77273 - DNA, 223 bp, Zea mays
  unsure (1)..(223): unsure at all n locations
tgcatttacatagaaataaatctctgtttgcctctctttaccacttgagtctgttgctgatttgtgtaggggtgttctttcacttgtgaatgacaatatggnactggcttatgaatcacataatcttgcagttttaatggtgttgatgctcttcactgtgaatgcatcagaaatgtgcgagaacaataattgtgcaacctgaaaggaaaaagtaatgggtatc

SEQ ID NO: 77274 - DNA, 268 bp, Zea mays
  unsure (1)..(268): unsure at all n locations
gcatttacgattcaaacacatcaaacacaccatctcttctctanaacgtgggcagagttgatagcttcgaaccctgtacagtggggactcacagttcgctggtttctgctgtctctttgtcctactctttaccgatcgaactacttcacagcaacagaacgttcgtcttaggatggttgccttcataaccactttatgagcctaagctttagatgactcgcacaaagactacttttgttggacgaaagcgactcatttttttacctgt

SEQ ID NO: 77275 - DNA, 182 bp, Zea mays
tattatagagcatgcttctatccaacatgaatttttcattgtctaaggcatgctcattaatcgtagcactaaggtgagctatgtgatcattttggtggttaattaaagctacgtggtcatgaatagcatcaacattaatatctctacatctaagacaaatagtaacatgctcaatggttgat

SEQ ID NO: 77276 - DNA, 145 bp, Zea mays
cccatccggtaatgcagcctaagaaccaactctaacaacaacttgcacaacactggacctacaaagaacaatgtccttgaacctatcacaacctaattcgccattaccagtgaaccaacagatgttacatcaactagactaacct

SEQ ID NO: 77277 - DNA, 328 bp, Zea mays
  unsure (1)..(328): unsure at all n locations
tcgaacatgagagaantacgtgatactagcaaacacaaatagaaactcgcgacgattgtattctattntcgtaagctcttggatggctcgagaatagtgtgcagcacanattccgcanatggtcgatccttctaacggtcgcacagttaacatagttacaggattgagctcttatacaaccttgtgtaaaaatttattntaattactatgctttgtacatatttgacatttcgccatgcaaacatgccatatacttcttctcttatccaaggtgtatttcactggctgtcgcccggcgccgggcctctcgctgccactcacccattct

SEQ ID NO: 77278 - DNA, 256 bp, Zea mays
  unsure (1)..(256): unsure at all n locations
tatgttgagcaaccttccggctttgaagatagtgagtaccctaatcatgtttataaactctctaaggcgctntatgggctcaagcaagccccaagagcatggtatgaatgcctaagagattntcttatcactaatggcttcaaagtcggaaaggccgatcctactctattcactanaactcttgacaattgattngttgtatgccaaatttatggtgatgacattatatttgggtctactaacgaatctacatgtg

SEQ ID NO: 77279 - DNA, 170 bp, Zea mays
  unsure (1)..(170): unsure at all n locations
ctcatcatccacacaagaacatcatgacgactgacangccgcttgagctacttcacatggatctattcgccctgattgctgacataagcatcggtgggagtaagttctggctagttattgtggatgaatattctcgcttcactcgggtggtctttttgcaggaaaaatca

SEQ ID NO: 77280 - DNA, 252 bp, Zea mays
  unsure (1)..(252): unsure at all n locations
ttggaaaagatcaaattctgcttacactgggtagataagtgaaaaaagacgaagctgcttcaatgcccangccgaagcttcaaaacgcgagaataaagatcttcagaaacatctggctagagctaaagaggagcgcgcgcttgatgaaacgaaacgagaacttagtgattttatggtcaacaaattggaatcaaaagttaaggagcttcgcacatctcacgggaaatgctatgtcaaatctgtagaatgtgt

SEQ ID NO: 77281 - DNA, 276 bp, Zea mays
  unsure (1)..(276): unsure at all n locations
gctgagcttggtctatctgcaatgtcgaaagatgatcttgcagatagccttgcttgtaatagcttaaatgtatgcatactcttattgggaaattatctgtatttgtagctntnttctgctatcattatgttctcatgtatttntattattagggcttaattctaagtaaggctttaaaggcccaaaaggaagcagaagatgagagctgccagatagctcttatgaaccttcggtcagaggtcatttcactaaggaatgaagctgtcaaaaatgata

SEQ ID NO: 77282 - DNA, 476 bp, Zea mays
  unsure (1)..(476): unsure at all n locations
tcanatggtgacatcttcaaactggcctgatagctattattatatgagaactctgcatacggtcaactcttatcccaactaccaccatgcttaagagcacaagctcttaacatatcttccagtacttggttagtcctctcagtctgcccatcagtctgtggatggtaagctgaactaaaattcaatcttgtatccaaggactcgtgtaacttcttccaatatcgagaggtaaactgtgatccccggtctgatacaatcttctttggctcaccatgtaagtagacaatctgtgccatgtacaactctgctaacttggctnctgaatatgtggtcttcacttgaaataagtggctaccttagttagcctgtcacaatcacccatatagaaatcatatcagcagatgtgcagggtaatcaacaatgaagtccatgccaatctctttccatttcacttangtatcttcagtggatgcagt

SEQ ID NO: 77283 - DNA, 499 bp, Zea mays
  unsure (1)..(499): unsure at all n locations
ttctcgaagccatcagaaccgcataaaagaccttctccatctctatataatttctttatgattatacatttttttactgaaggaaagcttagcccatgtacatgggccctatttcatcatagcttgagttggttccctagcatatcgattgtaagtgcttgagtcgatgagtggtgtgcatcatgtgttcgatgtaataaggacatctatgtaccaaaactaccctttagtaattaataccagtatcgcttgtagaataacataaggctattcacaataatgtgttcatgcacatttaatattgtcacattaaatcttatgatgacatgacatatcatnnntaaaagattggctttcatatgatgaaantaatttattgggataaatcatgtaactcattacanggcttanaactatgtgaaactcattgnaatgattattctattgctatgagtgcacattaatggatgtagtgataaacagtgtagaaaatacatga

SEQ ID NO: 77284 - DNA, 378 bp, Zea mays
gctgactatattcttcaccttcatgtcatgcagcttaattggagataaatcaatgtaaagtactgttggactgggtaacggtcttatcgctatagtgattcaactgaataatattcttaatgaaaggaaaaagctacctagggatttttataatatgatatgtcaatttgcagtctatgattatttaacagcgataagaaaaattcttgacaaatgattgcccctcaatagtgattccaatggatattaatacctgatataaacatacagcttgacttatgacatcaggagcaagacattttggaagatgatatgcccttacttgtttatggtgtactagtcgatggaatcaacatgcatgtggtgacattaacttat

SEQ ID NO: 77285 - DNA, 310 bp, Zea mays
  unsure (1)..(310): unsure at all n locations
tctatagggagaacatgtgatatgtctaaccaatgttcatttcgaanaagatagaccttgtgcagcttgtcaagcacggaaacaggtgggaggagcgcatcacagcaagaatgtgataaccacttcaagacccctggagctgctgcatatggacctcttcggacccgtcgcctatctgagcataaggggaagtaagtatggtctagttattgttgatgacttttcccgcttcacttgggtgttcttnttgcacgataagtctgaaacccaagggaccctcaagcgcttcctaaagagagctcanaatgag

SEQ ID NO: 77286 - DNA, 194 bp, Zea mays
cccaatcagcttgctatgagggccttatcgtactatgtttcgtatttgcactttgatctatgtaaagtaatgacggtgtggatgtcttggcatcgtatgaataagactatttctgctttatttgacaagtgtgatatgtccaatatgtatcgttggtcatgattctatctgcacgacatgtcgattcgttacct

SEQ ID NO: 77287 - DNA, 343 bp, Zea mays
  unsure (1)..(343): unsure at all n locations
ctaagctggcatacagctgtcaatctcgtagcctctgaagtactttcctcaaatgctcctcatgctcttactcattctgggaatatacaagaatgtcatcaatgaacactacaacgaacttgtcaaggtagtccatgaacacgctgntcatcaagtacatgaagtaagatggcgcattcgtcaaaccgaatgacatgaccgtgaactcatacagtccatacttggtgatgaatgtcgtctttggtatgtccgaaagtcggattcttgactgatggtagccttgcctcatatctatcttcgagaacacactggcttctctcaactgatcaaatangtcttcaat

SEQ ID NO: 77288 - DNA, 166 bp, Zea mays
  unsure (1)..(166): unsure at all n locations
taatattcgaattgactcaagcctagctacgggtgcatatgtttcaccgaaatccaaaccttcgacttgggagtatcctttggccacaagtcgagctttgttcctttgtaccacaccatgctcatcttgcttgttgcggaagacccatttggntcctacaacattt

SEQ ID NO: 77289 - DNA, 311 bp, Zea mays
agcccttaatactcactcctgccgacttcgacgatcacctcgtccgacctgcttttatatttgtacaactttattccgagtgcaaaggttcttgtacatgtattatacttgcgaaacattgttaatcgcgtctttgaggaccttcggaagacaaaggccccctacagtatcttttatttgtagagggaggcaacatatgtagtggcggaaatattgttgttgttggtggcatatattggtgtctaacgattaaggaagagcttggagtaattgacgtcgaatacgtcagaacataacatcataagttggat

SEQ ID NO: 77290 - DNA, 345 bp, Zea mays
  unsure (1)..(345): unsure at all n locations
tgcacacatagctcatntaaatacctttgatcatatctctcttatatgctatgactaatgtgtnttcatgtctatttcaaacgaagtcatangtatattgaaagggaattggagtcttccgcgaagacacaggcttccactccgtaactcatgcttcgccaccactccgagcaactctctcttctttgggggagaaatgagcatcaaggaaaaggacttcatccttgtgggagagagtaaaagctcaaaagcaaaaggaccggatttcgtctttggtataatcttaactcatttacttatgaccaaaggggaagaaatactcagagggctctaatgantccgttt

SEQ ID NO: 77291 - DNA, 292 bp, Zea mays
  unsure (1)..(292): unsure at all n locations
tctgacttctgggcccgcctngatgtcccgtggcgcaccggacatgcactgtatgttgttctgtgcaccaccatgggcgtgcctgacctctgcgcgcgctggcacgcaataaatgcgctgcaggtagccgttggcgcctgaagtaaccgctgcttcgcagatgcaccggacagtccggtgaattatagcggagcggcagaagtgaaaactcgaggctggcgagttcctgaggccggcctttcttggagcaccggacagtcccgtgcacaccggacagtccggtgaattatag

SEQ ID NO: 77292 - DNA, 267 bp, Zea mays
tctcttcaggagcagggacagacctgactctggtgtcattcctcacgatggatacgtctcggaaagaccttcctctcatgttatcaacatgactctgcttgataatcgactttccgaacactgcgtgaattggttgccacggcccgacatcggagtcttctcccacactttccgcatcataaatatcgctgacatcggtatctttagataagccttctagaatttcttttgaatcttttctgtgtcggtcattgcaattgactcgac

SEQ ID NO: 77293 - DNA, 310 bp, Zea mays
  unsure (1)..(310): unsure at all n locations
gctgggtgcgctaaggaagcacagatccatagtggacatatatggacaccaactttcatctttatgggttcaagtcgacggtgataaagaatatatgatattgcagtctataantttaatggaatatgtaaatggaggttctcttaaggtaaaaatcatttatcatgtttatggcttcctcccgcattgtctcaacatcaattaagatgttcattnttggtactgtacctgttaatttctcatcanggatatttgacaaagctactgaagganggcaagaagtgtgtccccattgatctgtcagtttaca

SEQ ID NO: 77294 - DNA, 207 bp, Zea mays
  unsure (1)..(207): unsure at all n locations
ctaagcttccttgaggggtttctggcaaagtattcctcgatgagaanatgaacatgctgatttgctagccaagtcagcagcatagaggctgccttaccttctgaagtatttttcgaaacaataaaagcaacttctgttgaacttcttgaaagaagcagcctcaatatatctcatgtttatagtgaagactggagaactgagatcatc

SEQ ID NO: 77295 - DNA, 290 bp, Zea mays
  unsure (1)..(290): unsure at all n locations
tcgagagcactttctncagcgttgcgaagatgtctgaagataataaagctattgctgaatcgaagctgagcctttctcaggagatgcatctcggctttcttcaatcaatgtcaaagaccaatacagagaagattaatagggagattttggaggggttatctgaagatactggtgacagtgatagttatgatatggatagtggtggtgaagactccgaagatcgaccttggcgaccaagccacacagtttttggtaaatcaagtattaaagaaagccatcttgttaatatg

SEQ ID NO: 77296 - DNA, 242 bp, Zea mays
gcattctatttatgaccttatttatacacctaaagaatattacaaacttgtatgttctgaatgttcttttctatgtatcgaagcacaacaatggaccggttgttccaagggcaaccgtcatatgttgacccaatgtacttcaagtgcaattacaccctttgaaatcgagctcaacccttttggagaagccggtcaagtgaataatgtgttctagaattccttttccattgaagacaacacta

SEQ ID NO: 77297 - DNA, 231 bp, Zea mays
  unsure (1)..(231): unsure at all n locations
gcgttctgctcatgctaatatcatcttaatggnncgggataaagtttctcgctatgcccatattattccactcttgcatacctacacagctttcaaagtggctcaacttgttatgtcatctgtttacaagctacacggcatgccaaaagctatcatttccgaccgtgatcgcattttcaccagctctctgtggcaagaattgttcaagctggctggtacacagctgcgtat

SEQ ID NO: 77298 - DNA, 475 bp, Zea mays
  unsure (1)..(475): unsure at all n locations
aggaccttaaaactaagcttcgatacacccctattttctaggaaggacaatgttttacctccgatcctcactatagacacatcatgaaaatacttgtccttcatggcctcaacatgccctttcctcacagttgatttcccaaagaccacgtgacttggcctncacggtcggtcttcggcatcatctgcgccgctatcgacatcaaaaatcatcgtgtcttcctaatcttcagacagcccagccaaaatatcatcgattatgttntcaacattggtattctctatggtttcatagaatccagctagtatggcgtcttcactcctcttatctttgcgcatctcaacttcgattaagcaacgagtcgaagcttgacattaaagtgcattgcaatagctcagaaaataaaacaccgtaagttggtggtganaaaatattntgcataagcctatatatatacacaaaacccactgaaagt

SEQ ID NO: 77299 - DNA, 378 bp, Zea mays
  unsure (1)..(378): unsure at all n locations
tctcagcttccctcttttgtgctatcaaatacttaactatgtattgctcacttaaaaacaactttcatccttttctatttctgaattgctatgngctcacttaggttttattaggtgcacatctatttttaaaactcattgttgatcatacatttaagattactgggaatcttatacttagtaattgagctcagctacttattacatanagaggtttggttgctttcaaaaacctagtacctgggtgcacatgtcctgcgctactctactactttattgtcactctagatgattatatatcaaataatgaccagctaaggaatgttatctgatattgtccctactgaggtgaaccctcaaattcttagatgtacaatt

SEQ ID NO: 77300 - DNA, 292 bp, Zea mays
  unsure (1)..(292): unsure at all n locations
gatgtctgttntgagaaagacagaccttgtgcagcatgtcaggcatggaaacaggtgggaagcacacatcatggcaagaatgtgatgacaacatcaagaccagtggagctccttcacatggatccttttggacctgttgcctatctaagcatcgagggaagtaagtatggtcttgtaattgttgatgaattttcccgcttcacttgggtgttctttttacaggataagtcagaaacccaagggaccctaaagcgcttcttaaggagagctcaaaatgagtttgagcttaaat

SEQ ID NO: 77301 - DNA, 236 bp, Zea mays
  unsure (1)..(236): unsure at all n locations
ctcgctgacgtgaaacctgtttggaggttggccctgggtggcccggcctcaactctggcttcgcaacgtctggggcggacaccacttctctggggaactgttactccctgagttgtgtgcacccttcgcgacagcaccatgcttacgctcaaagcgctgaatgacagtacacngttctccgctccgactctagtatggcaggacacagtgtgttcactctgaaagtcgtctgctct

SEQ ID NO: 77302 - DNA, 262 bp, Zea mays
gctaccgatgcttatacttaatgccattcaagattgtgtcctcgatcccataaattatagactcaaccacatcaattattgaatgtgaaatcgaggcatcgagaagccactattgtatgttggtgagtgcctcaatgtatcccatcattagaagtagagtcctcctcatacatgcaccaaggaacctcacaatatgtgtgaagtagataggtgctctacaggattcatctctaaagggttgtctaaatagaggggtccatgt

SEQ ID NO: 77303 - DNA, 231 bp, Zea mays
  unsure (1)..(231): unsure at all n locations
catgcatctagagcgggcctctctnttgcaaaatcaactaaataaagttggccgtctaatacacccttaaaagctaatgaaccatcacttcttctaaagacagacacatctatatttgtanatagacaattatatcccatattacataattgactaacagatagtaaattatatccaagagactcaactaanaacacattagagatagagttctcatttgatattgcaatc

SEQ ID NO: 77304 - DNA, 289 bp, Zea mays
  unsure (1)..(289): unsure at all n locations
tccatcttngaagatagtgagtatcctaaccatgtatataaactctctaagacgctttatgggctcaagcaagccccaagagcatggtatgaatgcctaagagattntcttatcgctaatggcttcaaagtcggaagagccgatcctactctctttactaaaacacttgcanatgatttgnttgtatgccaaatttatgttgatgatatcatatntgggtctactaacgaatctacatgtgaagagtttagtaggatcatgactaannaaatcgagatgtctatgatgg

SEQ ID NO: 77305 - DNA, 434 bp, Zea mays
  unsure (1)..(434): unsure at all n locations
tatgtattacatagagtcatccatgttcaagattntaggtcaccatattatanatngatttatgattatgtacttgtaaataacacttatggaaataataatctattntcaaataaagttaatgtatgccatagtttatgttatacttggaattcattatctcttatgtagtattatgtctttttaagatgtgttccaatgtttgtacatngttggtgtgatgttcattngtactttccaaatgtattgaatgcatgctcactttatttagacaaacgagcagtccgaggttctctgagtgtgttgtggagaacctcctgagcaacaaccttgttgaaagcaggtggnctctgacatattatgtcctacatactttatgattcacttgcccgcatactttatgaacctaaggatngactagttgatttacctta

SEQ ID NO: 77306 - DNA, 224 bp, Zea mays
  unsure (1)..(224): unsure at all n locations
tggagcacgaatagtctttcaagcgtgtcccatccggctactggtcggtggtattatatggtaaccggngcatgtaagcctaagtacgaaatatgcctcggtacctactacanttncaggatattctattcaatgggggtaattgtacacagtanatctatcagcctaactacaccaaactttctacccttccgagggtatacaagtggactatcatgctgata

SEQ ID NO: 77307 - DNA, 233 bp, Zea mays
  unsure (1)..(233): unsure at all n locations
tctaangggagaacacgtgataggttgactaacgtgatattcgaanaggatagaccttgtgcatcttgtcaagcanggtaacaagtgggaggagcgcatcacagcaagaatgtgataaccacttcaagacccctggagttgctgcatatggatctcttcggacctgtcgcctatctgagcatatgaggaagtaagtatggtctagttattggtgatgacttttcccgcttcac

SEQ ID NO: 77308 - DNA, 269 bp, Zea mays
  unsure (1)..(269): unsure at all n locations
aactcgcgtcaaacctgacaagtctntagttttaagctnttagcacttaaattctntcttttcatgcaattattggttcttganatatgcatgaggtactgcacttagggggagtattcanaactcaaatcactcatganaacccctagtgcanaccanaatgcanattntcaccattgcctatnttctctaanaattatctagcctatggcaaaatattntgaaaagtatatgagggtgccaatacctgtcccaacaagtgttctttt

SEQ ID NO: 77309 - DNA, 476 bp, Zea mays
ccattatctatggaggcaggggcagctttggaagccctattcaacattcatatgccggacactgaacacattgacaaggcactgatggtgattgcatgtgaagctatagaagatacacaggatgagatggacaatctgcaagcggaagcaatgagcaatgctgcagcacatctcggggttgtctgattccttgctagccggtgtgggtgtatttcggtttcgacgttgtactgcaactcagttgtagtcccttttgcaatctgctgcgctgagctactggttattgtgtttactcctgttgagatgttggactgcatcttagtttcactccaattgcgaacaggtcagatatgttgcgctgtgctagattcagcctcgtgcagaaactatttcaggcatgagaccctattattaacaatggtttcggtatgcttatctgggtcatctgatatgcagattacatctctctgatgtat

SEQ ID NO: 77310 - DNA, 283 bp, Zea mays
  unsure (1)..(283): unsure at all n locations
cgcgccagatggatgggatggctcatcggagctcggcgggcatctctgggccgcaccgtgccatggctagcccnctccacgctctcagcaccggtaagtaacctgcacacgagtttgttatcttcgccccatcatgtatcanccggtgaatcgtagcttatggcacagaatcatggcaccgtgctctccggcgaggccaccgtcnggtgacgtgaacgcgccaccgctctgganggagggggtcgtgatgtggaagaatgcccggggccgttcgatctaatgg

SEQ ID NO: 77311 - DNA, 317 bp, Zea mays
  unsure (1)..(317): unsure at all n locations
tatagaagttttatcagatatgtagatccagtggattgaacaccaccagtcaaaggtgcttatntacgttgatacgtgcacttacctcgtgtatcctagaagtgagttgaggtgaagttcttgaaataatatttgcaaggatatgcaatccgtttgctaaatctctatgtgtgtatacnttcagaagatngtatgccatattgatacgattttgcaaggatcagggggagcatatttctaaatntagcccttgtagaagattcgatggaatcctgatccagaagatacgaaattgtcccgatgatanngtgtgactc

SEQ ID NO: 77312 - DNA, 329 bp, Zea mays
  unsure (1)..(329): unsure at all n locations
acagatgatagcttcngcgctggttctaatagaatctgccgtatgtgttttcttcctttangatcttcggctacaaagcataccgcccaacaggtgcatntgttagtccanaagacataacagtgaactcatacaacccatacttagtaatgaatgccgtcttcggaatgtctganggtcagatcctgagctgatgataacctgacctcagatctatctttgagaacacgttggctcctctcaactggtcgaacagatcttctattctgngcaangggtacttgttcttgantgtgacctcattcaaagcttgataatcgatacacatt

SEQ ID NO: 77313 - DNA, 506 bp, Zea mays
  unsure (1)..(506): unsure at all n locations
tactcaacttacacacagctacttgtgccaagcaccttcgtagaatctccttcgntgntatagacagttataagntgaagacaagttttgtaccttgaatntggaatagaataaactaccgacgatgtgctgtcgtcggtagcggctaatgtctgtctcaagcttcgggaaaccaatactctgtgatagagtaccgataaccttcgctccggtttgatctcggacgcaacctaacttttcatcgtcaacaccactgaagagtagtgcccctgggtgatatccgcaggatatggtatattcttttaactcttctntctcagccttcgtcaactcttgtncaactaagtgttgaaagttgataatttctcttccgaagcgtcttcggctattatcttctccttctcaggctctgtggcatggattcttcggtggctgcagcagcttcttctgcgggcatgtccagaagtatcttatcaatggtagaaagtgtgctttctatatgtaca

SEQ ID NO: 77314 - DNA, 347 bp, Zea mays
  unsure (1)..(347): unsure at all n locations
ctgtgcatggatcaatgatagacacacacacgcacttggattgcataatgatggacatagatgggctccanagcctaagacctttctagagaaggcanaggaaagggcaaacacacacactgctgattngtttgacttacagtcagggacatatgaggtattccttcaagctggtactacttctgacggcgagtcacaagagtcgaggaagcatgtggttgtccttaatgacttgtcatgtacttgtggcgcacccaggcaataccattttccatgttctcatctaatcgcagctgctcgagctcgtaactttgacttagagaggaggatacctcaagaagttacta

SEQ ID NO: 77315 - DNA, 245 bp, Zea mays
  unsure (1)..(245): unsure at all n locations
atgtgagtcttagcaattaagcaagtgtcgagttcagctctatcaaaatctactaagtatagctgaccctctaacanctccttaaatgctatggaatcatcacttcttctaaagacagtaacacctacatccgtaaaaagacaattgtagcccatcttacataatngagaaacagaaagcaaatggaatctaaagaatctacaagaaaaacattggaaatagagtggtaggagatatgcaattta

SEQ ID NO: 77316 - DNA, 266 bp, Zea mays
  unsure (1)..(266): unsure at all n locations
acacgtgatagggttgactaacgtgcaattcgaanaagatagaccttgtgcagctngtcatgcangtaaacaagtgggaggagcgcatcacagcaagaatgtgatgaccacatcaagacccctggagctgctacatatggacctcttcggacccgtcgcctatctaagcatatgaggaagtaagtatgggctagctattggtgatgactcttcctgcttcacttgggtattctttttgcaggataagtctaanacccaatggaccc

SEQ ID NO: 77317 - DNA, 505 bp, Zea mays
  unsure (1)..(505): unsure at all n locations
tatgtcgatatcacttcttctcaccagcacatacaagatgtctgtcgtgactggtagtctaacaagcagaatccataacatgcttctttggtagagagagacagtaaattggtactgtcacttacgtgaatggttattaatgaaatgaaaatacatntgattatgatcgggcacttataaaaacttgacttgcggngctaagacaacttctgagcattgtgtgatagagaagacctctcatacatgccanaataaccttgcccgcgtgagcgaccgtgacctggtcctggtcatagtcacaaagttcgttgatcgatagggtcgatgaccatcatacgctacctgtgagaagatttacatggtgggaacaaatatgacccttgcgacccgggtcgagggtcactaccactggacccatntcttgtgactatggttggtcttcacccgtgcttggtgtggggaggcganggattnttaaccccactaaataatggtttgtttatga

SEQ ID NO: 77318 - DNA, 273 bp, Zea mays
  unsure (1)..(273): unsure at all n locations
gagatgaatctgagtcttgatgaagagaagaacttatgttntcttatagcgatgtcaaagaccaacacagaananatcaccaatgagattctggaaggactgtctgaagatactggtgacagtgaaagttatgatgtagacagtggtggcgaagactccgaagatcgcccctggcgaccaagccattcagtttatggtaaatcaactatcaaagagaatcatcttggtaatatgagaggaaggtatttccgggatctgtccattgtgagagcg

SEQ ID NO: 77319 - DNA, 221 bp, Zea mays
  unsure (1)..(221): unsure at all n locations
accttgctagaacactaccgcacttataaagaatgagggtagaactcttgaatctttggggattgaactccttgaagacctcatacaagggtgtaccgggccttcttcttactgtgctgcttgagcaagctgcggagaaatgactgacacanggttgattatgggacaaccttcttctcatattctcttcgctatcttcttttctcttctcacttttcact

SEQ ID NO: 77320 - DNA, 296 bp, Zea mays
  unsure (1)..(296): unsure at all n locations
gtctactntcatatggatccggaatatagtcatatctgttctgangccgcctttatcattgttttcttatcgagacatttcctgccttttctgcccatggtgctgcgtcaccctattntggcccaatgngtcgtatatcaagttagatccattatggacgtatcctagggttgcagcacgaccccaatacccttgtggtcgtcctnccatggttataaacctcctagccgccaccaagaacagcgggttttgtttagatcaagtttagctctcgctacttgcttgcaagcgcgcgt

SEQ ID NO: 77321 - DNA, 154 bp, Zea mays
ataacttgtcgttgcagcagaaaaatgggacttatctgcaaatgatgacacatcaacctggagtcttattggccttttgaccgggccattaagtttgagaagaaattggcttgtatagtgagattttgcgttcattggtatctttgaagataat

SEQ ID NO: 77322 - DNA, 284 bp, Zea mays
  unsure (1)..(284): unsure at all n locations
catatttgtctagggctactcttatgtggtggacctacgaatgtaaccttaatctttccatttgcaacctttcttagaacatagngagcattgaaagcaaatggtcttgagtgcttatgcaacggagtcggtggtntagctttgccagtgtgggcaaaatgaccttcatttccacactcaaagcatttgataggcttgtgagtctgctttggcttgtattgagtgatagctntcttttgcacaaaagcattgtatccaataccactcttgttatattcataaca

SEQ ID NO: 77323 - DNA, 272 bp, Zea mays
  unsure (1)..(272): unsure at all n locations
tgcttttggagctacaacaaaggctggcttatttcaaacagaaacctgtagggtttgtcacaacaagatgtttgctggcagcatgatcttgcgagtacaggagtttgcactcctatgtaccctttaaccaaacaagttgaaagttatacacgcgaagcctcggatgaatcaaaactctcatgcngagtatcaagaagtaagacccaaatggctactacactgtatggaaaaaaggcaatggcnatggcaatgtgatcgatttacaatctaac

SEQ ID NO: 77324 - DNA, 365 bp, Zea mays
  unsure (1)..(365): unsure at all n locations
gatcatataataacatctattgactgcttatgttcttagcgcctcatattatttcaatcgatatctctcttgatatgcactaagttcaaaggagaattcatgattcatttatgcaacttgtgatccacttgacatatgcttaccataacttataagaggatcactcagttgtagaactctctcttgtgcaaaatattttcatacattgtcattgagcataggtcttaagcaaaccagactaatgacaaagcacaatgaagagagcatctacaagtaaaggtacaanaagggtanaactaatctctatcatttacatatgtacctaaatctttctcttatatacatctctttgcatatcttggata

SEQ ID NO: 77325 - DNA, 256 bp, Zea mays
  unsure (1)..(256): unsure at all n locations
tgacatagttaagatccccatgctgttcccattcatcaatataatcacggtggtgggtctcgaagtccgtgaccttcttctctctctatctgtcgaacctgcnaaagttagacacatatattagtaactcattgaatatttgaaataatagttagaataacaagttgatatagtcactcacttatngaagtctattgaagtcgagaagggcttcaccggaaactcctgttgaatccgaactatcgagcaactctat

SEQ ID NO: 77326 - DNA, 297 bp, Zea mays
  unsure (1)..(297): unsure at all n locations
tctttcatttcgaaatggctcgatagaagattttaacttcctcaatcacattgagattngatccaaagatcaagatgtcatcaacatanaggcacagcataacagactcacccncgccatactgatagtatacacacgcgtcagattcatttacaacaaagccaactgctgtaagagtattatcaaactnttcatgccattgcttangtgcttgttttaagccatacaatgattntatcaacctgcacaccttgttctcttgaccatnctcaatgaacccttctggctgatccatat

SEQ ID NO: 77327 - DNA, 297 bp, Zea mays
  unsure (1)..(297): unsure at all n locations
gaagtcaccagattgctcgctgggcctattctccatcgtggtctcgcactgctccgngggtcgaagtcctcacggcacaatcgttggtactcggtactagcatngtcgttgtgttatgctctacanttttctcggttccacgcgtatggtagaacgtactgtctgtgtttgggcaaggcgctggcgaagaacgccgctatgatgttgtggcgctaccgtgctcattggccgaaggtgggagagttatgcgccaacccgtggatccgatcgacacatangaatatatctcgtgctcat

SEQ ID NO: 77328 - DNA, 343 bp, Zea mays
aactcccttctagtgtttgaaagaaagccggcaatcagcttatgctaactactggctgttgggatcccgttaccatggggagaaaacttcagctttaaggaaacctatagttgactactacaatcaaaaataactgtcactgcagcagcacagtggagacgctccacagaatggagacactagacccgactgtctatgactttgaccgcgctttactagagaaaatgtatatgtatattccgtactgggtctttgagtagctaaccaggacctacctctcgaactaatagtgactaggaaaatagccacggtcatcaactatgaggtctagagaggaaccatt

SEQ ID NO: 77329 - DNA, 256 bp, Zea mays
  unsure (1)..(256): unsure at all n locations
atgtgctantcggcgatgccagagccagcccatgttagtcttagcaattatgcaagtgtcaagtccagctcttccaaaatctactaagtatagctgaccctcntaacactccttaaatgctattgaatcatcacatcttctaaagacagtaacacctgtatccgtaaaaagacaggtgtaggccattttacataattgagaaacagaaagcaatttgaatctaaagagtctacaagaaaaacattagaaatggaat

SEQ ID NO: 77330 - DNA, 209 bp, Zea mays
caaccagctgccgaagaagaaacaaaccaggtaactccacgaagaactgggaggcccatatgcaccacgaaattccctcagtttcaagtcacagaagcatacccgtgctattggaacgtaaacaattgccatgcctagcccaaagacaatacccataacaggagtcagacacattgaacagacaaggtacgtgaagtaagcccaaacac

SEQ ID NO: 77331 - DNA, 321 bp, Zea mays
  unsure (1)..(321): unsure at all n locations
tgcacaagtccttgtgtgcctgtgcggaccgtccggctcgagtctgtggaccgtcctcttgtgccatataggaattgngtatggactgtgtanttttggtcgaatgaactacngactgtctngggattcagcccggacagtactaactcctatgtcgcggaccgtccgtgcttggacggcggacagtccgcacgtgtaaaatcgacttggtcagtgctcgagtgcattaaattgacaggtctcggaccatctggccaggatgggcggatcgtccggacttgccttctctgatagctctgacagggttcaaacggaaaaact

SEQ ID NO: 77332 - DNA, 455 bp, Zea mays
  unsure (1)..(455): unsure at all n locations
ctagtgagcacagatctgtcaaactgngtgcgaaaggagaaaagaagaagaatcgaaagtgccaaaagtgctgatggaaacagtcgcacctgtctatctatggaggcgaatagggttaaattggctagccttgctgatagaanaagaggacggtcgctcgagtctagaaacaagagttcaacgatggtcccttagtggaatgagacatcgacttcaaagaagcataaactggttgattcttgagacccatggatccaatgacgatatgtgacattgtgaaacatacatngcaaantttgtatctcattatatgaaatatgtatggncatggtactatatgatgattatttgcnngtaaagttcactgtatggattatccctagtaatgcanagtaattaaggtgaacagaanaagttaatatgaacanatgatgtactagtatatttagagatat

SEQ ID NO: 77333 - DNA, 284 bp, Zea mays
  unsure (1)..(284): unsure at all n locations
tcactcaatcaaacttgtactcctataacagatccataactctggtataggggccataagctataactctatggatagagcagcanagagctccaaagctgcacccaaaacatacaaattcagactntgaatttgcactaagtctgaaatctgacaaccctattntagaccaaatttcacacctagttcgagacaaccaatagtggtagagttcaagtagtaaatggtgtgagcttcactgctatatggagaacacagaacatgagttacccgagtgtgtagta

SEQ ID NO: 77334 - DNA, 273 bp, Zea mays
  unsure (1)..(273): unsure at all n locations
gacactctntgatagagtgccgattattattgcctcagcacgatcgctaatacatcctaagactccttcgtcaattccaccaaagagcatagctcctggttggtagtcacaggatatcccatattcctgtagctccttcttctcagtctcggacaattcttgacccaccaagttctgaaggtcaaagtctctttcttctgaagcagtatcagcaatctttntttctttgtccggcactgcggccatgaccttctctgtagccgcagctgtctc

SEQ ID NO: 77335 - DNA, 372 bp, Zea mays
  unsure (1)..(372): unsure at all n locations
tactcaagcttacnanagaatntggacatgcatatagctcttgggaatcaccatgcagcataatctacaagcacccatccagcaacgtcaacgatcaagaataaaaacagctgtgtcgatacccccaatgttcaattattggtgtntcacaatatataaatatatctgggacctgaaatatggtctcaagaaaattanggtcacatagttcaatggtatagcaaggaacggtactgtnggttacagagaanatatattactacacagaaaaaggangcacagagaaatgagaaactatgcaagcanataagctgcatcaatgcagcccaggaagtaccacccaacgtacagcattcacatgttcatcttgta

SEQ ID NO: 77336 - DNA, 281 bp, Zea mays
  unsure (1)..(281): unsure at all n locations
acttacctatgtagtggtttctatcatttanttntataagaagcatactgcacattgtgaccanngttccangtatntntntagcaacaaatatgaggtatcacctattccttctcttagagcaattaacatcatgttgggtgatatatatcaatcgngtggactcactcatgaatcaatctgtaactgatacctctagctatggagcaatgcataatagatgtatatgtaatatggtatacaaatctgcagttctgattttctaatttggatgtacgtga

SEQ ID NO: 77337 - DNA, 426 bp, Zea mays
  unsure (1)..(426): unsure at all n locations
agctgtggaccggtggtntcggcgaggggctccgatcctccccgctgtcgtagcgtccctctatgtntggtgtggtagcctcggcgaaccttatcgtcgaggtgggctcgacggtcgcggcggtggtgctcgttgccgaggcgtcccgggaccgtatgcgctgtgtcccgcgtgcgcccggtgtggaccgaggcttctcgcatgaatccggaagtcgcggcgcgatgctccggnggtacccctgccttcgagaggcagagctttcgacccgtcggaccgcgacatcnttcaggagattcttgagctctncatagataccgccgccctccggtggtggatgggttcaacatcgctcggagtagtattgttgctgttgtaggttctggccgacccactggagctgggggtagcttgcctgcatcatac

SEQ ID NO: 77338 - DNA, 255 bp, Zea mays
  unsure (1)..(255): unsure at all n locations
tcatgtgtcgacgttagctctatcanaatctactaagtatagctgaccctctaacacacccttaaatgctattgaatcatcacttcttctaaagaaagtgacacctacatcagtaaagagacagttgtagcccactttgcataattgagatacagaaagcaaattgtaatctaatgaatctacaagaaaaacattggaaatagaatggtcaggagatatatgcaatttacccaatcctttgaccaaacctttggt

SEQ ID NO: 77339 - DNA, 462 bp, Zea mays
  unsure (1)..(462): unsure at all n locations
tcctaccccttacatagaatctcgtcctcgagatatatgtagaactangataaatgtgtgggaagactatgcgtagatcttcttctctttcccatgtagcttcatcttctccatggagactacattgcactctgcacactttaatcactntacttctcgtgacacgtgtcaaagtattaagaatcttaataggatactctgtataagtcagatcatcttgaacactaatgtcctccattggtagctgctctttatgtagcctgagacacttcttctattgtgatacatggaagacatcatgtacattctcacgatgatcaggtttgtctaattgatanggcacttctcccactcccttcatgatcaagaaggttcaataaagcgagggggacacttcctttaaccttaaatcttccataccccggattggtgacccttcactacacgtgatcaccacttaac

SEQ ID NO: 77340 - DNA, 519 bp, Zea mays
  unsure (1)..(519): unsure at all n locations
cttcactgcanatctacaaaaactcttatgtctatcaagcctgccattggtcttcaatngttccgcaatngactctcaatnggcatctgttgagactatattcggtataacgacctacatgtcttctccaatttgtaagatacttctgttatataattatgattgtgacatttatctctatacacttggtcattatatgtgctggtcttctttggcgcacatatgagatgcacccgactttatcccatatatccgggcgtgataggaagtgaacgccagccgccaccatttcaagctctctgatccctcgccttcattagaagtgcccccttcacactcagtgtgcaccattgccgtctgtntctgtcacactctccaacttcattcattgatagtgaccccttatgcccctgctcacctctcgcgtgctattctcatcttgctataataacgggcatgcagcttttgtcatctttgtactcctcgtctatcttgcacctcgtccactgtacttgtgtc

SEQ ID NO: 77341 - DNA, 328 bp, Zea mays
  unsure (1)..(328): unsure at all n locations
tcacctagagagatcactngaaggccgctannagaattctaatatatttgaagtatactctcaatataggtctatggtatcccacaggtgctcaatatgaattaattggatattcggattctgactatgcggngtgcaaagttgatagaaaagcacctccgcgtggtgtcaatctcttggtagatctcttgtttcatggtcttctataaaacaaaaatcggntgctctctctactgccgaagcggaatatatatcggccgcgaaatgttgtgctcaactattatggatgaaacaaactttattagattatgggattatttcaagaatg

SEQ ID NO: 77342 - DNA, 313 bp, Zea mays
  unsure (1)..(313): unsure at all n locations
gcttagcaatntcacactctnttntggaattgtgctngaagacttaattgtctccaagacgtctagtacanttaccattcttttcctttttggggtcactatggccccttctggctttttgctgtttcaatatttactgcangactcacaacttctaatgtnnttttcttagtcngctnttttccttcttccattttttctgtggatggtgcttcngccatctcttgcagttctggcagcaaggttggctgttcagcttcngtggccgaagaagcttctccggtgaactcangcaccgaagctggttcaatat

SEQ ID NO: 77343 - DNA, 337 bp, Zea mays
  unsure (1)..(337): unsure at all n locations
ngatgttgattngaagtctctttatagagttntatcagagatctgtatgacaagntgactccaattgatgagcctaacttcggtggtaccattgcatatacatctattacatcaccgaatgtaaagggtgatgaattggtaactaattcttatcctacttatgctaatttctaagatgttgcaagattagaaaggttntactaataataatagtgcaactctctaaaatatgaatatggtactggtaatatagagggtaaaagaactgattatgtncgattatcgattgaagagcctactaaacaacctcaatatggcattgacatataactattat

SEQ ID NO: 77344 - DNA, 316 bp, Zea mays
  unsure (1)..(316): unsure at all n locations
gtccacttgaattaatcttcggagaaacccgacctcgttgcaacatgacactataaggtccaacccaacaagcgttggatgaatntagaattattgcagagcatatcagtacaagagacctggttcaggagttnttggctttcaagggttttcctagtttaaaaaaatgggaaacgccgaagctaaagggggagaagaaaaaaggtgaacttgtgcgtttaccttactatttcaagtttaagaaatactttaaaacaccttgccaagagtggctggatacaattgaagtaatgtgcaatgaaatacttgacaatta

SEQ ID NO: 77345 - DNA, 463 bp, Zea mays
  unsure (1)..(463): unsure at all n locations
tgcataactctgcgttgtgtaatgcataagatgggtagcctgtgaaccatgactgtacaaaanatgaccctcgttgcagtatataactctgatcatgtatataataatgtattggcatataatgatgaatattggatcataagtgtatggacaaacatgcatangactggcaataattatatcgtanacttcggacaaaaacatgcatacttcgagggtattgacataacaatattgtacaggaaccctgtagaatcaaatgcaagaaacacacattactatcaaacacagtttgggtacaatattcagnttagaaaatagttgatccccanagtgtcattgcatanactaagaaacgctacggacttgcccatatatacacacatgactgtctgagttanggaccattgttacannattatacatgaccaactaactacatccttagaccttgatctttgat

SEQ ID NO: 77346 - DNA, 195 bp, Zea mays
  unsure (1)..(195): unsure at all n locations
tacttcagtacttgatacagtctggcccaccgcgaattcaagaaaaggcagaattgcttcttcagtgcttgcctgggactcttactcgtaccgataaatgtggcagaattgcttcaagaaaaggcagaattgcttctctatccattatcctcgntctgagggctatgcttcatcctacacagagcaccaatcctt

SEQ ID NO: 77347 - DNA, 118 bp, Zea mays
  unsure (1)..(118): unsure at all n locations
atgtatagcttctacagcaagagactaagtggntttataaactgntgatatannncgctatgagtagctagatataatagcatataccaacttagctaggagacagagtcatcattga

SEQ ID NO: 77348 - DNA, 238 bp, Zea mays
  unsure (1)..(238): unsure at all n locations
gcatgggatatcagtaaataaagcggatgctaaatcttaatcatcttcgttatcgtgttntaatatcgtatctatttcatttaacgcgagttcgaccatcgttntatctatccgggctcttccgaaatcttcgtggtgttcggaacatagtcgttccgaaaatcggtgcgttcggtggttatttaaaatacatcgctcgcgtgaatacgaattcggaagctttacctactcctacgat

SEQ ID NO: 77349 - DNA, 268 bp, Zea mays
  unsure (1)..(268): unsure at all n locations
tcgcttcagtctatcatccgcagtccaacggggtcgtggagcgtgccaatgggataatcttcacagctgtcaagaagatgctcctcgatgaacaaaaaggcagatggaccgattngntaccggaggcagtctgggcgctaaacacaactgagtgcagggcgaccgggttcactcctttccgccttctatacggatcggaggcaatgaccccgcaagaaataaagcatgtggtcccgcgtacagttcccgcagccgtccctgacgtgga

SEQ ID NO: 77350 - DNA, 319 bp, Zea mays
acctttggactacatcgactgcatcactctatgacgttggccactagacaccagatttgatgaccttcccaaccagagtcctgcatgctgcgtgtatcccgcattgcccagcgtggacctcatctagcagctgcttcccagtacacgaaagaatgcatttcatgaggactcctaacgtgcctattctgtatattggttacccaatgagagtatagagagctgactgccttgcaatgcgctctactgcattattgtcatccggctcctcattccttatatatctgatgagtgggttcttctaggcatcatggtctgactc

SEQ ID NO: 77351 - DNA, 320 bp, Zea mays
  unsure (1)..(320): unsure at all n locations
ctaagcttgcaccaccattgcatttacataagattctgagacaagtatattatttcattcctcaacatgcanaagcgggtcttatcaagtggcttagtgaaaatatctgctaattgatcttccgacctcactccttctaaaatgatatctcttttagcaacatgatctctaatgaagtgatgacggatatcaatgtgcttggtgcgagagtgttgtacaggaatattangcattntaacagcactctcattatcacacaacacaggtactttntctagaactacgccatagtctagaagaagttgttcatatataaaatc

SEQ ID NO: 77352 - DNA, 108 bp, Zea mays
  unsure (1)..(108): unsure at all n locations
cttcatccncacatgtgccaagcggcgatgccactttcagcccatgcatgntttatccattaagcatgcatctagaccggcctcctcttttgcanaatcaactaaata

SEQ ID NO: 77353 - DNA, 398 bp, Zea mays
  unsure (1)..(398): unsure at all n locations
acactggttgagatggttcgaatatatccaacagagactctctatcatcatctatgtgtagtgagatcctaaggcgcgatagcaatgggaagagaggcangngaagaccgaaattgacatgggaaggggcattanaatgagacttgaaggatggatatacccaagattatctttatagagatataaaacactatttggctgaactgattggtttgtggttaatgtacctaccaactgctgggataaagtttgtgtgtgaatcaggctatcaacagattatgcgtgatgatacagatcatctatgtgatgtctattgagacatgaagatgtaccttctttttgttgagaatcggatagattggaagatctgatacatctgtaatgtatgtcgcctgatt

SEQ ID NO: 77354 - DNA, 306 bp, Zea mays
  unsure (1)..(306): unsure at all n locations
aaatgctntgcanaaatcttattcattttaccttgactatcttgcanaagggattttatanagaanttatanaaggattngcangaacacaacatgtggcgcanatgtggtccaatatgntaaaaacaaagaaacaatccatgcacatctatgtaagtattatattggctcaactccaagcaacctntgcacttacattatgcaaactagttcaattatgtatttttatatttgctttggtttgggtggcatcaatcaccaaaaagggggagatngaaagggaattaagcttacacctagtcccta

SEQ ID NO: 77355 - DNA, 162 bp, Zea mays
  unsure (1)..(162): unsure at all n locations
gcgtgtcaagcanggaagcaagttggtacccaccatccacacaagaacattatgacgaccgacaggccgcttgagctactccacatggatgtattcagcctgatcacttacataagcatcgacgggagtaagtattgtcttgtaatgtggatgatattctcg

SEQ ID NO: 77356 - DNA, 307 bp, Zea mays
  unsure (1)..(307): unsure at all n locations
tactgtgcncncaatntgtatgttactgcactgtgtcgtcgagaacacgtcgtgaatgtctcaacctncatgggtgtgcgtggaccgagctctatggcagtgttcagggtaaattagtgactcctagtggatcgctaaggtctgaattagccgtagaccatattacggcacatattgttgcgtatttcggccggtatgagttctccggagagcgcacgccgtcgttcaccgtcggggacttggtcatgcgaagaaatagaaaccgangggtctaagtgcacatgttagtgaaaagattgaatagtgc

SEQ ID NO: 77357 - DNA, 125 bp, Zea mays
atggacttgtcgaaagagccaatggcattataatgacaggaataatgaagttaatcttcaaccagcccaccggaaagtggccagatgaattaatcaaagtggtgtggagccacaacacaactatg

SEQ ID NO: 77358 - DNA, 344 bp, Zea mays
  unsure (1)..(344): unsure at all n locations
ctcagctaatgctgattcttaactcggcatncttctatgtatggtagagtatntctttttgtctatgtgtcatgngngcgngngttatcggggtaggggatcccccaccacattattgatattggatcttcttgcaatgtgatatataaacaaagttcagcagattttttaggtactaaagtatcaactcataaagatcttaaatagaaacaaaccaaagggttntttgtgtgttntgcagcagtatgaaaatctgacacaagcaacacagagcaacatgttggttcgcaactagcataaattaccataaggcacaaaccgtcatacttatattacacctatat

SEQ ID NO: 77359 - DNA, 289 bp, Zea mays
  unsure (1)..(289): unsure at all n locations
attcttgtatngcatctagggcttgtctaacctagttgagataaccgccaacttagcgagtgnaaaagcttaactcagatcanacttgacaatcttagtttaagctttagcacttaaattcttacatcttatgcaattgntggttcttgaaatatgcatgaggtactgcacttatggggagtattcaaaactcanatcactcattgaaacccctagtgcaaggccaaatgcanatttaccatttgctatttctctataatatctacctatggcaaatattttgaaaata

SEQ ID NO: 77360 - DNA, 305 bp, Zea mays
  unsure (1)..(305): unsure at all n locations
ctatgaagattcttcattccacatgggctactcggcggtgccagagccaacccatgttagtcttatcaaccaatgcagtgtcgagttcagctctatcaaaatctaccaagtatagctgaccctctaacactcccttanatgctattgaatcatcacttcttctaaagacagtaacacctacatcagtaaatagatagttgtagcccatttgacataattgggatacggaaagcaaattgtaatctaatgaatcgacaagaaaaacatttgaaatggaatggtcaggagatatagcgaatttaccc

SEQ ID NO: 77361 - DNA, 292 bp, Zea mays
cgttacaaagcagcccgagaaccccgggtctgacaagcaaccagcgaaaacacacaaattaaagtactaaaacgagacgcacgtagagcgaacgggagaacgcgaaacgcctgcgacaccagcgctcgcaacagagcaaaaacactgcacagaagaaaacccgactgtgcggagcgcaagaaaaactgcacccgagaaaagcgatgccagcttgaacgaacaatccgacactgccaaggggaaagaaacacccccacacccaaaacaaagaactcggggcgaaccagcgaca

SEQ ID NO: 77362 - DNA, 413 bp, Zea mays
  unsure (1)..(413): unsure at all n locations
taagctcaacgggctcagtactagcgtctngagcttctccctcttcttctcatcggccttaacatacaaccactcanttttccaaccgggtggccacttggtgcgatagctaaccaccacagacttcatatctttgcggtaagcaaagttgtaacaaccaagattctcatgaagtccatcttctctggccttcgtctgataatgaagctcatgcactcggcaaaaagcttcagcattcgggtctattccttggctctggagtgcccagatgtagacgctgagcctaacgatagcgttaggagtcagctgatgaagatagaatttcataatttctataagcttcccaatcatttccgtcaaaggaaacctcaatcccgctctgaagaaactcctgaaaactaccacctcatcat

SEQ ID NO: 77363 - DNA, 441 bp, Zea mays
  unsure (1)..(441): unsure at all n locations
gcttacggtgaactctgctgtgatatcatcttgttatacttanatgttantttatagattagtaaacctcgttgttcactgcgtagaacctgagtgttcatgcgtcttgaattcatgagccaatgtcgataagtgtggttgataattctctacaatgtctgggtaaaatattgatgtgtncggatcataaaanaaacagagcacgggcaaaaatgcctgtgataaatataagacaaggacactgatttaagtcgcctaataattctattctaacggtagcatacagtaggaaagatcattntatcaaatcccaaattgtagcgactagtatgccgaaacctcttcatatgaagggttatataggaanaccagctcatatagaactggttttggtacattcatctcatcatcnttatactctcanggnggtacaatctctaa

SEQ ID NO: 77364 - DNA, 230 bp, Zea mays
cttcattacacacacacactcacagtttcacactgcattacacacacacacacacactcacacgccagatcacctgcgttatccaccatacatgacaccacatcaccactgtacgagattcgttaacacacaggtacactcacacagtcaccacacaaatgcagtactgtactactatattgcaaacactagatcatatctgcctatcatcgcactacagctaactaaca

SEQ ID NO: 77365 - DNA, 222 bp, Zea mays
  unsure (1)..(222): unsure at all n locations
actcacatgtacacttacttatattaatatggattgagactgtcttttaacgttattgccctggcacagattaccatcttccgcgatagagcaatattttatgcaattaaatgcatgttgattattctctgtataaaaaattatgatcatacacatatagtctaacaaatcatgatattggatggangagcaatatatgcccatataacatccttagaaatg

SEQ ID NO: 77366 - DNA, 263 bp, Zea mays
agtgcttctgcaacattcatgaattattctaccagacataggcaattgggaacgagcagtatcataacaacttctggtgctacaactttgttgcaccgtctgatgtgaggcctatgccaatggttcgaaagaagtggccaggctcttggatgaaacaattggtttatgtcatgaatgattcgagttagaaggaagatgtgaggggtataatccagcgccccatacgggtcacgttcggcatcaggagaccatcgatcgcaagt

SEQ ID NO: 77367 - DNA, 196 bp, Zea mays
  unsure (1)..(196): unsure at all n locations
accctgctgcccatttgcttcggtagctgatcataggatacttcgtagttttccgataagcanaantatagcacaccaanatgtcatgtaatccatcctttctagcctttgtctgatagtgcagttcgtgaactctgcaaaagctgtccgcaaacggttccacccgctggcttcggagtgcccagatataaacact

SEQ ID NO: 77368 - DNA, 311 bp, Zea mays
  unsure (1)..(311): unsure at all n locations
gtgcaactgcgactttccacgacgaacatgagccaaaagcccttgcatgctaccaattgctcgcaacaaggccaaaagaaagtgaagagagcantgtatcattgccatactctggtgttccccacaacacaaggagctttgaatttggttntgcatattcactctaggagagccaaggacaccaagcatgcaagtagtgaacctggtagagcttagcctcatctgagacccaagagaatacaaactttggaatataaagtgagattgtgacctctcccattatcttaantctttggggtaaactangctat

SEQ ID NO: 77369 - DNA, 214 bp, Zea mays
  unsure (1)..(214): unsure at all n locations
ctccgctagccagaagttcgaatagatcatgcctnatctggtagtggggcggaaatggtgcacaactctacctctagccggaaaactatgttgacttactctctgaattgccttctattgttttgatatcagagacgaactgaaatgacatgcgaattgcaaataagcaacttactgagctaagtgtataatgttctgaaatctgatataaatg

SEQ ID NO: 77370 - DNA, 312 bp, Zea mays
  unsure (1)..(312): unsure at all n locations
ataccgatctagatgcatgtntaatcactaagactaatatgggctggctctggcatcgccgtttagcacatanttttatgaagaatcttcataagcttctaaagggagaacatgtgttaggactaaccaatgtctgctttgagaaatacagaccttgtgcagcgtgccatgcagggaagcaggtgggaactactcatcanagcangaacatgatgacaacattcagaccatatgaactcctcatatggatctctttgggtctgtcgcttatcttagcatcgaaggaagtaagtatggtcctttgtaattgtg

SEQ ID NO: 77371 - DNA, 222 bp, Zea mays
cagtgatcatctcccaactagaatgcagcgtacttcatgttatcgcctctatactgcgagagcgcagatggagattcccttctggatctttggaaaccactcaaacttagaatcaaagactaaatggtcgatgaaatcaaaaatataccacatggccaagttagattccacttgaggattttgagatgaggatcagctgatttctttctaacacctacaaat

SEQ ID NO: 77372 - DNA, 452 bp, Zea mays
  unsure (1)..(452): unsure at all n locations
ctcagcttatatatagctgtgctatgcagtngatcagatggttcagtcagcactgtgctatgtcttcaagctagccttaacngagagaatcttgcacaagcttgcctgttcttacatcacccttgacatcttgttgttctgccacccactntgtccaatgattcttgatcttgtggggcttctccagggccaaacttggtacggggaagttgtaagtcttatcatggcgtcacccttccggacttgtacgcctattatcatgtngctcacacaagaacaaaggagtgatgtcaataaagaacatgttatggatcgagataacccttggaagactccaagattggtttgagggactgaatatgataattctctgcccactggaaaaatctgacataattttcgctgacctgctgtcataaacaagattcttgctccctattttatattgggca

SEQ ID NO: 77373 - DNA, 107 bp, Zea mays
  unsure (1)..(107): unsure at all n locations
tctcctggacangtgctgcacttaccgctgagtgcgaagctgccacatataataataatggagcccctggcacaggtggagttagtgcctgtagatctattaaatac

SEQ ID NO: 77374 - DNA, 252 bp, Zea mays
  unsure (1)..(252): unsure at all n locations
ctcaagcttctaaggggagaacacgtgataagtctgactaacgttcaattcgataaagatagaccttgtgcagcttgtcaagcatgtaaacaagtgggaggagcgcatcacagcaagaatgtgatgaccacttctagacccctggagctgctgcatatggacctcttcggacccgtcgtctatctgagcatatgagggagtaagtatgggctagttattgttgatgactnttcccgcttcactcgggtgttc

SEQ ID NO: 77375 - DNA, 260 bp, Zea mays
tccatactggctatatatattacctacagtccttatggacctttatcaattatctatcccaaggttagtaacagcagccacaggggactccctgtgaagcaacacctcgcagtcagccacagagcccagatttccatccagaacacaaacctgctgacaaccaatctgagtgtaatcttcatgacatccgttcatctgcccattgccaggacctttaagcacagaaatctgcccaccctcctgctgacttccaatctgac

SEQ ID NO: 77376 - DNA, 285 bp, Zea mays
  unsure (1)..(285): unsure at all n locations
actgcaacaacaccgaataagcaagggccacganaagtcattagtaagagaaaggggtatagcagttcaattaccccttgtgatcgacatcaatgatgcccatctcctgcagctgctggaggatgttgcgtgaaatggcaccactgctcttgcagaagtgaggtgggcgtgagccattcctctggcggccaccataaatcttctggaagccaccaacaccaatgccttgtctcaagtagatctttcttgctacagatgctgcaggagaagaatattaaaaatatt

SEQ ID NO: 77377 - DNA, 503 bp, Zea mays
  unsure (1)..(503): unsure at all n locations
gctcttgacaataaattacttcacccagttttaacagagatgcaagaatgaatgttttgataagtaaactangcatgaagcagggctaatgcatgaacatgctctttcttccttctanacaagatatgctcagaaagtatgataaggaagaattatgtacaagttaacatgaaaggaaacntgtttaccctcttgtaccttcacatagagactctctcttcattgtgctctgtccttagtcttaggcgcttaagacctatactcaagacaatatatggaaatatcttgcacaagagagagttctacaactagtgatccctttctaagtcattgtcagcatatatcacatggatcacaagttgcatagatgtaacatgaattcttcttctaacttactgcataccaagatagatgttgactgatataatatgcnggactaagagacataagtgtatattgaagtatttaatgatcaaacaacagattcgatcacaagaacacat

SEQ ID NO: 77378 - DNA, 174 bp, Zea mays
agggtatctatagatatctcaacaatatagctgaaagtggtgtcactattcaatctaacaagagagcgaatatatagagaagatttcttttcttgaacattcacttctaagatttaagaacatcctataaatatattacttccctaatagtgaataacgaactcttttataact

SEQ ID NO: 77379 - DNA, 276 bp, Zea mays
aattttttatttgatggtttttaaatacttctcccgagctcagctctaacattaaaactgttttctggagaagggccttatgtgccactcgtagttttttggaaatatgtataccatgtgttgtgctactattgggaggaacctggatcctcttcaactgtaatcttggatgtcagattgctatgcacctgtgacgttgccagagctagacctttgatggaataaattgcctttacaaccatggacggcttataacaagtacgttcgccaatctgt

SEQ ID NO: 77380 - DNA, 117 bp, Zea mays
ccttatggctgatacatctcacccacatccgacgatgcagatattgacgcaccaacacacttatgcatactgtggtgtgcacactgtcctgatatgtgatgtcattgctcctgtaca

SEQ ID NO: 77381 - DNA, 146 bp, Zea mays
cactactgggactgcccgagttgtctgacaacacattgtgtgagacatgtctcacttgaagaggataagctccatctgaatgtattttgtgccacatcaactaagcttactgtgtaagaaaaaggagtacaaacccaacaggtcac

SEQ ID NO: 77382 - DNA, 194 bp, Zea mays
cttagcaattaagcaaggatcgagttcagctctatataaatcaactaagtatagctgaccctctaatactcccttaaatgctactgaatcatcacttcttctaaagacaagaacacctatatctgtataaagacaagtgtaacccgctttacataattgagaaactgaaagcaagttggaatctatagatctac

SEQ ID NO: 77383 - DNA, 120 bp, Zea mays
  unsure (1)..(120): unsure at all n locations
ttattggtagtacctaggcctataggtattctttttaggtctattgaaaaccaacagacactgttgaatttgctatgaagacttangggtaatctatgcatgcaccgttatgatgtatgc

SEQ ID NO: 77384 - DNA, 166 bp, Zea mays
  unsure (1)..(166): unsure at all n locations
tcacgaagagccagancaagagccaccgagagagccctgccaaagggggccttaaaatangagttcaaagtacggtccgatctgaaataatatgagttcgggctagcacggtccgaagtctgacatgagccnggccttatattctgaccccgtcgggcctcaacat

SEQ ID NO: 77385 - DNA, 200 bp, Zea mays
ctgaacgggccggggtgtttttcttattccccaagggccgggagcagaggaacgcgcgggatgccccaaagcggacggattggattgattgcatgtaatggttgcatctacgggcttgatgcagaatagaagggacccaggatcagccgtgttacaagagtaaaagccgtggtgaactgtcacgcaaaggtcatttctct

SEQ ID NO: 77386 - DNA, 176 bp, Zea mays
  unsure (1)..(176): unsure at all n locations
cttgggttccaaggcaagttacaccaaatgcggcatcatcttttaccttgctgtatgaaccggaaccgaaactgccaaggtcctgtggttgaggccaatgaacctacctacatacgtagggtactgtgaaataataccaactctcatactctgatatccatgtnggggaatctatc

SEQ ID NO: 77387 - DNA, 59 bp, Zea mays
aaccgagttatcctaagttctgcacagactgggagagttgatctctggctctaacccgc

SEQ ID NO: 77388 - DNA, 200 bp, Zea mays
  unsure (1)..(200): unsure at all n locations
gagcacgaagcaggataaccacattgctgatntacaggagaccttcgctaattttagacaggctggtctaaagctgaatccacgaaaatgtgtcttcggagtaaagaanggagaaattcttgtgtgtctagtttcaacaaagggaattgaggccaacccaagtaaaatcgaagctatacttctaatggagccaccaagta

SEQ ID NO: 77389 - DNA, 93 bp, Zea mays
cgtggatcgcgctgtacggttctgctcttaaactgacctttggcttctcaggccgaccgggaacacgctgaatggcttggacttgtgaccgac

SEQ ID NO: 77390 - DNA, 193 bp, Zea mays
gaatagggccacaattggtgcggcctttgctttgggacgaaggttgtcgcttccgcggcagggcatgggtacgggatacgcacagtgataccctgatggtgggcatgcttgtcttttgtgggcgctgaagtgactgacatctctcatatttcaagtatcttaccgttatgcacctggccaacacaggtctgtc

SEQ ID NO: 77391 - DNA, 308 bp, Zea mays
  unsure (1)..(308): unsure at all n locations
tcaagcctagctactgttgcataagtttcaccaaaatccaaaccttcgacttgtgaatactccttggccacgagtcgagctctgctcttgtcaccacaccatgctcgtcttgcttggtgcggaagaaaccacttgggttctacaacatttngattatgacgtggaaccaaatgccatacctcgttcctcgtgaagttgttgagctcctctcgcatcgncatcacccaatccgaatcttggagtgctttctctaccctgtgtggctcaatagaggaaacataagagtaatgctcacataaatgtgcaca

SEQ ID NO: 77392 - DNA, 325 bp, Zea mays
  unsure (1)..(325): unsure at all n locations
tttctcacaatgattggatgctcatggcacctgtagctacactgaagactttggttgangaaataaaaatacccacaataatgcctgctgtgtcaatgtataagtgcaagctgattgacatggttatggatgtcttgcacatggaccatcaatctcagctttatccatacatgttatattcatatagtgacgaacctttttaatgaaatgtagtacccaaactgcttgatccctatgccaagtgtctttgaaggagatgtcgcgatagtttaatattacatgcttactgtgctcttgtataactccttccactatacttttggat

SEQ ID NO: 77393 - DNA, 197 bp, Zea mays
cgcgtgactcctgtttcgcatgtctactacgagagatgctgaagggaattcttctggtctttcgaatcccaaactaggttgacgtaaagcgtagcaaataaccacgcgataacttaaagtctggaggtactattttctcctacatggtgagaatatttgctgagctctgacaattgcgtgcagcgaccgtgcctacg

SEQ ID NO: 77394 - DNA, 257 bp, Zea mays
taacttctctctaaatgcatggaaaaccattcttcacatcactgcttaactccacccgagacacaacattcatacacaagtcatggtgcagattaacactggctaatgatctcatagcaaacatcctctgttgaactttgcacttggaacttgttcctctttaacatagattttcttattataaccactgcgcatttattgtctaaacttggacaatccagctgtgttcaacccgatctatcctgcttttcattgat

SEQ ID NO: 77395 - DNA, 223 bp, Zea mays
  unsure (1)..(223): unsure at all n locations
tatcaaattaagaagaacagtactacgtactatgcattatatatattatatatacatggagactganaaacttgaaaagaaagtttgtgttgcanaaggttntatatattccatgcaagggtttgatttgccgcgactacttcaacaaccaacttcgccatcacatcagatatatatcaattattgtttcattnggtgagtgcaatacatgtattctagatct

SEQ ID NO: 77396 - DNA, 258 bp, Zea mays
  unsure (1)..(258): unsure at all n locations
taaccatatctataaactctctaaggcgctntatgggctcaagcangccncaagagcatggtatgaatgactaagagaatttcttatcgctaatggcttcaaagtcggaaaagccgatcctactctctntactaaaacaattacaaatgatttgtttgtatgccaaaattatgttgatgatatcatattttggtctactaataaatctacttgtgaagaagttagtaggatcatgaatcacaaattcgagatgtcaat

SEQ ID NO: 77397 - DNA, 293 bp, Zea mays
gcctactaatttgatcagttagtattttcctctaacggctacagggtaggaaatcgtatgactcactcctcttaatatttcttcacatacctagaggagacgttaagtctgggcaaggtgacagaatacatttcacctcttttccacaagacttttaactccctactaaattgtatttaactggcacacactcgatgatcgtcgcgtgcagacacattgtttgatgctaacatatcacacaatgctcccagacttcttatttgacgctatcgatgatacataacaagactctt

SEQ ID NO: 77398 - DNA, 346 bp, Zea mays
  unsure (1)..(346): unsure at all n locations
atattaaatgatctagctatattatacatcgagaatatattattggatgagattgatattgacatcatcattaatggctttgcggctagccatgttcatttaacggtaaaatatatttcgacttcttattcacatgagtagttctcgaatatcacagcgataggaaatataacctatattatgataatagtcttataaaacggcctttatacttatagctaccccgacttaaatgtggacgcccacatcatccattcaatgttaacatgtaattgtaacaaaaaaattatatgctaaatcttacattctgatttatgttctaacgacanacatacatgctttaccg

SEQ ID NO: 77399 - DNA, 349 bp, Zea mays
  unsure (1)..(349): unsure at all n locations
ctgcactcttgtaacatgacccgaaacaatctgtgaatcagttttatgtatggcccttcttattcccattgcttgtaacttccgaagacctaanagcacggcttcgtactccgcaatgttatttgtgcaactaaagtcaagctctgccgcataacaagctttaaccttggaaggtgaaaccaacacagcagccgctcctgctctaatggtccccaagatccatcgcanaacactgtccatgcttcggcatctntatttggttcttccttctgagcccctggcgtccagtcagcaatgaaatctgctaatgcctgagactgaatcgaagatctatgaacatattcaatac

SEQ ID NO: 77400 - DNA, 254 bp, Zea mays
  unsure (1)..(254): unsure at all n locations
acacagcccatataaaaatacacccatgtnctttacanttggtagtaattctatagtaatccaccaaggtctaaatagccttttcatctttaagtcgggttccttttctgctatcgcgccgaaagctttctgctcacaccttcggcgctgtgtcaaccttcgtattcttttgggcttctccactgtggtactgattcgagtctgaagatacctgttcacacattatactccagaaacatcgttaaaatcatgtt

SEQ ID NO: 77401 - DNA, 249 bp, Zea mays
  unsure (1)..(249): unsure at all n locations
cgagtgtcctctgtatactactaagctttctcttgactgtttaccactacaaaatgatactcatctgtcgacaatgtacaatcaacttctgaatactggccagctgctgtttaacaacactattgtattaaaccatgtcaacatggtcttgcttacactcaactatatgatgattatcttgctgtaccacactagaagtttccatngtatcactcaaatgtcaagacattaacattacactctttacca

SEQ ID NO: 77402 - DNA, 226 bp, Zea mays
  unsure (1)..(226): unsure at all n locations
tcaagaaatgcgcatatgttgaagaattatcatagtgcaggcatatcgcgatcatantaaaatgtatggtaaattatgcatgaacataaataggagaacatacatatgaatctgctgaaatatangagtaagttactctactatattaataactattaaagtcaaggactaaaacttcaaaatcagactcatgacanatttcagcgaggaaatacaatgaacctcg

SEQ ID NO: 77403 - DNA, 268 bp, Zea mays
  unsure (1)..(268): unsure at all n locations
agtaccctaaccatgtttataaactctctaacgcgctttatgggcttaaacaagccctcagagcatggtatgaatgcctaagagattccttatcactaatggattcaaagtccgaaaggccgatcctactttattcactaanactcttgaaaatgacttggttgtatgccaaatttatagtgatgatattatatttgggtctactaacgagtctacatgtgaagagtttagtaggatcatgacacanaaattcgagatgtctatgatg

SEQ ID NO: 77404 - DNA, 283 bp, Zea mays
  unsure (1)..(283): unsure at all n locations
ataacaatatattttctgaaacaatttattntactttcattggcctagcaggctctattactatgacaacatgaagagtattgctatgaaagttatccttgacaataactgaaccttactgtatgtcttatcactcgcaacgacatttatgaagacatcttacattacagctccttgtcttctctttaaagttactgacgctattctagtaatacgaagtgtgactcgcatcctatctattggttgttatctatacccacaagggatcgatgaaaactttgag

SEQ ID NO: 77405 - DNA, 224 bp, Zea mays
  unsure (1)..(224): unsure at all n locations
tcttctcctttcttcgacgctgcggtcacagactcttctgcagcagtgttatcttcttcctcagccatgtctagcagtanttgatcaatatgttcaattgtgctctccaggttcacatcttcagctgaggcagcttcngcagcttctgcagctgcggccttcgaaggtgcaatttcaatatctgtcccctctgcagctgccggtgtgttctgggctgaagctct

SEQ ID NO: 77406 - DNA, 189 bp, Zea mays
  unsure (1)..(189): unsure at all n locations
attttaatgcctgccactcacgttcagcagtagacatttcattttgaattctactctgtaagatgactacatttattattcactgcatctataacactgaagtagctaactctgcgacttngtagggaatacactacattttctatgcacttgtatctacaatgccactatcagtgttgctaaatctaa

SEQ ID NO: 77407 - DNA, 309 bp, Zea mays
gaaggagacctaatacgctataacttctaagccttatggctcagcaaccccaaatatggttgaatgcctaaatttctatactatggctcaagcggaaagcgacctactctcttactaactattcaatgattgttgttgccaattatgtgtgaatatattgggcactacaactactgtgaaattagtagtatgataaattcaatgctatatgggggtgagattctatcatcagtgacactcagaggccctctaccacaagcatcagactctacagttgggatgtgcaccatcaaaccatgacatggcttt

SEQ ID NO: 77408 - DNA, 170 bp, Zea mays
ctattactcccgcccaggtttggggctaaaccctccatcccggcgcggccgaaccgcccgttaagcccagctgtgctccggcttctcccgcgtaccaccactactcggatcccatgcggcgcaacacacggcagcttcgctctctgacgctaaatctgggcgactgtact

SEQ ID NO: 77409 - DNA, 177 bp, Zea mays
tcatacagagacactacatcgagactcctttctcgtgcaagtcaccccgctggtctcagcttaatcatttaactccaaaggttggtacctggcagaggtacatcttttccgatgttgaatccatcacggccgtgatggattcaccatcaagtgttattttcaaaaacatcccatcca

SEQ ID NO: 77410 - DNA, 299 bp, Zea mays
ctgcacatgggaattaatttcgttctcttcaggaaaaatggtattgactgtggctttgaagatttgagatggacggggggaattacctttgactttgtagtggtgagcgtaccttttggagacacttgatgagcttggcaattatgcttattgtttatgctcatagtttggctcatagatttgtctgctcatgtgacctgcttgctctttaagctcctttctgctctcggtggtatgcattctttggcaaattctatctacactgttgcttattgcttcgcactgtgagttctatctct

SEQ ID NO: 77411 - DNA, 207 bp, Zea mays
tatgattgactgagtaccttacagctcatcatacactgattaacaagggaaatacatgatattaataagttactggcagttattcatacatgggaggataatgtaaaactacaccaattaacagacgatactcacatgatggattgactcttgatgtaatacacgtcatgtagaaccatctatgtggaactctaacactaataaaca

SEQ ID NO: 77412 - DNA, 378 bp, Zea mays
  unsure (1)..(378): unsure at all n locations
agtctcttacttctgctcatatcataatccactattatatgcggagaggagaggggcttattaatgtctatcgaaggagcctcatcagtagaatctgagatcttgtgagggttatcgtccaaaaacactttatccataaacttattcttaaggcangtgtntggatagcaaaggataacgaattcatttcatgctcaagcaagcagataaatatctgaaacataatgattaaaccagtgaggaatcagtgcacaaccgacaaaaaacgngacatggtaacctaaatcatttgattgaaaaattactaaatacattaaatgatttatagtataatgaaattctaaggaaaaaataataattgcatgattacattccact

SEQ ID NO: 77413 - DNA, 307 bp, Zea mays
  unsure (1)..(307): unsure at all n locations
catactatggcatatgcagcaatcattttatattcgttttgacgtgctacaatgttatgctgataaccacttatgttcattattttgggactgctttaattgaaagaaaggagcatttactatgctttattggattacaccctatttgacgtctctgcctgaagtttgtgcacacactgcacccacacacactcagtactgggatattgttacacgatgatgcctggccatttctcaaatctacttccccatattggacntagtgagtctataagaccactatgttgcagtaaatataactggaaat

SEQ ID NO: 77414 - DNA, 297 bp, Zea mays
  unsure (1)..(297): unsure at all n locations
agctgctcttctattgacctttgtcgacaacatgggccaacagagcccttcgcgtgctaacgtttcatacagctgatcggaaaaagttttatgttatgaagcaaggtcgaaaacccttcctgactcgtgtnagaaagatacaattcgacgcgacggcccacctgctgttatattggctctgcgccaccgccacgggggacactgttgctgggtaaatctgcgattacctctactgcgactattaatgacggtagtggagtacacacattatgtatgactgttgtgcaaatttaccta

SEQ ID NO: 77415 - DNA, 86 bp, Zea mays
  unsure (1)..(86): unsure at all n locations
ggaagctctcatcacaccaaanatgtgatgactacatcaagaccttggagatgctcacatggacctattccgacccgtcgcctatc

SEQ ID NO: 77416 - DNA, 127 bp, Zea mays
tttgcaacagcgaactggcttctgctcgcgttctcgtcacagcttaccaaatacaatacttggtttcacctgatatattcggatgcaactcgttcgcctgcgcatgcaacccttgttctgccaacgc

SEQ ID NO: 77417 - DNA, 163 bp, Zea mays
aaatctcatgtatcatctcttaccttgtctgtagtgcagtcgcgactccgcaaagctgctcaaatgttccaccgctgcttctgaggccaaatataacactaacctaagatacgtatgggtagctgtgaaataatccaaattctctatattctgcataatccat

SEQ ID NO: 77418 - DNA, 466 bp, Zea mays
  unsure (1)..(466): unsure at all n locations
aagctaggaatgagctaaacatcttagattctcagaaacttgatggagacattgcacacattgctcatttatatccctttgatcatgtctctntcatttggtacaaatacatatctcttattgttcttgtgccaaggctaagactaatatgttttcaagtatatttctatgattaatcttaaattgaaagggaaatggagtattcggcaaaggcaaggcttccactccaactcaatcgatatcatttatcctttgccttactcataaacttccaattggtataaactntcactcatatctttntgccaaacagggaaaatttcgaggcctcttaagattcttcattnttttgcgattaatgccaaaggnggagaatatatatgccaaagcaaaaggactgcaccatgattttcaaaaactatttcacanaaaagaagaaattatntcaactggtatctatttcaca

SEQ ID NO: 77419 - DNA, 474 bp, Zea mays
ccaagccgagtatgccactggagcaccaacgtttgtatacttacccctgaggatcatctcaagtcggcttaccaagtcaacagaaggaattctcctattggtaactcgggttgagtcggccagccctcgatacagatatgccggataggccctgtctatcagcggctgaatgttcttgaaaacaaaatccgtgaccacagcttcggcagtcagacctctctctttcagtaatccgacttcaataagcaacacgcctgcctcggccacctcttgatccgtgggagactcagtccaactcggagtacgaacgtctggctgtcttcctgaccgggaagggagagaattcccataattatcaactataaaccactccagacgccaacctttaatgctgtctatgaagggtatctcgagatactcggtcttccgccacgaacatctcaaactggcccttcgaccaactgatgttgcccc

SEQ ID NO: 77420 - DNA, 357 bp, Zea mays
attttcaagcatttcatataattgtttccttcgtcatagcctctgaacgatatcataaggaacagagaagctactggaatgattggaatgtgggctgcggaactcaacgaattcagcattgattatgtccatagatcctcgattcaatcccaggcgctagcagacttcatcgctgactggacgccacgggctcacgaagaagaagcacataaagatgccgacgcttggacagtattctgcgacggttcctatggaaccttccgggcaggtgcagatgctgtcttggttgcgccattcaaagtcagaacatgctatgtcataatgcttgatgtccactgcacaaataatattgttgaa

SEQ ID NO: 77421 - DNA, 378 bp, Zea mays
  unsure (1)..(378): unsure at all n locations
gaaaacaaatcactactctgttatgcataatgagaagaagcttgtattgcaccccatgtcctccgatgctattttgaaagatgaagttgctagagcttgcaaagagaaaaataaatctgctcataataaaaatctaggtgctgcaaaggagttggttcaacataagagtgacaattctaaatctactcaagtgaggaagacagaaatacaactgaaaagtgcttgttttcttgcttccaaatctgatttgcttgaattaaatgatgttgcttcaatctgctatgtatttatttgcaaggatgctntgttctcacttcacaacataccatactacttgccttctactgtcactaatcttttgcaggaatatgctgatgt

SEQ ID NO: 77422 - DNA, 392 bp, Zea mays
  unsure (1)..(392): unsure at all n locations
tattgtccatccatctacacgaccactcanataatntagcacatacatccttccaaacaccattcaacacatgcagccctacttcagacagtcagctaaatttagtctcaatttattcgaataaaggtttgagaaaaaggaacatatatagaatgaagctaattatgaccccatactggtcaaagtgcttaaacgaccaaacaacccattggatacatttgacctggccgtgatacaataaatgttcatcagctgtatgtaaaaagataagttctgttggctgattgtatgagttggcaaaataagagtaagatagtgtttggctacctacatgtgttagtttaaaagaaaacaaggaaacataagtgatggcatagactgaataaatctat

SEQ ID NO: 77423 - DNA, 405 bp, Zea mays
tcgcactgaggtgcctgccgtagagattacaagcacttcttgagaggggaagtccccaagtccctagaactgattcatgcaagtgccaatatcgaaagactggaagaaaactaccaagtgtttgcttgcctcttggaggagttatgaccgccctatttatacacctacgagatgtacgtttgtgagcaaggggacatcatgttcccaggggagatgtcttggcgtcctgtggatgacatgactatgcgctgcgttgttgacttgagcttgttgtttttctgctgagagccgacgccatggccgaggggttggccatacgcctgagcccctaagggaggggatgctcataccatcgtgggtgaacagggattccgtatggtaaacagcctgcttacgagatacgtc

SEQ ID NO: 77424 - DNA, 484 bp, Zea mays
  unsure (1)..(484): unsure at all n locations
ngaagtcacctcanaccagtataaactcataccttgtgcttacctttttcttggaactngaatntaccttataatgctttgttatgtacaggatgacgaagccgaagaacaatgatccgaagcttggtggatgatctgaagcttancggatggtgttgaagctaaagacattgctatgaaaaaacttttagagaaacttttgaattattcttgtaaaaaatattgtaatttaagaatcagatactactctataaatttgtccataccttgtaatatattattacctttccgtccatgaactgctttgatgtggacgaaacttgtattttttttgagccgaatgcgaagaacaccttcccatcttttcatacacaacgaagcataaatctgcttctttttctttcgccgaagccttatcattaaagccaaagtaaatgtctgtatntgtatgatatgatgatgatgatcctatgtatgtctaaat

SEQ ID NO: 77425 - DNA, 205 bp, Zea mays
tctgacaagctcctcgatggactattgtctgataaagacgccagcttggacagctcgacgccggtaacctctccgccgtgattcatgtcgccggcgccacgattcgcgctctggtaagtggatagcttctcggcgtcaaaagatcgtcgtcaccgctgagctggaagccaccccgattggacacggcaccccttccctttactta

SEQ ID NO: 77426 - DNA, 237 bp, Zea mays
gaaccgatgggttgtgattaatatgacgaacatatatagggtgttgaaaatactacatgaagaccacttgatgctatagcagagcaaatgagaatgacaatcacaacataaatattagccagagtgcattcataaatctagcacaatttgaagagctttaccttgaaccagaaggccaattcaagacacctccagtgttcagtcctgaatgatttatcagttggttgactgcgacac

SEQ ID NO: 77427 - DNA, 478 bp, Zea mays
  unsure (1)..(478): unsure at all n locations
tctaaggggagaacatgtgttaggactaacagatgtctaatttgagaaatacaaaccttgtgcagcatgtcaggcaaggaagcaagtgggaacaaatcaaccaagcaagaacgcgatgacgacatcaagaccaccgtaacttcttcatatggatctcttcggacccattgcttaccttagcatcgggggaagtaagtatgggcttgtaattattgatgaattttctctcttcacttggatattctttntgtaggataagtcagaaaaccaaagtacattaaagcacttactaaggagagcccaaaatgaatttgagcttaaggtacagaagatcaggagcgacaatggatcagaattcaagattcttcaagtagatgagtatcttcaggaggaaggcatcaagcatgagatctccgctccttacacgtcacaacanaatgatgtagtagagaggaagaacatgacgctcatcgacatg

SEQ ID NO: 77428 - DNA, 242 bp, Zea mays
ctgtggcacagacttcaaggcgataaaaggaaaggtcaaacctcttatcttacaggcacagacactcaacctgaatatcaggctactcatgcgacacagatttgtctgctcacattcggatgtggcactatgactagaggatgcctggttcccgtactataactttttggtgcgccatactctatatatctaagtctacaaaaccttcaactcgaaggtgccaactcttcttacggacacaa

SEQ ID NO: 77429 - DNA, 459 bp, Zea mays
  unsure (1)..(459): unsure at all n locations
cacatatttatctcanacacggtcatcgcgcgcacatgcagtatcttacttgccttccttctgctccttgacccacgggcaagggaaatttcttgctgaagtcggatttttatgggatctggccgctcgcgtgtcgtgcaatttcttgccatgtagtaggagtgactgcctcattttctttctcgtatgcatcaaggagctgtgcgggtaatgcttatgtattttcaatctgatccgtgcaaaccattgtgatcgatgatgcctttattccgatntctcagcttatgaaataatcatatatatatgctcatacttactgtagtagtagtagtacagtgctctcgtcttagcgngtcaaacttcaattattagttgtataatatcggccagtagccatagggttgtttgctacatgtatattgtaacaagtctttccatggatactcatcaacatgtata

SEQ ID NO: 77430 - DNA, 370 bp, Zea mays
actaacttggcgcggcatgtcggaacggacagcgcttatcttctatcgactatgcagatgaatgtgtgtattgtggaatgacagcacaacaatgtggtctatgcacctccttggttttatacgcgcgtgagggggcacaacaatgggtgtaccaccagggcaggacttactcgccttgatcatagatgaacacccccccccccattatgctccctcctaaattacttaagtatttactacatctccaaacagattacaccgttgcctttgattgaccaaactatataactttactcaacaaaactctttgaggaatattgttcagtacccttatatagatcataatactccttaatccatcctgcactgt

SEQ ID NO: 77431 - DNA, 318 bp, Zea mays
  unsure (1)..(318): unsure at all n locations
atgtctcgnttgatcanaatcaaacgaagttggatgtttctcttttgaagcttcttcatgcgactctgacttatatgacccaaacgacagtgccacatgttggtatgacttaaatcattatgccgaggcctcttagcactaatattacagataggcgcgtcatcaagatttataatgaataacccattcataatggatgcaaaagccacaaacatgccattcttagagatcacacaaccattggtttcactctctaatgaataaccatccttcatcaaacatgaatgagacataactgttctactcatactaggaact

SEQ ID NO: 77432 - DNA, 445 bp, Zea mays
  unsure (1)..(445): unsure at all n locations
cgacctatgatactcagcttaagtggacatggactcccataggtaagacattcgtagcgaagaagcgaccacttgaacccttgaccctttacgaacaacaggcaagacctatctgaaatccccaccgaagacaatggttntaccaccgaatggcagtccgggtcgacccattatatcgtgcatgctattgtccagtgcctccacgacttgtctcttagtcatagaagcctcgtcctagataatgagagatgctttccgtagcaactctgtggttccactctgcttcttgaagctacatacaacgccatcatcaatagtgagaggtatcttgaagcgtgaatgggcggttcttcctccaggcattatggaagccgcaacgccagatgtagttgttgccactgcaatcttgtcctggctgcgtagcgtcgtgagcaacactctatat

SEQ ID NO: 77433 - DNA, 367 bp, Zea mays
atcattcttcacataaaaccattctgtcatccagtcgcccggccatctctttcgaaaggatggcacggagcagcttgacccggaccgagaaacgaaactgtttctagcaaaattattatgatactgttccttaccccacggtactgtttcgtatgatatttcttgtatattgcagaagctatttgcatcaggcttcagaccttggcttttcacggcccacacgaagatattcagccttatgattgcttctggggtaatgtggtgaagatagacttcgaagatattcaacacctccacgacgaagctgctcaagggagatcgcagtccagctttcataaagcttctgtacactacgacttcattctct

SEQ ID NO: 77434 - DNA, 442 bp, Zea mays
  unsure (1)..(442): unsure at all n locations
aactaagcttctnagggagaacacgtgatnggttgacaacgacaattcaattatatataccgtgtgcagcttgtcaagcaggtaaacaggtgggaggagcgcatcacagcaagaatgtgatgaccacttcaagacccctggagctgctgcatatggacatcttctgacccgtcgcctatctgagcatacggggaagctagtatggtctacctattgttgaagactattcccgcttcacttgggtgttctgtttgacgataagattgaaacccaagggaccctcaagcgcttcctaatgagagctcataatgtagttgagctcaacgtgaagaagataaagagcgacaacgggtccgagttcaataatcttctagtggaggagcttcttgaggaggataggatcaagcacgaattcttcagtcctaccaccacaaaaaatggt

SEQ ID NO: 77435 - DNA, 402 bp, Zea mays
  unsure (1)..(402): unsure at all n locations
tagcgaccttagaaactaagctcttcnagctggacttcngttccncttaagcagatttgtggttgtagttntaaagatatatcagaatttccttcaccagatcactcccgaagcaattattagaatggggatcttcgtctgggctgtgaggagtcaaggtctagagccaagcacaagatgtttttgcagtatgcacgagctttcgtatgagacgaagccgtggggcaaggaacaatatcataacaatattgggtgctacagctntgttgctcgctctggcgcaagctacccagtgccaacgtttctaaagaggtggcccggngcctgnatggaagaatggttttacgtgacaaatgatttgaaggcaagagaagatattatagaaatcatcatgcgacccat

SEQ ID NO: 77436 - DNA, 418 bp, Zea mays
acaagaggctggacggtggtgtatctgtgctctcggttggcatgaacccattctggtcttgagaaacccggtggtgagtttacatatgcaatggttaagtgctacgtatgtcatgtggttggagatccctagctgagtattaatagattcggatcatctgtacttctcggacatgaagacttggtcactgccctacacgtagcaatccaataaagtgaagggttgataaaaggcggctagcataagctaagtgcctgaactacgatagaaagaactctagatataggtaatgacttaactcgataataaaattggattctaaggatccactattagtaagcatttctacaaacagattcatcgattcttgataagcttaccttcaatcccacaaaccaacatatccttgagagtcttt

SEQ ID NO: 77437 - DNA, 464 bp, Zea mays
  unsure (1)..(464): unsure at all n locations
gccctcggacccgaccggacttcaccggaggcccgagatctacctcttcggacttcggtcttccgccgccgcgcgtggactgagctatccagtgagtctccgtccgattcctttcgctcatgtcttctctggcatcccatggacctccttgacctatttgattgaactatctcgccgtgaccaggccggtctcctcgccaccgacgagcatccccgcccgcgcgcgtggaccgactgactccggccatctccgacggcgttccgcacaccgttgtgatccccgcgacctccccttcaccctcgaccacttcaccggaacagtctcgccgccggtaagcccctccgcccttttcttcgccgcgactactgtttaaggtagaagaaggacctctggttatgttctgtagagcccgcggggttntctgtaatgtcagcgactcatgtgaatagtaacctaatgactg

SEQ ID NO: 77438 - DNA, 497 bp, Zea mays
  unsure (1)..(497): unsure at all n locations
cttaaaactcagcttagataattggaactctggtntgcttcggcttcgaccttatatcttatgattctattctcgtcttcggaatgatctttagcttcctttaagtttgaatgtgttatttccagctctttatcttgatcacgcatgcgagcagcttgatccgagatacgaagtttatcttccgtcaagtgtttttcaacattttaaccttcaaatccttctcagccagagaattttcaagctcttttacccttttctccagagtgctaataacaagttcattcttttgatgttcaacttcttgttgaagcttcaaagccttactcagcaataaactcttccaagaaacaaaagttagccacaaaatctgagagtttaaaagttaaaaaattcaaagggacggacataaggggttgtaccttaaagtttgagtagaatacgcttcagtaatgtgttgcttatataatactaagggctcgctcaagcttcagaaatca

SEQ ID NO: 77439 - DNA, 395 bp, Zea mays
  unsure (1)..(395): unsure at all n locations
ctaagcttcttaaagctgggcttcngntcccactgagcaagtttgtagatgatgtgttttattccttccanantntccttcatcaactaacccccgaagccatactaaggatgggagtcttcgtctgggcagcaaggagcccaggtatagacccaagcgcaaaatgtttctgtagcatgcacgaacttatgtatgaaacgaacgccacgggaaaagaacagtatcacaacaacttttgctgctacggatttatcgcccggcccaactcaagctatccggtgccaacattttggaaaagatggtcgggaaattggatggaggaatggttttatgtgaagaacgacttggtagcgagggaggattgtaaggaggttattatgcgtctcatatggtcc

SEQ ID NO: 77440 - DNA, 380 bp, Zea mays
atggacagcaatatgtccttgctccgaaggtatcttcatgcataagtacgctggatgaagaatggctttcaaggcattaagcgtctctcgaccaatgattgcattgtatgggtaatccatgtcaacaatgtcaaagataacttgctcagaccttgtgttgtgaatgtaaccgaaggtaactgacattgtaattttgccaagtgccacaatctgtcttccttcatagccacacagagggtgtggagcatcatgaatcttgcctttggttcttgatatgtttgaagcatttacaaatatgatgtccgctgcactgcctgtgtaaccagaacattgtggaccagaaatctcttgatgacacaagatataaccatagcatcatt

SEQ ID NO: 77441 - DNA, 110 bp, Zea mays
gggatgcacattcttatctttcatatgactcaggtgtttgatcatgatacttttaattacatacttcgtgagttctttattacttaagttatattgatgctcatgcttac

SEQ ID NO: 77442 - DNA, 410 bp, Zea mays
  unsure (1)..(410): unsure at all n locations
cgacctatgatactcagcttggacgagtttacanactnntattggtagtattagcctccctcttatgtgcttactatgttnggattaaggtttggacatatgtangatgtgatattttgagagagacgatactaaggtgtatatgacaaacatttaaagcgtgtataccacttgaaataccacattgaaagaattgattcattatttgatatccatccttagtatctgggatatttagacttcaaaggcactagaaaccttagtaagatcgacattatatgaaggattgnggcgatggttcttgatgcctgctctcctaactctctctgtgggtagaggattgggacgaggaaactcttgcaacaagtaaactaagagagaggtgtatgtgtgcgctntgatatgtgact

SEQ ID NO: 77443 - DNA, 451 bp, Zea mays
  unsure (1)..(451): unsure at all n locations
tccactgcattccggtataatgtatcttggcctaaggactttgtattctgtcattgccttgttgctcctctttgacattttggtgaggcaatggggttagagggccaaaagttattccgttntggtgctgaatgccaaagggggagaaattaaggccaaagcaaatggatcagccaaccacttgtgaatttcgaaaattgtacagttagaatttgtatttcgtcaaatgaatcagccaaacacattgtgaattttgaaaattgtagagtttcacttgtgaatttcgaaaattgtagagttagaatttgtatttcgtccaaaatcctcttattgcgaaattcggtctcttatgtgggagaatttagattatgggaaaagggcggttttatgcacttgatcaaaattactcttgaaatatctctctatgtgctcaatcaagtgtggttgactt

SEQ ID NO: 77444 - DNA, 378 bp, Zea mays
  unsure (1)..(378): unsure at all n locations
ttcttcttcacaaacagtgctggacagccccaaagcgatatgcttgngctattaaatcccttatcgagcaactcttgcaactgcttcttcaactctgccaactcagcgggtggcattcggtagggcctcttggaaattggggtcgttcccggttgcaactcgatggcgaactcaatatcccggtccggtggcattcctggcaattcatcagganagacatctgcatactcacagaccactgggatcttcttcatgggtaactccgtcatagagaaagcacatgactgagaagaaccctgactatgcagaatcaaagtgaaattcccgcagaagggagaattaacttccacggtacgactggctacgtcgagcacaact

SEQ ID NO: 77445 - DNA, 462 bp, Zea mays
  unsure (1)..(462): unsure at all n locations
tgtgaaggttcttcatccccacatgtgccaagcggcgatgccacagtcagtttatgctagtcttagctattaagcatgcatctagaccggcctcttcttttgcaaaatcgactaaataaagtntgtcgtctaatacacccttaaaagctagtgaaccatcacttcttctaaagacagacacatctatgtttgtgaataaacagttataccccatattgcataattgactcacagatagtaaattataaccaagagactctactaaaaacacatttgaaatagagtgctcattagaaattgcaattntacctaacccttttaccttgccttgattcccatcaccgaatatgaatgaatcttgngaatccttattcttgacgtaggaggtgaacatcttcttctcccccgtcatatggtttgtgcatncgctgtctataatccagcttgaacccccggatgcat

SEQ ID NO: 77446 - DNA, 498 bp, Zea mays
  unsure (1)..(498): unsure at all n locations
tactcagcttcggaagccgacactcttcgatagagtaccaattatctntgccccttcgttgtctctaatgcatcctaaggctccttcatcaattccaccaaagagcatagctcctggttggtagccacaggatatcccatattcctgtagctccttcttttcggcctcagataattcttgaccgaccaggttccgaaggtcgaagtccttttctttcgaagcagcattagcaatctttttccctttgtcaggcactgtggccatgatcttctctgcaaccgcagttgtttcttccgcagccatatccgagagcattntatcaatcccagatagtgtactctcaaggttggcagcttcngcagcagctgcagcttcngcagaggtatcagcttcaacagtggcctcggcgcttgcaatgggtgccattttggatgccgaggccaacagtagcgttcgtcaatggcttgatgacagtacgattctttgtttttctgccgc

SEQ ID NO: 77447 - DNA, 115 bp, Zea mays
ctttacaccagctcgtcaagaacactgccaagaatagagacacgctgtatttttggttgtcccatcaatccgggcgggttatatttgggtgaattgcaacatacccagtcatttt

SEQ ID NO: 77448 - DNA, 370 bp, Zea mays
  unsure (1)..(370): unsure at all n locations
ttcccacaagaaacagctcggacttgagttggaggggccagtggtgcttcttcctccaaaacttgttcttcttgtgctcccccttgatcacacgcatcttcttgaggaacctgttcatcatcttgagttgggggattcacgattgttgaggaagaaggatgatcttgctcttgttgttcctgtggtcgcacatctccgatcgccatggtgcgtattacggccgtnggaacatcatcttcatctacatcatctagatatcaacttgctctcttggagagccattagtctcatgaaatacaacgtcgctagagacttcaaccaaacccgatgatgtgttgaagactctatacgcccttgtatttgagtcata

SEQ ID NO: 77449 - DNA, 389 bp, Zea mays
  unsure (1)..(389): unsure at all n locations
tctatgtatatatatatatatcgnattaagtacaagagccaactctttcttttctatggntctaganatatcttgggcttgcagtcgggattgccataagactggtgtccacgccgaggtgagcggtacgggtgctgagtcccgacgggagcggtggaaccatcgtccaggtgacgacgttctgcgcgctcagcccgcagcagggcgatctcagcatgagccctactcaactcgtctagtgcatggtccagctccgtgtttagcacagcggctatgatgactgtgctgctcaacctatgattgccctcaccgacaggtgagacaatcacgccttctatgctgccagatggacgacaggggtaatacttcacgtaagaccgtcagctacc

SEQ ID NO: 77450 - DNA, 337 bp, Zea mays
ttcagcttctgccatgatgagaatgttcctggccgaagagaggagtaccatgtttgtgccacattattgactgccatgacgaaggactacttcatgactgcagtattgccccacatatgaagatatggatgctttgtagctcatcagcaactgcttcggatctaagtgcccatcatacatggagagctggggtggcttgtatgatgggggccatggtgtagcctgccgttctgctgacagaggagaagcatcatcaaaagcaaaatttccatggtggaaatcatcataccattcatcatcgtcgtatgaattggtctaacgaagctctctgcgttga

SEQ ID NO: 77451 - DNA, 510 bp, Zea mays
  unsure (1)..(510): unsure at all n locations
tctcanacacatgtnaagaggcaactaanatgccttcaagactgctctgatccctagccttatgttgcatttcagccaattaacataaaagataatcacattaggcatcgccaaagatcatttgttataagaatggcaacccttaaaacataaaagatacatttgttataagaatggcaacccttcgaacataaaagattttttcgcttggaacaaatagtacatttacaataaaaaagcccctctgtgaggaaagaaacacctaactaaagaccaggtgactcacaacatcattgacatttcccacctacttagaaaggtagatatttctatggaagagttgccattcaactcctgtgaggatacaaagaagagtgatctatagtcaaagaccanagtgggatntaagcaacaatggtacaatatctaatggataccaatcaatgtgagtactttgaataagagaaacactacatatgtattatntggtccctttgagaggcccccact

SEQ ID NO: 77452 - DNA, 366 bp, Zea mays
  unsure (1)..(366): unsure at all n locations
ctattccagtgcacccaagatcacgaggaatatcttcaggcgtatgttctgaagttcttacgcctgagggcacaagcgccaacaatgcccaatgaaattgtcattgaggccatgattaaggggcttcggctgggaccttcagcctaatactttgccaggaaaccccctcagactctggagaaattgcttcagaagatggatgaatacatccgcgctgacaatgactntcgatagagaagggaggaagcttataggttctccgaaatagccaggggcttcggaggaaggtttcatcctagacatgtcagatcgattcataacactcagaatgatgacaggggaagccagcaacagaggccgcaatat

SEQ ID NO: 77453 - DNA, 446 bp, Zea mays
  unsure (1)..(446): unsure at all n locations
ctgtcttatgcgggtagcanatatanatttaattcctaaatgtaacttggtctataagtctaagtgccatgtgtgtgttgaatcaaaacaacccgcaagcctcacaaagctgctgaggcgaggagtttggcacctctagaacttgttcattctgatctgtgcgagatgaatggaattttgaccaaaggtggtaaaagatactttctcacttttatagatgactccactagaatttgttatgtgtatctcttaaaaacaaaagatgaagcgttcaattattttaaggcctataaagctgaagtaagagaaccaacttgagaggaaaataaaacgtttaatgtccgaccgacgtagagaatatttctctaatgtgttcgatgagttctgcgtggaacatggtattattcatgagaggacaccgccattctcaccacaatccaatggga

SEQ ID NO: 77454 - DNA, 497 bp, Zea mays
  unsure (1)..(497): unsure at all n locations
cactctagaaactcaagcttctanagggagaacacgtgataggtctaaccaatgttactttcgaattagatatacctngtgcagcttgtcaagcaggtgaacaagtgggaggagcgcatcacagcaagaatgtgatgaccacatcaagacccctggagctgctacatatggacctcttcggacccgtcgcctatctaagcataggaggaagtaagtatggtctagttattgttgatgacttttcccgcttcacttgggtgttctttttgcaggataagtctgaaacccaagggaccctcaagcgcttcctaaggagagctcataatgagtctgagctcaaggtgaagaagataaggagcgacaacgggtccgaattcaagaaccttcaagtggagaagtttcttgaggaggaagggatcaagcacgagttctccgcttcctacacaccacaacanaatggtgtggtagagaggaagaacagaacgctcatctatatg

SEQ ID NO: 77455 - DNA, 326 bp, Zea mays
  unsure (1)..(326): unsure at all n locations
cgcatctagctccacgccattngaagagttctattttatattattgtcaaaatactgaaggctgcgcagaagtcaaacagccacacggaaatcagttctgcagatctcccgaagaggctccttcacattagctcgtgaaaatacttttgttttgtgtttatacctcgctaaggctggttgttactagtataaatacccccctatgtctatgatgtaaggcagcttatgataatctaaaacagaaccctcttgttcagctgtgtgctaacaaatattgagagtgatctctacccctttgctcttgtgaattccttcgcgggattgca

SEQ ID NO: 77456 - DNA, 420 bp, Zea mays
aacttagcttgaagactgaagggaagccaactgaaccgtcgctgccaatgtttttgtttcgaacatttcatacttggaaaataagaaaagtaggacaatgtggtgtgaatcaactatagtaaagtttgggtcttgaatttaaaaaatgttaatgatgatctgattttcaaaccatcattcattgtaagatggaaaagtgggaaaatatcatatacatgaggattttatttaagtacaacttgtgtactaatcttcgtagatgtttattgcggagcacatggagagtctacagtatttggacaaaaaactataaatgctatgatattttattggctcaataggagagacgctagattgtgagcgtggtactgcacaactagcaaattgacctatgtttattctcttaccgtctaaatctgg

SEQ ID NO: 77457 - DNA, 409 bp, Zea mays
cacacattaaactcagctgctaatggagaacacgtgatagggtcgactgacgtgctattcttttatatagacctcgagcagctcgtcgagcaggtaaacaagtgggaggagcacatcacaccaggaatgtgatgaccacttctagacctctggagctactgcatatggacctcttccgacccgacgcctatctgagcataagaggaagtaagtatggtctacttattgatgacgactcttcccgctttacttgtgtgtgctttttgcaagataagtctgaaacccaatggaccctctagcgcttactaaggagagctcaaaatgagcttgagcttaaggtgagaaagataaagagcgacaacgggtccgaattcaagaaccttcaagtggaggagtaccttgaggagga

SEQ ID NO: 77458 - DNA, 432 bp, Zea mays
  unsure (1)..(432): unsure at all n locations
tctagacacagtccgaaagagcgaagcttccttcgattgattttctgttaagaatattcctcgagggcaaaatgaacatgctgatttgtagccaagtctgcagcacaagggctgccgctaccttcggatgtattcttcgaaacaataaaggcaccttcagtggagatacttgaaagagcagttcttactatttctcctgtgtacagtgaagattggagaactgannataattcttaccttcagggcaacttcctatcagatgacgaagcttataataaaagaatagaggcaagagctcgtccgtatatcattatagaaggggagttatacaagcatggagtttggccccgctgctcaagtgcttgtctagagccgaaggtatagagttgatgaaggagatacatgcaggcctttgtggatcccacatcggat

SEQ ID NO: 77459 - DNA, 167 bp, Zea mays
attcgccaaccagcaacgctgcgccgccttgcctcggcgttcctctccgctgcttcccaaatctttacttggttttcccctggctacttattcggcatccaactggttcgcctgcctggcaacctctttgccaccggcacagctgcgccccgctctgcttaccagct

SEQ ID NO: 77460 - DNA, 397 bp, Zea mays
tgcttcggctgatctttcttatcccatgcttctatgtgaagacatagcagagcagaatgtattggtgggatctcaactatctgaagagcacgagaaaaccttgttaaggttcttattcaacaacaaagatgtttttgcatggtcagccaacgatctctgtggtgtcaacagggacgtcattgaacattcactcaatgtcgatccattcttccgacccaagaaacagaagcttcggaaaatgtctgacgataaagccgaatgtgcccagaacgaagtaaaaagacttctcagtgctggtgtcatcagagaagtgaaatactcagaatggctagccaacactgttatggtgaagaaagccaatggttaatggagaatgtgcattgattttactgacctg

SEQ ID NO: 77461 - DNA, 381 bp, Zea mays
tctgcgtaactcttctgacgagcatgagctttctttcaattattaattatactgtgaaccctctcttctgtctcctttaccatatcaggcctaaagaaatatctttcaccacgttcagaccagtttaacggagtacaacatcggtgtccatataaagcttcgaagggtgccctcttaatgccttcttgatagctattattatatgagaactccgctaattggtaacaatcatcccatttctgtgggaactcccgaacacatgctctgcacatatcttcaagtatatgagttaccctctcagtctgcccatcggttgaggatgatgggtcgactatggacaattattacccccgattttgaagtcttccagaattggatcaa

SEQ ID NO: 77462 - DNA, 494 bp, Zea mays
  unsure (1)..(494): unsure at all n locations
tcacgtngatgcctaagagaatgaccagtaccacttgttttatcaacactcaatgtacatttgtaccagtgacactttccaccatacctgatcctctngccgnctacagacttgtatagtggtttaaaatcctaccacactttagatgtgcgaattcttttatgcttcttaccatcagcattntctgaagtatttgcatctctggaaccattgttggtagcagcaccctcctctaagttaataggggtggcactgctaccatcgttaatggactgagatggaccattctcatcagaggacacaatccttagatcattgntgatgaacttagatggactgtcctcaccaccaacatcttgctccatcacagctcagaggccgaagcaccagttccgtcaccgtcaatgtggcgcacaccggtttcacactgcctaccacacatgtaaaaccacagatattcattgatataacagttttagtaaaacacacaatct

SEQ ID NO: 77463 - DNA, 513 bp, Zea mays
  unsure (1)..(513): unsure at all n locations
atagacactcaagcttttctcttatatctaatgatctagatcttatcaacagggccggttgcaggccactattntgcaaggcttgtctcagcagcttacctatcttatatcttccatcccatattgtgtgcaatcagacatgacaaacaatctctagttgagatgtaaacatgaatgatacccccgcctcgttcaacatttaagccgcgccacttcaccaacgcatctactctcaacctgaaacttaacgttcagcgtgtgcagggcaagtttgggaggttaaagaccgtcatcgctccaactgcaatcaaagaccaaccagaagggcatcgtatattggaatngggttntgaccagtcaactagtcttgcactatcaaaacaccagattcaattcagagacgacctcgtagtcaatattaactntacccagatccaggattctatcgcaagcgtcaccagacagttctttgcagttgccctcaaatccacaaaacaggctatcaacaattct

SEQ ID NO: 77464 - DNA, 475 bp, Zea mays
  unsure (1)..(475): unsure at all n locations
agcttgtgaagattcttcatcccaacatgggctagtcggcggagccagagttaacttatgtntgtcttagcaattaagcatgtgtcgagttcagctctatcaaagtctactaagtatagctgaccctctaacacacccttaaatgctattgagtcatcacttcttctaaagacagtgacacctacatcagtaaaaagacagttgtagcccatttgacataattgggaaacagaaagcaagttgtaatctaatgaatcaacaagacacacattggaaatagaatggtcaggagatatagcatatttaccaagtcctttgaccaaaccttgatatccatccccgaatgtgatagctcgttggggatcttggtttntctcatatgaggagaacatacttntctcncctgtcatgtggtttgtgcacccgctgtcgagtatccaacttgagccctcggatgcataaacctacaaaacaa

SEQ ID NO: 77465 - DNA, 259 bp, Zea mays
aggcgaaaggcacacaaggccatcagagagcttgtgcaactcgacttgaaaggatccctacagtataacttaaaggcttatggccacaccccaacatgaggaagcacaaattccttactatggtcaagcggaagagaactactcttataaactatgaaaaatgttgatccaagatgtgagaataattgggctacacaactcctggaagtaatagactatcaaaatcaatgcatatgggggtgagatttctagaaaagca

SEQ ID NO: 77466 - DNA, 366 bp, Zea mays
gcttcttgacctgaaacacacggatataagaaacatctgtaagtacatgtaatgttttaccatctcatggcagaggtaccccttatactaaaaccatgccgcattgctaggcagctcatgaccgattgactttacttcgtcatcaattgaggtgatactcgactgaaatttaatttgacaacaaacttctgtatttccaccaccaagcactggcatgtctgtagctgagcacattaaccgacccccatctggtacacattgaaccatggaaaggaatatagcttgtgacccatacggatcaaggtcaacctaattcagcatgtacatgacattaagacataatccaaataatgacaacccatatta

SEQ ID NO: 77467 - DNA, 301 bp, Zea mays
ttactatgaagctggcagactagcttggacttcatcgcataccctccatcgatgaagatacaatctatttcttagagcagcttcatgatctctattatgctctctagccttaatataacctcatgtctgtatctttgaggtctgttgcatcctcaagccttactttatagcatactctgcgcaaacaaccttcgcaaagaacaccttcgtcgttaaacaatgaaaagcgaagaaaaattttaccttgtattagaatagaataaacaccgacatatgtgtcgtcgtagcggtgatgtcggct

SEQ ID NO: 77468 - DNA, 485 bp, Zea mays
  unsure (1)..(485): unsure at all n locations
tcttgaatggtggatggatntaccaatatacttttccggtcttggctcatcttgctgctagagataaccttcttgttcctcctgtgttaaccatttcctctgaagcaacattcggcaatgttggaagaacaatttaagaaaaaagatcttccgttgcccttgatgagacggtggaggcggtaacttgccttgaagattggaagattggaaaagagcataagaggggaggcgatattgaacttgctcgagatctagacattgattagtctagctgttattgttattttctttctctctgttggcgaccgatgttattagtctagccaatcaactttatgacgaatctgataacaactttctattataaatacttngtattttttgcagtttataaaagtaaaacgttcgacccggtattacttatgagtataacggtggttgttccggcacaatcacatcatggagtacaactgggtgacaccttt

SEQ ID NO: 77469 - DNA, 438 bp, Zea mays
  unsure (1)..(438): unsure at all n locations
acatcttcagactggcctgggactattattatatgataactcagncataggtagactnttatcccaacttcctccatgctgaagtgcacaagctctcaacatatcctccaaaacttgattggtcctttcagtctgtccatcagtctgagggtgataagccgtactgaaattcaactccgtactcatgttctcatgaaagcttctccaaaatcgtgaggtaaactgcgagcctcgatcagacacgatcttctttggtactccatgcaaacacacaatccgagccatatataactctgctagctgagaacctttataagtagtcttgacaggaataaagtgagccactttagtcaacctatccacaatcacccatataacatcatatcttttcttggtgcgaggcaatccagtaataaaatacataccaatctcttccac

SEQ ID NO: 77470 - DNA, 438 bp, Zea mays
  unsure (1)..(438): unsure at all n locations
tgcgacactacataatactcatgctggtgaaggctcttcatccctacatgtgctgagcggcgatgccacagtcatttcatgctagtcttagcaattaagcatgcatctagaccggcctcctcttttgcgagatcaactaaatagagtttaccgtctaatacacccttaaaagctaatgaaccatcacttcttctaaagacagacacatctacatttgtgaatagacagttatatcccatattacaaagatgactcacagacaacaagttatattcaagcgactcaactaagaacacattagaaatagagtgctcggatgaaatatgcaattttcctaaccctttcaccttgccttggttcccatcaccgaatatgattgaatcttggggatccttgttcttgacgtaggaagagaacatactcttctcccncgcatgt

SEQ ID NO: 77471 - DNA, 419 bp, Zea mays
  unsure (1)..(419): unsure at all n locations
atccttaagggaaaatgcttaatattattataacatgctttcataagtgcataatctgtcatgagcatcacacctatactatgacacaatgcactttactttctctatgatatagagttgntctcattaacctaatcatgtgcacttggcatttaaggccaaaaatatgtattcctctcaaggcacatatttatggggagaaatctatattatatagaactatgatcatgctgtaatgatatatctcttgatcatatctctttatgtctacgactaatgtgctttcagtgatctctatctaagtcgagattgaaagggaatggagcctcngcgaaacaaggcttcactaactcatcggtctattattcttcgcatcactcactctattctcacatagtatgatcttcactcgatattgt

SEQ ID NO: 77472 - DNA, 432 bp, Zea mays
  unsure (1)..(432): unsure at all n locations
ctcagctcgctcatgccttcttctttttctccatagcacgaactntactggtatatcatcccnacttaaaagaatgagggtagaactcttgaatcttgtggagttgaactccttgaagtaccacataacaagggtgttacgggtccttctgctgctgttgctgcttgagcacgctgcggagagatgactggcacacggttgattctgggagaaccttcttcttatcttctcttcactatcttcttttctcttctcacttttcacttttcactacctctttctttctctttgctcttcccactggaggattctatcgatgagtattaccatcatacagaggaggaaaccaaagactatgaaccatgtgcaacagtcttcaacccaagaatcaccacgcattgtgatcttatgggcgacggagtggaaatggag

SEQ ID NO: 77473 - DNA, 452 bp, Zea mays
  unsure (1)..(452): unsure at all n locations
gatatagntacgcctttttgtaagaaacaattatcaactatttgcatattctttaatataatatggttctttgtgatgcgtgaaatcttcgtacatatcgtttttgagccgtaggcgaaaaaaatattcccttcttttcatgcttcataaagaaagaaagaaaganataccacttctttgtcgaagcaacattgaatatctcatcgtggctgtggtataagaatgtcgttgatgaaggtacaatccctatataaaaacacctctgncanaggcatgtcttgtgttattggtacattctttcgtgataccttgccgaaggtattcctaacctcatgggttagccggtatgtntgaanggagcaattttcttctttttcactgcttctgctcgnatgaaaatgatgtatggtgcgatgttatgcaatatgatatgatgatatgatgcacatgat

SEQ ID NO: 77474 - DNA, 452 bp, Zea mays
  unsure (1)..(452): unsure at all n locations
ctaagctttcttatctataacctgactagaacatgcgatggcactctgttgtccatntgcttcggaagctgatcacaggatacttcgtatttttccgataagctaaattatagcaaccaaaattgtcatgttatccatcctttctatcctttgtctgatagtgcagatcatgaactctgcaaaagctgtgcgcaaacggttcaccgcctggcttctgagtgtccagatatatacactaaaccctactatagcgttaggggttagctggtgaaaatagattccaaaatacttcaatatctctgcaataatcccatgataggggaatcttaacccagcctttatgaagctcttaaaaataacaatttcatctttctccggctgtgaggtaggctctactcctccgaagcgtaatagctctttttgattgtcagataaatagcctgactttacca

SEQ ID NO: 77475 - DNA, 496 bp, Zea mays
  unsure (1)..(496): unsure at all n locations
ttcatgagaatatgagtacanagttgaatgtcagtacagcttatcatcctcagactgatggacagactgaaaggactaatcaagtattggaagatatgttgagagcatgtgcccttcatcatggaggaagttgggataaaagtctaccatatgctgagttctcatataataataggtatcaggccagtctgaagatgtcaccttttgaagctttatatgggaggaagtgcatgactcctttgtattgtgatcagactggagaaagacaattctntgggcctgaattgattcaagaagcagaagaacaagtccgtataattcgagagaattcgagggtggctcataccacgcaaaagagctacgcagataatataagaagaccactgtgaattgaagaaggagagtatgtgtatctcaaggtgtcaccacttcgtggaatgaggagantcataagtaatgggcacatagtgcnctcgcttcattggactattctgag

SEQ ID NO: 77476 - DNA, 363 bp, Zea mays
tcttgaccacctcaacgttcaccaagttggtgcagctaccaccgtctatgatggtatgtacacagtagtccttggcgatgaggaacatgttgaaaaggatgtggcgctgtctgttgtcgtcgtcactagccgtggtactcaaagctcgttgcacaatcaaggccttatatgtctcggtcgctattgtaccaagaacctcttcatcaacatcataaatctctgcaatggtagctccaacagtatcttcatcttcaacatcagaagcactaacatacccaccatcaccagtagcaatgtatgcccgtttgctggggcaatctcgctgaatatgaccaagtccctggcagcggtggcacttgatgt

SEQ ID NO: 77477 - DNA, 420 bp, Zea mays
  unsure (1)..(420): unsure at all n locations
tcctgtctgttcgtaacggtcgggaagtataagaagggtgccattctggcctgcttctgcataaaaacgtggtctgcgatcagctggagtactcatgcttattattgatagaatgggaattggatctcagttggatgctgngatcactgccttctagtccgtagtatttatttgttgaagagttgggacttgtataaagaaattagttgcagggttcatgctatatggtttgatctgcagttctgcaacattctctgatcgataaaacatttcttggtttcattgaatatattaagtcacgcaatgctgctgcaccatgaatgtatcatagatgtgaaccatggtggaacacattacagcacatattctagatttgtagagcaaccagagaccaaaggaaacacttcactgggcaggagc

SEQ ID NO: 77478 - DNA, 354 bp, Zea mays
  unsure (1)..(354): unsure at all n locations
tcaagctntacgtgcccactcgaagacaatanaagagcgaggaatgaagtttgtttattacaacaattgaagacgcctaacagcccgactgcttcgttttcacgcgcacgaaaccctagactagataaaaagatcccattttcctcaatttcccaacttccctcgccgcaatctctcgccgcctccagtccatagccaccgtgagatctgtccgatttcgccgcccggacccggggactccctcccctcctcgatccgttcgggcggtcggccgggctagcttcaagtgcggggatggtggtctacttcaaagcgcgggccgaggccggcgactataccatcttcatgggtctt

SEQ ID NO: 77479 - DNA, 379 bp, Zea mays
  unsure (1)..(379): unsure at all n locations
actaatattcagaagagcagtgtgtatccaattctatgtggncaggaagagctggtcacccttcatgattgacttccttgcgaactctcgtctttcccctgcaaataccttggtctgcctttgtctttaaaaaagctgtccaaaaatcagttgcagcccattattgacaaagtggctgatcaactntctgggtggaaagcgaatctcatgacaagagcacgcagaagagtgcaggttcagtatgtgatgaccggcatgcttatatatctagtcatggcagtcgacatacccacaggttcgctcanagctatcgacaagatcagaaaatgatttctctggcgtggaaggaaagaggtcagaggacactgtctagtggctt

SEQ ID NO: 77480 - DNA, 491 bp, Zea mays
  unsure (1)..(491): unsure at all n locations
tacatcacacagtggagtagggtattacgctccagcggtccgaaccactctaaaccctcgcgtgctctcgtgtgttgatccaccagtctcgtagcaagcaaaacccttaggtccctcctctctttatgatttaaggcgggtgcaatccgccacccggccggggagatttcctccccgacagtgaggtttgtccacctctcgcttggtctgaacctattccgattggaatccttgatgactangggcctggccggttgagtctgaactagtagaggtctagctagatggcactcgaccagngtcttgaatgcatttgctgattggactttgcccgatatagtttcggctgacatcattntgaccgatcttgcgtttcgtcgttgggtattcattggcggatatttgcaggtcacgctgctntagaaaatcacgaaaaatccgggtggtacacccaatgggtgtatacccattgaaaagtgtacattgtcatg

SEQ ID NO: 77481 - DNA, 394 bp, Zea mays
  unsure (1)..(394): unsure at all n locations
aactaagctgatcagtagctgcaagatattgagctaaggacatatggttgatattatnctgagaaatggagccggcaagctattgtttagaaagatgatcaagagcgaatggttaaagaccgatattgtgccaagatgctgagccatcaccatactggacaagctatttatcgatttcattcaccctgaagcactaatgtacagactgacacattttggggactaatgaaatgaatccagtatggcaaatggacctgtgactgcagggaacatatgaactgtggactacatattgcatccaccaaaaggaaattgattgattattggatacttgcagtaagatcacttttggtatatgacgtacaaactgcattttcctaagggaattatgtgt

SEQ ID NO: 77482 - DNA, 337 bp, Zea mays
  unsure (1)..(337): unsure at all n locations
gcccgatactatacctaagcaacaggagatattattgtttgcatcaccccaaacatagaataggtgagctatccttaattatactgttccgttgcgagaatctcaaagtggagtctctccccttcaacaaatatcatagtggaagcactatattaatgaagggaagctacacacacaaatccacagcaattcgcacacacacacaacctatacttgagctcanatgagtagcactaggttcaccactagaacgaagctcaaatcactaagaaagtcaaacgagtgcgcacagacggagagtgaatgattaagaatgctcatagtatgcttgtgtgac

SEQ ID NO: 77483 - DNA, 438 bp, Zea mays
  unsure (1)..(438): unsure at all n locations
tctggactaactnggcggcatcactctgtgctgttggccaatatataccagacttaaaaactctcccaaccagagttctggatgctgcatgtattccacattgtccagcgtcgatttcatccaatagctgcttcccagtagttgaggaaatgcacttcatgaggactcctgtcgcaccccttctatacagagcgccccctatgagggtgtagtgggccgactgtctcgcgatgcgttctgctacagccgtatcatctgggtcttctcattctttatgtacctgaggataagctctctccagtcattatggtccaattctggttggctcaaggtggtgcattcttctccctgatctgatggaatacttgggtgtgatactctcttggagaaaactaccggtgggacctacgcccgactggatctagctttgacaacgcg

SEQ ID NO: 77484 - DNA, 446 bp, Zea mays
  unsure (1)..(446): unsure at all n locations
catctaccagcacagcatctgcttaccatacctataacttggccgttcgcgtgctgggaactggatatgaatggacctttcaagaaagctcaaggaggatacacgcatgtactggttgctattgacaaattcactaagtggatagaattcaaacccattgcttctctaacttcagctaaggcagtggaattcatacaggacataatatntaggttcgggataccgaatagcatcataaccgagctgcgatccaatgtcacaagctcagagttcttctatttctgtgaacaaaaaagcattcagatcatatatgcctcggtggcgcacccaagagccaacaggcaagtagaaagagccaacggaatgatactggaagcactcagaaaanattcttcgacaagaatgaaaagttcgcatgaaagtggatcacagagttgtcgtattgt

SEQ ID NO: 77485 - DNA, 454 bp, Zea mays
  unsure (1)..(454): unsure at all n locations
taaggacatgctagtcaccagttntcaagggtttcagacgaagccagtcactgctcaggccttgttccagtgcactcatgaccatgaggagtaccttatggcatatgttcgaaggttcctacgcctgagagcacaagcgcctacagtgcccaatgaaatcatcattgaggccatgatcaaaggtcttcggccagggcctacggctcaatacttcgccacgaaaccncacatactctggagaagctgcttcagaaaatggatgagtacatccgggctgacaatgacttccgccaaagaagggaggaagcttacagattntctgagatgactaggggcttcggaggaagaatccaccctatgcatgtcagatcaatccacagctcaagccagaacgatgacaaaggaggccagtttcataagcctcaacacagctcacagtcttcatgacagcagc

SEQ ID NO: 77486 - DNA, 238 bp, Zea mays
ccctatacagcacccggcagataatagcctatcccctctggttatctgcataaccattggcgggacaccagcgtcaattactagtcggtgaggtctcgcggtcaaacccgacaattgggcccagtagggtcactggtgtggcatacttccgtgagttcagatgatatttagaacctttcgccggacctgctcgtttgagttcagttatgtcccgacgagtacagatggactctccgtg

SEQ ID NO: 77487 - DNA, 432 bp, Zea mays
  unsure (1)..(432): unsure at all n locations
actcagctcgcaacctactggtgttagacgcgtgcacagagccgtccacagactattggtgtgacggtgctcctacggtcggcaaggtcgatgcgttggcaccccaacacggtgatgcctagccaaccaccatcgcacgggaaacttcgcggagcgcttcacccacctaactccgccttcggtctatccaacctctagccacacccttatctcttttctctctcctgccggcagntttaatggtggccattcctagcacggtgtaaatcctccgggtatagacgaggaaaggcggcaaccggtttataccctggtgccaaggactccgcaacgcgccaatggaggaacgatccgcaggatacggtgagatatgttcatcccgcgctattctcgcggtgaagaagaccggacggctagatgggcccacatgca

SEQ ID NO: 77488 - DNA, 427 bp, Zea mays
  unsure (1)..(427): unsure at all n locations
tccgctacacgttacatgactgacgcatagagtatcaacatactactatattctgcatanggaagcaaagcctggcagtgaagaataccttgaacaccacacactcatgtacctcctatttctaaaccacctcgctctcaggcacataaacttggtctaatactaatggcctcctttgaataaacggggcaagagcagcttcttccatcaaagacataccaaacttaagcgatttagcttcattgtccaccaactccaactcgaaatcttcaaggtccgccaagtcttcttcagaaagcagaaatcacanattataggtgagttcttcaacatcagacatcttcacgaagacaagcaaaaagatctctcaataaaatctgataaaatctcaataaaagcctgtgtacgcgaacanctgattactgac

SEQ ID NO: 77489 - DNA, 184 bp, Zea mays
cacatctgcatctgaggcatgctctgactgtggagcagaacttccatttcactgcattttttgaatcacgacaccatgaatatatggtcaaattgctcaggtgtgcttggctacgctggttttgcaactctgaagattatctagttactaggctacatgagtggtcatgagtggctaacacagg

SEQ ID NO: 77490 - DNA, 242 bp, Zea mays
  unsure (1)..(242): unsure at all n locations
aactagctcttactcaacggacacctcatggggatgtagtgcaaacttccctgtattcatgtgtgcgcgctgctgatactctttggcagctgncttcttcaatatgatattattgacctcttttgttctttactatagccgaaacatttcacctgtcaacagtaacaaaacacccgtgcatcaagcttaagggcatttatcttctatactgtatgataaactcgcatggacatctcatttgg

SEQ ID NO: 77491 - DNA, 272 bp, Zea mays
  unsure (1)..(272): unsure at all n locations
cacatacttagcccatgtagtcttttataanataggccatacttcccacagttgcatagctgcaatcacttgtagctaagcagaaccgagttgattacatgcatgatcacacggatactggtgccatctgatgcggtcgtggtgagtgtccgttggtgggccaatggctgagacttgctcaagattgtggacatgccctgatgactgtctgctggtgatgcatgcaacattgtatcatgaccttcgtgtgctattggatgtcatgtactgtg

SEQ ID NO: 77492 - DNA, 248 bp, Zea mays
  unsure (1)..(248): unsure at all n locations
taaactatgcctgcctacctaacctttggccttacctatatgcctatggtgattcagtcttgcctttatcaaagtgttcatcaagtgatgagtacatagttatcacttcatgttgggattcatgtttggggaaattgggaaatgcaaagatcaaacaccatgtntaacttgaatatgtacaaccacattaccttgttctttgacatangtgttgcacagtaccacacaactgaagctcttagatctag

SEQ ID NO: 77493 - DNA, 299 bp, Zea mays
gctctggccttgacaggatggctgattcatcaattgcttgacgattgaagtattctttcgttttcgtgctctcaagcaactctagcatagtgtcttgcggatgcaccccctggtgccaccaccatgcttgccgcccgcgtcacttctgccggtgcacccgccacgttctgtgatacgccactccgctgacccatcagccactgatggctggtctgtctgcgccagccttgctagccttgtgtgccagccactcaacgccagctctacgttgtgctggactgattcacctgcgttctgtc

SEQ ID NO: 77494 - DNA, 286 bp, Zea mays
ctgtaactgacttatcaacattatacaacacctaacacaacaatcacgcgatctttactgctcaaatgggcttaatagcatattcttcagatgtcccaaaaacaggttgggtcttggacaccgacaggtcacatagtttatgtttctgagtatcattaatatcatctgactggacgtattacttccttttctgtgtgatatctctcaatgctaaaaccgatcagtcaagataaaatgcagctattcaacataacatatgaatgaattatcgttactgatcactatt

SEQ ID NO: 77495 - DNA, 190 bp, Zea mays
cctgttgtcggagggattcgacaagctagcactctcacacaaacccgcactcgcgcccaaggtttctccacgcgccatgccttgaaaacgaacgaaagtaacacctcctaatatcttggtatagttgaagagaatggtctttcactactccaagaatatatgtttgtttgaaatactgaccaagtgtata

SEQ ID NO: 77496 - DNA, 192 bp, Zea mays
  unsure (1)..(192): unsure at all n locations
gtcttttgctcacattaatccacatgtgataatggtcacaatgtgngcattgatggacanaccatgggtaacaccttgngatgttacanatagtagaacttctatgctatggttaagaataatttagtcgatgcctaattaacagtagacccatattataatgtggaacaccctagttcaccaaattaagta

SEQ ID NO: 77497 - DNA, 221 bp, Zea mays
tgacgatgcatccctcacatggcgcatctagatctgggaaaaagacacgtgggtacttctgatccacctgtctggcattagctaggggctgcgtgtctgtgtgtgtgatgacgcaagctacgtggttaatgctagctgctaaacattgccatgacatgggtggcgctggtgtgtgtgactctctgtacgtcgtctgtacaccttctcttgcctgtttgctt

SEQ ID NO: 77498 - DNA, 322 bp, Zea mays
  unsure (1)..(322): unsure at all n locations
gttaatattcttcaatttaactntcgatcacgccatctganntgttcggcctggtacttatngatgtgttctattgcttgcagtctagtcccttctatggtatcttttgttattnggcaatcaccttcatcttctgtcgaagctaanggtcttattgaacctgttcttgcttcttccggtgttatttgcttcgcaccaaatagaagcttaacggngtaaatcatgttgaccttgacacggcagtgttgtggtccacaccacctttattaatcatctggccacttttcttttngctggntgaagattgacttcattattcatg

SEQ ID NO: 77499 - DNA, 351 bp, Zea mays
taacacttctgcaggctgctacgtaggaactgcattatacaagtccctgtttgtgagtaagtgtaatcatcaaattgtcagtctcaggcttgtgctgcccatgaagactactaatcacactcgagatggaattcttctgtgactgattgatctatgagaatccagctcctgctatcttggccccttttgagtggtgtcatcgagatactcaattacttgatagctcatccttgtgaccacatcagaattccctcttatcgagccatttctgattacttaagcactgctaactgcatgctctcaacacatgtgttctgtcggctttcatgttataccagtaccttctctttg

SEQ ID NO: 77500 - DNA, 175 bp, Zea mays
  unsure (1)..(175): unsure at all n locations
tcaaatttatacacacatgctattcaatgtcgcaatcaactgatgtactattcactctacatatgctgacaaacaaactcttatgaagactanaacttttaacatctcattaatattgaccatgtacctactgttatattttctgatacatcagaatttttattcagcatcttat

SEQ ID NO: 77501 - DNA, 106 bp, Zea mays
  unsure (1)..(106): unsure at all n locations
tgttcatcctatggaactttggaatgttctcagagaactttttcgtgcttgtgtctcgttatatcactgacccgtctaactgnacagtagctgttagaccacgctg

SEQ ID NO: 77502 - DNA, 199 bp, Zea mays
  unsure (1)..(199): unsure at all n locations
actcttggcagcctgcgaattcttccttgccaaaaaccacttactagattttcggctgcatagataatcaaacaggtttagactacgctgactagagtgggtcatctttaataggactagcgcgactgctcaatgagacgcatatacttcactatgctgccctaccacgcgcgnaacacactctaatcatctctcaagt

SEQ ID NO: 77503 - DNA, 326 bp, Zea mays
  unsure (1)..(326): unsure at all n locations
acatgtgctaagctgcgatgccacagccagtctctgcatgtcttatccattaagcatgcatctagaccgcgctcttctatggcaatatcaactaaataaagtntgccgtctaatacacccttaagagctagtgaaccatcacttcttctaaagacagacacatctacatttgagataaacaagtatatcccatntgacataattgactgacagatagcatatcatatcctagactcttcactangaatacatntcgtatagaatgctcattagaaattgcaaatttacctatcccgtttaccttgccttgagtccatcaccgaata

SEQ ID NO: 77504 - DNA, 209 bp, Zea mays
ctctgtgaaccgatgctaacattcagcattgtgtaaatgggtctctttgcttgctctcaccaaataaatgcaatgatcctatctcacaaggactgctatactttactatttattgtaatacacattggtatgagacattattatatcagtcctaacatatggtctatctacttattgttttaagaggtatactaacattatataccctg

SEQ ID NO: 77505 - DNA, 143 bp, Zea mays
  unsure (1)..(143): unsure at all n locations
taagcttcttgcttgtatatagaatanntagtgtattgattgcacttccgctntattttgaagctatactctntaccagcaagaacttgagttntatactcnncgatatagtcatcttgttctaaccactaatcaaaggatct

SEQ ID NO: 77506 - DNA, 202 bp, Zea mays
  unsure (1)..(202): unsure at all n locations
atgttatccctatgatatgttcacgattctcttgggcagnattcaccggctatcgatatgtggagcatcggttgcatctatgcagagaatttgactaagaagcctttattccctggtaaaaatgtgggtcaccagttggatatgatgactgatctcctgcgtacaccatcagcagatactatntcacaggtatgggttatta

SEQ ID NO: 77507 - DNA, 180 bp, Zea mays
  unsure (1)..(180): unsure at all n locations
atgccgacgtgcgctccgctaatactatgtcacgtcctngcgtgcgactaagaccgcaactgacgttacgagggatgtgcaacatatacaaactgggattggaaaccatctcgatgtctcttactgcaatcgcttatttcgttacccaaacaccccaccccaagaattgtttcacctcgt

SEQ ID NO: 77508 - DNA, 244 bp, Zea mays
tgtacggggggatttgccgggctgcgttcgtcgaagccacttgactgggtccgaagatccggaagtggctgcgtttccggcgcggccgcgcaacccggtcccgctcttacccccagtacggaatgcgggtttctgacacatgacctctaattcaactgcgttctgcgtccttagatcacaatgtggggataggatgttgcctcacaaaattcattgcaatggggtatttaggtaagtgctttag

SEQ ID NO: 77509 - DNA, 195 bp, Zea mays
tatatatgttcacatatatactctagcatgacggagatataatgggatatatataccctcataaatcatggatactatttgtaaggacgttggtatttgtacagcattcatgcatcagaaactactaataagcaaaatgaagaagtaatctatgtagattttgcattgcattccctcaaccaagcaagcatccag

SEQ ID NO: 77510 - DNA, 162 bp, Zea mays
  unsure (1)..(162): unsure at all n locations
accacatcatctacataagcttgcacacgcctgccccagtgatcggctaagcatgttngaatagctctctggtaagtcgctccagcgttnttgaggccgaacggcatggaggtatagcagaaagcaccgaacggagtgatgaacgctgctttttcctcgtct

SEQ ID NO: 77511 - DNA, 260 bp, Zea mays
ctctcttgggaaggccctggacatcctcttttatagatacaaggagatgatccagctgtacatatggtggtgtagctgtgcactaacatggcaggcggagaagtgcttgagccctgtagaagcgtatctggcgttgcggccccgggtcctcctgacgtttctttgccttcgtagagagttgagaacaaccgacgtcatggacgcatgcagggaaccatcattacctattgcctgagtaatctatattggaacaccggcat

SEQ ID NO: 77512 - DNA, 322 bp, Zea mays
  unsure (1)..(322): unsure at all n locations
cacctctacagaaaacatgggttaattcattgaactagctgcataaccaanactggtcatacagtcccaaacaacaagcaataaatntattcaggttctatactcttctaagaataagcgttcatcgaaggactaataactntatgttcttcattacgagacacttatatccaacataaggatagaagcaatatgctaactttttaaatcattntaagcctgatctcacatcatgcangcaagaatcgatntaaccatactatgcctgcccataatccatncaagcacattctatacattatatcatgccatcgaagaactc

SEQ ID NO: 77513 - DNA, 296 bp, Zea mays
cactacttgcatagaatcacaattgtgcatgtaactcataactaggatatactctttaaacgtacatcatatgagaataacatgagcctttgctatgaatcaaagcaatgtactagatttcaaatactaaataaaggcagggttacaattactaccttgatacttattcatcaaagatgcttggactattttatagagaactttcctgttgtggccggcattcatgcttactacaacaatagctctgacaaatggctcatacccctgcaacattgttgctccattgaattcattta

SEQ ID NO: 77514 - DNA, 268 bp, Zea mays
gattatgtcatacctagtgcctaaatgctatcacacaatctgcaactattagcatatcatctctgagactaatgtatactaacaccttggggacaagagatgatgccttgggagaggcctaactgaagaacctgaacgttgcatgtctacttcactgatggagataatgttcttagtgcaacacagttgtctaggattgcagtcaatgtatctgcgaaaatcaagcgttggatatgcgttactgtgatcaaagttacggccatgtcat

SEQ ID NO: 77515 - DNA, 279 bp, Zea mays
gcaccattgcttctggtatatggtttcaatataatctatactcaccactcttgctatgttatttactgggaaattacttaactttatactgtttatgaaattccacaatatgacccttttaaggctaacactgacaattcagcatagtgatatgtctatgcgcgctgctgacattcttatcaccctgctaacctcaacacgcacctcattctaaagttatgcgtacatcgacggcaatctactgtagtgtgttagcataatgtatctatatgatgtcac

SEQ ID NO: 77516 - DNA, 388 bp, Zea mays
tcactgctcagctttctttctctacagacctatgatattccacttaagatgagtaaactctgatctgggattgaactctgaatcccatacatggggtaaatgcctcttctgtgtgctgttgagccgctgtgataatgactgcacacgttgatttggaaaccttttctcatctcttacataatttctgtactttcactttactgcgttttcttctctttgtcttccactgaagatctattgatagtataccatcatacaaggatgtaccgagactataaccatgtcaacttcttcacccagaataccaacatgtatctaggtgagagggaatgagtcttcgattgcaaagattattgacgtcttgacactggattatgactgtgtggtt

SEQ ID NO: 77517 - DNA, 327 bp, Zea mays
  unsure (1)..(327): unsure at all n locations
acaatctcgacataagagatatgcagactaacgacgacaacccctatactttcaagttgaagattatgtntacctgaaagtatcgccaatgaagggtgtatctcatttcggtgtaaagggaaagcttgcacnccggtacattggtccgttccccattcttgaacaatgtggaccagtagcataccgaccccaactacnncaaacattgtctgcagtgacaatgtgttcacgtgtccaattgaagaagtgcttcnggttcagatcgacccattagtgcagatgtaccttggaccagactacatatcagacatctattgagtctgatca

SEQ ID NO: 77518 - DNA, 209 bp, Zea mays
tgtgatttgctttgagtgaaaatagctactgcttaaaatttgcgacagcggtggacgcttaacaattttttttaaattcctcaaatgagataacttggatgcagttggaccgctttgagacttgtatttatggatgctttgaatccgtgatgagcagctatggttatacagtggcgttggcattatggtggtgatagttatgatgcact

SEQ ID NO: 77519 - DNA, 227 bp, Zea mays
  unsure (1)..(227): unsure at all n locations
cagtgagtatcctaaccatgtctataagctctctaaggcactntatggactcaagcangccccaagagcatggtatgaatgccttagagaattccttattgctaatggcttcaaagtcngaaaagccgatcctacactctntactataactcttgaanatgaacttgttgtatgccanatttatgttgatgatattatatttgggtctactaacgagcctacatgtg

SEQ ID NO: 77520 - DNA, 184 bp, Zea mays
  unsure (1)..(184): unsure at all n locations
cttaactactacgcttgcgctgcacctgtgcaagtgtggggtgccatgcacttgcgatgcgcgatactccgctggagtgtgcgaagtatgcggcatggccctggagtttngccgcgtccgcgctgacgcatcccgctcctgatgcgtccacgctaccgggagccgcacctgtcctcttcctgta

SEQ ID NO: 77521 - DNA, 402 bp, Zea mays
  unsure (1)..(402): unsure at all n locations
ctcagctactagacgacacgnaccagtgcacgttcgagggatatcattacacattctgctttggtgcctgatagtcactatgcaatcttcttccacgacgtgaatgaggtatcacacgtattcatcgctacatgggccacgaccagtcacaacccttatgggatgcgattacatgtacctggcaacgacagctccaccacatggcgataattgccgactgccatgtcagaccgtcgacgtgacgcgaccgtcggccacactaccgatccatttaaagcaataccaacctccccagccgccatgctgcaacctaataccttcgaccgtgcttgcgcaacatcaattatgcgacgccgcactgccgcatcgtccgaccgacgcccgtttacgacgcaccaagtt

SEQ ID NO: 77522 - DNA, 289 bp, Zea mays
  unsure (1)..(289): unsure at all n locations
acagcttagttagctttactcttaatctacttgtatgcantgtggtcttgaatatcatgaggactgactaangagagattcacactctatcactatgaaaccctagtcatgcaaatgcaattcaccattgctatttcttaaaatattacctatgaaaatttgaaagtatangtgcatactgcccacagatatttggtatatagtggattgttggtgaatattaaaatcaatttcatctccttgctgctacgacatcgttgacaacctcatgcatgcgtcgcgtgctcct

SEQ ID NO: 77523 - DNA, 189 bp, Zea mays
  unsure (1)..(189): unsure at all n locations
ctatgtctggtgctgatgagtcacattgcctgatggccntctcaaaagtgtttccaatgatggtaaaccacttatgatgatcctgtgcgccctttgtcatatctcccatagtgtgatgaccactgctgcatgcctctgcagtctgcgctggtctctcatcttattactatgacggctctcagcataagc

SEQ ID NO: 77524 - DNA, 143 bp, Zea mays
ccatcattcacacaagaacatcatgacgaccgacaggccacttgagctactccacatggatctattcggcacgattgcttacataagcatcggcgggagtaaagacttgcttgtaatagtggatgattattatcgcttcactt

SEQ ID NO: 77525 - DNA, 371 bp, Zea mays
  unsure (1)..(371): unsure at all n locations
taggccttaactcgtagtcgcgctctagggcgcgaataatgtttaacgacaccttgccggcggtattctttgcttccgcgtcgagaaagcgagcgcgaataagaacgcgcgcagctcgtgcccgccatgctcacgcgccaggatctggactccgccgccgagcctgcggccagacagccgggcgcttggaatctgcgcatgggcgtccagagccggccgcgagcttgtctgtccacgcatgcgcagccgaccgtgcgctgttacgtatcgcggtaaggagattaattttagataattgggtgtagatatttgggggtaganatgttggttgatggcacgctgagtatatgcataatagctgttagtattat

SEQ ID NO: 77526 - DNA, 367 bp, Zea mays
  unsure (1)..(367): unsure at all n locations
actccaacaagcttctcaagtaaggggcaatagggatttctgatattcanatnntctgaattcagcccttgagccaaacaccgagcgtgttcaccttgatcccaagctcaaatcctaatgaccccattgacaaaaatgtgcctaactaacccctctacctcatatcacaagatggcatcgggacacgtgctctggacacgctaaacccgggatcttctctctatgcgcggcagtgagacaaacccgcattcttccctctctatctcttgatctagtcagcacaacctgcaagcctccacacacaaatgacacaggaatgtcatgtgagaagactctcaccgggtaatgctataatctcacagattgg

SEQ ID NO: 77527 - DNA, 230 bp, Zea mays
  unsure (1)..(230): unsure at all n locations
tctgctagatgagtgctgcacttaccgctgagtgcanagctgccacatataacaacagaggagcccctggcatcggtggagatagtgttgataggtctatcaaatattgcttcagctcttcgaacgctctctgctgaactggtccccattgaacaacttccgctgacttcagcacttctaanaatggtaaatntctctctgctgatctagatataaatctattgagagat

SEQ ID NO: 77528 - DNA, 478 bp, Zea mays
  unsure (1)..(478): unsure at all n locations
agaatttntcacgggtcaagctcgttacgacaaacgatctagcgccgcgaaggtgctactggtgggccatgcttcngtgcgccgaacgtcttgcgcgaagaagcagcttctgctgatatcgtcacaggaaatggccgaaggttcctttctatagagcttcggcgttacaaaccgacataaagatagaatgacctctttatccatagaggtctaagataatgttgtaaacttttgtaaagggcataattgtaattcgtcacaggctgcgtcctgtgtctataaatagaatgaacagacccccgtactggtcacgcgaacctgtcatttggcttcgcatcacacttgtattcttcagaccgaaagtcctttgaatttgagtcatctacattcgtataatatagaatgggatgatttatgatatatttaatattccatatctctgattatataatgcttcgtctcgtgcatgctacgaaga

SEQ ID NO: 77529 - DNA, 257 bp, Zea mays
  unsure (1)..(257): unsure at all n locations
gatgccaggcgtctnccattatatagcatacttctagcanatntaaatgtttcattctctaagntatgctcggcaattnctgcatctaataatgctatgtgatcattctgntgtttaatcaaagtcatgtgatcatgaatagcattaatatcaacatctctacatctagcacaaatggaaacatgctcaacactagatgtagagggtttgcaagattttaattctacaaccttagcatgcaatattttcattttact

SEQ ID NO: 77530 - DNA, 339 bp, Zea mays
  unsure (1)..(339): unsure at all n locations
ctcagcttttactgaactctctgtttcactgaattctanacaaaacattactcttgtacttttgtttattaaaacttctgtgtctgtcaggcaagtcatgtttatgttgccctatagaatgtcttgcacttgtaactatggttccgtttgccctggacaatacaactatgagttacatgctacattaaatggctcacgtgtgttgaattctacaatcaacgcatttatattnntgtccttaaattaatttattataaaaatacatttcagttccactgctatggctagagcttctactatggcttctgctatggctggagcttttacgtacaggggagc

SEQ ID NO: 77531 - DNA, 382 bp, Zea mays
  unsure (1)..(382): unsure at all n locations
ctaagctttgcgcgttggcccacctggcagcgaaacaggcaagcgaacgcgcatggattcactatctaatggccccacgagccactgtatcacgatggcgcgtgcgagcggncactgtgcatgtggacccaccagtccgcgccaaatcaccagatgggctgtgcaaaggatatccaagtggcccagcgagggtgatagtgtggcgcgccaatagaaatgagaccatgcgatgctttcccacttttctttctctttttaatatttctttttgcctctttcatttgaatctcacaattgaatatgaatcttgttatgagcttcacctttgagtcaatatacaaatctannacctagcgtacgaanatatatctctatttactta

SEQ ID NO: 77532 - DNA, 246 bp, Zea mays
  unsure (1)..(246): unsure at all n locations
gcttctacacggagaacacatcttaggactaaccaatgttcattctgagaaagatcaggttgtatcgcatgccaagcatgagagcaagtgggtgcncatcatccacacaagaacatcatgacgaccgacaggccacttgagctcctacacatggacctattcggcccgatcgcttacataagcatcggcggaagtaagtactgtcttggcattgtggatgattattctcgcttcactcgggtattc

SEQ ID NO: 77533 - DNA, 309 bp, Zea mays
  unsure (1)..(309): unsure at all n locations
ntntgngctgtatctgatagtgatatgggagaagtggtcaagtcgacctaataagatgatggaacatgtcatatgtacctgactaggtggagagacgaacacaagcgaagcagcaaggcatgaaaaataacttcttggactacatagtccatgtttgttcagctggcgtttcttcattctagagagcancctgacccattttctgtcccggcggtgcttgcatctatctcctgctcaagccgaaacccaacagactacagtgtggaaactgggactcacctaaacaccgcttgagattctaacagcatc

SEQ ID NO: 77534 - DNA, 314 bp, Zea mays
  unsure (1)..(314): unsure at all n locations
ccgacttaaagtanaatgaccttttagtccatacatggtcgagtctgttgtgtatactcttatgaaggacataattgtaattcctcacaggctgtgtcccgtgcctataaatagtgaacattattcctntactggtcacgctntcctgtaattgcaatcgcgtcaatcgggaattaatctttgtcaaggcagaggtataaatgtatttaatatttggacacattgaatggagataatataaaagtgatgttgttcatctataatctatctggctntaatgtttcgcatttcgattatcttatataatctattag

SEQ ID NO: 77535 - DNA, 174 bp, Zea mays
gaaggtgactatcagagacgaagcatatctttgatttaggccagaaggaaaagaagtcacactacggcaagtggaaaggactgagaggaatatgtaaacttgccggatgaagggggaaatggcatcacggcgaacctattgagtttgtcttctcctaatcggtgacccttcctg

SEQ ID NO: 77536 - DNA, 351 bp, Zea mays
  unsure (1)..(351): unsure at all n locations
acactctaattatatgtcttaacatattntaaaactttntaaaacacaattacgagatccggccgacatcgatgcataacgtgaatgcattcaacattaaatntatgatgtatctcgtattatatttggttgcagaaatccttttaaacacatttggagactaattagattggtttgagatattggtttcataaaataggatatatattataagatggtagagatatctctataagctgtaaatattttatttccgatttatgtgtcccaatatatctctagntttttttaaacaaatcctagaatgttagacaccttcttcatggttngtaaccttatcgagcatttaca

SEQ ID NO: 77537 - DNA, 348 bp, Zea mays
aaatgaattgtgaatggattagagattagtaacagtgtttacactggtagctctaatattctataaagaatgagcacaagttgttagaatctataaacacactcattggaaattagatggtataaactcttttgtatctttctgattgggattcacttgttcatcttatttctatgttctgaccttggtgctggtctgctctatttggaaacaagggggctgtcgtggctatgtcgttctaaaaacgacattctcttccttacatttgtgcactcggtaacaagctaaacttattcctgctttgaggtataactgactcaaaattaactttttcggtttgtatcaaat

SEQ ID NO: 77538 - DNA, 301 bp, Zea mays
  unsure (1)..(301): unsure at all n locations
ctttatcaattacaccacccatgccactatgtntgtctatatcacaccagtcaccagcgcactaacctagtatgtgtttcaagataattcaatgtgaaatgattgtccatgcacctgttaaatagcatgattcaaccatttctcttttttcaaagcacttgattgagggtagaaaatgaaaatgttgtaataactactctctcaatgaacaaacatggtgagacattctctccaggttatggacaaacatagtgaaaccgagagagtgttacaaagaacaaataaagtaggtctgtcgata

SEQ ID NO: 77539 - DNA, 394 bp, Zea mays
  unsure (1)..(394): unsure at all n locations
tggtattactggtagatgccaacaaacatgacccttatgacagaacccactcctagcttataagtgtagtgcanagtgacccccattgcccaactntgttatttttgtccaagcatactctcttattctggacctcatattcataagacagactacactgaccaatagttatccactgtaatttttgcaaaatttttgtaaaggttaaagcactgttgtagttcacacccacactagaactcttaattataaaatgaaaaaggggaaaatgataatggaaacttgtgtcaccctaacccaactagcaaaaccctctttaatttgcccactgagatatgtaagggagaaatacaaattcactatgctgattcttcacaacacctacacctagagt

SEQ ID NO: 77540 - DNA, 207 bp, Zea mays
  unsure (1)..(207): unsure at all n locations
tctcctgacaagtgctgcacttaccgctgagtgcgaagctgccacatatatcaacagaggagcccctggcgttggtgggagtagtggtgntaggtctatcacatattgcttcagctcttctaaggctttctgctgaactggtccccactgaaaaacttctgctgacttcagcactctcaaaaatgggaaaattctctctgctgatct

SEQ ID NO: 77541 - DNA, 141 bp, Zea mays
gcatactacgagcaacttaattttattttcagttatgctcgcaatttacatctattactattgacattgtgtgttaattaaaacatgtgacatgaatagataatataacatcttacatctagtgccatagctagtgacatg

SEQ ID NO: 77542 - DNA, 418 bp, Zea mays
  unsure (1)..(418): unsure at all n locations
tcagccccatctatgttatggatcgctcttgaatcagtccagtttccttcggcccttctggcagcttcctgacttccatgaatagcgatgggtccttgatccgaacgtatcttcatgcanagataggcaggatgaagaattgcttcgaaagcattgatggtgccacgaccaataattgcattgtaagggtattccatgtcaacaatgtcaaacacaacttgctcagttctagtgttgttgatgaacccgaaggtcactgacatggtgatcttgcctagtgctacaatctgtctttcctccgaagccacagagaggatgtgtagcatcatgaatcttatcttctggctcttgcatttgtctgaaggcctancanatatgatatcagctgcactgcctgtgtcaaccaagacattgtgga

SEQ ID NO: 77543 - DNA, 318 bp, Zea mays
gttatcgaacaatgatactatattcaattggtcttcaaaatgtaatgaatcttttgaacaattgaacgtattattaaccactgctccggtatagactcaaccggatatcaataagccctttgatgtgtattgtgacgcatccggcagtggtctcggctgtgtgttaatgcacgaacgccgagtcatcgcgtatgcttcaacgcagctgcgccgacatgaagagcattatcccactcatgacctggagctatctgcagctggtcatgccctgaagatctggcatcattatctgctgagtaatatctgtcacatctatac

SEQ ID NO: 77544 - DNA, 440 bp, Zea mays
  unsure (1)..(440): unsure at all n locations
tcttctcacctgacagagtggtggaccgtactgngagcttccattatgaagganggactcatggacagcaaacatgaagctagcanacaagaacctttcttcaccaaacgcaacactgcaccgtctcataagttcttccgaaggcaanggctggacaaggtggaccttgtggcactatcaggaagccacaccattggaagtgccagatgcgtgagtttcaagcaacggctctacaaccagcacagagataacagaccggacagcacgctagagacgagtttctaccacacgttggcgtcngcgtgcccacgcgccggtggcgacggcgagatacgggcactggatctcgtcagcccttcgcgaattgacaacagctattataagctggtactggaggggaaagggcttctcaattcggacgaagttctgtggacaggaag

SEQ ID NO: 77545 - DNA, 253 bp, Zea mays
  unsure (1)..(253): unsure at all n locations
ctctcctcngnggagatattgcacgtacggggtctgcctttttctatatgcgtgaccccgctctgctcctactcaacgcgcagtgcctctggccgatccgagggtgcctctggctgagccgaggctttatcaggttcgggcgcgtcgtcggtcttgacagagggttgatgcacgtctctggagaatacattcgggggaaccgctgtcttgccccacgctatcttattcagcttgtgcgcagtctcgttgtatc

SEQ ID NO: 77546 - DNA, 309 bp, Zea mays
  unsure (1)..(309): unsure at all n locations
tctaangggagaacacgtgataagtgtgactaacgtacaattcgcaaaagatagaccttgtgcagctcgtcaagcaggtgaacaagtgggaggagcacatcacagcaagaatgtgatgaccacttcaagacccctggagctgctgcatatggacctcttcngacccgtcgcctatctgagcatangagggagtaagtatggtctacttattggtgatgactcttcccgcttcacttgggtgttctttttgcaggataagtctaaaacccaagggaccctcaagcgcttcctcacgagagctcaaaatga

SEQ ID NO: 77547 - DNA, 410 bp, Zea mays
  unsure (1)..(410): unsure at all n locations
ctctgcgggactccatttcctttctatgagactactgcatataatggacttgaagaaggatactctcaagattagatatagagaacctcccctgtaagtggcatacaagtttngaatacttatatgagacatggactctgatttgatatcaagaggggcaaattatctgggcacatataagttaaattataccaattgaaacacaattgaagtattataccacttgtagtatatgtcatatgacaatatcaattgatgtatcattttcttatgaatgttaagtaagctatgtgccgcgcttagatagacatcttataccatgtatgtgtgctcaagaataccaattgcaagcgagcaatcctatcatatgagtaacctcagatgcttgcggttatgagcaaaagtaatac

SEQ ID NO: 77548 - DNA, 289 bp, Zea mays
  unsure (1)..(289): unsure at all n locations
tacagcagctcacagaacctatgtatacngcccagnccttgttatgccctatcttcactcttaaccatctaataagcttatgccagtgacgtgtggatgcaatggatagacccatatcgaccgtcttactacaaagaaaatcttgctctttataggaaaagaaatggagctagggtcaagttccagaggggtgctcaaacagcctcacactacaccatcacgtgggagctccttcacttctgtgtgaagggcatgtcttactatagatagtangtcagcttaatcactt

SEQ ID NO: 77549 - DNA, 432 bp, Zea mays
  unsure (1)..(432): unsure at all n locations
tgccttcgcttcagtctatcatccgcagtccaacggggtcgtggagcgcgccaatgggattatattcacagctgtcanaaagatgctcctcgatgaaagaaaaggcagggtggaccgattattaccagaggcagtctgggcgctaaacacaaccgagtgcagagcgaccgggttcactcctttccgccttctatacggatcggaggcaatgaccccgcaagaaataaagcatgggtccccgcgtacagttccgtcagccgtccccgacgtggatgagccaacttcaaaagatctcattgacggagaccgggtcttcgccctacaggccctaaacaaatatcaggcccagaccanagcatggcgcgaccgcgcagtcatcccgagggagttcagcgagggggacctcgtactcatncgaacagctcggacgga

SEQ ID NO: 77550 - DNA, 456 bp, Zea mays
  unsure (1)..(456): unsure at all n locations
gtgccgccgtgccagatgctgngttgaggtcgtcccgtgcctcgtcgaccttagagcatgatctctatggtcgggataatgactcggaccgtcctgatcctgtggaaacagctgaaggcccgtcgaccttagaggtggtcacggcagagagcttggatcctttgaatagtgctgacacgtgcccagcccccgagggtgtcgccggcgaggactcaactcangcgaggagtgtangccactacccaccccccgagggtgttgccggnggtgacccggctcaagtggtcagtgccaaccttgacccacccccgacggtgtcgagcgggtctcctcctgcacttcatggatgtcatgtgggtcacctcccactcttgcggatgatggcgctcgactccgacacgggtcctttgatggcacatccactggctggagtaactctctgatgtctgacttgtc

SEQ ID NO: 77551 - DNA, 323 bp, Zea mays
  unsure (1)..(323): unsure at all n locations
ggtgaagggtcttcatccncacatgtgctaagcggcgatgccacagccagcccatgctattcttagctattaagcatgcatctagaccggccctcttcttttgcaaaatcaactaaataaagttgccgtctaatacacccttaaaagctagtgaaccatcacttcttctaaagacagacacatctacatttgtaaatagacagttataccccatgttgcataattgactaacagatagcaaattataaccaagagactctactaanaacacattagatatagagtgctcattangaaatggcaatttacctagcccttttacc

SEQ ID NO: 77552 - DNA, 265 bp, Zea mays
  unsure (1)..(265): unsure at all n locations
gctctgcatattcacgaattatcatatgaaacanaaccttggtgtaggaacagtaccattataatttcngctgctacagtttcgtttcccggcccgggtcaagctgccccgtgccaacttttctgaagagatggcccggcgactggacaacagaatggttttatgtgaaaaatgatctgtcagctcgagaagatatcaaaggtgtaattatgcgccctatttggcaaagcttctgccttctgaggccgaaggttgaaatgaatga

SEQ ID NO: 77553 - DNA, 308 bp, Zea mays
  unsure (1)..(308): unsure at all n locations
ctcagcttagtcagctgtgcggggtggggagcggagcacgaaggtggctggcaagcttctcatcactgtctgtggtgaacatggaggtgaaggtgaacgcctggacctctgatgcatatgccgagctgtatactatcaacaccaaagtcaagtgggtcacggggcttctgttgggcaccgagacggaactgtggccagcattcctcgacactccagcacgacctctgtcgctgaagatcgcagttgtgacacctcaccgncttcgcctgtcttaagagatgatacaccccctcccacacacacacaca

SEQ ID NO: 77554 - DNA, 475 bp, Zea mays
  unsure (1)..(475): unsure at all n locations
cagctaatagatctaccttatctntaaagatactatattactttagtagactcatcttatctttgaaagactctatctcaccttaatagatctaactgacctcaaaagaatctgccttatgtgtatggatccatcttatcctaataagcatacttattcacccaagtttaacaaccatgatctaatgccaattaattagatcttatctggtcaaactagtcataccaatctaatctagatcccatctaatctaatatgatctaatctcatgtggtctacttaaacatattagtgatactggtagaagagattaaacactactagccagggtttaactttacttcgcacattagacaacctctaccatgtcatangatctacctatccatagagtttgatgattgataataattatctcccctacctcaacgaacttcgactacataattaccatattatttaccatactcgaact

SEQ ID NO: 77555 - DNA, 288 bp, Zea mays
  unsure (1)..(288): unsure at all n locations
tgacattgcctccctattggaagccaatgccatccttaatgccagggcgtctncctctatatagcatactacgagcacaattaaatatttcattttcaagttcatgctcggcagatttagcatctagtttagctatatgatcattctgttgtttaattaaaatcatgtgatcatgaatagcattaatatcaacatctctacatctagtgcaaatagctagtgacatgctcactggtagatgtatagggtttgcaagaattaagttcaataatcttagtatgcaatata

SEQ ID NO: 77556 - DNA, 312 bp, Zea mays
  unsure (1)..(312): unsure at all n locations
ttaatgattaaagccatctcctcattgtcgagcttggaggcgtcaatngagtgtctacttggtgtatactcctccttcttttcctccgtcgccttgaagaccaccggttgcgcctctgacgtggagggttcgtcaagctcgttaatcttcttggagcccttgatcatacattcaaagctcacaaaattcccgataactctctcggcggtcatctgagtatatctaggattaccacgaattaatngaacttgagtgtgggtaagaaaaatgagtgatctaagaataaccttaaccacctcgtggtcatccatt

SEQ ID NO: 77557 - DNA, 434 bp, Zea mays
  unsure (1)..(434): unsure at all n locations
ggtagaagaaagcaatgattagggccgggacggtgctaagggttcagagaagcaagatgtttgtatcttactcatcatgcaaccatcggacctagcaagccgagaccagagcagctccacctcggccttagcagccctcggcgctgcacanaggaccctatggctctctcgagaggccaaggagggaggnggccactgctccgaccatcatgaaccaacagacaacccctcgacaaacctcatatgaagatgcgattgagacacaaaaacccgcatgggatgatgggcaaatacctaccaacccacactaaatagaagcatgatgtgttcaaagacggcgcacctcgcgaagaggcagccaccacgactgctcgaaagacgaggagacgacaaacacgcgaaccgagaaaagagaagccccgganggagatgct

SEQ ID NO: 77558 - DNA, 212 bp, Zea mays
  unsure (1)..(212): unsure at all n locations
gttaatttcatcgacggtcctcacccaccatattattaatcatacataaacttaattttagccataacatacaagagtataacatatttaaactatatgcacgcggtagccaatcaagttaattaacctaactacctacgacattattngagttaactctcggaagttagcacattgaactanaaataaaaaatataacacggtacttgaca

SEQ ID NO: 77559 - DNA, 419 bp, Zea mays
  unsure (1)..(419): unsure at all n locations
ttcttcgagggattntctgttaagaatattccaagaggcgaaaatgagcatgctgatctattatccatgtcagcggcacatgggccttctgtaccttcggaagtantttttgagacaataagagcaccttcggttgaactccttgaaagagcagtgctcacaatttctcatgtccatagtgaagaatggaggactgagattatatctntcctccagggtaactgtctctcggatgatgagggttataacaaaagaatggaagccagaacaagaccatatgtcgtaatagaaggggaattatataaacatcggagttgctccccacttctcaaatgcttatccagaaccganggtatagaactgatgaaggagatacatgcaggattgtgtggatcccacattgggtccagaccttctct

SEQ ID NO: 77560 - DNA, 362 bp, Zea mays
tcatgcaactgctgccaaaaatgagaggtgaactgactgcctctatttgatactatcttctttggaacgccatgcacacacacaatccgagacatgtatagttcggccaacactgcactgttgtatgtggtcttgactggtatgaaattggtcgcctttgtcaaacggtccactactacccagatggagtcataactagtacgagtgtgagggcaaccaactataaagtgcatcctgatctcatcccaattccactgaggaatctacaatgtgtgcaacaaacctacaagcctctgatgttctgctttaatcctctaataattggcacatatagccacatactctactatactcccttttat

SEQ ID NO: 77561 - DNA, 234 bp, Zea mays
  unsure (1)..(234): unsure at all n locations
tttaccttatattgcttcgncgggacaggaagacgatgccgaaggtcaatantcccacacacgtttcgaagattgttgaagctgctgcataaagcttataaagacttgtattatctttgtgagagacattgttatngggaattgaacattactttgtatatttgtccatacctctgaatatatatataccttttcattcatgcatgaattgctgtgctgtggacgaaacttata

SEQ ID NO: 77562 - DNA, 243 bp, Zea mays
  unsure (1)..(243): unsure at all n locations
ttgtatgcaccccgacacncgntntcggaatgtgtgacgtgcggcaacgatattgcgctattncactccacacatgattgtggacctacagtagtggattgtgcatgttcgctgcgaacaacaaacaaatggtttccgtggcgataactcttgctctgtatgcacccccgacacccgtcttcggaatgggtgacgtgcggctacgaaatagcgctaaaccaccccacacatgagttttggacc

SEQ ID NO: 77563 - DNA, 307 bp, Zea mays
  unsure (1)..(307): unsure at all n locations
atgacggatcgtcctacttagtacatcgcacgcaaagacatatatgcgatataaacacgttgaacagtaagaatggcattcacacagcagatgtgattcggtatggctagctgtcacacggtgatccccatctgcaataatctgtgcatcacgatgagctgcatgtncgtgatatagatatgccatcctgcaggcgatgagtccttcaagacctatctaacgtatgctggtaaacacaatacatatacgctctggatcatcacatgttgacgcgcaggtcattacattacatatggacaatacatgt

SEQ ID NO: 77564 - DNA, 393 bp, Zea mays
  unsure (1)..(393): unsure at all n locations
tctaatcctctccaagtcccacaattaagacaagtgatcaatagtgattagtaaccttgttagcgtgatattgtgtttcatttgctgcttggtgtgctctcttaatctcttcctanacttcctaagtgacttgtaaagctagcaagagactcctaagtgtgtggtgatccttgcacggtctctgtgacccttgagattaagaagaagcactcaaccggtctaggtgaccgattgagagagggaaacatatgataaagacatggactttgtggcctcctcaacaaggagtaggttcattagaaccgacctcgggaaacaaatcaccgngttcttttgtgtcgatcatcaccattccgattnggttcttccctcctccctctctctaaaggtctc

SEQ ID NO: 77565 - DNA, 460 bp, Zea mays
  unsure (1)..(460): unsure at all n locations
tactcagcttgattatggattgatattgcctatcactggacattaagagatcgatggtatatggtgattcactggtggtcataagtcagatcaataaagaatgggattgctcgaatgactctatgggcacatactgcacagtagtctgaaaactagaagacaaatttgaagggttggaatttcatcatgtggagagagatcgcaacgcgacagcagacgcgttgtcgaaactaggatccagtcggacccaggtcccgcttgtggttttcgtccaagaagtaccacgctcaagtattttcttatatcgggcagaagagtgcaatgttctgagcctgcgagagtcagaatctaatgactggangggagccatcatcagatatataaagaatgaagaggagcccgatgacaaagctgcagcagaacacattgcaaggcagtcagctcactacactcttattgg

SEQ ID NO: 77566 - DNA, 319 bp, Zea mays
  unsure (1)..(319): unsure at all n locations
ttatntacataacannaacataaagactgctactcttatacacaacgattcataaaaaaccacttcttcgaaacctttcttttacataacgaatcataacaaaccatttatccgaaactnttctctgtgccgaagcaaccatttaggaacacaaatgctatgaatgaatgcttatgcatgcaaatgccatgatgtaatgtgcaaatgaatgtccgaagcgtatgtccgaagccacactcatccatcattttcttatgagcaaacacacgtcagctctgcattcccttatgaacgactntggagcatctttgccttttac

SEQ ID NO: 77567 - DNA, 279 bp, Zea mays
  unsure (1)..(279): unsure at all n locations
cgtgcaattcgaaaaagatagaccttgtgcagcttgtcaagcangtnaacaagtgggaggagcacatcacagcaagaatgtgatgaccacatcaagacccctggagctgctgcacatggacctcttcggacccgtcgcttatctgagcatangaggaagtaaagatgggctacttattgttgatgacttttcccgcttcacttgggtggtctttttgcangataagtctgaaacccaacggaccctctagcgctttctcangagagctcaaaatgagtt

SEQ ID NO: 77568 - DNA, 422 bp, Zea mays
  unsure (1)..(422): unsure at all n locations
atgagagccacttatagcacacatcgcacgcattagacttctcttgatcaagtgaaagtctacgtgttattactcttggtgatcggtatcatctagacgacatcggggcaattggagctcggtgatcaccccggaggatttgttggtgaccgacttctgcgatttacattgtcatgagggatccaccgcgctggagatgcaaacaatcatcttatagngagcacttggttcccgcgatgaccacagggaagcgatacctatacccatgtgcttcaacacggactagtgaagagtaccaactctctcataccgcgagaacanattgaggaggtttcttcccgtcattatactctgcattacttgagcgattactttgggtattgcatacagcatttcctgaccctaacggtgttacattcata

SEQ ID NO: 77569 - DNA, 133 bp, Zea mays
  unsure (1)..(133): unsure at all n locations
actcagctgtngcacaccacaagaccccgaagatcactagctcaagatattaaacctcttactgcacctgcctatgggactgaataaaaggangggtaggactaagctgtcaggcacagcatggtgagctctg

SEQ ID NO: 77570 - DNA, 321 bp, Zea mays
  unsure (1)..(321): unsure at all n locations
tggacgtgaagagtgccttccttaatggaccaatcaacgatgttgtctatgttgagcaacctcccagctctgaagatagtgagtaccctaatcatgtctacaaactctctaatgcgctntatgggctcaagcaagccccaagagcatggtatgaatgcctaagagatattcttatcgctaatggcttcaaagtcggtaaagccaatcatactctctttactaaaaccatcgcaaatgaattgtttgtatgccaaatatatgttgatgatatcatatttgggtctactaacaaatctacttgtgaagagtgtagtangatca

SEQ ID NO: 77571 - DNA, 272 bp, Zea mays
  unsure (1)..(272): unsure at all n locations
tgcaatggagttacaagctatgcaagntcacatgttttactatatacagaaataagttagacatctagtataagaaacatgtacattacaagaaactagcttcgctcggcgcagacatcttcatcatacactgatacaatcgggctggctcttctgcagtctatcaattgtggccccaacgtatattgtcccagaggaaaggcttcatacaaccaacttgtggcaggctcttcatgatcaatcccacacagacgcagacggcagcaatggag

SEQ ID NO: 77572 - DNA, 261 bp, Zea mays
  unsure (1)..(261): unsure at all n locations
ctcagctgcttcngcgaaagccttctatatcaaggagaagcagttngtctgaccaagttaacagtcgcaactgactttcaaaaactgcactccctccactcagaagcacgacgtcccgcgtactctaatctttcaaagctcggctaccgtgatcattgatacccctctggtcgccagatgaagtctctcgttgaatacccncacttgggaactagctttattttttaccctctaaatttttaaaacatctctcttttgatg

SEQ ID NO: 77573 - DNA, 263 bp, Zea mays
tacattttatctactgcaggacagatatatgagattaattcagtgaaggtactcattctcttctataataggtacacttagttattagtaattagcttattatcatcacgtctcaatccagatataatgtgatttagtcccttaagagtttcaatctctctattcttctcgaacacacaacatagttgtgtatcatctagctaatataggaaggttgttagcatataggccctaactgccttataattacaacatgtgccact

SEQ ID NO: 77574 - DNA, 312 bp, Zea mays
  unsure (1)..(312): unsure at all n locations
ngcctctactcncanagctctaatctgctcttggattacggtatatctttcctatctntggtgcttcttattctactttgagacattacacagctttctgagcaaatggcttccanacagnctcaaactttgaccacatgctcaaatgacaaaaacaaagctactcacaacaattcataatttttggcactgtacttatatttctaaaatccatacatttcttcaaagagcacctttaattcacttaacattntctaactaccacaaacactctaagtttatttttaccagagagatctcgattctataaac

SEQ ID NO: 77575 - DNA, 122 bp, Zea mays
  unsure (1)..(122): unsure at all n locations
aacatggagatgctgcatcaactagtgcacaggaagaaagaanagatggcccgactagctgatcgtacaatgcagatagaagaagcctctgaagaagtcatcatgttacgcacgatgagcag

SEQ ID NO: 77576 - DNA, 468 bp, Zea mays
  unsure (1)..(468): unsure at all n locations
ggtgaagattcttcatcccacatgggctagtcgacgatgccagaaccaacccatattagtcttagcaattaagcaagtatcgagttcagctctattaaaatcaactaagtatagctgaccctctaatactcccttaaatgctattgaatcatcacttcttctaaagacagtaacaccaatatccgtaaaaagacaattgtagcccattntacataattgagaaactgaaagcaagctataatctaaggaatctacaagaaaacattggaaatagaatggtcaggtgatatatgcaatttaccaagtcctttgaccaaaccttgatttccgtccccgaatgtgatagctctttggggatcttggntnttctcatangaggagaacatncttttctccccagtcatgtggtttgtgcacccgctatcaatgatctaacttgagcccncgggatgcataaacctacaaaca

SEQ ID NO: 77577 - DNA, 230 bp, Zea mays
aagttggagcccatcatccacacaagaacatcatgacgaccgacaggccactatagctcctacacatggacctattcgggccgattgcttacataagcatcggagggagtaagtactgtctagttattgtggatgattattctcgcttcacttgggtattctttttacaggaaaaatctcatacccaagagaccttatagggattcttgagacgggctcacaatgagttc

SEQ ID NO: 77578 - DNA, 230 bp, Zea mays
  unsure (1)..(230): unsure at all n locations
catgaagggcatgaatgtatatttacacaggttgtgctctgtgcctataaatagatgaacagtacccncgtacctgtcacgctgacttgtattcactcgtgcatcacgcttggacttttaccttctatcaagccgcaaggacaattgtaactcgatattggtcacgttcattcatgatgatataattaagatatattaataatgtcatatggctatccatgttatctctt

SEQ ID NO: 77579 - DNA, 113 bp, Zea mays
  unsure (1)..(113): unsure at all n locations
gatccccctanatctatccttataaaggatacattctaccacacacaaatgaaggccttcatatctatatgggtgcatccgaaacaataaagaagcattcacatcgttttatc

SEQ ID NO: 77580 - DNA, 425 bp, Zea mays
  unsure (1)..(425): unsure at all n locations
agatgctgtgtatcaattcgttaatgtaagaactgctaaatacttctaatacttcttctgtcgctaaattatatttatctctntcctaaattataactaagtataagacataattattatgttatagtattgttatattcgttgttttctataatctacatatctagatgtatagtttaagttagcttatatcgttaagtctagcttatatgtgtaggtttgttctttttatttcaatcatattaaggtctggttggttgggcatgtggaaaaagctcgtgttgggcctgtggaaaaagctgctgtggactgtgagcggtggaaaaagctgttgtgagctgcttaaaagcttanaaaccgcttgatgtaaactactataagccgctacaagttttttatatatggtttaaagatttttatatatg

SEQ ID NO: 77581 - DNA, 238 bp, Zea mays
gatgtacatgaatgtatggaatgaggcacgcacacgttatatatgtgttaaaagagatatgtatgggcgaggtgaacaccggagtagtttttggtagctgcattgtcccacacaatctagaggacggtgtcaccccgcctcattccaccttgacctctaaccacacacattctatcgaccacctatcctcccgccatcactaaactgtcttaaagccgttttaaccctcgatcatgtg

SEQ ID NO: 77582 - DNA, 289 bp, Zea mays
  unsure (1)..(289): unsure at all n locations
tcgcgcgaacggcgacatgagaacgagattcgccgtcgggaggagtacnaccgggatcatggcatcccgactcagagccaggccaccaggactgagtcggcaacagcctcaactggcggaaccaccctgggacggtcgaggaaccacaatcacaactcctctccccgggacagacatcgtccccgacgacaggaggacacgtgcggagtgtncgcacttactccgcgccttatggccatccaatggcctcccaacttcaaggtatccaatgtcgacaaatatgagccta

SEQ ID NO: 77583 - DNA, 331 bp, Zea mays
  unsure (1)..(331): unsure at all n locations
gagaaagacaagatctgtcgtgcatgtcatgcacggaagcacgttgaagctcgtcatccacacaagaacatcatggcgaccgacaggccgctngagctactccatatggatctatttggcccgatcgcttatataagcatcggctggagtaagtattgtcttgttattgtggatgattattcttgcttcacttangtattctttctgcagacnaaatctcaaacccaagagaccttacagagattcttgaaacgggctcataatgagttctgattgagaatcaacaagattagaagcgacaatggaacgtgagtcaagaattcacaaattg

SEQ ID NO: 77584 - DNA, 416 bp, Zea mays
  unsure (1)..(416): unsure at all n locations
ctcagcttaaccctgcagacctnttccgttctttctaccatatgatgcgatatcaatgtctacttttgcatatcactttattgttcccttgatgatgtactgttgcttccaattgaattatgaatgtatgttgcttgcatccataagaacgatccggctaagagcctagaactccatgagaagccctgatctgagctgttggggaggaagagtccttgacctatcttgtctattattattaattcacctccgcatacacatttatcctaaagattgctagcttttgctgccatgtccttgcttacacatctgggttgagttttattattattagatatctgtatgctattgctcaaccttatcaatgaacatgatgagactatctatgatacactcggttctctttcttattatga

SEQ ID NO: 77585 - DNA, 351 bp, Zea mays
  unsure (1)..(351): unsure at all n locations
gatgagtatatanngtaaagtatatcatanaatngctcaagatgaccaacttcttaaatgacaccaaagatcaaggtaagggtctatagtccttanggcgaccattctagtctangttagtggtcctacaatcaacaaggctttgataccacttatgtcacaccccattntggaaggaaaccgaatgcgaaccatgtacgtgccangctcataaactcacgtacacagcgaatacataatnggacatcatcacacatcgctcanagtaaatagcngaaaaagactttattacattcaagatgttccaagacatccacaggagtcattacttaacatagtcattaacatcat

SEQ ID NO: 77586 - DNA, 300 bp, Zea mays
  unsure (1)..(300): unsure at all n locations
tctcctgtccggaataatctacggtattccggacagtcgaattagtatagttgtagatgaacctttggcacctgtagaacatgtaatctagagcanactagttagtccaatttatttgagttgggcgattcaaccaccaaaactatttatgagctaggtgtaagcctaattccctttcaatattgttctttaccccagggcttcgtttcgtataacaattcatgtatattgcaaaagctnttcgcatttggctctaagccctgactcttcacagcccagacgaagattccatccttatta

SEQ ID NO: 77587 - DNA, 428 bp, Zea mays
  unsure (1)..(428): unsure at all n locations
ctcagcttactgaaaagaaaagaaacgttgaacagtgatgggccgctttggtctgtgacatttctaacgcaacangaatccgggtcgcgcgcccacgcgcgcccgcgctctggctatnttgcacaaagggcctcggtttaacagctaattcgaagtaggttcatctactattgcacttagtcgctgacatattgccgaaatgaccctaaacttctatttctttcccaactacgaccctgaccacggcgtgctcgccgtcgaccatcccgtcgcttggtccggccaanaactacggcggatacccaaatcagctgctgtgtgagcatcactcgacctgaggcaatcattgaacaagctccaatgtgactaactcggaccacgatgtgcnttatcaccgtgatggcggacaccatgcattgatcaatacg

SEQ ID NO: 77588 - DNA, 432 bp, Zea mays
  unsure (1)..(432): unsure at all n locations
gcttctaaggggagaacacgtgataggtctaactaatgtaactntcgaaaaagatagaccttgtgcagctcgtcaagcangtaaacaagggggaagctctcatcatgccaaaatgtgatgacaacatcaagacccctggagttacttcatatggacctcttcngacccgtcgcctatctaagtatatgaggaagtaagtatggtcttgttatagttgatgaattttcccgcttcactcgggtattctttttgcaggataaatctgaaacccaagggaccctcaagcgctttctaatgagagctcanaatgagtttgagctcaacgtgaagaagataangagcgacaacgggtccgagntcaagaaccttcaagtggagaataccttgcgangaatgaataagcacgagttctccgctcttacacaccacagc

SEQ ID NO: 77589 - DNA, 329 bp, Zea mays
tattctttttctttttctgacttcctttatctttcttaatatttgagtttttcaaaattgaattcaaacttttatggggagtgttcccctcttagcaaataaacaaattcaaaccttaatatagaattaatatactttattatctatatttttatatcatttctcttctcctctttttcaaaacccaatttttcaatctacgggttgaattaacttctagcatttattatcttcctatctttattattattattattattattattattttatttaatgcacaaacataaaaactccacatgatgcattttcttttatcttggtattat

SEQ ID NO: 77590 - DNA, 283 bp, Zea mays
  unsure (1)..(283): unsure at all n locations
ctcagcttatcttgttgtntcacaacaagtaaagtgacgcctgagacttgtntagtggcacagtctctcaatggttggctatggcatcgccggctagcccatgtcggtatgaggaaattggcccaacttcacaaggataatcacatcattggactaacaaatgttgtatctgagaaagatatggtttgtggcgcatgccaagcatgaaagcaacatggagtcccacatcaatcaaagaatgtggtcacaacaaagaggccattcgagctttttcacatggacc

SEQ ID NO: 77591 - DNA, 277 bp, Zea mays
  unsure (1)..(277): unsure at all n locations
atgtctgttcatcttttcaacatgtttatgagagaataaattactgcgctgcagntatgattatcactgtttgatcgtgctacggttcantactaaaatagaactttcttgtgaggtatacctggagatacccacaatgctttgaaccatatattctgcagagaggttgtctatactgtgcccncagcgtagatattaattgtgttgcagaatattcatgtgattntcacattcagcattatgtattaagcttatattatgaggacattgtaacata

SEQ ID NO: 77592 - DNA, 190 bp, Zea mays
  unsure (1)..(190): unsure at all n locations
taacgtcgctagatctatcagatactggttcagctcttctaacgctntctgctgagctcggctccattgaaagacttccgctgacttcaatacttcaaagaatgagaaaattctctctgctgatctagatatacatcgattcacagatgccagtcttcctgtcagcccgtgagcccccttctttgtgcct

SEQ ID NO: 77593 - DNA, 227 bp, Zea mays
  unsure (1)..(227): unsure at all n locations
tggacctcacctnccaccgcatcatcatctcttgtcatgtcgtcttcgacgaaaatgtgtttccccttgcaggctccaccccacccaccgatcttgactcactcctcgagttcgacccggttgcctccacccccggcgcgccgtcttgcgccgttacctgctcctcgtgcagccacggcgccacgcgtggtcccgtcgaccgcgtttgcgccacgcgccggcccgtc

SEQ ID NO: 77594 - DNA, 362 bp, Zea mays
tgttgaggcttgaaccgaggacccccgccaccggaaaggcgctttcgtgctcgccggagttcggaaccccgccggcgcacgtggaccggatgagtctctgcgccattttccgattactgcacgcatagcctctacgtcaccccgtggagctcatcgtgccgtttgattgaactagatcgtcgtagtttggccagagcaggagccgccgccgacctccgctgcctgcgctcgtggccaggacagctccgaccacctctgacgccgacccgcacaccgacgtgaccgtcatgatctccccgacaccactgactaccccaccggagctctattgccgccggtaagcctcgccgccgtaagctttg

SEQ ID NO: 77595 - DNA, 362 bp, Zea mays
  unsure (1)..(362): unsure at all n locations
ntccatgtttgtgcttgaacattccaatccgagcccgtatcttttcgtggtgaccgtcacaagttggtgttcttctgcagtccgaatccagcatgttcaaatccttttccctttcgtcttctccttggttcctaagcaaaacaagagtgcacgggtctccatggtctaaatatgatggacatgaactcaagagtgtaatcacctgatggttgagttgacgagcacgagcgcgagtaatgggaccagaaattgggacttgtattggcatagatgtatcagtagtgtggatgtcttcatcatgttcgctgcgaaaaacgaagaaatggttccggtggcgaaaactcatgctgtgtatgcacccg

SEQ ID NO: 77596 - DNA, 358 bp, Zea mays
ttaaaggttaatcttcacctaaaagaaagattaggaatgctcttgcaaaggtatggaactaattgcttcaattggtagttgatcaatagtagttcctttcaagtggcatactttaattagtaataatctattttatgaaaagaaatgtcaatatgaaggttaaattccttttggattaaattcgtaaattggtgcatattgttaatttactcatacatgtgcattgacttaaaaggaatttaatttatgcctttatgcctcataaatgatgatttatttgacattcatatataaatatcatcattcattaaatacttcattgtactactaatacctcttttcaaagtgttttttttac

SEQ ID NO: 77597 - DNA, 356 bp, Zea mays
tgacaggtgatccgaagctcagatgatccgaagctaaatgatttctaagctgaagaacgtgctagaaaaattctagagaaaaatcttgtaatatcattgtaaaaaatcattgtaattaagaatcagatactaattctataaatttgtgcatactttgtaatatatctttacctttttgtgcatgtattgaactgctttgctgtggacgaaactagcattttttgagccgaaagagaaaaacaccttcccttcttttcgtacacaacgaagcatgaaactgcttctttttctattttccgaagccttatctttagagccgaagcacccgcctatgttatgatgatgatgatcctatg

SEQ ID NO: 77598 - DNA, 355 bp, Zea mays
  unsure (1)..(355): unsure at all n locations
tagacatataaatgttgntttagacgcatcttcggacataaagatctgattatatccggcattatcatcaagaaagctaataatactattttctgatgcattattaatcaacatgtcggctataggcataggatatttatccttaggagttgctctatttaaattgcggaaatcaatgcacactctaaacttatttcttctccaacaacataatataggaggctcactctgcatatctacaaggtctaataaaattagcttcttaaaagccagtgggccaatggatttcttcttttatccgtgggagtaaatctggacgaaatgatcttggtctctgcttgaaaggcctgaaacc

SEQ ID NO: 77599 - DNA, 351 bp, Zea mays
tggctggctggaaccgaggacgcccgcaccgcatatgttttattgtgctcgccgtaacctgggggcggtcttctgcagtccgaatgcagcatgttcaaatcctttttcctttagtcttctgcttggtacctaaggacaacacaagggctctgacatccatgtgtttaaaataatgcacatgcactaagccatcgcagcacccggcggtacttatacctagcatgcacacatggaatcgacacccaaaaccggatctcacgccgacatgaaatactccgaaggcgccgtgaactcctcatgcacgacgggcgtaccgcagacactgtcttgccgtcggataatctttgctgc

SEQ ID NO: 77600 - DNA, 354 bp, Zea mays
ttgtgtggaactggaagaggatttgatcacttgtgtgtttctagaattgaatgctagagcttttgtaagtagttggaaggtggaaaacttggatgacttgaatgtggggtgttgggggtatttataaccccaaccaccaaactagccgtttggtggaggctgttgtcgcatggcgcactggacagtgtccggtccgccagccacgtcacctggccgttgggttccgacggttgaagctctgtcttgtgggcccgcctggctgtccggtggcgcaccggacatgtcctgtagactgtccggtgtgccacccgcgcgtgctctgctcctctgcgcgcgcaggcgtgcatttaatgc

SEQ ID NO: 77601 - DNA, 354 bp, Zea mays
tttgacaaaacaaaaactctattctactattttcaaaatctctcaaggggtagctgatccatttatcgctttggcctttattttctccccctttggcatcaagcaccaaaagggatcaatcttggccctttaaccccattgcctcaccaaaatcttcagtaagaatacaaagtcaataagagtctaaagatgaacttggaataagttaccctctcatcggagtgcagtggaagtctttcatggtccaagtccaccttatccctttcaatcctccttcgagactaaatcatcaaactcaagcacatggttagtctcaaagggtcaagttgtaacacatctccccctaaacatgtg

SEQ ID NO: 77602 - DNA, 351 bp, Zea mays
tcgcaagaacagaggataaagaattaatcagttgagatactcccaaattattggttccctcatgtaccttgctggtgcaaccagacctgatatctcgtttgctgtgagccaattgagcagattcacttctaatcctagaagcggtcactggtgtgcactagaacgtgtaatgagatacttgagaggtacttctgcgtatggacttcactatactgggtatcctgctgtacttgaagggtatagtgattccaactggatctcagatgcagctgagatcaaggccacaggtggatatatattcacaattggtggggctgcattttcttggaagtctcgtaagcagactatctt

SEQ ID NO: 77603 - DNA, 357 bp, Zea mays
tgaagccatggtaagtagcataggccaataatatacgaattgactcaagcctagctatgggtgcataggtttcaccgaaatccaaaccttcgacttgtgaatatccctggccacaagtcgggctttgttccttgtcaccacaccatgctcatcttgcttgttgcggaaaacccacttggttcctacaacattttgattaggacgtggaaccaaatgccatacctcattcctagtgaagttgttgagctcctcttgcatcgccaccacccaatccgaatcttgtagtgcttcctctaccctgtgtggctcaatagaggaaacaaaagagtaatgctcacaaaaatgtgcaacacaaga

SEQ ID NO: 77604 - DNA, 351 bp, Zea mays
ttgcatcaaaaattttcctttcttgctcgaagtcttctgattttcagaggagttcattttttaatctagcaatttcggcttgggcttctaccaatgaaccctccatttttgaagaagaaaatctttcttctcaagagaagcttcataatctttgattttactttccaagccctcaattataacctcattcttcttatcttcgaggtcttgttgcattctcaaggctttgcttagcagcatactctgtgcaaaataaccttcatcagaaatctttgcttcatcgcaaaaaaataaaatgttgaggaaaaaactttaccttaaaattagaatagaataagctgccgacgatat

SEQ ID NO: 77605 - DNA, 362 bp, Zea mays
tcggcaacaaaggcttctgtatgcacttcggaagattcaacaattttcttcggagttgtgcttgaagactttattgtctccaaaacatccaacacattaaccatcctttttctttgggggtcactgctggacccttttggcttgttgctgcctcaacttttgttgaaggacttagaacttccgatgtttttagatcttcaaccctcggttcttctattttctctgtcgccggtactttggccggcccttcaatagtcggcaggggagttggttctttagcttcggtggccgaagaggtctcaccgacaaaatcaggcactgtggccggttcaatgtaacgtggccggtgtgtgagaaccttt

SEQ ID NO: 77606 - DNA, 362 bp, Zea mays
taacctctgcgagaccttttcccgtttctttctaaccttattttttgcgatatcgaatgtcatacttgatgcatattcactttatttgttcccttgcatgatgtactgtttgttcccaatttgaatggatgaatgtatgtatgcttgcaatcgcatagagaacgatccggtcgaagagcccgaggaactcgcaggagaagcccctgagcagcagtcggttggtggaggcaagtgtcccttgacctatctctgtcctattcattctttaattcacctcccgctttacacatttatgcctaaggattgactagcttttgttaaccatgtccttgttcacctatttgggttggattattactgtt

SEQ ID NO: 77607 - DNA, 357 bp, Zea mays
ttctcgactaagtcggggacagggcctcatggacgggtgaaagtacgcgtaagcggcaaggccgaccgagccgagggattcccacgcctctaggatacagatacctcactcgtccttctgcgaaaagcaactctcgctcacacaaacatccctgttaccgacagagtccagatgctcgaaacaagaggaaaaaaggcgcagcttctcaagcgtggcgagggtgtgttttttctggcctcggcggccgcagaaagcacacgctacaagatgatctgatcctgcaggctcgggtcttcacgctgaagggagccgtaacaccctcggcatcgacgacgtcttcagcaaagcccgacccag

SEQ ID NO: 77608 - DNA, 358 bp, Zea mays
tcgtgttcagttctgatatttttgcttcagcttccgccaattaaccttcggttgcctggagctcaaagttctttttctcgaaagcatctgattgctcctttattttgctttccaatttccaattataacttcatgcttcttatcttcaaaatcttgttgcatttgcaaggctttgctcagcagcatactctgcacgaaaacaaccttcgtcagatatgtttttattattagaaacaataaaagttaagggacaagtagttcaccttgaagttggaataaaataaactaccaacgacatgttgtcgtcggtagcggctgatatctgtttctagcttcgggaatccgatactcttggaca

SEQ ID NO: 77609 - DNA, 354 bp, Zea mays
tttgaagagatcctgagcgaccgcgggcatatctatgcttttactggcgctcgaggtattgcggcaattctggagaaggctggttgcgaccacgttaaagctgtggcccagactaaaccgccttctccactgacgacatgagagaccctttggccgaagctactttggtgtgtggaaagttttactccgatgtttggttgaacagtggccgagaattggccaacaaaatcataaagaaaaatgaaaaagacacccatgatgcccgagaagaagctaggcgagccaaaaaagttgctgagcgtgcaaggcgtataggtattgtttttgaatttttagctttggcgtttattttct

SEQ ID NO: 77610 - DNA, 358 bp, Zea mays
tgaccttgtaacaaggataagctgcctttgttccaaattgtggatggtccttaagcctctttgaaatccttgaaggataaatgcctgagatatctataacatgctttcatagtgcataaactgtcatgagcatcacacttatactatgacacaatgcacttcactttctctatgatatagacatgatctcattaacctaattatgtgcccttggcgtttaagaccaaaaatttgtattcctctcaaagcacatatttagggggagcaatctatattatatagaattgttcaagcttaattgacatatccttttaatcatgtctctttcctttggtacatgtgcatatttcctatctat

SEQ ID NO: 77611 - DNA, 359 bp, Zea mays
ttaaccccaacgagacctttccccgtttctttctaaccttattgaatgtgatatcgaatgtcatactttatgcatatttactttatttgtcccctgtatggtgtactgtttcttcctaatttgaatggatggatgtatgtatgcttgcaatcgcatagagaacgatccggtcggagagcccgaagaactcgcaggagaagctcctaagcagcagtcggttggtggaggcaagtgtcccttgacctatctctgtcctattcactctttaattcacctcccgcattacacatttatgcctaaggattgactagcttttgttatccatgtccttgtttacctatttgggttggattattatt

SEQ ID NO: 77612 - DNA, 352 bp, Zea mays
tgtcaacggtgaacacagcctatgattaccaccctttttttttgagagcgacgctatttgcaacgcgcgcccagccaggcagccattgggcaccaatcatacccacgagaacgtgtgaccaccgacaggccggtggcgctattatacgtggaactattcgggccgatcgcttacatatgcacccgcggtagcaagtacaggacatgtatcgtggctgattattctccatccaattctgtattcgttcaataggaaactactcacgcgccatagatctttgagggactgttcaaacgggctcactgagagtgcgactgtccgatcacaagattgatatacgacagcggcacat

SEQ ID NO: 77613 - DNA, 290 bp, Zea mays
ttcaacgatcctccaacgatcgacagcgcccgaaccctttttttgggtgacgtggctggcgcaccggactgtccggtgtgcccatctacagcaaccacccccaacgattgttggtgcgttcttttcataaattcctttattttatcatagtttcaaattttacttttatttaatttcttttgtaatttataatatatagtttatttattatatttttagctgttccccatttcttgcataaaaatcaagtattgttattataaaaaattttactccgtatttcaaattgt

SEQ ID NO: 77614 - DNA, 351 bp, Zea mays
tggaaatagtgccgaagcttcctggaggccatctttatatcatacaatatcttctccagctctgtataatttttctttgacaaactaagaacctcggatacaaaatatatggggcctgcctcttgacttgaccatcaagcttctcctggaccagcgctgcacttaccgctgagtgcgaagctgccacatataataacaaaggagcccctggcattggtggagtcaatgttgttagatctattaaatactgttttagctcttcaaaagccttctgctggattggtccccattgaaagacttcggctgatttcagcacttcgaagaatggtaagtttctctctgctgatctgg

SEQ ID NO: 77615 - DNA, 356 bp, Zea mays
tcctggcagcagcttccgcctccacctccattgcttttaggtcaacagccagaagggagtcaatacgctccacagcagagggacttcagagaacagtccgaagctcgacagtcaacagcactgtgccagagtcgaagcacatttattgacatatcctacctttgatagcagtcttttctattcagttttattttctgtgaagcaaaaaacattgatagtttccatgtaataatttcattgtttccacgagaaaaatttatttgattcacaggcctaagttgccgaagcctaaaatttcttccgttaccaagaaggaccttcggactaaaaatccttcggagtaacaaaaagtcgtt

SEQ ID NO: 77616 - DNA, 351 bp, Zea mays
tagcgataatgtttctgtgtactttaatctgcttttttgttgttaacttttatcctgttcattcgggaggaacaatacattatttatgtcggtggcataaatcttaaagtacactactttgcaacatcgtgtttatttttccagagttcccaagttagctttgagtcagtagcagtgcaataagaagatttgctgattttttatagtttggctgcacccatttcttgtaataaatcgtgtatcgtcatctcaggaattcgacgcgttattgaaaatgttgaactaaaaccctgcaactctgctgcatcttgcgtcatgtttgtgtgtccctgataaatcggcgagcaactt

SEQ ID NO: 77617 - DNA, 360 bp, Zea mays
tctaaagggagaacacattttgggactaacaaatgttcattttgagaaagacaggatttgtagcgcatgtcaggcagggaagcaagttggtgttcatcatccacacaagaacatctgacgactgacaggccactcgagctcctacacatggacctattcggcccgattgcttacataagcatcggcgggagtaagtactgtctagttattgtggatgattattctcgcttcacttgggtgttctttttgcaggaaaaatctcatacccaagagaccttaaagggattcttgagacgggctcaaaacgagttcggcttaaggatcaagaagattagaagcgacaacgggacggagttcaag

SEQ ID NO: 77618 - DNA, 362 bp, Zea mays
  unsure (1)..(362): unsure at all n locations
ntgaaagactgactgggctttccatttctaactaatctagcgttctacggncacattgctttgataccacttctgtcacacccatttctaaggggcagagccgggtgcatcgcattgtgtgtcaggatctatttccacacatatgttgatgtcacaagtgtaatatatcaaaagaacaatgcataaaagcgtaaatgaagattatattaacatattatacttcgaacagacatattgtcttaacctttattcatcaaagtacagcgaaacaaggacatccatctacaggaagatgaacaggtgtatcactagactagcatccatggagctcagcatcataacttcatctgcaaacttctgat

SEQ ID NO: 77619 - DNA, 357 bp, Zea mays
tcaacttgggtgagagcaaccgatcgctgcctcgtgcttaccacttttcattacccatgggactcacaaagacctgctgattttgttggtttctttgggctggcacaagtgggcaagcgctcttgatctctgtctgctccgcattgtttttcgttctaaaatttctaccagtgcgaactgttcgtttggaggagaagtgctttctaataaactgacatgtattttttctccatatgttatgtgataacatatcaactgaattctactaccatatactgtattttggtagttccgaacaactaggagagtttctgaagatattggaagtacaacacaaaaagctcagaaccacttttc

SEQ ID NO: 77620 - DNA, 358 bp, Zea mays
ttcacgaacaaaacctctatcaagaagttcttgcacttgcctttgtatttccttagtttcttcaagattggtttgatatggtggacggttaggaagtgcagcccctggaataagacgatttgatgctcaatccctcgaattggaggtagtccaaccgatgtttcttgtggaaacacgtcttcaaagtcctgcaaaagattagccacaacactaggaagagatgttatgttgttaggagaaatcaaaacatctttgttcacaagtacaaagagtacttgatatgggttgttcctcacttctctcagctcagattttgtggctagcataactagatgttctccctcttccttccttttat

SEQ ID NO: 77621 - DNA, 359 bp, Zea mays
tggaaattgaaactaggtgttcactacaagcatcaatgtctttatctttacacctagtacaaattacaacatgttctacacaagaattagatttatttgctacttctaatttagcatttaaatcattgttgacaccttttaaagtagaaatggtttcatgacaagtagatagttcaaaagaaagcatttcatttctcttaatctctaatgcaagtgatttttgtgcttctacaaatttgtcatgttcttcatacaacaaatcctcttgcttttctaaaagcctattcttatcattcaaggcatcaatcaattcattaattttatctatcttagatctatctaagcccttgaataagcat

SEQ ID NO: 77622 - DNA, 357 bp, Zea mays
tctaaagggagagcacattttaggactaaccaatgtttattttgagaaagacagggtttgtagcgcatgacaagcaggaaagcaagttggtgcccatcatccacacaagaaatcatgatgaccgacaggccactggagctcctacacatggacctattcggctcgatcgcttacataagcatcaacgagagtaagtactgtcttgttattgtggatgattattctcgcttcacttgggtgttctttttgcaggagaaatctcacacccaagagaccttaaagggattcttgagacgggctcaaaatgagttcggcttgaggatcaagaaaattagaagcgacaatgggacggagttc

SEQ ID NO: 77623 - DNA, 357 bp, Zea mays
ttatttatagattagcctttaacttctaagaagtgtcatgttatttagaaagtggttatgaaagcatgggtatatatatgtatagtcaccttattgtgtaggatgaaagatggttagggcaagaatagcctaaggtaagaaagtttatggtgagaaagaactccaagttgagtggcaatacaactgaaggttgagttgacttctctcctcccttgacgaggttgatcttttcttctccggtcttggtctcattgagtcagggtcagtgtttatcatcggagttaccggagtatggttaggatggatatgggtgagataaactagataagatctacttaatttattttagaatagatc

SEQ ID NO: 77624 - DNA, 353 bp, Zea mays
tccataggtactacatcgcaatccgcataatcagaatatataccaatggagaaatgcactcgtaccatgtgtgttaccttaaccttgcctgaatcattgatccactgaatgggtatggatgtggtcgtggacgtgtggtcaagccaagcttcttgaccaaatctaaactcaccaaattattgcagcttccaccatcaataataacacgtgcacgccgattctcgatggagaagaaagtctggaacaaattatggcgttgctgcttctctgatgattcaggctgagaactaagaacacgaagcaccatgatgcttcgaaggttcgccgtagcatcagcaccaagcatggcatca

SEQ ID NO: 77625 - DNA, 354 bp, Zea mays
taggcccctcctcatctaaggatttagggcgggtgcattcctttccccggccggagatttcctctccaacagaagctttcactgtaagacaatggcaggaagctttgcgactagtgcatctgccaccacgttggccttgcctgggtgataatgaatttccaattcataatccttaatcagctcaagccatctcctctgcctcatatttagttctgactgggtaaatatgtacttcaaacttttatgatctgtataaatatggcagatatttcccagcagataatgacgacatatcttaagggcatgaaccacgacagttaattctaagtcatgagttggataatgttcttcatg

SEQ ID NO: 77626 - DNA, 352 bp, Zea mays
tagtgaagcgctgagagctcttaaggagagatgttttatctttgcaaggcaatgcaccgaccgattgaaaagcatattcaattcagttggagctgcacctgaagaagctacttctctaccgaagatatccccggggcactcgaatgtgtagagaaagaggttgatgtcctcgatgaagtcataactggccatggagacttctgtgcgctggtggcttctcgtggtacagccaccgctttcataaaaaccgggtgtaatcacgcaagggctatcaacaggtcgaatttcaccctttcatcttcagacctggttgatgttccagctgaaagaccgaagcataggtaacaggttc

SEQ ID NO: 77627 - DNA, 354 bp, Zea mays
tgacctggcgctgaacgatttttggagtaaaatgctctcaaacttgctttgtgacgcgccctgatgagagtttgcgatggtacagtaacctgacgaagatcgccaggtcagtgcaccgccaccggtgatcccgcgccgtgatcctcgtcgctgttgtgattcgtgcccggtggagtgcagacaactacacatggtgaaaaatatcgcacaagagatgaacttggggcactgtttcgccctgtcgtcgtacccacttgcacgggcgacgtggctgcgcgaccatcaccgttgtgccaccgtctagctcgattgtgacacgccttaagtcgtctcaccactcgttgcaagtcgtga

SEQ ID NO: 77628 - DNA, 351 bp, Zea mays
tcgtgaactattctccgaagccataaaaaagttttgtgttgtctctccaatgaggctactcttcatctcgattcgtcttgggccttagcacgattttctcttttccaaatatgttccgaagattaacactgtatccccttcttgttccagatgcagtatgctgtatgatgcttatgttatgcaaaaatgatgtgatgatgttatgttatgcaaaatgatttttgtgtcgcagatacatatccctgtaataaagcacatacactttttatatcagcgctgacttttcgctgtaagccttccttaggagcttcttcgccttttactttcagcggaatcagcgtttatttttcg

SEQ ID NO: 77629 - DNA, 356 bp, Zea mays
tctaaagggagagcacattttgggactaacaaatgttcattttgagaaagacaagttctgtagcgcatgtcaagcagggaagcaagtttgtgttcatcatccacacaagaacatctgacgatcaacaggctgcttgagctactccacatggacctattcggcccgatcgcttacataagcattggcgagagtaagtattgtcttgtaattgtggatgattattctcgcttcactcgggtgttctttttgcaggaaaaatcacatacccaagagactttgaaaggattcttgagacgagctcaaaatgagttcggcttgatgatcaagaaaataagaagcgacaacgggacggagtt

SEQ ID NO: 77630 - DNA, 361 bp, Zea mays
tgccttcgcttcagtctatcatccgcggtccaacggggtcgtttttctcgccaatgggaaaatcttcacaactgtaaagaagatgctcctcgacgaaaaaaggcagatggaccaattattaccggaggcagtctgggcgctaaacacaactgagtgcagggcgactgggttcactcctttccgccttctatacggatcggaggccatgaccccgcaagaaataaagcatgggtccccgcgtacagttccgtcagccgtccccgacgtggacgagccaacttcaaaagatctcattgacggagaccgggtcttcgccctacaggccctgaacaaataccaagcccagaccaaagcatggcgc

SEQ ID NO: 77631 - DNA, 346 bp, Zea mays
tgccacgccacctaccgctgtgaacgtagaacaccatgtttgtatgcatctgcacgggcaggaacagcgccccggggtccatggtgatgaagtgcaaccggtacgccgtgcccgcgcgtcggtgacttccacagtcgagaccgatcctgtttctgtctctgacaccacccgtcgttgcttctttttatcaccttgggtgccacccttcacctattgtgcttttcagattccgtggtcccctaaacgacctccctgtaaatcgatccaccctccagtcttcttccccgccatggaccaagttaacttggtagctagaatctctgctttgaatttttacccctatccc

SEQ ID NO: 77632 - DNA, 357 bp, Zea mays
  unsure (1)..(357): unsure at all n locations
ntattgcattaacaaattgttatttttgtattaaataaaatataaaacctgcgcatgtgaaatttatacattggtcatgattcgttattacctatgcctcataaaaattccagcccaaattagatagtttcatatggtactaaaataacacatgttttataattataagaagaattagagacaaattagaagtaaacaaaagcatccatgtttcttgaaatgattaagtgtcttgacataaattgaaacttgataactaagtcataatgatttaaacttgagaaattggtggtagtacctctcaatgattttgcttggtaatttagttaanngctctcgtgcttgcaaactgagatt

SEQ ID NO: 77633 - DNA, 356 bp, Zea mays
tgtgaagaatattgtggcctttgttgctgactccctctatcgtcattttgagtagagttatgaattgacctgacgtgcctcaggtgaaatcttcctccgaagcccctggtcattcagagaacctgaatgcttcctcccttctttggcgaaagtcattgtcagctcgaatatactcgtccatcttctggagcagcttctccaaagtctgtggtggcttcctggcaaagtattgcgctaaaggtcccggccgaagtcccttaatcatggcctcaatgacaatttcattgggcactgttggcgcctgtgccctcagacgcagaaaccttcggacatacgcctgaaggtattcttcgtgg

SEQ ID NO: 77634 - DNA, 353 bp, Zea mays
  unsure (1)..(353): unsure at all n locations
tcacacctctgaactaactcggttgcatcgntcttcgttgtctgccaatagaatcctgacctgaaaacctttccgactagtgttctggatgctgcatgtatcccacattgcctgcatggacctcctccagaagttgtttcccagtggacgggagaacgcacttcatgaggatgcctgacgcacccctcctatacaatacctccccaatgagcgtatagtgagctgattgcctggcaatgcgctctgccgcgttcttgtcatctggttcttcttcattctttatatacttaataatcggccgcctccagtcatcagagtctgactcgggttgatctatgatgttgcattcttct

SEQ ID NO: 77635 - DNA, 358 bp, Zea mays
tggatattctttacgaagcatgaaaagaagggaaggtgttttttcttcaaagactcaaaaaaaaaaaggtacgtatgtaaggtttcatccatcgtaaagaattgaaccataagggaaataaaacaaatatattacatacaggattacaagatattacacatggtacatttaaaatgtttttacaaatagcatctagtcttccctaagtaccacctctgcatattcattcagaagccgattgacgacttcgtccataatatcttcggccatctttttaatttcgtcgtcccccttcggctgagggcccgaaagcgctttagtcggatctgaagcaggacacgactacattactattaca

SEQ ID NO: 77636 - DNA, 295 bp, Zea mays
  unsure (1)..(295): unsure at all n locations
ctgtattcccccttatacaaacattggtgcaaggtacacaaatacccaatgcacataagtacatttgtcacccaaaccagtacaaaaaactttatgtcatccttgcataccatccacacaggacgcacaaaggagacanattactagttggtgtacctggaacaccgataagttacaatatcttttaccccttattctacttgttgttctaatggggtagtaacacaaattttatactttgatgggatttgtttgaatcgatcaaaaaccaaagggttcttgtcggagaagaaaa

SEQ ID NO: 77637 - DNA, 352 bp, Zea mays
tgcacgagcgtgaaccgaggacccgcgccaccggaattttgaaatcgtgctcgccagagttcagaaccccgccggcgcacgtggaccgagtaagccactgcgccatttttgattcaatgcacagatagcctctacatcaccccgtgaagctcaccgtgcaattggattgaactagatcgccgtgatttggccggcacacccgccgccgacaagagcacccgcctgcgcacgtggaccgggcgatttcggccatccccgccgtcgagccgtacactgttgtgaccgtcagaacctcccggagccaaccccgcccctcgccggtcctctctcgccgccggtaagccgcgccacc

SEQ ID NO: 77638 - DNA, 353 bp, Zea mays
ttcttcggcggcatgacgaaggtgatgcttgccgaatgtgttcaaaactcaaaaaatggaagtgagttcaccggaggtgggcgccaatgttggggacttgttctcgaatgtaagagttaagaacaaggcaacataaaaagtgttaaatataaaagtccttcgttcttcaagacattaaattccttcgaatataatgaatttcggacgaaggttatgaaggaagaaaccttcgtaagctcgatagatgataaggaagatttcatatacagaatacaaagaataatataaatattatcatcaacttatttttattttcattatcatattcagaacaacaaattataaaaatacct

SEQ ID NO: 77639 - DNA, 354 bp, Zea mays
tctaaagggagagcacattttaggattaacaaatgtttattttgagaaagacaggatttgtagagcatgtcaggcggggaagcaagttggagtccatcatccacacagaacatcatgacgaccgacaggccgcttgagctactccacatggatcttttcggcccgattgcttacataagcatcggcgggagtaagtattgtcttgtaatagtggatgattattctcgcttcacttgggtattctttttacaggaaaaatctcaaacccaagagaccttaaagggattcttgagacgggctcaaaatgagttcggcttaaggatcaagaaaataagaagcgacaacgggacggag

SEQ ID NO: 77640 - DNA, 343 bp, Zea mays
tcaacggtcagaatccaacggcagtgatgacgttgctgtggcaccggacatgtccggtgtgcaccggactgtccggtgcgccatcgaacaaacagcctccaccaacggcatgttggtggtggagctttaataccccaatcaccccaccattcattgcatccaagatttccacttctcaaccacttacaagagctacgcattcaattttagacacaccctagagatcaaatcctcttcaattccactcaaggctttattgactagcgagagagatttgccgtgttattttgagctcttgcgcttggattgcttcttttctttctcacttgaccttgagatcaaa

SEQ ID NO: 77641 - DNA, 361 bp, Zea mays
tgtacacaaagttaggttcttacaatcttcaaaatagggtggtcgttcaaaaaatactaagtcactgatatatccattaagagatatactctttatgtccatttgatataacttgtgtcatgagcacatgcatatgccaataatattcttattgcttccaatcttgttaccagtgcatatgtttctccaaagtcaaggccttcaacttgagtataaccttgagccaatagccttgattttttcttactataataccatcttcacttagtttgttcttgaagacccacttagtgcaaataacattattcttcttggcctctcaactaattcccaaactttatttttagcaaattgtcaagct

SEQ ID NO: 77642 - DNA, 370 bp, Zea mays
ctatatcagaagtaacagcacatcatatgtacgacatctttatattttatttgcagtgaggcgtgcaaaggagatgatatagagttctcatccaagtctactcctaccatgtgcaaatctctacactaacacaacctaaggttttcttttgctcatgcaatagcacccaatccacatctggacacagaaaaatgaaccatcaatttctaaacactttaatttagccgccaggacgatacactcttgactttgtatctatattactccaagattcaccttgacaaactgtgctactgtcagaatcccagcaacccatgctacaagagaggaacacttatatagaaaacaagatcagattggccgtaccttt

SEQ ID NO: 77643 - DNA, 354 bp, Zea mays
tctaaagggagaacacgtgataggtctaaccaatgttctattcgaaaaagatagaccttgtgcagcttgtcaagcagggaaacaggtgggaggagcgcatcacagcaagaatgtgtgaccacttcaagacccctggagctgctgcatatggacctcttcggacccgtcgcctatctaagcatagggggaagtaagtatggtttagttattgttgatgatttttcccgcttcacttgggtgttctttttgcaggataagtctgaaacccaagggaccctcaaacgcttcctcaggagagctcaaaatgagtttgagctcaaagtgaaaaagataagaagcgacaacgggtccgag

SEQ ID NO: 77644 - DNA, 356 bp, Zea mays
tgaagccatggtaagtagcataggccaataatattcgaattgtctcatgcctagctacgggtgcataggtttcaccgaaatccaaaccttcgacttgggagtatcctttggccaaagtcgagctttgttccttgtcaccacaccatgctcatcttgcttgttgcggaagacccatttggttcctacaacattttggttaggacgtggaactaaatgccatacctcattcctagtgaagttgttgagctcctcttgcatcgccaccacccaatccgaatcttgtagtgcttcctctaccctgtgtggctcaatagaggaaacaaaagagtaatgctcacaaaaatgtgcaactcgag

SEQ ID NO: 77645 - DNA, 355 bp, Zea mays
ttggggagattgagggagttaattcaattcttatcaactcattatatcaatcttcaaatgatctacatattcaagattgacccaaggctacttcaatttattgtattcaaaacccatatcatctcggggaagatattgatgttgtaggaattgaagaatcatcatgtgcggaaaaaacaatgcctacaacatggaggactgtcaaaggatggtaacacttatgcttttaagtgcaagtatcttaaattatcatttcttatgtgtcttgtgtagtcacatagaaaaaggaagcacttaagatgttttttttgtcaccattctttgaagaaattcctctcatatggcagatggcata

SEQ ID NO: 77646 - DNA, 358 bp, Zea mays
  unsure (1)..(358): unsure at all n locations
tctgaagaagtncgtcatctagctcatgatgagcttatttttatggcctcaacacagagagcttcatcaagagggcttcttcaacgaggatgactggtatgaggatttccatatggaaattttgcttttgatgatgcttctcctctgtcagcagaactgcaggctacaccttggccttcgtcttacaagcccccccagcttcccatgtacgacggacactcagacccgaagcaatttttgatgagctacgaagcaaccatatcttcgtatggtggcaatactgcagtcatggcgaagtctttcatcatggctgtcaagaatgttgcacaaacctggtactcctctcttcgaccaggaa

SEQ ID NO: 77647 - DNA, 353 bp, Zea mays
tcaataaagtaccacctttaaaacaaacaacctgcatggttggaggacgctaccgccaccgacttatctctgccattgggatattttctgtctttgaagcatttgtggctcaccattcattttcttgtgtgcgaagcttttccagatttatcttccatgtttttggattttgtgcttttcgtatgtgattttttatcatcttctagtatcttgggtaatggaatcacccacactccttcagaagttatgaacttatggccaatagtttgttcatatcaaccaattatattactgccttttcagcctttgataggaaaggagttttactattagtttctgtagtttctctgtgt

SEQ ID NO: 77648 - DNA, 352 bp, Zea mays
tcactaaaaaagaaaaaggaaaaactctacacagtactgggccaaatctagctcaagcggcccacaccagagagaaaacgcgcccacgcccgcgcgcgcgctggtatctttcagaagggccctcgacttaacggttaacttgaaataggtttctttactgttttcccaggtcgctgacaactcacaaaaagaccctcggtcttctattcttttgcgcgacggggtccacgacggtgtcgagcgcggccgaagtccggcgagctcctagaccggcgggatagggcaacggctagggttcccgagcgacggacacggaattggacccatcccacacctttcccccaacttaatt

SEQ ID NO: 77649 - DNA, 350 bp, Zea mays
tgccaagccctcggacccggccggatatcaccggaggttttttatcgacctcaccggacttcggtcttccgccgtcgcgcgtggaccgagctatccagtaggtctccgccaattcctttcgctcatatcttctctggcatcccgtggacctccctgacccatccaattgaactatctcgtcgtgaccaggccggtctcctcgccaccgacgagcatccccgcctgcgcgcgtggaccgaccgactccggccatctccgacggcgttccgcacaccgttgtgatccccgagacctccccttcgtcctcgaccactataccggagcaatctcgccgccggtaagcccctccg

SEQ ID NO: 77650 - DNA, 339 bp, Zea mays
ttagggtaaaagtcataaaatgaccccaaaaataaacttttatcacctttatacccctgggataccaaaaacactaattggaaccctggaaaaccctaaaaccaaaccctagggcctatgtgcaaaattagtccactttgggactaaagtgcaaaaaccaagttaaataagtatcttaagtcatttgggccacaaatatgggagtttgcaagttaaaccctgagatttagacttatgtgcaaaagagccacactctttctcaaatgcctaagtctgatttcagtgatattggctcaactttggagccttgtaactttcaaattatagagtttttgccct

SEQ ID NO: 77651 - DNA, 350 bp, Zea mays
tatgaagattcttcatcccaacatgggctagtcggcggtgccagagccaacccatgttagtcttagcaattaagcaagtgtcgggttcagctctatcaaaatctaccagtatagctgaccctctaacactcccttaaatgctattgaatcatcacttcttctaaagacagtgacacctacatcagtgaaaagacagttgtaacccattttacataattgcgaaacggaaagcaatttgtaatctaaagaatctacaagaaagacattggaaatggaatggtcaggtgatatagaaattttacccaatcctttgaccaaaccttggtttccatccccgaatgtgatagctc

SEQ ID NO: 77652 - DNA, 347 bp, Zea mays
tgtgaaatgctctacatcccaaagttgaagccataccattttgagcaaatttggcacaccggacagtccggtgtgcaccggacatcgcatatgctgctcttgttttttagcaattccgacttcgtattgtgggcataacttttagctccaaactccggttttgatgatcttggactttttggaaagcctataaaattatctacttcttagagttgaagccatgtcagtttgagtagattttattttgtgaaacactttcaattcagtcagtctttcctctcaactttgtcaagttcacttttgttttgcatctttgtatctcacttctacttcttgatgtgttggac

SEQ ID NO: 77653 - DNA, 361 bp, Zea mays
  unsure (1)..(361): unsure at all n locations
tacccatgatgaggcatgtgaccagttaanaggtcctcattcagcaggcctacatttagtataatccttaatcaacctgggtagaacatcacatgttcctagcccaagtcccaattaagtacttccatccttaggattgtttgcgttccttaggacgaaaagagcattataggaaactttgcagtaagatcccaccattgctctcaatgaaaatattcttgcaggcagaagccatccttcctcaggataacccttgagctaggcattaacgcaaaggacaacctctatccacaagatctaagcagggataagcatttttgtaaatcatattttgatacttcatcagaagtatctataaagg

SEQ ID NO: 77654 - DNA, 359 bp, Zea mays
tatgaagattcttcattccaacatgtgctagtcggcgatgccttagccagcccatgttagtcttagcaattaagcaagtgtcgagttcagctctatcaaagtctaccaagtatagtgaccctctaacactcccttaaatgctattgaatcatcacttcttctaaagacagtgacacctatatcagtgaaaagacagttgtagcccatttgacataattgagatacagaaagcaaattgtaatctaaagaatcaacgagaaaaacattggaaatggaatggtcaggagatataacaattttacccaaacctttgaccaaaccttgatttccatccccgaatgtgattgctctttggggat

SEQ ID NO: 77655 - DNA, 352 bp, Zea mays
ttgatgtgcactcaaagttagtttcgtcatgctcttaaatgttaagaaatgtgccttgctaatattctaagagaatcaattttctatatactaatatgtattttgttttacaattaggtgaagataatgtggatgttaatagcttttggtcatgtcttgaagacattgaagaggaaatgaaggaggatccttgtatcgcttcggatgattagtttaaacttaaatttgtgattgttatcctataacttgtttgacatttattattgctatgaactgatgtcttggaagttgtaaactatatatgtatggaactggagctgttgtatgtttgttgtatgggactatttggaaa

SEQ ID NO: 77656 - DNA, 355 bp, Zea mays
tgcttttgaaataaatgtaagtttatgtaactgcttccgcatttctttatctccgatgttctgtaatgtctgcaagacgggtgagacgttcctggtgaggtaaggaaagataccgagcttgtcaagtgacttaggaacatctacaggatgtctgatgtctgttagacaaggacaactgtaggtgggcctaattacttgggaggttccgtcacacatatcctagtaaaaagccttctacagccttaggagcaaatttggattttctacctcttttaacaagaataaagcatttgctaccaaagactctgaaatatgaaatattgggctttttaccggttaggagttcatatgatgt

SEQ ID NO: 77657 - DNA, 357 bp, Zea mays
tgccagcacgtcctagaagagtaaccatacatgcataatgtttctttctcggagaaacaccctactcattatgcatttctttgaaataatgacgcccttcctctgtgaagccagttgcgcgcaagcagcaagcaagcccgtgaaggtgaccatgtcaagcttttgtttgcacttcagcattgagtgaaacatgcaaactgcattgacagcctctccatacatagcataaccaccgatcatggcattccatgacaccacattccgagataccattgtatcgaatattattctcgcatccttaaccctgccacactttgcatacatgtccaccaaagcactgctcacataaacatcatg

SEQ ID NO: 77658 - DNA, 354 bp, Zea mays
tgttgagactcttacttcttctgatgttaattgtgtgtgtttgacctctgacatttgtctggtaatgccaaagaggactaccttagtgttgttgcccattacataaaccctattggcaactagagaaaagggtgcttgctttagtgcttattgatgtgtcacacaatggacaaaacattgctgatcgtgttgctggtgtgcttgctgattatggcttgactaataaggtgtttgcttttaccctagacaatgcatcatctaatgctgctgccatgaggttgcttaaacctataatgtcaccatatctgggtattgataatggggcataatctgaaatgttcttgcatcagcgtt

SEQ ID NO: 77659 - DNA, 357 bp, Zea mays
tgtggaggttcttcatccccacatgtgctaagcggcgatgccacaaccagcccatgcaagtcttagcaattaagcatgcatctagaccggcctcctcttttgcaaaatcaataaataaagtttgccgtctaatacacccttaaaagctaatgaaccatcacatcttctaaagacaaacacatctgcatttgtaaatagacaattatatcccatattacataattgactaacagatagtaaattatatccaagagactcaactaaaaacacattagagatagagtgctcatttgatattgcaatcttgcctaaacctttcaccttgccttggttcccatcaccgaatatgattgaatc

SEQ ID NO: 77660 - DNA, 353 bp, Zea mays
ctttgaagagatattgagtgaccgcggggacgtctgtgcattttctggagcaaggggagttgcagctattttggagaaggcagggtgcgaacatgttaaaactttggcctagccgaagctggcttctctattgacgatacgaaagacacctcggccgaagcaagctcaataggcggatttttttactgatatctgggaaaatggtggccgatggatggcccatgaaataatgaagaagagcgaaaaagatattcatgacgctcgagaggcaacaaaagcggctgaaaaagctgcggaacttgaaagacggataggtattacttaatgacttttgactttgttgtttatttttg

SEQ ID NO: 77661 - DNA, 349 bp, Zea mays
tatgccgaaatttaatatatgggcaatttgagtgaaattatgcttatctaggcatgtggattaataataataattggaagaacaatcgttcaaattggtcattccaattagaatgattttgcgtgtgaggtgaggtggtgacatgcccaagtagtcactgcttccctatgtttataagccgagtcaatacccattaggcgttcattaattttcacgtcgcgcatagtgtatggttgtactcgtgacaaggaggtgtaggtcttactcaattagaagtttggttggatgtgataagtagattggaagtgtgggtttgttgagcactgtgttgttggacgtgtatgtcgaa

SEQ ID NO: 77662 - DNA, 352 bp, Zea mays
tagcaagtgcgagttctggatcagagaagtcctgttcttgggtcacattataaaccaagagggattggctgtagatccgaagaaggcaacaactatcttggactagaaagcccaacagatgtccgaggaatcaagagtttcatcggaatggccggttattatcggtgtttcattgaaggtttctccaagattgccaggccaatgacagccttgttggcaaagaaggttgagttcaagtgggccccagcatgccagaagtcttttgagacattgaaggagaagttgacaacggcactagtactgattctgctagatgttcacaagccattctcaatatattgcgatgcttcgt

SEQ ID NO: 77663 - DNA, 351 bp, Zea mays
ttacaatccaactggtcccaccttaaaattcatccggagtcaatagaaatcgtcaaaacatgacagcgttcagattcagttttagtgctacgatatcgtctattgggcgttgggtcatgtatcgtgttaaagcccattaggggtagctccagaggttgtgcatgcccctaacctctattttaacagcagtcgcttccacattagggtttaggttttgcttagatcatatctgtcatcgaacagtgttgtcgttcatcggtttgtgaaaccccacctcgtgatcattgcagttttgattgcgttctttctgttcttgcttgtgttcttgattgcgcttgcagggataatcct

SEQ ID NO: 77664 - DNA, 348 bp, Zea mays
tatcaagaatcaaagactcttttgcagaaagtgttggagacttgttctcaaaagcttactatgagtggatccttaaagtccatttttacttgtcaggttaagtaaagtacctgcatctagagttctttctatcctagttcaagcacttggcctatactagtcgtcttttaccatcccttcagttcactggatttctacgtgtaagtcagtgaccaagtcttcatatccgagaagtaaaagtgatccgtatcgattaatacccagctggggatctccaaccacatgacatatgtagcacttaacccttgcatatgtcaactcactaccgggtttctcaagaccagatcg

SEQ ID NO: 77665 - DNA, 360 bp, Zea mays
tccctttaaccccgaaacgtgatactcccttcattggtgagaccttcaagtagacatagtctccttccaggaaatataagggcattcgccgtttgtctgcataactcttctgacagcttgtgctttattcatattatgaataattttctgaaccttatcctcggcctctttcaccatatcaagcctaaagaaacacctttcaccaggttcagaccaatttagcggagtacgacatcgacgtccatataaagcttcgaaaggtgccatcttgatactttcttgatagctattattatatgaaaactccgctaagggcaaacattcatcccatttctgtgagaagtccagaatacatgcccg

SEQ ID NO: 77666 - DNA, 356 bp, Zea mays
tcctccagcattcttgagcccctcgggcatccgaaggttacaatatgttccactaggggttatgaagctggtttttggctcatcctccttcttcatccaaatttgatgatagcctaataacaatccagcagactcataagctctgatgaagctgctgcatcaactagagaatctatccttggcaatggaaattcgtccttcggacagaccttgttgagatcagtaaaatcaatacacattatccatttaccattggccttttttaccacaacagtgttagccagccattctgggtattttacctctctgataactccggcactgaggagacttttcacttcatttcgagcaccttc

SEQ ID NO: 77667 - DNA, 351 bp, Zea mays
  unsure (1)..(351): unsure at all n locations
ntagatgactacgccaagctcttcaagaatactctntctcgtagtcatgtgcaggctcttgctgccctttttgggtggtctgtcccagataatttaaaatatatcaatgggactgggatattaccgcaacaagcatattttagctggcagtgttgttgttcttgtttgtcgatttacctctcattgttactacatggatccggaaaaaataattgtttggaatgttagaggtcttaactctctggctcgacagaattctgtccgtgagctcctcaattgttatggagcggatataatctgtcttcaagaaactaagatggcacaaccttctccgcgtgctctcctctctat

SEQ ID NO: 77668 - DNA, 355 bp, Zea mays
  unsure (1)..(355): unsure at all n locations
tcggcattgaaaacagttnttagcatttccgaagatgtctgattacaaaaaggccagtcccgagatgaagctgagtctctctgaagagaagaacctggggttccttatagcgatgcggagaccaatacggaaaaaattaccaaggagatcctggaaggcttgtctgaagacactggtgacagcgacagttacgatgtagaaagtggtggggaagagtccgaagatcggccatggcggccaagtcacgcggttttcggaaaaaccaccattaagcagagtcatattgataatatgagggggcgatattttcgagatatatctattgtgagagctgatgctggagaaaaaacttctc

SEQ ID NO: 77669 - DNA, 359 bp, Zea mays
tcggcagcagaaagtcctgcaaagccaaaaaaacgaagatttatccaagtgacagatgtgattcatcagacaccgccaccggtatcggcgtcaaaaattgttactgccaagacctcaaagccgaagccggcgcagacgccgctaccggggccaaaaccactgaatttgcaaccgccggagccgaagctaccggagccgaagccgtcgaaactaccggagccgaagctaccggagccgaagccgagaccaccgaagattcaaacctggaaaccacacttgaagttattgacaatatacttctgaaaatggctgaagaagaaactgttgtggctgcggtgagcacggctactgaaaaagga

SEQ ID NO: 77670 - DNA, 353 bp, Zea mays
  unsure (1)..(353): unsure at all n locations
tcaaggaatcgacagtcaagcttcgtcgaccaagtgatttatctcctcgagctttacgagattgaagattgaagattctgagcatctgtttggtgaaggcaagtgtcctctacccattatgtcctatctacttataattcactgtcccgcattacttaattgaaacctaaggattgactagctttctatttaccttatccttgtttaccttttgggttatcatggttagcttcacgctattgctttactttaatcaatgaacatgatgtgaatattatgatacgatgatgttatccctatgaggttcttgtgattactttagggggctcaggctgttntcctgagtgcctctc

SEQ ID NO: 77671 - DNA, 355 bp, Zea mays
tccaaggcagagcaggctctgatggcaacaaatgcagtgtcgcagctcacaagcgttgcccctttatacaagttgtttcactcatcgaccactgaccccactggccagaagtattcgaaggtcacttttcataacgagcttcgaggtgtttttcgaaccttcggcgtgaagcctcccgatcacattttatgtggtctaagctcgttatggaaaacgaactcattccgcaagggctactgttgaggcctactttaccgaagatcctcaaaacaccttacctttggcctaagcaaatgtattgcagacatactacgaagaacagatgaaaccagtcttcagataaagcggacaacga

SEQ ID NO: 77672 - DNA, 352 bp, Zea mays
tagaacatgcttcgttggctttactacgtaacctgttgtgcgtacgcgttgagctgaccaaggtgccttgcatctgcacgcaagctctgacctgatgttcacatggtcttgctggacttgtcaagttgtttctactagactactagtacgctgtccgtggcaagttttgcttcttcaacaaatttggctatgtaaaaggagagaacccaacaagtccgttgacactccagatgtaattttagtgatgcagcaatagcaagatggcagtgcgaatctgtcaattaaagcatagcaaagataaagtcagggctggagatcagcaatatatgtgtgcatcgagtgcatgcataca

SEQ ID NO: 77673 - DNA, 351 bp, Zea mays
tcggcattactttcaagcatacaatattggtgtttctttttcttatccattgaaggatattatgagaaatagagaagctactgggcggattggaaaatgggctgcagagctcaatgaattttgcattgattatgtgcatagatcttcgatccagtctcaaacgttggcagattctatctccgattggacgccatgggctcatgatgaagaaacaaataaagatgccgaagtatggacagtgttttgcgatgggtcttggggaaccttcacagcatgagcagacgctgtgttgggctcaccatccaaaggtaaaacttgttatgcggcaagactcgattttagttgtacaaa

SEQ ID NO: 77674 - DNA, 349 bp, Zea mays
tctctttttgctgaacaatgaagagatcgtattaatgctttatagaacaaattggtgtataatatgaggagaaaagtttgccttttggcagcttacacaacaaatattgactattggtataagttctctctcaaaattattatacctaaaaatgttgcattgatcgatacccaatttcagaacggtatgagtaattgggtaaaccatgggcagtgataaaaacgagctggactatacatctctgcatataaaaatctttgcttggcagtattggcctgatgtcgtgcactttactaccaatataaacacattttcctatgtgcctcaaagcacaatgcaaccagtgaat

SEQ ID NO: 77675 - DNA, 353 bp, Zea mays
tcggcgtggtagcagaaaaggaaaccgacttatagatgaaaaggctattcagacctcgggggattactatagaattattaccacatgtaaagggcatgaatgtaatttatatgggctgtgtcccgtgcctataaataggtgaacagtaccctcgtactgttcacgctgatttggtatttgcttttgcgtcacacctgtactttcatctccttccaagctgaaggttcatttgtaagttgatgtcatttctgtttcttcataataataatgcaaaaataagttgataataatatataattgtctatgttatccttcatatttcttatgattcattcttcattatcgtatgctgg

SEQ ID NO: 77676 - DNA, 349 bp, Zea mays
tcgtaattatgctcttatcagccttcgtccaaggctcattatcctcaagggaataatgtttcatggacgaaggacattgacatttaacattttatgttgccttgttcttaattcatagcatttgagaacaagtccccaacattggcgcccaccgtgggtgaactcacttccactttttgagctaatgacttcgttcaacgaccaagctggagctacttcggacccgaagctggtgctcccgatcacaggtggttcgtcctcagagccagctaacaagaaacaaaagaaggaagcacagagaagggtacatcatgttggggtgcaaggacccttcatcaagtcaagatgg

SEQ ID NO: 77677 - DNA, 348 bp, Zea mays
aagttatcaggaagagatggacaatgcacttataaacttcaacatttagaactaagttaatctaacggatgagaaatcttttctttgcaaaaaaaaagatcaccaccactaccacacctggatcagacgctcgcctctgggcacaccgtttgccccctaacagacgccgctttgccgaccaatggtgtactgtccttagccctcgaatatgaattccctagctcatgtaattccttgaaaaagaatcactcttacccctccccctcaaccctggacgctcctttgtttgtaccacctttcattgtaatcgccgcaccccggcccaatgcaatgcaatccaggtgggga

SEQ ID NO: 77678 - DNA, 148 bp, Zea mays
  unsure (1)..(148): unsure at all n locations
accaaaataaaaagcggccatgtgtataccctcccccccagggcnatgtctccagcgcccaaaaaaaccccgggcagggcacccagacagaaactttttttcaaaacaagcacggcggggcacacaaacatccaaaccacccccacca

SEQ ID NO: 77679 - DNA, 353 bp, Zea mays
tgcttttgaaataaatgtaagtttatgtaactgcttccgcatttctttatctccgatgttctgtaatgtctgcaagacgggtgagacgttcctggtgaggtaaggaaagataccagcttgtcaagtgacttatgaacatctacaggatgtctgatgtctgttagacaaggacaactgtacgtgggcctaattacttgggaggttccgtcacacatatcctagtaaaaagccttctacagccttaggagcaaatttggattttctacctcttttaacaagaataaagcatttgctaccaaagactctgaaatatgaaatattgggctttttaccggctaggagttcatatgatg

SEQ ID NO: 77680 - DNA, 355 bp, Zea mays
tgaagccatggtaagtagcataggcaagtaaaatgcgaattgattctagcctagctatgggtgcataggtttcaccgaaatccaaaccttcaacttgtgaatatcccttggcccaagtcgggctttgttccttgtcaccacaccatgctcatcttgtttgttgtagaaaacccacttggttcctacaacattttggttaggacatggaactaaatgacataccttattcctagtgaagttgttgagctcctcttgcattgccatcacccaatccgaatcttgaagtgcttcctctaccctgtgtggctcaatagaggaaacaaacgagtaatgttcataaaaatgagcaacacga

SEQ ID NO: 77681 - DNA, 357 bp, Zea mays
  unsure (1)..(357): unsure at all n locations
tcagctccatctatattgtggatggctnttgagtctgttcaatttccctcagcctttctggcagcttcctgacttccatgaattgcaatagggccttgttccgaatgtatcttcatgcataggtatgctggatgaagaattgcttcgaaagcattaagtgtcccacgaccaatgattgcattgtaggggtattccatgtcaacaatatcaaacacaacttgttcagtccttgtgttgtgaacaaatccgaaagtcactggcattgtgatcttgcaatgtgctacgatttgccttcctccgaagccacaaagagggtgtgtagcatcatgaatcttgtcctctggctcttgcatctgt

SEQ ID NO: 77682 - DNA, 354 bp, Zea mays
tctaaagggagagcacattttaggattaacaaatgttcattttgagaaagacaggatttgtagcgcatgccaggcaggaaagcaggttggagtccatcatccacacaagaaatcatgacgaccgacaggccgcttgagctgctccacatggatctattcggcccgattgcttacttaagcatcggcgggagtaagtattgtcttgtaatagtggatgattattctcgcttcacttgggtattctttttacaggaaaaatctcaaacccaagagaccttaaagggattcttgagacgagctcaaaatgagttcggcttaaggatcaagaaaataagaagcgacaacgggacggag

SEQ ID NO: 77683 - DNA, 353 bp, Zea mays
tgtgaaggttcttcatccccacatgtgctaagcggcgatgccacatccagcccatgctagtcttagccattaagcatgcatctagactgacctcctcttttgcaaaatccctaaataaagtttgccgtataatacacccttaaaagctagtgaaccatcacatcttctaaagacagacacatctacatttgtaaatagaaaattatatcccatattacataattgactaacagatagtaaattatatccaagagactcaactaaaaacacattagagatagagtgctcattagatattgcaatcttgcctaaacctttaaccttgccttggttcccatcaccgaatatgattg

SEQ ID NO: 77684 - DNA, 351 bp, Zea mays
tacccttgaagcatggaataagctacagaggaatctattcagtcgctcagtcaaaaggaccggccgtgagaatcaaagcactgcccctgagtcaaagtaaacaggaaagagggcagaagaagttattaccatacagagaggcaaagattcttggaactagagaccacaaacatcagggtcatttgaccccaccactcacccgttctccccgcacgcgtgccctgcctccatgcgcactaccaccgccccatgccctttttgcagcgcacccaccgtcgccattaccgccagcaacaccatctccccctgcatcgaacttgttaccttgtgtcacctgctccatcaccacta

SEQ ID NO: 77685 - DNA, 352 bp, Zea mays
tcatatcatctctgggtacctgcaaaacttattaagtatattttggtacccatctcatgataggtccatcaaggttagccaataaggacttaggcatccaaatagcctggtcctagaatgtggtgaactcatcacctttctagcacaagagtcaaatttgggtctcctaagcatatttgaatgtattgacaagttaggcttaggagttttaccctttggacaaaccttgaatagatgacctttttcacggcaattgtagcaaatgtgatgcttgtccttgcaatgcatttgccttttgctttcatcctttttgatggtcatctttcttgaccgtgcaaggtcttgattcttc

SEQ ID NO: 77686 - DNA, 362 bp, Zea mays
  unsure (1)..(362): unsure at all n locations
gacacttanaaactgagctttgattaaacttctgcttttattgttcgaagctttttttcttggagaggagctctgtatgtaattctgcaattttagcttcagcttctgccaataaaccttctgtgtctgaagctcgaagtccttcttttcaagagaagctgcttgatcttttatcttgctttctaaactctcaattataacttcatgttttttatcttcaaaatcttgctgcattctcaaagctttactcaacaacattactctgtgcacaaacaaccttcgttagaaaacatctatgttgtttaagataataaaaactgaagaaacgttttttaccttgaaattggaatagaataaactac

SEQ ID NO: 77687 - DNA, 243 bp, Zea mays
  unsure (1)..(243): unsure at all n locations
tctttcgagctcttgcgctnggatgctttcttctttctttgattcttcattgcgatcaactcacttgtgattgaggcaagagacaccaatcttgtggtggtcgttgtaggaactttgtgttccaagtgattgagaagagaaagcacactccgtccgagggacccgttgagagagggaaagggttgaaagagacccggtctttgtgaccaccccaacggtgagtaggtttgcgagaaccgaacc

SEQ ID NO: 77688 - DNA, 178 bp, Zea mays
  unsure (1)..(178): unsure at all n locations
agcaagtttgtgttcatcattcacacaagaacatcatgacgaccgacatgccgcnttgagctactccacattgatctattcggcccgattgctcacataatcatctgcgggagaagtattggcttgtattggggatgattattctcgcttcactcgggtattctctttacaggaaaaa

SEQ ID NO: 77689 - DNA, 358 bp, Zea mays
  unsure (1)..(358): unsure at all n locations
atgctattcttagctattaagcatgcatctagaccggtctcttcttttgcanaatcaactaaataaaggttgccggctaatacacccttaatagctagtgaaccatcacttcttctaaagacagacacatctacactttgtaatagacagctataccccatgttgcataattgactaacagatagcaaattataaccaagagactctactaaaaacacattagagatagagtgctcattagaaattgcaattttacctaacccctttaccttgctttgattccatcaccgaatatgattgaatctcgggaatcttattcttgacgtaggaggtgacatcttcttctctcccgcatatg

SEQ ID NO: 77690 - DNA, 390 bp, Zea mays
  unsure (1)..(390): unsure at all n locations
gtcatgatgtgctccacgtatctgaacttatgaagtgtttcgtgtccanagaacagttgcaatagaaaaataatgtgcagagactaactacctagtatctatcaaatattgacccttgaccgtgtacaaaaacaaatgatcaaatgtgcaagtgaatggagtcataggagaaatgagctcttggaagagaaagaatgcagtaagtctccacttttctaatcgagaatctcaggtggatattttacgaggtagaattgtaagcccacaaattgataaaatatataaagtagaaataattattatatgtggaattggatatggacctgcgatattggtacttttcttttgtgctatcaattgtgtgataatacgcaatacaataataatatg

SEQ ID NO: 77691 - DNA, 350 bp, Zea mays
  unsure (1)..(350): unsure at all n locations
gctcgatcttagcctgcactcttgcgattggccgaacaacctggatcagttaaaatggccttctgatccatgctttaactccgaaacccnaagcaggcttctactcagaatattgtttgacaactaanatcgagttttgcgataacaagtntaactttggatggtgagaccaacacaacggctgctcctgcttcgaaggttccccaagacccatcgcanaacactgtccatacttcggcatctntatttngttcttcatcctgagccccttgcgtccaatcnngcgataaatctgccaacgcttaagactggatcgaagatctatgcacataatcaatgcanaattcatt

SEQ ID NO: 77692 - DNA, 250 bp, Zea mays
  unsure (1)..(250): unsure at all n locations
cgtgatatgtttgactcacgtgcaattcgaaaaagatagaccttgtgcatcttgtcaagcangtaaacaagtgggaggagcacatcacagcaagaatgtgatgactacttcaagacccctggagctgctgcatatggacctcttcngacccgtcgcctatctgagcatatgagggagtaagtatggtctagttattggtgatgacttttcccgcttcacttgggtgttctttttgcaggataagtctgaa

SEQ ID NO: 77693 - DNA, 341 bp, Zea mays
ggcctttatctacttgcttgagcgtgctgaaaaattatctcgtctcacttattaacgaaaatgacctgttttaaagtcacgagggtctatgctcaaaaacttcaagaagcgcctggcgtgactgtacaatcactgctcatttctaggatatttgcgaaacctcaagagcttaactcaatgatcagattttaactcggttttgttcactttgacatacaaatactggatatttagacactctatccatgcttacttcacccaagaactctctacattatggccgaatattacgtaatgctactgaggcccaaagatgctgccagtccaacgcaaactcactg

SEQ ID NO: 77694 - DNA, 180 bp, Zea mays
  unsure (1)..(180): unsure at all n locations
tgggatctaccgcaatccctttgcagataatacatgtcccagaaattgaatttctttcagccagaacacgcatttactgaacttggcatataactgatgttccttaagcgcgtcaatacgatccgtaaatggtgagcatgctnctcttcattctttggatatattaagatatcatctatg

SEQ ID NO: 77695 - DNA, 389 bp, Zea mays
  unsure (1)..(389): unsure at all n locations
catctcttgacacatagtggtgtcagaggtcttcattgtaagacaatgacaggcaaccttactgctcagtgcatctgcaccacattggctntgcctgngtgataatggatctccagttcatagtctttaataagctcaagccatcgtctttgcctcatatttaattctggctgggtgaaaatgtacttcaaacttttatgatctgtatatatgtgacagatatttcccagcagatagtgacgccaaattttcagggcatgaaccacagcagctagctccagatcatgagtngggtaatggctctcatgtcngcgcaactgcttgaagatacgcaattactcgcctcttgatcagacacagccgacccactgcagatcatacaattacat

SEQ ID NO: 77696 - DNA, 255 bp, Zea mays
  unsure (1)..(255): unsure at all n locations
tagagagtcaggatacaatacagaacagagcacacagacgctatgatttatcccgaggtcggccaacctgaatgcttgctagtcctcgttggagttagccatacctgggcttggagtctatttcaactccttcctttcgttgctcagatctgtcagtatgacagatagagcctttcactatttgagttngttacaacaacaccatggctgcttacanacttcttggcagcacctcggtagagtaacgatatgctc

SEQ ID NO: 77697 - DNA, 233 bp, Zea mays
  unsure (1)..(233): unsure at all n locations
atggaagtatctggatcactggcgtcctgggatgggcggnggcaacatcagntggtcggaggcgccagtttggagatgcgccgtgggcggaagaccgagtatctcgagatacccctcanagacagcattaaagggtggcgtctggagtnggttataatggataactatggaaattctctcccttcccgctcanggagacaggcagacgttcgtactccgagttggactgaatc

SEQ ID NO: 77698 - DNA, 283 bp, Zea mays
  unsure (1)..(283): unsure at all n locations
tttatgataatcaccctctgtcaccttaaataaacaatctttatgtttagatgtactatgctataattacaatagtaaagataacctctttataatataataatatatatgaggtctgcaaacatgaacattccttcagaacagaacaangcatacatttatgctaatcttccttgcactcatgatangtctgtccatactaacagtttgtgcccatcaaagctgctaagacctatgatactaacatctagcatcttaactattaatcttgataacactaagg

SEQ ID NO: 77699 - DNA, 242 bp, Zea mays
  unsure (1)..(242): unsure at all n locations
atatcatgttggttatcccgagcataanattaggagaattcattctaggaagtctcattctggntctcatcatngctttatgtataagaatgagacatctagttataggcattctacccatgttaaaatacctaanaagaaatcttctgttgcatcaaatgaacccaatattntatttaagacttttgatgcatcttatgtgctaactaacaaatcangcaaagtagttggcaaatatgttg

SEQ ID NO: 77700 - DNA, 461 bp, Zea mays
  unsure (1)..(461): unsure at all n locations
gtgtcgcgtatctgggcttgaccncggcgggtgatgtgatgactgcagcagcgcctgcctccgcatggcaccatgcgctgtcgcagtggattgtccaaactntctctgcggacgggtcccggtgtgttatctgcccagtccagtcgacgacgaagtctgctagaacttgtgacttgatggctgtcctgggctcgaaagtgatgtggtagctggagagttcgtccgcccatttggcgatccgtaccgatgcctccgaatttctgaacagttcgccgagtccgctatctgaggtgactcgaaccttgaatgcttcanaatagtggcgcaatttgcgcgaggacatancgactgcatangcaatcttttctagttccgtcatgttacatattgatggtgtgagcacttcagagacataatatactggacacttgctgatcacgcnnctctactgtctgctctga

SEQ ID NO: 77701 - DNA, 372 bp, Zea mays
  unsure (1)..(372): unsure at all n locations
ttactcttagcaattaagcatgtgtctagttcaagctctatcaaatctaccaagtatagctgaccttctagcacacccttatatgctatggaatcatcacttcttctagagacagtgacacctacatcagtaaagagacnagtgtagcccattttgcataatngagataccgagagcanattgtaatctaatgaatctaccagaacaacattggaaatagaatgggtaggagatatagcaattntacccaaccctttgaccaaacctttgatttcatccccaaatgtgatagctcgttggggatctggggtttctcgacgaggagaacatttctttctcccagcatgtggtttgtgacccactatcgatgat

SEQ ID NO: 77702 - DNA, 166 bp, Zea mays
ctacactgtactgaacattgcatagctaagcatctgttgagatatgatctcctctgtttataatggtcaggtaattattgctctgattctttatttatgtgggtatcatggcttaggatgctttagtattatctaagacatcttacactaaactatagatttagtg

SEQ ID NO: 77703 - DNA, 389 bp, Zea mays
  unsure (1)..(389): unsure at all n locations
atgtgttcaagggtaattggcacgactttgatatttggatcttctggctttgagtttggaaaagcagagaacacagatgatctttgagaagaggtctganattcagaaattcagagatctgaatttctctaanggttcattgatcaagggctgatttngngatttattntgagtattnttgctaagccttctcaatcntttcttgtgctaacaaatatactttaacttatataattggctcaactcanaatntaaacttttcatcctctnttcacatcttcttgaaatttgtcatggggtntactanggntttgaatannggtgacattctttctttcaaaagtctcaatgtntgacatgacactttagatatctggtgaatcttctca

SEQ ID NO: 77704 - DNA, 351 bp, Zea mays
  unsure (1)..(351): unsure at all n locations
gcgtgtatcccgcatttgccagcatggacctcatctagcaggttgcttccagtagtcgaaagaatgcattntatgangactnctgatgcgcccttctgtatagtgtttccccaatgagagtataatgagctgactggcttgcaatgcgctctgctgcattttttgcatccggctccttctcattctttatgtacctgatgattggctccttcagtcatcagaatctgactcttggtggctcagaatattgcattcctctacccgatctattgaaaaatctcggtgcagtacttctttgacgaaaaactcaggcgtgcctgagtctgactggatcctagctttgacaatgca

SEQ ID NO: 77705 - DNA, 468 bp, Zea mays
  unsure (1)..(468): unsure at all n locations
atgtacgagagtatgcgtcatgcttgcattgttncagatggaaagntgtgttttattttggacattggcaatgacatgggtggacattggcaatgacaggggtgattgtgatgtttctcataatgcgaacggtgtaacataattacataattntcacagagatttattaacttgatgaanggacttctctatgatggctgaatggctatgagctcttcagtgcangacacactgttngcttcatttngttccttcacttncacactgccatcatatggacaaggaatgcaaagcagtaacctgaaatgttggcagtaaaatccgtggacaactaccaatgggtgtgaccgatacangntatgcctttgtattgtcanataatcatataagaaagtctgcatttgaaaatgctccttttgtcaaagtgtacataacagtttaacttcagtactgagaatacatatactg

SEQ ID NO: 77706 - DNA, 201 bp, Zea mays
tacggtaacccgtagcctgtacggcttagagcgcgatgcgcaacgcggacggcggcatagctcagggcatcgcgatactacgcacattctatcgagtatcgcgctgcgcagtaattgcgcatcgctctggagcagtcgtatccaacgagtgagctgacgcgatacggcaatactcgatgttggcgcggcgattaggtgcat

SEQ ID NO: 77707 - DNA, 152 bp, Zea mays
  unsure (1)..(152): unsure at all n locations
gagaatagaagctctactcttatcacttgggattgaaggggttctcagggccctttgcatatttccttctctattgatggtataatggtgttaanggttgggtaaaagttacacatgctntacccacttgatcactctctntccccccttac

SEQ ID NO: 77708 - DNA, 425 bp, Zea mays
gcactatagagcttctatgtactagtgtggtctacatgccaaacacctttatatactatggcaactttgagcagagcgaagttcatgaagctaagctacaccaaacacccactaaatcattctaagtttgttctccaatcaaacatctcaagtttcactaagtttatataatagaatactaacattaataacgtcaaataagtattattatagttaatcctattttaatacacacatatgtaatggtatagaaattttgcatttctatgagttaaataaatttaaaattcttgtgtttgacaaagctaaatacttggatgggacacaaagcataatcgaactatcgctactcacagttgctattctatttatttaacttattgaacatcattatatcaaacaacatgttatagggtgcatgctac

SEQ ID NO: 77709 - DNA, 321 bp, Zea mays
  unsure (1)..(321): unsure at all n locations
aaatataagggcattcgctcgttgtctgcataactcttctgacgagcttgtgctttcttcatatnatatgaataattntctgaaccttatccctcggcctctttcaccatatcaggcctaaagaagcacctttcaccagggtcagaccatttagcggagtacgacatcgacgtccatatanagcttcgaaaggtgccatctngatactttcttgatagatattattatatgaaaactacgccaaaggcanacattcattccatttctgtgagaagtccagaacacatgtccgcagcatatcttcaagtatctggttcactc

SEQ ID NO: 77710 - DNA, 230 bp, Zea mays
  unsure (1)..(230): unsure at all n locations
aatcataaccatatctgctgaccacaatcttatataaccaagactcttaagcanatgtgcctaaataatatctgtcataccctttggagccataaccgncagacttgatgaactgctttactttctcaagatagtcgtcaggcaactggtttgtaagtgctggagctgcaaaatttgatgtacaacttagatccaaattcaacctcaattatgagatggtatagtgtctc

SEQ ID NO: 77711 - DNA, 97 bp, Zea mays
agtttactggagtgactgcatcgtgtcttcgtcgtcggagaggagcgctcgtttgtgagataaccctcctccccctcacgtacaacacacgactaga

SEQ ID NO: 77712 - DNA, 318 bp, Zea mays
acaacgatgtcgtgatctgctctgctctcatttgtgactaacacacgctgacaatgacgcttataatgctctgatcatctgaccaatctgtcttcggtgttccttaggctgatcatagcgaagcaagcagtgaatttattcaatactacaagaaacgaagccggctacctgtcataaaaatttattaccggagacgaagccacgcggttggaattgtgtgattggaaagccggttgcccaagaggggtctgcatcgcagatgggctggcacggaaactacccctggcgggaattcgcaactaactgcaacgatccgct

SEQ ID NO: 77713 - DNA, 323 bp, Zea mays
  unsure (1)..(323): unsure at all n locations
tatacccagctagtccaagaaaacttcggacttggtgaacagtcggtggnggtttccactccagaatatncttgaccttgctaggatctaccgcaattctttagctgataatacgtgccccaaaaattgaatttcttccagccagaatgcgcacttactgaacttggcataaagctgatggtcccttaggcgcgttaatacaatccgtaaatgctgagcatggtcttcttcattcttggaatatatcaagatatcatcaatgaagactaccacgaacttgtccaatcanggcatgaataccgagtcatttaataagtgaaatg

SEQ ID NO: 77714 - DNA, 126 bp, Zea mays
tcgcgctcaccggagttcaagaactcgcggcgcgcgtggaccggtaacctcttaccttttcccgattcgtcgcgcgcatggtctctgtgtcgtcccgtgaagcttctcgtgccccttaattgaact

SEQ ID NO: 77715 - DNA, 292 bp, Zea mays
  unsure (1)..(292): unsure at all n locations
cgaagctatacttcgaagatgaagagtgtgtctccttgngactcactatttcactctttcagatcatacttttcgaagatcaatattgtgtcccttctgtgaccacgatttcactctntcaaatcatacttncgaagatcaatattgtgtccccttcttgtgccatatgcaacatgatgtatgatgcttatgctatgcaaaatgatgtgatgatgttatgctacgtagatgacatttgttccgaaagatacacacatatncccacacaatattnttgtatcagcactgattc

SEQ ID NO: 77716 - DNA, 303 bp, Zea mays
ctcaccttgaccctgcccgtggttgagtgtaatatcaatatgtcactcttaagctttgtacctacccatgaaacttggcgattaacttaagatggaattctttgtgactgaataatcatcaaatgcatctcttagcgtagccttttttggctgggtcctcatgaactcatttatgatacttgaccttgtgaacaacaccagaattcctctttaccaaccatttttgatactctacactcctaaacgatgctcgaatcacagattctgtctgtttacatagctccaagtacattttgcattgat

SEQ ID NO: 77717 - DNA, 229 bp, Zea mays
cttcgataatgaagttctaagtttcagattatttttatttgctattcaccctctatgcacatctaaacattgtctcggcaaaggaatttcaatgcgcatatttgactattggtactctattgcttataagctgacattgaactgtggaagtgaccactttggtctatattggaattaactctccatacttgcgctctttatacaaccatgctccccttctcccatatca

SEQ ID NO: 77718 - DNA, 288 bp, Zea mays
  unsure (1)..(288): unsure at all n locations
gtgagtaccctagccatgtttattaactctctaaggcgctntatgggctcaagcaagccccaagagcatggtatgaatgccttagagatttccttatcgctaatggcttcaaagtcggaaaggccgatcctactttatttactaaaactcttgaaaatgacttgttcgtatgtcaaatttatgttgatgatatcatatttgggtctactaacgagtctacatgtgaagaattaataggatcatgacacaaaagtttgagatgtctatgatgggggaagtgaagtattt

SEQ ID NO: 77719 - DNA, 242 bp, Zea mays
  unsure (1)..(242): unsure at all n locations
atggacagctatgggcccttgttctgaaggtatcttcatgcataagtatgttggatgaagtattgcttcgaaggcattgagtgtccctcgaccaataattgtgttgtacggtactccatgtcgataatatcanaaacaacttgctcaantctgtgttgtggcataaccgaatgaactgacatgtgattttgcaagggccaaatatgtcttcttcaaagccacaagagggtgtgagcatcatg

SEQ ID NO: 77720 - DNA, 203 bp, Zea mays
  unsure (1)..(203): unsure at all n locations
agctcttctctctcagncttagataactctggaccaattatattntgaaaattgaagtcctttttctctgaagtatcttcggcgatcttcttccctttntcaggcactgtggccagggtttcttcngcagctgcagcagcttcttccgcgggcatattcaagagcattntatcaatattagaaaatgtgctctctagattcgt

SEQ ID NO: 77721 - DNA, 383 bp, Zea mays
  unsure (1)..(383): unsure at all n locations
atgtgcagtgggtgcatatgtatattgtcaccgctctgggtggctgatgatcttcctctctaagacattctaaatgagttccaaaaagggcacaatcacatggctgtggcagttaaacgaacaaaggaagcaggagtatccactgaatagcaagagagcacaacaacatattataaaacanaccccacagatgctcatgctgatggtacacatcttttaattntttctgcactgattaagcttcactctaaaaaatgtgtgttgatatatacacagtactattctagtagcctttgctgatacatgtattccaggaagtgactgattgctttggtttcagctcatcccttcttgactagcactgtagaagtcgagaataacgt

SEQ ID NO: 77722 - DNA, 164 bp, Zea mays
  unsure (1)..(164): unsure at all n locations
gcagtgtacctgcacgaagctcccatgagaacgatgatatcgtgtcacattatatataagtaacctatcaatgagaattggaatgcaatattcccaagagtcaagcggcccgtgaaactatanaaacgaataggaataatacctcttacagctatgcatctttt

SEQ ID NO: 77723 - DNA, 168 bp, Zea mays
tgacaaatgaggggctgtcactggggggttcattataatggcgattggtcttcactatgaactttgggaggataaagtctacttcacaaattcataatttgtcacagttggagatatcgatttaagtacctctgttgtaacaatcgcagtatttgcaatgtttaaact

SEQ ID NO: 77724 - DNA, 229 bp, Zea mays
  unsure (1)..(229): unsure at all n locations
ctcgttcgactgccctaccattataatttcaagatatacttcanagtaccctgccaagaatggctcgatacaattgaaataatgagcaatgaaattcttgggaacactctaagaaagaggaccaactaatgacagcggccttcggcactcggccgaaacgaaggctaaacagagtacttgatgccataggatatgaatatgctgactacggtcgactgggcggagatgc

SEQ ID NO: 77725 - DNA, 219 bp, Zea mays
  unsure (1)..(219): unsure at all n locations
gcaagtgtcgagntcagctctatctaaatctaccaagtatagctgaccctctaacactctcttgaatgctatngaatcatcacttcttctaaagacagtaacacctacatcagtaaatagacagttgtagcccatttgacataattgggatacggaaagcaaattgtaatctatagaatctacaagaaaaacatttgaaatagtatggtcatgtgatat

SEQ ID NO: 77726 - DNA, 328 bp, Zea mays
ctttacccctcccacctaagcccacgcaatgaagcttacctctgatctacactttaattttacgaccttaggtgccccctttaaccccaacattttccggcgccttttctccgggggaggttacacgcgacccttaattggaaagatcccccaactggcaaaaaacggacacgttttgttcacattaaatccggagtacctacccctccggcaaaaccgcaaactcaagtgaccgctaccacaagcgaaaatgatcttcaaacatcccaatcctagggaccgctaccacaatggaaaacaatttccaaattcccaagcctagccgcgc

SEQ ID NO: 77727 - DNA, 224 bp, Zea mays
tctgggtatgaagcacatactagagaagattatgactggagtagccaaatgttccaaggaagacgatcaaggtgtgatatggttataaaccgcatagtagtgccaaagaacgaagaactccggccgcaaattcttgatgaagcacatcttagtccgtattctattcattccagaagcacttagatgtatcaagacttaaagcaacattattggtggacaaagat

SEQ ID NO: 77728 - DNA, 197 bp, Zea mays
gtgacatttgtgtgtcaatgaagcccgccggagcactatttgctcctaaagaatatctctaatgaaaataagctaaagtatattgcttaaatacggtgatggatgtctagtcacttaatgaagtgattataataattaatagttaaatatctatctaatataaccaatgaatatatatgattcaagggttacttact

SEQ ID NO: 77729 - DNA, 262 bp, Zea mays
  unsure (1)..(262): unsure at all n locations
ggataatcatgtagagctttgtcatacctttcanacgagtacttatgcgctcgattcggagttataatttaggagatatcattgtttgaatctagatatgttgttgtccaaaanacacgtttttcaggtgggtgaacagcagtagtattagcaatttctgggaatttcgtgcgtaattattgggaatcagtgggataatcatgtagagatttgtcatacctttccaacgagtacttatgncgctcatttcggagtataattt

SEQ ID NO: 77730 - DNA, 114 bp, Zea mays
gttacggtgttcccccctgagcatgaaagacccgtttaaacttgcgtggaaaaatgtctaaattatgttgcagaggggggagtgctataataaaatatgcatcacattcctact

SEQ ID NO: 77731 - DNA, 334 bp, Zea mays
  unsure (1)..(334): unsure at all n locations
gcttgagntgcacaagatcttgagaataaaacatgaagttataattgggggttatattgcatattntaagatcaagcagctgctcttganaagaaggatntcgagcttcagacaacagaagggttattggcagaagctgaagctaaaattgcanagttaaatacggagcttctctcatagtcagaaagcttcgaacagganaagcagaagtaaatgccaaatttaagactgaggtcgagaaaagtcatatttgaaaaatcattgacagaacttcaaacacatgtctggagttcagtagccgatgtatacaacggctgaagcagatcttcaattc

SEQ ID NO: 77732 - DNA, 228 bp, Zea mays
acagctgtcaaaaagatgcttctcgatgaaagaaaaggcagatggaccgattattaccggaggcagtctgggcgctgaacacaactgagtgcagggcgaccgggttcactcctttccgccttctatacggatcggaggcaatgaccccgcaagaaataaagcatgggtccccgcgtacagttccatcagccgtccccgacgtggatgagccaacttcataagatctca

SEQ ID NO: 77733 - DNA, 201 bp, Zea mays
tgtagttggccagggtagagaaacaataactccctctttgaaatgcttacatagtaaacattggaaataaactcttgccttacaggaggactccatgaaattatttcaacttccatggcgattttctactttttgtaaaccataaagttattggctaaaaattttttattaaagtatgacgcatcatcatgaattgagata

SEQ ID NO: 77734 - DNA, 53 bp, Zea mays
aatgcgcttctcatacttttactaatggggatggaagttgccttactcctaaa

SEQ ID NO: 77735 - DNA, 283 bp, Zea mays
  unsure (1)..(283): unsure at all n locations
tatacttgcacttcaatacttatatgtngtacaagctgtcttcgaagtgacggtattttaagatangaacttcaattccactgcaacctactcgaatggtctttcattgcactacgatctagccttctagtagaagaagaatttctagttttaaagtgataattattattcgcctattcacccgcctctatgtgacatctagatcctagtccccggcatatggaactttcactcatggtcatgagcggctcggaccctcacatgagtaacttatggaaataaa

SEQ ID NO: 77736 - DNA, 84 bp, Zea mays
  unsure (1)..(84): unsure at all n locations
cacctacccgtctgtttatatagtgccgcaggtgggaaggtgaatcatcanaatctccctcaccgaacaaacagttacccgcac

SEQ ID NO: 77737 - DNA, 123 bp, Zea mays
cttgccgtgctcgatgatggaacaaagcccggcttatatcctataaattgcagaagtaactgattgacgtggatagcaatcgcgctggcaaaagtacggtagagcccctattatagaaaacct

SEQ ID NO: 77738 - DNA, 305 bp, Zea mays
  unsure (1)..(305): unsure at all n locations
ttttctggtgtatccctcattgcttttgagtattgcanactttatctcttctgagagggggaaaagatgttatatgacatgagcaccatctgcttcacgtcaacagaatagntntggagatntctagtagttggattctagtgtaataacaaccatgntttatagagctggagacgggtatgtcaggtgtgtcatacattgtcggtacatggatgttngaccttagtggcattaacaaacgaggttgttgaattcattgattgttgtgcttagtgttctaacctatttggtagagtggtatttaa

SEQ ID NO: 77739 - DNA, 431 bp, Zea mays
  unsure (1)..(431): unsure at all n locations
ttcattttctaagtcattctcattaattttagcactaagttgagctatgtgatcactttgntgtctaattaaagctatgtgatcatggatagcatcaacattaatgtctctacatctagtacaaatagtaacatgctcaatggtggatgtagagggtttgcanacatttaattcatcaatcttatcatgtaacatgaacatttcatttctaagaatggaaacaagatcattgcaaacatttaaantcttaagcttattaatcaaattatcatttctatcttaaggctacgaattgatcattcaactcgtcaatcttagcaataaattagcatatcattttaagttaacagagatcatacaacangaatttcaccttacataattacatttaanctaggtggaaagatatgaagtgtactatactatttaca

SEQ ID NO: 77740 - DNA, 387 bp, Zea mays
  unsure (1)..(387): unsure at all n locations
tctanagggagaacacgtgataggtctaaccaatgttactttcgaataagatagaccttgtgcagcttgtcaagcaggtaaacaagtgggaggagcgcatcacagcaagaatgtgatgaccacgtcaagacctctggagctgctacatatggacctcttcggacccgtcgcctatctaagcataggaggaagtaagtatggactagttattggtgatgacttttcccgcttcacttgggtattctttttgcaggataaatctgaaacacaagggacccttcagcgcttcctaaggagagctcaaaacgagnttgagctcaaggtgaaaaagataaggagcgacaatgggtccgagttcaagaaccttcaagtggaggagtaccttga

SEQ ID NO: 77741 - DNA, 340 bp, Zea mays
  unsure (1)..(340): unsure at all n locations
ggagtgagccgtctgagttagcctctttcctctctctctgngaaggccctgagcatccnctcttatagatacaaggagatgatccagctgtacatatggnggtgtagctatgtgcaaatgtggtaggcggagaagtgcttgagccatgtagaagcgtagctagcggtgcggccctaggtcctgctgacgtttctttgccttcgtagagagttgagaacaatcgacgtcatggatgcatgcaaggaaccatcattacctgttgccggagtaacctatatgggacaccggtcttgtttcttcgtagcctgaggcagctagctaggggtagggtaatgatgta

SEQ ID NO: 77742 - DNA, 460 bp, Zea mays
  unsure (1)..(460): unsure at all n locations
tgcgaattgactcatgcctatctactggtgcataggtttcaccaaaatccanaccttcgacttgtgaatatcccttggccacaagtcgggctttgttccttgtcaccacaccatgctcgtcttgtttgttgcggaagacccacttggttcctacaacattttggttaggacgtggaactaaatgccatacctcattcctcgtgaagntgttgagctcctcttgcatcgccatcaccaatccgaatcttggagtgcttcctctaccctgtgtggctcaatagaggaaacanaagagtaatgctcaccaaaatgtgcaacacgagatctagtggtacacccttatgaatgcgncgaggatggtgtcacgggggatctcttggattgtttgtggactttggtgtggggccttgcactcgctcatctcttgcttgacaatgcattcccttgacattgcgcatat

SEQ ID NO: 77743 - DNA, 393 bp, Zea mays
  unsure (1)..(393): unsure at all n locations
tctntctgttctccttngaggacagaggtaccagaagagcagcttgtctagccttcaccttgtttgcttcctttttccttgtgacccgtgtccattnttccgtaaaggaggtggacagcggngttctccgggtagatggatcttctgctcttggcttgcaggaggtagttntcgctcggagcgctggaggttgcgctttttcctgcttcgctccggctttcccggagatcgccgaggaaggttttctttctggtggatccgcgatgcgatgtagagttccttcttcgtctgccacggatgagatggtcccgaagcagaacacggatctcaggtggaggacgatcttgtgctggaaagtgaaggccattgagctagcttggatcagtgacacac

SEQ ID NO: 77744 - DNA, 221 bp, Zea mays
  unsure (1)..(221): unsure at all n locations
aataggcttacaccttttcctaaattggatttggtgggtgaattgcccaacacanataattggactaactagtttgctctagattatgagttctacaggtgccaaaggttcacaacaaaccaataaaaagaccgagaaaggattcaaatattaagagctaaaagtcagccaaagtgtgccctggtctggcgcatcggactgtccggtgcaccanggacacc

SEQ ID NO: 77745 - DNA, 355 bp, Zea mays
  unsure (1)..(355): unsure at all n locations
atattgcatcattcattngaatatcataatttcttatgtgcaaacagaacagntgatgtccctagctcccgaatagtatcattgaaggtatntatgcactgagtgagaagttacggccagtgatagacttgcgtgtttctgtcactggtggtgttcattttgacctactcaagaaggtctaatggatatacagcgagctggccaggagcctgaagaaataattcatcagatctctgaaacggtacgttgaatactgcaacttggctatacatattatgagcacactgtgtgtccattgttaacagagaattacctcttactgtaattggtgtgagttaatgaaatatgacatttt

SEQ ID NO: 77746 - DNA, 346 bp, Zea mays
  unsure (1)..(346): unsure at all n locations
gcgacctataaaactcagcttacgccggccgctcgtncccaccctgagacacattacgaatcttcttagcgcgangtccacgagcccgacagcgtcgccgccgaagaagggtgtccacctggagcactccctgaacgcctgctccagcgacttcaccacggagaccacgccgtcgagcgcctcctccgacttctccgccgtcgtggacctgtacagtttgatccactccttgcagaactgcataaatagcgcagaaccattcggtgtcaactagaactagcgcanagaatcaaggttagcttgcggacaggctcgctctgcactattattaccttgtcgtcgacgt

SEQ ID NO: 77747 - DNA, 343 bp, Zea mays
  unsure (1)..(343): unsure at all n locations
tccattcgccttggggacatgactgggttggccagccacactatgtgatgaacctcttcgatgaagccggcgtctagcagcttccggacctcctttcggatgaagtcctgccagtcaacagactgtctccgaggcttctgactcaccggtttggtgtcagggttgatcttcagatggtgctcaatcacctncttgaggatcccaggcatctgcgacggctcccatgcgaacacgtcggcatttgtctggaggaaagcgatgagcgtgagttcctatatttcctccagatcacccgcaatgcaagtggtctgtggggaatccgcatagagccggacggtcttga

SEQ ID NO: 77748 - DNA, 325 bp, Zea mays
  unsure (1)..(325): unsure at all n locations
tcacgagagaaggaacaggtcccacgnctcttgagaagtctaatgttgcttagtggagttcgatgtttgagtgagttcgtctccgtcgttcttgccgcctccgccttcttcgggaaggccctgngcatcccattttatagatacaaggggatggtccagctgtacatatgggggtgtagctatgtgctaacgtggccggcggagaagtgcttgagccctgtagaaacgtagctggcggtgcggccctgggtcctgctgacgtttctttgccttcgtagagagcttgagaacaatcgacgtcatggacgcatgcanggaatcatca

SEQ ID NO: 77749 - DNA, 433 bp, Zea mays
  unsure (1)..(433): unsure at all n locations
gactatgatagtgatcatgatcaagggatcaagagggagaaaaagaagaactataagaaggcgaagggcgaggcacatcttggcaaggagtgggattcggattgctcttcgtccgactccgacaatgaaggactcgccgccaccgccttcaacaagtcatccctcttcctcaacgagcgtcacacatgccttatggcaagggagaagaaggtatgtactcaaaactctacttatgcttcttcaagtgaggacgaatctagtgatgaggatgaaatagaatattcatgtttatttaagggactagatagaaccaaggtagataaaattaatgaattgattgatgccttgaatgataagaatanngctttagaanaacaagaggaactcaataacttcaagaggaatgaagtttggacactggtgcctcgttcta

SEQ ID NO: 77750 - DNA, 340 bp, Zea mays
  unsure (1)..(340): unsure at all n locations
gacattgacccctcttaatagtacggctatctatcctactaaaccggncaggtatcttctctatactcctcaagaccggcaaaaacaaaacctatattttacctttgccttcatctgatccacaaccaaagcttatgattctccaacatttgctgttctatgtgggccaaccctgcattcttatatctccaagaaccgttagtccacaagcagttatcattaattaccaaaacatcaccaaaggggcctagatgattcacaatctccccctctttggtaattgatgacaacactgcataatatattaaagagaagtttagattttcataggacatatcta

SEQ ID NO: 77751 - DNA, 376 bp, Zea mays
  unsure (1)..(376): unsure at all n locations
ctcagctatagtaagagctctaaagtgnngttggatcttctacatagtacttgtattatttacacgacttaataaatgctgagtatttttgcagtaaacaacgtttatataccgcggcttgccgagaagtttggntctggtgctgtggctcatctggctcttgacggttcaatgggagttgtttgtgccagtggtaatcattntaagtctgaagagtgatcaatatgtagatgtaagtcatcttggtgccagtgatgagctaattgtttatgttntgaaccctgtgcaataatgcataagagcacttgcatggcaaatcatctcacagattnttaatgagtattttctcaaagcaagcctcttttctttttttttt

SEQ ID NO: 77752 - DNA, 196 bp, Zea mays
cttcacacctacccgtctgtttatatagtaccacacgtgggaaggtaaaccgtcaactctttcgcaccagacaaacagccgcccgtaccgacaaaacggtggaccacagagtccgagaaggtgaatcgccagggcacgcgtaactgctgcaagatggggccacctcgcgctcggattattttaatcgtttctcggc

SEQ ID NO: 77753 - DNA, 378 bp, Zea mays
  unsure (1)..(378): unsure at all n locations
cactcacaaatagtcactggatcatgcttaanaccaagtccaaagttagctctgtttcactgaagttctgaatttcagaattccaccagcctgacagtccaactntgggcttacttatctctggatctttctcaacaagtgaacttgcaaccttaagcaaagttgttctccattaattggtctacaaacttggtgtggtcactttgggcaaaatccctatattntaaaagatacagggctccaaagttgaaccaacaaaactgaaattcagacttagagaaatctcaattggggggtccttttgcagttgagtccanaactccaaatttgactttcaagtccacatattngtgaaccaaatgacttanaatacttatt

SEQ ID NO: 77754 - DNA, 189 bp, Zea mays
  unsure (1)..(189): unsure at all n locations
agcctatgctcttgtgtgaagatatatcagaccanagggtattgctgggatctcagttatctgatgaacaagaaaagactatgctaagattcttgttcaacaaataagatgtcttcgcttggacagctaatgatatctgtggtgttaacagagatgtcatcgagcattcactcaacgtggatccatctt

SEQ ID NO: 77755 - DNA, 255 bp, Zea mays
cttgtattatttacacgacgtaataaatgctgatattatttgcagtgaacaacgtgtatataccgaggcttgccgagaagtttggctctggtgctagggctcatatggctcttgacggatcaatgggagttgttggtgccagcggtaatcattttaagtctgaagagtgatcaatatgtagatagatgcatcttggtgccagtgatgagctaattggttatgttttgaaccctgtccaataatgcataagagcac

SEQ ID NO: 77756 - DNA, 208 bp, Zea mays
tttcgtcaaagactcaaaagcggtacgtgtaaaatttcatgcatcgtaaagaattgaacgggtaaaataggtatattacattcaggaatacaaaatattacaatatatcacatttcagaagtttttacaataatacttaatcttctctcaagacaacttctgcagcctgattcaggagccgagtaacgacttcgtccataatagcttc

SEQ ID NO: 77757 - DNA, 315 bp, Zea mays
  unsure (1)..(315): unsure at all n locations
gggaggagtgcggtgcatttatgatacctatctggcggctacagccccggggaatctttgtaaaggctacgtagtgagaccctgcctactcaccttgngagtgttcaagggtccgtacaacccgaggcaaanagggaatcacgtctcatgggtaaagtgtacaacctctacagagtgttatgaaactgatatatcagccatgctcgcggntatgagcggccaagggagctccagtgattagtggtacttgatcagagatgttcggtttgcaggtggcaatgagattgatggttcttggttctgactctggtaatg

SEQ ID NO: 77758 - DNA, 325 bp, Zea mays
tcgaacgaagctccatcttgaagcctgcttcggaggaaaaaagtattaaaggttcacaagttcatagttaaatggccagagtccgttctaccgccacggttgagcgtgagggggacgaaactgaagcttcggagactgtccctatcttcgaagccatgcaacgatccgggctagtgacttcggaaaagattcctagtgatgatgcggaacaagcaatcgctgaagcagaaggagaagatactgaggaaactgaccccgaagatgattatcaccttgccacgccaagcaaacccagccatttggacttcgggaaatctactgtttc

SEQ ID NO: 77759 - DNA, 271 bp, Zea mays
  unsure (1)..(271): unsure at all n locations
ttcctaaatttaacttggtcaaaaagtctaagtgccatgtgtgtgttgaatcaaaacaaccccgcaagcctcacaaggctgctgaggcgaggagtttggcacctctagaactagttcattctgatctgtgcgagatgaatggaattntgaccagaggtggtaaaagatactttctcacttttatagatgactccactagaattgttatgtgtatctcttacaaataaaagatgaagcgttcaattattttaaggcctatanagctgaagta

SEQ ID NO: 77760 - DNA, 407 bp, Zea mays
ctcagcttgcctcaccacttcatctgggagtaagtgcatcttcctctcatgaagacttgaggaggccagatctgcttggcttgacacaccgctacctatgaacttgtcctgccaaagagctgaaacacatattagcttggcatttctatgaatctgtcattgataacatagactatctgagctataaattcattcactttcacaatctccatatgctcgatggaaagaacacggataccatttgcgactcaaatcgagtctctctcaagtaggagttgtcagggatggaacaaatacattgacttgcattacagagatcaaaaaaattgataaccgttctcttctatactgcgcgtgtcttggagagtgctatgtgcgcgataacactctgacgctgcttttttcat

SEQ ID NO: 77761 - DNA, 303 bp, Zea mays
  unsure (1)..(303): unsure at all n locations
agccttgctacgactatattatgctcacgtgtgtgggaggtgaaccatcttgtaatggagataacaacaaagcatttacagctgttgcacccgagataatttcgtaactgcagcaagtgcatgttaaagagggcatatctttcaactcccaaggttgtttaaagcaaacaagcacttgttggaaaggtctcttcgtctactttctagcggatcaagaatcaattagagatcagacactcagcgtgcacaaactgctgagtgaactcctgctctacaccngtcaatttcataatctgcagcatg

SEQ ID NO: 77762 - DNA, 431 bp, Zea mays
  unsure (1)..(431): unsure at all n locations
tgtaaggctggactcannaattgggtctacaggtaatatatatagctcctgcactttcacctgcctggtntatgcactggaacagcgtgactggaaacattattctcttctccctatccggcccgcccaaagtataagaaaatctggggagaaatatgatagtatataaatactatgggctacggctaccagcaagttcaaactgtgctatcagcctatcgccggcagtggacaagcagggcatcattgcgacattgcctattccagaccgtcaattctatccgttaaccggtattgataacgggttcaagcacacgtaggcagtgacagctaanaaagtanatgaagttctcacaattcataaccattaacatatagtatcatcgatagactctctactacctgttgagcattatatgtggcatctggga

SEQ ID NO: 77763 - DNA, 132 bp, Zea mays
tcccatgaagctgtctctatgaagaaatgactagacgacacgccgttatgtgttgcaaaagacgagagcctctgtgaatgcgtgaacgtaaccaataccaaatcaaatatatccatagaggagctaggaaca

SEQ ID NO: 77764 - DNA, 472 bp, Zea mays
  unsure (1)..(472): unsure at all n locations
gagttctgcaagctcgattctcaatcgttcggggtccagctcggnnttgggatgaagacactctcggactaatcatgagagcttgtatcattatgcataatatgatcgtcgaggatgagcgagatgacgaacatgatataatttacgaaggcgtaggagaaaaggtaaattgtcgcatgaagggacaccagaacttgaggaatttattccaaactacaagaatatataggataaagaaattcacactcagcttcaagctgacatcattgagcacttgtggcaacatcatccagacctttacaaatgaatttatatantttactattatttatttggtcttgaacaattgtgactcatggatacaaagttattatgtaataacatcatctgcactttcatcagcatatcttactggnttattctcttacttgcatcacaacatgtatgacatacaaatgtgtacacatgaact

SEQ ID NO: 77765 - DNA, 325 bp, Zea mays
  unsure (1)..(325): unsure at all n locations
ctcagctgtgccaccttgtgaagctcccgagcaggaatcggagttcccttcgccggagtatccagtccacgctcgccggagctctcacccncgccggagcacgtggaccgggtaagccactccaccatccttcgattccttgtgcacacagtcgttgcgtgacccccgtgatgctaaccgtgccctcggattgcgccagttcgccgtagtttggccggtatactcgccgccgacgaggacacccgcctgcacgcgtggaccgggcgattccggccaccttcgacgccgagccgtgcctcgacatgaccgtcagagccttcccaag

SEQ ID NO: 77766 - DNA, 211 bp, Zea mays
tctcctgtcgcgagtaatctacagtattccggacagtcgacttattatgattgtatatgaacttatgcacctgtgaaacgattaactgcacatactggttagtccacaagggttgcgatggtcgccaaacaccataatcgattataggaaatgttgagactatttcctttcagatacagtgttcatcctcgccacgccgcacaagggccaa

SEQ ID NO: 77767 - DNA, 483 bp, Zea mays
  unsure (1)..(483): unsure at all n locations
ctcagcttcgctcctctatgtatggattgctttgagtctgtccaatttttttgtccttctagcagcttcctgacttncatgaatagcaatgggcccttggtccgaacgtatcttcatgcaaagataagctggatgaagaattgcttctaaggcattgagagtaccacgaccaatgattgcattgtaagggtattccatgtcaacaatatcaaatacaacttgttcagtccttgtgttgttaatgaatccgaacgttattggcattgtgaatttttcaagtgctacgatctgccttcctccgaagccacaaaggggatgtgtggcatcatggattttgtcttctggctctcgcatctgtctgaaggccttagcanatatgatatcagctgcgctgccagtatcaaccataacattatgaaccaggaatcctttgatcacacaagagataaccatagcatcggcgtgtgggtaatccttgagttg

SEQ ID NO: 77768 - DNA, 441 bp, Zea mays
  unsure (1)..(441): unsure at all n locations
tcttcacctannagaaagattaggaatgctcaatgtctatgtatggaactaatngcttcaattggtagttgatcaatagtagttcctttcaagtggcatactttcaattagtaataatctattttatgaaaagaaatgtcaatatgaaggttaaattccttttggattaaatttgtaaattggtgcatattgttaattcactcatacatgtgcattgacttaaaaggaatntaatttatgcctttatgcctcataaatgatgaattattngacattcatatataaatatcatcattcattaaatacttcattgtactactaatacctctttccaaagtgcttttntactagttntaaaagganaagagataacacgctaaagaaggaagtctccacaattgaagaanagaagaatacttagatgacaccatatcatatagt

SEQ ID NO: 77769 - DNA, 324 bp, Zea mays
  unsure (1)..(324): unsure at all n locations
ngagccgaggcatngcctcaccggagaggcggatccaccctcgctctacttctgtcgcccgccgccgcgcgtggatagagcaatccagtgagccattctccgattccttgcaccactgtccttcttgacctctagcgaagctctctgaccggttcacttggacaatcgcgctgtgagcaggccggattcctcgccgccgatgagcatctccgcctgcgcacgtggaccggccgactccgaccattcccgacggtgacccgcacatctgcgtgaccctcaggacctcccctacattctcgaccacctcaccggagcagtctcacc

SEQ ID NO: 77770 - DNA, 327 bp, Zea mays
  unsure (1)..(327): unsure at all n locations
ctcagcttttacctgtgatctggtaccttaaaagggtgaccagtgctctttcctcttagntgtgtcaagctcatctttagcttctcattatcttctttgagctcttgacatgtatcatcttttgttcctggaaattttggatcaaagaagaatttgcttatcgatgaacaacaagcattagcacatggtaatataatatcaatntgaatacatgtgcatgagtgaggttgttgggatattaagctntctatcacaacctcatgagcaatgtttaacatgatatgattatccataagaatttcatgagaacatagaagcatatcatat

SEQ ID NO: 77771 - DNA, 241 bp, Zea mays
  unsure (1)..(241): unsure at all n locations
ggccttaactcactgtgcacggacgcgtctgccgctgacacggtttactgccggcccatctttggccgcattgaccgtcgcgccacgctggcgctgctgggtcgcctcgagtcgcggcattggttccgcaatccaagaggcgcggtaatggcgcgggtggcggtgcaattgctcgcacgcagcatccggcgcgccggttgcatgacgcgtgggcctgggcctncatgctgggcgtgttgga

SEQ ID NO: 77772 - DNA, 507 bp, Zea mays
  unsure (1)..(507): unsure at all n locations
tctcctggacaagtgttgcacttaccgctgagtgcgaagatgccttatacaataacagaggagcccctagtgggaagaagctctatagcaaactcaactntccgctctggtggcatacccggtaagtccttctgaaacacatctgggaactcggacacaaccttgatactctcgatcgggtctgcttcactgctatcaacaactatctgataaaaacttcctttctttggctcaagcgggactaactcggtcaccacttcctctcctagtggggacaccaacttgatggtgcttttatcacaactgataactgcctgatacttatctagccaattcatccctaggatgagcatctattcctgagtacccattactataagggttggcgggaaacgctatcctccttatntccacacttatattcaaacaaatgctatcggctcgaattctaccaccggctgagtcgatatgaatgggggttgacatggtagaaattgaacgatatgt

SEQ ID NO: 77773 - DNA, 344 bp, Zea mays
  unsure (1)..(344): unsure at all n locations
gaacaagtacctgttacctcggattgatgatctggtngatcatatgggaggagctaaagtattcttaaaatagatctaagatcaggctattataagttgaagattcgaaccgaagatatacctaaaacagccttcaccacaagatatggactatatgagtttttggtcatgtcttttggactgactaatgcaccgacttactntatgaacctgatgaataaagtattcatggaatacctcgaccagtttgttgtggtattcatcgacgacatacttgtatactctcgagtgaagaagcacatgaagatcatctgagattagttctacagaaacttcgagacaat

SEQ ID NO: 77774 - DNA, 268 bp, Zea mays
  unsure (1)..(268): unsure at all n locations
gctattcgcccttctcttgcanattcttacaatttgaacctgtgaagaagatgtactttcctcgtgggcaaacgacaaaccattacatgggaagttaaaagtgttctttattacatgaaaaatgaaacttgaatagagaagacttctatcagagtaggatacttggcaatagatgtgctntgactctggcacagtgctattaactgtgcgagcttcggactgttctctgaaatcccgttgatttgagtatattggcccccttctggct

SEQ ID NO: 77775 - DNA, 298 bp, Zea mays
  unsure (1)..(298): unsure at all n locations
tcagctagcagagagattctagatcagaattcgagctatgcctaatctggtatatatgttcatcaagggcctggcaagatttggctaatgatctttatattatgtcagaaactgatatcccctttgttgggatccctaaaaaatgataccgaatggctatggctagtgcggtatgctctacgggatgtcngcatttaagtgcctctcattatcaatagccatggacttggtaatttgttacgtagtccgcaggttgcctattcaagacttggcgcacaatgtctgcggaatgactcgc

SEQ ID NO: 77776 - DNA, 293 bp, Zea mays
gaataaatgtaagttatgtaattcgcttccgcatttcttcatctccgatgttctgtaatggctacaagatgggtgagacgttcctggtaaggtaaggaaagataccgaacttgtcaagtagttcacgggcacctacagggttgtctgatgtccgttggacaaggacaactgtaggtgggcctaattacttgggaggttctgtcacagcaaccatctcggcatgccggaggacggtgatctccctatgccggtgcctcgcgttgacatcccacgggagctagctgtggtccccg

SEQ ID NO: 77777 - DNA, 291 bp, Zea mays
  unsure (1)..(291): unsure at all n locations
cggagaaacccgaccccagtgcaatatgacaccagaaggtcaacccaaacggcgttggctgaattcagaattattgcagaacacattggcactacggatttggtgcacgaatntcaggctttcacagtatttccaactatgaaggaatgggctatgccgaagcttataggtgagaagaaagaaggggagcttgtccgactaccctatcattatannatcaagaaatattntaaggcacccttgcaagaatggctcgatacaatcgaaataatgagtactgaaattcttgga

SEQ ID NO: 77778 - DNA, 326 bp, Zea mays
  unsure (1)..(326): unsure at all n locations
tcgtcgntcgagagacaattaccctgagagagagagatgatttcagttctgcaatcttcactataaacaggggatatgttgaggatagctctttcaagaagctcgaccgaaggagcttttattggttcaaaacatacttccgaacgtatacgcagcccttgngctgctgacttatccaataaatcagcgtattcattntcttcacgaggaatatgtgtgacatagaaaccttcgaacgaagcctcgatccttcggaatgtatctagatacttctcgagcttcgggtctcttgctatggaacttttgtcaatatgaccagaaataac

SEQ ID NO: 77779 - DNA, 176 bp, Zea mays
catatatctaaacaactagtagtcagtgttggtggcattaccacaaatttagaactaggaagctaatcctttaccactgctttctgaatttaatcgcctttcgtatggtcgatggaatctgtcgacagaatacattaccatcattagtggcatgagaaaatgagttatgtcacttg

SEQ ID NO: 77780 - DNA, 286 bp, Zea mays
  unsure (1)..(286): unsure at all n locations
tctatagggagaacacgtgatacggtngactaacgtgctattcgaattagatagaccntgtgcagcttgtcaagcaggtnaacaagtgggaggagtgcatcacagcaagaatgtgatgaccacatcaagacccctggagctgctgcatatggacctcttcngacccgtcgcctatctgagtatatgaggaagtaagtatggtctagttattggtgatgacttttcctggttcacttgggtgttctttttgcaggataagtctgaaacccaagggaccctcaagcgc

SEQ ID NO: 77781 - DNA, 227 bp, Zea mays
aactcagctttcacctgtcctgctaccagttggtgagctacctcatttattttttacacatgaacgcctcctaatgacacaactttgtgtgaaacaacgtatgtcgctgattctgctctgccttcatcatttgtgcacttaacacacgctgtacaatgaggctctcataatgctctgcatcatctgcaccaatacggtcttcgggtgggttcttagtgcctacatca

SEQ ID NO: 77782 - DNA, 206 bp, Zea mays
  unsure (1)..(206): unsure at all n locations
ctcagctaagattgcgatgcaggaggaccttcacattatcaaanacttattttataatgcacgctatgaattcttcgaagcaacaaanagtcgttctaaggaacgcagagtaagtttgctgaagttacagaaagccgttccaaagggagcgcagtgtaaagtttctgctccaaagtcgttccaaagggaatgcagagcttacagcg

SEQ ID NO: 77783 - DNA, 300 bp, Zea mays
  unsure (1)..(300): unsure at all n locations
gtcaaaagcaggccccaatatactctgtatctgatgttcttagnttatcaaagaaaaattatacagaattggagaaggtgctatatgctgttntgatggcctccaggaagcttctgcactactttcaagcatacaatatagttgttccttcttcacaaccgttgaaggatattatgagaaatagagaagctactggaagggttggaaaatgggttgcggagctcaatgaatnttgtattgattatgtgcacagatcttcgattcagtcccaagcgttggcagacttcattgctgactgga

SEQ ID NO: 77784 - DNA, 431 bp, Zea mays
  unsure (1)..(431): unsure at all n locations
tctnaggggagaacacgtgatatgtctaaccaatggtactntcgaataagatagaccttgtgcagcttgtcaagcaggtnaacaagtaggaggagcgcatcacagcaagaatgtgatgaccacgtcaagacctctggagctgctacatatggacctcttcggacccgtcgcctatctaagcatangaggaagtaagtatggactagttattggtgatgacttttcccgcttcacttgngtattcttcttgcaggataaatctgaaacccaagggaccctcatagcgcttctaaggagagctcanaacgagttngagctcaaggtgaagaagataaggagcgacaacgggtccgagttcaagaaccttcaagtggaggagtaccttgaggaggaanggatcaagcacgagttctccgctccctacacaccac

SEQ ID NO: 77785 - DNA, 442 bp, Zea mays
  unsure (1)..(442): unsure at all n locations
cacttctgaatacctcaataaaatactagagttgtcgacatgagnttttattatatcaccttntagcttctgcatttacattatgtaccttggttgtgtaatttaccttcctagattagttgataggtttggaacctaggttgggtaactgtttgcaataaacataacaacatatttagtcaaaattgtagtttcacatagatactttattaattgcatagtatttggctagtcaaaattagaggtcttagtttatgaaatagattacctaatttaccccacccnctcttaggcatcatggtcccttcaattggtatcagagctagtatcttattttggaacctttgccttaatcaccattgagttgatgctctttatggctcgttcggttaggagtggatatctctangacttcacanntttgatggcactagctttctta

SEQ ID NO: 77786 - DNA, 152 bp, Zea mays
ttcagattttctgaaatgacacagggcttctgagggaggttttacccgaggcatgtgagatcaattcacaattctacgcaaaatgatgacagaggaagccaacagcaaaggccacaatgctcctcgcaggcttctggacaacagcaaagctc

SEQ ID NO: 77787 - DNA, 233 bp, Zea mays
  unsure (1)..(233): unsure at all n locations
tgtcgaggttacggatgatgagggtgtcatcgtccgttccacctagttggcaggccagacggtagtccgcgagccacagttccggtctcgtctcccccgagtactntgtgataataatcggnggtcggaaccgggtcgggaacagcgcccgtcgtatggcccggctgaaagcctgcggaccgggtggttcgggcgaaagactccgatccttcccgctgtcgtagcgtccccca

SEQ ID NO: 77788 - DNA, 500 bp, Zea mays
  unsure (1)..(500): unsure at all n locations
ttaacctagtatactgatgagtntaacatttttaaacagggcagttagtagattagtatgtctctaatatttcttaccctcagtctaaaagtatttctatntttcctctatctatttagttttgggcagtatacttgtttaaattaaaactcagaaagtatcgtaggaatcacggtgtttattatttctcctaaatacgtcataatatttaggacctagcaaaattagtttgatcaaatttggttggatataactcgagttacgaatctttcaagttctgtacttatctaatagaataaatcttanagggttaaggataacaggtttgcaccgaggcccctgngtttntctttaactaaaccatntaaattgtgcccctatggaactgttccactgagtcgactgatgtggggatttgtctcaatgctatgaataataacaaggcacataaatgtaaatataatgccttcgccgcgaacatanttcacaagattaatgac

SEQ ID NO: 77789 - DNA, 463 bp, Zea mays
  unsure (1)..(463): unsure at all n locations
cgtgacatggtttaatgatagacacacccatgcaggtggattgcttattgatggagagagatgggctccaaaacctaagactcttctagagaaggcaaaggaaagggcgaacacacacactgttgattgttttgacttatagtcagggacatatgaggcattccttcaagctggtactacttccaacgtcgagtcacaagagtctaggaagcatgtggttgtccttaatgacttgtcatgtacctgtggagcaccgaagcagtaccattntccatgttctcatcttatcgcanctcgctgagcttgcactctgacttagagaggatgatacccaagagttactattgacaagctgtgtgacttgagtccaaattattcttacatgaccgaggagtggctactagatggccaagatgtcgtgatcagcatcgttgaccaactgatcagaatagacagacggatg

SEQ ID NO: 77790 - DNA, 425 bp, Zea mays
  unsure (1)..(425): unsure at all n locations
tagcgaccttagatactcagcttgtgcagagcttcatagtctccgcaagcttggatcattgttctttggatcatcatcatgtacacaacaaagcagttataaggtataaagtgatctcacgagaaggtaaacaacaggtacgagtttaataccggcttaagatggctttgagcttcgtcaccagctaagtctcgcccacccttcgtccaaatgtgtgttacaaatctatttccaatgcttctggctatgctggngatgtcagttaaatccgctggtgatagactgaagttcggcctatttacaatcttttcgtgcgtgcaactagccttcataatagctatagctgtgccgcgagaagccagcanggcacagaaatcaccatgcccagctataacttcgtcaagcgcctcaacttcactctcaat

SEQ ID NO: 77791 - DNA, 307 bp, Zea mays
  unsure (1)..(307): unsure at all n locations
ctcagcttacaacagggtaatagcctcatgtggtttgcaagataaaagttcattttcaacaagaagattgtcatgatcaaatttaatttgagtatagtcttccttgatctttactagtctatattgcaactccctattggcttcatttaatgattcattntcatttttcaacctatcacatttagattntgactttctaatgatttgagtatattctttaagtaagtcggctaactcatcatatgaaggtgaagcaaattcttcatcactatcactatcactatcatcagcaatattaatatcattt

SEQ ID NO: 77792 - DNA, 451 bp, Zea mays
  unsure (1)..(451): unsure at all n locations
tctatgtatatatntatgtcgtattaattacaagatccaactctatcgatctatggttctagggttatcttggtcttgcaagcgggattgccataagactggtgtccacgctgatgtgagcggtactggtgctgagtcccaacgggagcggnggaaccaccgtccagataacgacgttccgcgcgctcagtccgcatcatggcgatctcatcacgagccctactcagctcgtctagtgcatggtccagctccgtgtttagcacggcggctaggttgactgtgctgctcaacctatgattgccctcatcgacaggtgagacaatcacgcctcctgtgctgccagatgaacggcggtggtataacttaggtcatgacctgcagctgccccaccgataaccgagcagtattgcgaaagcgcacgccgtgcagcatcttgcatggcttgctcatc

SEQ ID NO: 77793 - DNA, 376 bp, Zea mays
gtttcactgcgtagcatgttctaactttagaaggtgcaattaaaacggcagctgctcctgccccgaaggttccccaagaaccatcgcagaatactgtccaagcttcggcatctttacttgccttcttcttcctgagcccctgtcgtccagtcagcaatgaaatctgctaacgtctgggactgaatcgaagatctgtgcacataatcaatgtagaactcattgagttccgcagcccactttccaacccttccagtagcttctctatttctcataatatccttcaatggttgtgaagaaggaacaattatatggtatgcttgaaaataatgccgaagctttctggaagccatcaaaacaacatacagcaccttctcca

SEQ ID NO: 77794 - DNA, 109 bp, Zea mays
ctgacatatgctgaggacatgatactgacgagcaccaagcgcgtaaaccgctttactgatctgcaggatacactggctgatattaagcacgctggcctacaagtaaatt

SEQ ID NO: 77795 - DNA, 473 bp, Zea mays
  unsure (1)..(473): unsure at all n locations
ctcagcttcagataccatactctntgatagagtaccgataaccttcgctccggttngatctctgacgcagcctaactgttcatcgtcaacaccaccgaagagtagtgcccctggttgatatccacatgatatggcatattctattaactcttatttctcagccttcgtcaactctggtccaactaagttttgaaaattgaaaatttcctcttccgaagcatcttcagctatttccttctccttctcaggtactgtagccacggtttcttcagcggctgcagcagcttcttctgtggccatatccataagtatcttatcaatgttagaaagtgtgctgtctanatgtacatcttcgggtgtggcagcttcagtaggtgcaacttcngtagctgttgtgctctcaacagctggtgccttcgaagccgaagcatgtggtggtgtcccttcataacttctgcactgaacaatcttcg

SEQ ID NO: 77796 - DNA, 277 bp, Zea mays
  unsure (1)..(277): unsure at all n locations
acatgtgttaagcggcgatgccacagccagnccatgcaagtcttagccattaagcatgcatctagaccggcctctntctttgcaaaatcaactatgtaaagcttgccgtctagtacacccttaaaagctagtgaaccatcacatcttctaaagacagacacatctacatttgtgaacaaacagttatatcccatattgcataattgactaacagatagcaaattatatcccagagactactaaaaacacattagagatagagtgctcatttgagatt

SEQ ID NO: 77797 - DNA, 338 bp, Zea mays
  unsure (1)..(338): unsure at all n locations
tatctcggcngtgctgccgcatttggttatggaaatatctgtatcactgccgtcctgngtatggccgggggcaacatcagttggtcggaggtgcaagtttatagatgcgccgtgggcggaagaccgagtatctcgagatacccctcanagacagcattaaaggttggcgtctggaatggtttataatggataattatggaaattctctcccttcccgctcaggaagacagccagacgttcgtactccaaagtggactgagtctcccacggaccaagaagtggccgaggcaggcgtgtngcttactgaagttggattactgaaagagagaggtctgact

SEQ ID NO: 77798 - DNA, 247 bp, Zea mays
actatgaactagaaattcattatcacccaggcaaagccaatgttgtggcacatgcacgtgagccgtaaggcttcctgccactgtcttatggtgaagacctctgacgacactttatgtcaagagaattaagagctgaacctgtggatggtccaacaaggaactctgaatcagctaaagcttgagtctatcatctttgcaaggataattgatgctcacaaggataatgtgggtatgaagcacataccgg

SEQ ID NO: 77799 - DNA, 424 bp, Zea mays
  unsure (1)..(424): unsure at all n locations
attagcgacctatgatactcagctaactngtgactgacttctttgactntcagatgcttgagacggattgatgcaattcttgaggatctcttggacctgtgggttatgacccacacacgctttcgctgcgccactctgatcttgttgggtgatgttaatcgcattgtcttcattgnggttagccgctaacccccttaacaggagcatngatacacacttgatgaagatgtcgtcgactctgatcttgactgnattggangannnnaagattgccaaatggacaggtgtaagaggaaagaatagcgagacaagataagtatagacagattagagagagcatggggagaacccaactacttaactttatggcactcacctagtanacagattccattacagaccaagggccaacacacatcaacac

SEQ ID NO: 77800 - DNA, 416 bp, Zea mays
  unsure (1)..(416): unsure at all n locations
ctaagcttcctggcacgtactagtgatgatggatgagcacagtgcacctcgcagcacggatgtactggttggcattggacaggcctgtcgcctgcgggatggcctgngcgccgcctgccagctgagtggacaagacacattaaatgctgaaggggcacatcacctgccagcaggatagtcaggcggtgtgtcttctctataataaatgcagagacagtgcggcccacaggtcttacgtcaggctccacccgcgggcttacgtcacgcgtggtaggccacacggcagcatcgggtctctgcctgngcagggagcagtagcgctacgcggacaagtccacaccaggctgggcctggacacacgtcggcatcggaccccagcctaagcaaggcctgggtattccctgcccctgagtcct

SEQ ID NO: 77801 - DNA, 291 bp, Zea mays
  unsure (1)..(291): unsure at all n locations
tagcgaccttgaactaagcttaggaaagtctaaatgcccaaaataagtgatccatttatcnccggatccaganacctaattgaaccctggaaaaccctaaactaaaccctatgggcttatgtgcaaaagtggtgaacctttggactaaagtgtaaaaactactatgtttaaacatataaagtcatttggttcacaaatatgtgaatntgcaagttaaaccctaagtnttgggcttatttgcaaaatcaccttttaagcactatagagcctaagtctgaaattcagttgagt

SEQ ID NO: 77802 - DNA, 313 bp, Zea mays
  unsure (1)..(313): unsure at all n locations
tcttaatgcggttactatcaataacaagtatcctntgcctcgtattgatgttctctttgaccacttggtcggagccaatgtgttttccaagatagaccttcgctctggctaccatcagatcataatacgagcaagtgatatcccgaagacagcattctcaaccacatatgggcattatgaattcttggtgatgtcatttgggctgacaaattgcaccagcatattcatgtatctgatgaattctgttttcatgccggaattggacaaattcgtggtgggtttcatcgatgacattctggtgttctcaaagaac

SEQ ID NO: 77803 - DNA, 307 bp, Zea mays
  unsure (1)..(307): unsure at all n locations
ngatgatgccaccacatctgaagctcagacccgtgcattcaaggcgacatatgagaagaaggaggaggctacaccaagtcgacaaccaatagacgcctccaagctcgacaacgaggaaatggcgctcgtcatcaaaagcttccgccaaatcctcaagcaaaggagggggaaggactacaagtcccgctccaagaagggttgctacaagtgtggtaagcccggtcattntattgctaaatgtcctatatctagtgacagtgaccgaggtgacgactagaanggaaggcgaaaggagaagaagaagtac

SEQ ID NO: 77804 - DNA, 409 bp, Zea mays
  unsure (1)..(409): unsure at all n locations
agatctattggttgtgtgtgactgtgatataaagttggtgcgggttatgaanaatgttgctgtagtatatgaaccgctaaaagcaaaaaatcgtttgatggaaaccattaanaaccgctaaattgtttcttatatatataatagagttgctttcagttttacactgtaagacagtcggaatttagagaaagctacgatctagatctcgttctttgatttagctnttaattaggagacaaaaaataaagctaaaagccaaatcanacacaccctaagccactgctgctacagccaaccgatggtgtctatagttattgagagagacagagagaaatgagctagctgtatctttagcagcaacatcttattttcagccataatatagtaaaatcggcctgagccggttatc

SEQ ID NO: 77805 - DNA, 263 bp, Zea mays
  unsure (1)..(263): unsure at all n locations
cactggatatatcaaggagtgtcttacggcctatgcagacagtgcgatcacatatggccnccaaaattatagggcctcanaatttatacgtatatatatgtatcacataaataacattgcacacaatattatccaaaatgtggcttataatcgcaagaacgttaaaatagatctggtcttttcatcttgtaatcaagctattttttggcttatacgaagagttcaacagtctcaaagttctcaaaaatatttgtgttataatt

SEQ ID NO: 77806 - DNA, 274 bp, Zea mays
  unsure (1)..(274): unsure at all n locations
gaaaatgaatcgagtctttggcataagatnattgtcaagaaatactntcatggaaaagacttatacaatataaaagtgagaaactctgactccnctgtatggaaagactcgatgaaaatcagagctttctacctgaaaggcagacaaatcacaactaagtgtggagataagttcagattctggctagacagctgggtaaatgagaggcctntatgtacaatngatcctgaattatatgagaattgtgatgacaagtttattctagttaaagatg

SEQ ID NO: 77807 - DNA, 278 bp, Zea mays
atgaagaattcttatcccaacatgagctagtcggcggtgccagagccaacccatgttagtcttagcaattaagcaggtgtcgagtttagctctatcaaaatctactaagtatagctgaccctctaacactcccttaaatgctattgaatcatcacttcttctaaagacagtgacacctacatcagtgaatagacagctgtagcccatttgacataattgggaagacagaaagcaatgtaatctaatgaatctacaagaaaaacattggaaatggaatg

SEQ ID NO: 77808 - DNA, 384 bp, Zea mays
  unsure (1)..(384): unsure at all n locations
gtgaagagtgcgcttctcaatggaccaatcaaggaagaggtctatgtcgagcaacctcccggctgtgaagacagtgagtatcctaaccatgtctataggctctctaaggcgctttatgggctcaagcaagccccaagagcatggtatgaatgtcttaaagacttccttattgtaaatggcttcaaagtccgcaaggccgatcctactctattcactataactcttgacaatgaattgtttgtatgccaaaattatgttgatgatattatatntgggtccactaatgaatctacatgcgaagaaattagtacgatcatgacacanaaattcgagatgtctatgatgggagaagtgaagtatttctaggattacaagtcaagcaac

SEQ ID NO: 77809 - DNA, 263 bp, Zea mays
  unsure (1)..(263): unsure at all n locations
gtcttggctgtcaaactgctngccgttgtcaactggtagttcggacggtactccgaaagggcaaacaatgttttgccaaaagaatctttgggcacgttttgatgttattgtggaaacagcccttgcctcgatccattnggtgaagtactcgacagcgacgaaggcgaacttaaggttcctctgagcggtgggcaggggcccgacaatgtccaggccccagcgctggagaggccatgtgtgggcgatcagctntgtatactgcg

SEQ ID NO: 77810 - DNA, 458 bp, Zea mays
  unsure (1)..(458): unsure at all n locations
cgagcacattagcctncacactactgaatntaccatatgagcttacaatgatgattggttgtcttgggattcataatgatacattcataaaggatatgatgaatctatgatacattcacaaatttcagatcattaatgaccatcaataatgaattgtcatttccaactggttatggttggagtcaggaagcttttgcacgctcctgacttgtgattaactgcatgtactgcatgtacaggttccnctatggttgttagtacgtgggaatccgtgaaagatttcccatgcgtacattgggtatgttccaatctcaccaccgagcgacatatatggcacacagaaactgggatctatgtgaaattattctccgcatcattagttagatctttctgaaactattcggccgacctgctgatatgacttcagcatagggaattcagtcaaagatgcagaatta

SEQ ID NO: 77811 - DNA, 203 bp, Zea mays
  unsure (1)..(203): unsure at all n locations
ctcagcttgacacatgagccgttccaatctattctatcgatctgtttgattagtggctactcccttgtgtttctagagaacagcctctaccccttgtgtntcttggaacaatatgcatgcacatggttgacggagcagacttgctttggttgctctaggtcgttactattgatttggagaaaaaaaatgcttagggtgatttg

SEQ ID NO: 77812 - DNA, 371 bp, Zea mays
  unsure (1)..(371): unsure at all n locations
tgttgtatgttattgcgtgatgttngcttcttcttggttgatggcgcgatattcggtggttgatctattagctaagaatcaagatctattccgatccattgaagaacctcaagttttcaataagcaagacaagtggacttctccctcggcatactctgtttgatcccaaacaatacattcaataaagnttattcttggatatatatgcataacttgatgggttacctattcaggtacacctaacctttccaaccttattccttggtaacctacgttntaatttaatcaagtagctatgctatagctgcaactctaactttatgctggtactcctactgatgactataatgatccacatggacagttacatt

SEQ ID NO: 77813 - DNA, 398 bp, Zea mays
  unsure (1)..(398): unsure at all n locations
tcgtctttaaccgcgcttntgtatacccgcaatctaacttcgaatgtacctggttacacatttctcttggaaaacattgtcaaatcatgtttttgaggaccttcggaggccgaaggccctcaacaatgtccattgtggatgtgtgttctaaggaattcaaagagccttcacaagcacaagatcaaccatctttctccatgcaagcatcttcaccaactcaagatgaggatcaagatcaagatgatgatgatgaagatcaagaagagccaccttcagaggaggacaatgatcaaggtggagatgctaatgttcaagacaaggaagatgacgactgtccaagacctgcacacccaagaagtcaccaagcaatacaacgagatgactccgtgacaccatcc

SEQ ID NO: 77814 - DNA, 259 bp, Zea mays
gctcttcgttgagccgacgccagcggtagcgatatcaacatgaacaggggcggagttggctcaaatatgaaacctcggtgtgcggatcctaaccaggtcgttcgctggcgggaccaatgctggagttgaccagccgaagcctctggtcgggctggcgccctctgaggacagctggtcgatgcccttgggcgaccggatgagccgtctgctcaagccggattcctggataagaccactgcagcgattgcccgggtgtggc

SEQ ID NO: 77815 - DNA, 236 bp, Zea mays
  unsure (1)..(236): unsure at all n locations
aagcaggtgaacaagtgggaagctctcatcatgctcaanatgtgatgacaacatcaagacacccggagtcacttcatatggacctcttctgacccgtcgtctatctaagtatatgaggaagtaagtatggccttgttataattgatgatttttctcgcgttacttgggtattctaattgcaggataaatctgaaacccaacggacccttcatgcgctttctaatgagaagctcaaa

SEQ ID NO: 77816 - DNA, 197 bp, Zea mays
  unsure (1)..(197): unsure at all n locations
tagaccttgtgcagcttgtcaagcacgtaaacaagtgggaggagctcatcacagcataaatgtgatgaccacatcaagacctctggagctgctacatatggacctcttcggacccgtcgcctatctaagcatangaggaagtaagtatggtctaattattggtgatgactctttccgcttcacttgggtattctttt

SEQ ID NO: 77817 - DNA, 394 bp, Zea mays
  unsure (1)..(394): unsure at all n locations
ctatgttgagcaacctcccagctgtgaagatagtgagtaccctaaccatgtgtataaactctctaaggcgctttatgggctcaagcaagccccaagagcatggtatgaatgcctaagagaatntcttatcactaatggcttcaaagtcggcaaagccgatcctactctctttactataactattgcaaatgaatctgttgtatgccaaatntatgttgatgatatcatattttgggtctactaacaaatctacttgtgaagagtttagtaggatcatgattcacaaattcgagatgtctatgattggggagttgaagatttcttatgattcaagtgaacaactccagaggcaccttcatanccaactaagtcactcagacatactcccagttgg

SEQ ID NO: 77818 - DNA, 433 bp, Zea mays
  unsure (1)..(433): unsure at all n locations
ttgcccttgatctagctattggaataaagtgttgtgtaacgccagtatttctataaatagccattcagcagcttttattatgtgaagtaacaacttctcatcagtttgagtcaagccaagaccggtaaatttgaaagctttgagaagcctaacaaagacaaagggctagtcaatcgatacaatgatagaaagtgtacatgtaactttaaattctaaaaaaaattaatggttttcatggtgtctcttggacggttcaatgtgacattgtgcaacagttcatgcttgacgcccaacctcaggatgaggatcccgtgcctccatacccncatgatggtcaccagcttcctgttgagttttttggtatgggacagccgatgccccaacttcattnttcagttcgacctcaatattcttctgaagatggaatcaatgc

SEQ ID NO: 77819 - DNA, 386 bp, Zea mays
  unsure (1)..(386): unsure at all n locations
tcngagccgaagcagctccagctcgaatgttgaacgaagccatcttctcaaaaagtggaagtgagttcaccgacagtgggcgccaatgttgtggacttgttctcaaatgctatgaattaagaacaagacaacatanaatgttaaatattaatgtccttcgttcgctgaaacattatattctcaaggatataatgaacttctgacgaaggttataatgacacaattaccaagggtttatcttcgtaattgaactctcaaagataatgttaaataacacgagtcataatgcattaaagacacgtaaattagaagttaacaacatcatttacatatgtatataaactagcatattcatatataatggttaagtacatttataccttctg

SEQ ID NO: 77820 - DNA, 193 bp, Zea mays
  unsure (1)..(193): unsure at all n locations
acacataaaactaagcttcatctttctccncagacttgacaacggagtgcatgactctgttcggagtagacgcaagctctgtggaaggtcaggattcgtttatcttatctgacacaaatacaaaatgatctctccgttctctttactttatctgatctgactattagatgcgtattgcttccgatttatataa

SEQ ID NO: 77821 - DNA, 441 bp, Zea mays
tgtcattgcattcgaggcgtaggaacataacaagctggtcgacgtttccacacaacaacgtctggcaagtaaggtttgagataagtacgacctacgaaaccagcaacagcacatgtcgaaactaaggatagctctcgcaagatcaatgagacatcagaaaacggtaagtttcaatacatgatatgacgaagtttacaacaagcaaacgcatggtaactggaaacatctggatcccagagatttcttcagggtcagtcagtcaaaactgagacgagaatgtaaataaatccggggatggccgagtcttctatttgcggcgcttgtatctgcgaaaaatgaaggaaaaaactaaattacaaattctgtagcacctaacgttttcaacacaagcaaaaacttggtagacagcctcatgtagtcacaagagctcaatcaggacat

SEQ ID NO: 77822 - DNA, 441 bp, Zea mays
tatctaggtggcgtctaccagtctgctagatggcgccaatgtataatatttagttcgctgtattggtatgagttattcttgtaagacttccgctatgtaataatgatacctgtgacatttagctatatacactgtgtcattatatgttatgttcttctttggcgcacatatgagatgcacccggctttatcccttaaatcctggagtgacagaagtggtatcagaggaaatgttgactgtaggacaaaacctagatagaactggacaaaaccctttcctacttaccttactctgattctttcaatacttatcttgatcctgtctcaccttttgatgttctactctgactattcttatattttctactctagaaagacaagaaggatttcacaccttggaatcctacatttataaccctctcaagagataggagacctaaca

SEQ ID NO: 77823 - DNA, 472 bp, Zea mays
  unsure (1)..(472): unsure at all n locations
gtatattagaaacattaattattctagccaaaacgaagacatttctatccagtcagatactacctaanagtttagtggtatgcaaggtgtaaagtaaaccaaattatggtaacctattgggtcccatcaatttaacctgagcatatcatagtgattaacaggaacattattgggtaaagaagagtgatcaagggcacaacttgcctttagcgagctcctgctcagaattttccacttgctgagttctgggttcctcggtcacttgctcgtctactcgcaacaatacaaacaagcatgttatatgagaaattaatatcacaccaaacatgagcacaaaccatgtaataatgttntacgtgttgctatgagatcgtangcttgagaacggctaanatccgaagtacgagtatagagatatggntttgtgaagtttcggtgataactagcanaatatatctatatanatatgtga

SEQ ID NO: 77824 - DNA, 435 bp, Zea mays
  unsure (1)..(435): unsure at all n locations
actcaagctngaagctggattatgcgctatgacgaaggaggatcttgcggatagccttgcatacaatagcctgaaggtgcgagaattgtatatttagaaatttacaatttttgaatcattcttttattcttatactaattcttgtatatatagggtttaatattgagtaacgcgctgagagcgcaaaagagtgccgaagacgagagctataatattgctttcgacaatctacgatcagaggttattangctgaggaacgaagctctggaaaaagataaaattctgcttacattggtggacaagataaaggaaggcgaagctacctctaaggctcaagctgaagcccaaaaacgcgaaattaaagatctttagaaacagctagccagagctaatgaagagcgtattcttgaaagacaaaacgagagcttagtgatc

SEQ ID NO: 77825 - DNA, 455 bp, Zea mays
  unsure (1)..(455): unsure at all n locations
acacttaaatactcagcttataaatgacggaaagtgccttctattgacctatcaggaagaggtctatgttgagcaacctcctagctttgaagatagtgagtaccctaaccatgtgtataaactctctaaggcgctctatgggctcaagcaagccccaagagaatggtatgaatgcctaagagattntcttatcactaatggtttcaaagtccgaaaagctgatcctacactctttactaaagctattgaaaatgatttgtttgtatgccaaatttatgttgatgatatcatatttgggtctactaacacatctacttgtgaagagtttagtaggataatgattaaaaaagtcgagatgtctgtgatgggggagctgaagtatttcttatgatttcaagtcaagcaactccaagagggcaccttcatcagccaaaccanatatattcaagacatac

SEQ ID NO: 77826 - DNA, 433 bp, Zea mays
  unsure (1)..(433): unsure at all n locations
ttaattgtgttgccatcaatcaccaaaagggggagaatgtagctctcttgtgagttttggtgtttggatgacaactcaattaaaggactaacaagtgtactaagtgttgaacaggtacttaaggtaaagtctacaggattcaacacgagtgaacaagtgtgatggtccaagaactggattatggatacataatggacatcacaagcaagatggacattgcataaagtgagactcgggtgcgtagctcagagacaactgatcaagccaaggacggaggcaagaagagcttctaggtaccaagtgcacgggagaaggtcaaggaggctgaggaacccatagccaacggtgaagaagaaggcttgcaaagtcaagggtgatcgagttgagaacagctatggcacatcaaggatcactacatanggacgtgacttac

SEQ ID NO: 77827 - DNA, 397 bp, Zea mays
  unsure (1)..(397): unsure at all n locations
actcagcttcccaagcttcaatttgctcatccatgccgntggttgtttttaacgcgtttatccatccgatcatccgcattgtcgccgtgaaccaattgattcaaagccccgatggtgaaattgattggggggaaatgtgcgagaggggtccaatctggtgtctgccacacgggagccccagctgttgcggtatccggccggcgtaggctcatcggagttcggcctgtgctgttcaccgtcgtggacctcggcctgcgaagaattagaacatggggggggggtcctttgtaactgtcagcgactcatagaaataatgcagggcacccagttcgggttattcaaaacgataggtgtttattcgcaaagcctacatgggcgctttccttctgttgtgggc

SEQ ID NO: 77828 - DNA, 343 bp, Zea mays
  unsure (1)..(343): unsure at all n locations
tcgatgaccaagtgatcatgctatttgagttctccaaggtttaagaccctgaacatgtgtttggtgaagtcaagtgtcctctgacctattatgtcctacttactttttaattcaccgtcccgtattacattattgaaacctaaggattgactagtctatatttaccttatccttatttacctttcggtttttatgggtagctttatgctattgctttaatttaatcgacagacatgatgtgattatttatgatacaattatttatgatacgatgatgtgacttatattaataaaatatnagtttattggttaatcatctaaaccatgagaaaaccatatcttt

SEQ ID NO: 77829 - DNA, 427 bp, Zea mays
  unsure (1)..(427): unsure at all n locations
tcttcaccatgtgatcacgggtatcttgagaaggttgagcaatgcacnttcctttaagttgtgtcaagctcttctttagcctctcattctcttctttgagcttttgatatgtgtcttcttttgttcctgtgaattctagctcaaaagaagatttgcttgtcgatggacaacaagcattagcacatggtaatgtagtatcaatatgaacacatgtgcatgagtgaggttgttggaattttaagttttctatcacaacctcatgagcaatgtttaatatgatatgatcatctctaagattntcatgagaacatagaagcatatcatatttttgttgaaaagctagattttcaatttttagcttttctacttggtcccttagcaaggtattcctatttactaattgagcgatacaatgtaaagcattatc

SEQ ID NO: 77830 - DNA, 358 bp, Zea mays
  unsure (1)..(358): unsure at all n locations
aacttaatcaatgaacatgatgtgaatctntatgatacgatgatgttatctcgatgatgatcttgtgatactttaggggacttacgctgtgtcctgagtacctctccgtaaggacatgttcgttgagtgaccacccgggataacattacaaccatgagtgtggaatgggacacccttagctgattaattagaggaacttgaggtgtagttggcttcaccgtanggccgtctatggggtccgggcacaacacttgctctgccgaggttggttgccgaggttctttcgatttggttttggtagtcacccttcttatggggagaattactatgtttatcaaactagagaaacctaacgggc

SEQ ID NO: 77831 - DNA, 474 bp, Zea mays
  unsure (1)..(474): unsure at all n locations
tgcacgcggnttcctgcagcgttgtcagattagcttgttactcgtttttgggagacatgcataaatatgtacgtgcaagctattttggagccaaaaataacactggaatgaagccgattgttgtaaataaggcagtgatgtatttcaacagctatctatcaacgtcaattcaataagctattgttaaagtaagtcatggcattaaccactaatattgctacatcctactacaagtgtagcacacaccaagaggagggttagtggcagcatcagcctgcatcgcagtttcttcatagacaacaagtattcatcacaaagcaaaatgataaacgacccatctcgaaaatcaagtgggaagagggagagagagactggcaagtttctctggagaccacatattgaattgacacgagctagtaaataaccctttctactctacacccacaaaatggcaacaacaattttgaacaaatg

SEQ ID NO: 77832 - DNA, 463 bp, Zea mays
  unsure (1)..(463): unsure at all n locations
accattctacatatggctcaagaaggtggacaagttccagtggaccacagaagcacaggaagctcttgatgcactaaagaagttcttgaccacgccaccagtgttaaaaccgccacgccaagccatgccagatcagtcggtagaagatctgttgttgtacatctcctgcatgactcacgtggtgagcaccgcgttagtagtcgagcgggcagaggaagggcacgcatattcagtacagcatccggtttatttcatcagtgaagttctgggaccctccaaaaagaactatcctcaagttcaaaaactattgtacgcagtacttctaactgctcgtaagctccgtcactacttgatgactacaaagtcatagtagtcacccggtttccaataggggatattcttcacaacaaagaagccattggaagaataaccaaatgggcctgcgagctangagctcacgaca

SEQ ID NO: 77833 - DNA, 387 bp, Zea mays
  unsure (1)..(387): unsure at all n locations
agtgtttccgaatatgtctgaagctgctaagaaggctgctgctgagatgaagctaaatcttgatgaagagaaaaacttatggtttcttatagcaatgtcgaagaccaacacagaaaagatcaccacggaaattctggaagggctgtctgaagatactggtgacagtgaaagttatgatgtagatagtggcggcgaagactccgaagatcgcccctggcgaccgagtcattcagtttatggcaaatcagctatcanagaanaccatcttgccaatatgaggggaagatatttccgggatctgtccattgtgagggcggacgaaagggaaaaaacttgtcacaccctgaagaanatgaagttgtggtgtatcgaagctttttgaaagct

SEQ ID NO: 77834 - DNA, 479 bp, Zea mays
  unsure (1)..(479): unsure at all n locations
tgcgttgaccaacagcgctgccgctgttcatctgtttggatcttctcttcactactacgaaataggagtgcaaccaacatccgttctagtgggacgtgctacgaacaaatagtcttcgttttggcatatgacagtgcttttagctgcatttcatatgactgttgcatgctacttcagctcaggattgccaaccatactgctcacgattttccatctcaaaatctgatatgccaaaagtgtgatatctcatctcaaaaatataaaaaaaaggcgtaagagctagtgatggagtctgttggacacttggcctcgcttacaagcttgattgactgttcctttataaatgcagtacatcttcgatatctatgttcattggattaccaattggcaacttattgcatatagttagagactaaagaacctatgctattgntagttcttgggacgctgcttaatttgctgaaacttgatatagttct

SEQ ID NO: 77835 - DNA, 440 bp, Zea mays
  unsure (1)..(440): unsure at all n locations
taagatacttcgactctaaagaagactacagcgtgacttattatttaagaacgaaagtgtacgtcagaagatgtagcatttgaacaacaaatatagaatttcgaagttcacgtggaatggaatccatactactatgtggattgatcgatcgatgtagtaaacaacaaccaattntgctatattataccctcgcgaaaatctactttgccacaccttttcctctatactcttcataaatactatctttacttcaaattgtaagccattttgtttttctacatagatacttcaaattggtgtaattgttagttggaattagtttggctaanaaaatcgatgtggataagaaatatttcacctgattcttacaaacacatttaatctagttgtgaaactaaacatctggaaatattttgtgacgacgtcaaatatctcggtgt

SEQ ID NO: 77836 - DNA, 438 bp, Zea mays
  unsure (1)..(438): unsure at all n locations
ctttataaggggcatatttgtaattcctcacaggctgcgtcctgtgcctataaatagtgaacagttntccgttactgttcacgcattctagtaactgcaatcgcatattctggaattcaaccttttgccaaggcagaggtattattgtattcaatgattaaatatattaagcaaatataatgcaattcgtctatgaagtatttaccttttttgtaccttttattttatgtcgtctcgcgatgtctattaaaatcttattacgaagatttaagcttcgtaattntactctcatcaaccttcgtccaaggctcattatcctcaagggaataatgtttcacggacgaaggacgttaaaatttaacactttatgttgccttgttcttaattcatagcacttgagaacaagtccccaacagccagcanagagttcaggatatt

SEQ ID NO: 77837 - DNA, 462 bp, Zea mays
  unsure (1)..(462): unsure at all n locations
tctccatcatctctttctttatttctttggcacatagatgtctataanagtagcttagctccgctaatgctgtccatacatcattntttacaaaaccacgaaacataacaggaaggagtctttccattattatgtggtagtcatgactcttcaacccagaaaacttgcccgtcttcaaattcacagaccttctaaagcccgcggcgtaaccatctgggaactttaagttnttcaaccatttcatcaattgtttcttccttttaggtttaatactgaaaggagcacgtggcttcttctgattctctcctatctccatagttggtcttctacagattaaggccaagtctttccttgccttaaggttgtctttggtttgcagtgatattatccaagtgctgaaatgcttcacccatattcgtcctggtgatgacataatgtatgcatagaatcaaggtttcatat

SEQ ID NO: 77838 - DNA, 450 bp, Zea mays
  unsure (1)..(450): unsure at all n locations
ntcaccctttntgtgtcaaatccgcctgtgaccgacagctatttgtgccttagagtgcgaccctctgctgaggaagtcagtactttggttgcctcgctcggngcaattcctgatgacgaacggcaggtttattttgaagtgcctctaaaccccagtgatgcagacataaatgacatgcttgatctgctagctgaagattcatctgatgctgctcctgatggtacgttggcagtggtgccccttccagaggttgatacaaccttggatgtcccgaaacctgtcagtattcgcccgaggcgccctagtcgaactagtcatcctgagccttctgctgatgagcagaagaaaaagagaagacgcctccggcgagtatccagctttgacgaggacgccagtaccttagcttctgctgctgaaacatgactgaactggccttgctgcattgatccc

SEQ ID NO: 77839 - DNA, 371 bp, Zea mays
  unsure (1)..(371): unsure at all n locations
ntagccagaagcatcggaacagattcatgatccatatctgtgttattgggggcggaaaatggcaggcgacgaagctcgaagccatcttaagccggtaaaaaacttatgtttgttacttttaccttctcctttgaaatttgtacctttcttactgtgttgtttgataaatacaggatgacgaagctgaagattgacaatgctgaagtttgacaaaactgaagacgaagccttagttgtagcttaaaattgcttataatgtgcttttctgcaaaaattcttggagaaactcttgtaatatagatatggagtaacttatngtaaattgtacataccttttgtatatatttatctnctttaactgcatctagtct

SEQ ID NO: 77840 - DNA, 447 bp, Zea mays
ctgcacatagtctcgatgatgtatgttttatatactagccatgtcttctaaagctatgactttttgtgaaagcgcattgaaaaagtaacacaagtgtgtgatgacaactttgacatgctctgtttcgagggctcctaccgcaattgggaggaacaccgtcatcatcacatggcagtcatgagaggtgtagccaaatatagacaagtccttcatcctgactaatctgctgatattggatgagaaacctgtgggcactttgaccccacgcatacatttgcaaatctctgttctctactcaactgacaagttgtaactagctggggggaggaaggcttcccttgccactatccactggatgaaattcggtctgattgaagactactagatattgcgtgattgagtgcgcctttgtctactcgcatgctcacaaggtccatgatgctgcaa

SEQ ID NO: 77841 - DNA, 477 bp, Zea mays
  unsure (1)..(477): unsure at all n locations
nggtgcatttattgctaactgtcccgacaatgatagtgatctggatcaagggaacaagagggagaanaagaagaactataagaaggcaaagggcgaggcacatcttggcaaggagtgggattcggattgctcctcgtccgactccgacaatgaaggactcgccgccaccgccttcaacaagtcatccctcttccccaacgagcatcacacatgcctcatggcgaaggagaagaaggtatgtactcgagacaatactacttatgattcttcaagtgatgatgattctagcgatgaggaaatagattactctagcttgttcaagggattggatagaaataaaattgataaaatcaatgaattgattgatgccttgaatgaaaaggataggctnttagaaaagtaagaggatntgttgtatgatgaacatgatanatttgtagaggcacaaaaatcctatgctttagaaagtaaagaaat

SEQ ID NO: 77842 - DNA, 376 bp, Zea mays
  unsure (1)..(376): unsure at all n locations
gacttatttcttagagatataaatactattaataaaacgttcgaactgctgcagctgcaatccatagagacaaaatactgagaaaaagtaaaagccagtgaattaaagccacaacgaactgactatatatattaggctatctttaaccgnctatttatctttatattttattttaaactccactttataaataatcaatctatcatgtaaaatagtgttttgactgactacatatatgagctacgtattatataggttgttcgtttaaatttaatctgaaacgggttctaattnttttacagtgttttgttcaaatagtttgtaattgcaccggtgcaacagcttattttaatccagcctcataaagaatagcatg

SEQ ID NO: 77843 - DNA, 465 bp, Zea mays
  unsure (1)..(465): unsure at all n locations
gacctctgaaactcagcttaactgattagagtcccttggtggatgattcccaggtttatctctttcatttcttgacacacagngttctcggaggtcttcgccataagacagtggcaggaagtcttacgactcaacgcatctgccaccacattggccttgcctgggtgataatggatctncagttcatagtctttaatgagctcaagcccatcatcttgtctcatatttaactctgactgggtgaagatgtacttcaaacttttatgatctatatatatgtgacagatattacccagcagatagtgacgccagatctttatggcatgaaccacagcagctagctccagatcatgagttggatagtgctcctcatgtcggcgcaactgccttgaagcatacgcgatcactcggncctcttgcatcagtacacagccgagcccactgccagatgcatcacaatataca

SEQ ID NO: 77844 - DNA, 489 bp, Zea mays
  unsure (1)..(489): unsure at all n locations
gccggtattatccacctccttcaccttctgacccttccattagtctctcagacataaaatatttacacacctcctagtcgttgtctcaattaactccctttacttacctatgagcaaccctacattctaactacctaaatggatcctaattggttcgactcgcttccttacctttcacacccgtcgatgtatgaagacccttgcacatctttcactacactcggacattattgtaatctgctactaaggaagcaacaatccgatccttgctcatttgacactgtgtttagatcatgacattacgtgtcaagtgctgactcagttattgcccatttaacaccatgtcctagttttgatatggcatgtcgctaagaaaattatgcccaacgaatttcgttcgggtttcgtctacattataattgctagtgttaatggtggctcatcaagcctattataaccttccttcttactanggtgtaaacctactat

SEQ ID NO: 77845 - DNA, 372 bp, Zea mays
  unsure (1)..(372): unsure at all n locations
tcttgactgtcgaactgcttgccgntgtcaactgttagctcggacggtactccgaagcggcaaacaatgttctgccagaagaatttttgggcagtctttgatgtgattatggaaacagccctcgcttcaatccatttggtgaactattcgacggctacgaaggcgaacttaaggatcccctgagcggggggcaggggcccgacaatgtccaggccccagcgctggagaggccatgtatgggcaatcagctttgtatattgcgaggggttgcctgaccgaggagagaacttctggcaggcttcgcaggaccttgtgactcgatttgtggcgcagatcattgcaggccagtanaacccttgtcggatcaccttt

SEQ ID NO: 77846 - DNA, 492 bp, Zea mays
  unsure (1)..(492): unsure at all n locations
tgcacttcgccatanacctaagtggtgcgcgttgttcgacttatcncagcaatggagtcaaatgattctgcctcaacatgaagggcgaatatagcttcacgtcgccctattagttgcaatatggtaagagcacaatacaagggcaaagggccaacaatgagcatcagtgagagccttggtcagaacaaaaccatagtaaagcaactttataaggtcaatgagaagttaattatgcaaaaacgtacgagtagttcactaagttatggattagaacatcgacaatatgaatgatgtcatgaaaaggttcagcatgttgaccgttaaaaaactaaccacacaattaanaatagatgaccaaagaaacgagatataaattgaggagaacgataatggcgatgaatagtntttatgaaccatgtattcttatntttaaatttatatactcgaattaaattatgttctggagcgacgtgacaatagactattatacag

SEQ ID NO: 77847 - DNA, 473 bp, Zea mays
  unsure (1)..(473): unsure at all n locations
gacactataaaactcagcttgcacacatagctctnttaaatacctttgatcatctctcttttatgctatgactaatgagttntcaagtttatttcaaaccaagtcataggtatattgaaagggaattggagtcttctgcgaagacaaaggctttcactccgtaactcatgcttcgccaccactccgagcaactctctcttctttgggggagaaataagcatcaaggaaaaggactctatccttgggggagagagtaaaagctcaaatgcaacaggacttcgtctttggtataatcttaactcacttatttatgaccaaaggggaagattgcacttcgagggctctaatgattcccgttttggcgatttatgccaaaaagggggagatataagcccaaagcacacggaccgcaccaccaccaccaaattcaaaaacttagtgctttccacaagtatttatcatttggtatccta

SEQ ID NO: 77848 - DNA, 458 bp, Zea mays
  unsure (1)..(458): unsure at all n locations
tcttcagtttcttgtcgtagtccattatgagggtgctgttttcttcaccggtatnggtctcttcgccttcagctatcgagaggctctcttgaagggacactttttcttctgaaagttccctgactntntgctccaggctttccacccgggaggttatggaggtgcagtggagggcgaggtcatcatattggttatcaagggtatgaaggtatccagccatgtagacaatggtgggatcattctcaataggatctcctcctgatagggcctgaagtcttttcctccaggtgggggtattcttgttgctgggtggaaagtagcgaaggggggtttcaatgattactctgttgtagttctgacacagttgtcggagggcttttctggcgacatttttggcagcatctatgaaatggtctccggtgaaagagacttggaaagaacgttgtgttggatagctt

SEQ ID NO: 77849 - DNA, 471 bp, Zea mays
  unsure (1)..(471): unsure at all n locations
tgtgaagattcttcatcccaacatgggctagtcggcggtgttctagccaacccatgttagtcttagcaattaagcaagtgtcgagttcagctctatcaaaatctaccaagtatagctgaccctctaacactcccttaaatgctattgaatcatcacttcttctaaagacagtgacacctacatcagtgaatagacagttgtagcccatttgacataattgggatacggaaagcaaattgtaatctaaagaatctacaagaaaaacattggaaatagaatggtcagaagatatagcaattttaccaagacctttgaccaaaccttgatttccatccccgaatgtgatagctcgttggggatcttggttnttctcgtaggaggagaacatccttttctccccagtcatgtggtttgtgcacccgctgtcgagtatccaacttgagcccccggatgcataaaacctacaaacaa

SEQ ID NO: 77850 - DNA, 471 bp, Zea mays
  unsure (1)..(471): unsure at all n locations
ntatatggacgacggtgtcggactccgctaaattggtctgttcctggagaaagatacttctttagacctgatatggtgaaagaggttgaagaaaaggttcagagaattatccataatatgaagaaagctcaagcacggcaaaagagttatgcagacaaacggcgaatgcccttatattntcttgaaggggactatgtctacctgaaggtatcgccaatgaagggcgtatcgcgtttcggagttaaaggaaaacttgcaccacgatatattggtccttttcttattctggaaagatatgggccagtggcgtatcgactccaactccccgaaaccttgtctgctgtgcataatgtgttccacgtatcacaactgaagaagtatcttctggttcctgatcgaaccgttgaagtgactgatgttgtccctgaaccagattaacatactccgaacatcctattcgagttctggatc

SEQ ID NO: 77851 - DNA, 466 bp, Zea mays
  unsure (1)..(466): unsure at all n locations
cttctttttggacatgacgaaacataaaagaccgctttttctctngccgaagcgttttcttttttgtacatgacgaaacataaaagaccgcttcttcctcttgccgaagctttttcttttttgacataacggaacataaaagaccgcttcttcctcttgccgaagctttttcttttttgtacataacggaacataaaagaccacttcttccttttgccgaagcaaccacttaggaacacaaatgctatgaatgaatgcttatgaatgcaaatgctatgatgtaatgtgcgaatgaatgtccaaagcatataaccgaagccacactcaaccattatttccttggaatcaaccacacatcagctctgcattcccttatgaacgactntggagcttnctcgtcttttacttagacggtatanactctngcattccttaggaacagtctttgggagttcttcgcttttac

SEQ ID NO: 77852 - DNA, 465 bp, Zea mays
  unsure (1)..(465): unsure at all n locations
agatggcgctcgtcatcaagagcttccgctctatcctcaaacaaaggagggggtaagactacaagtcccgctccaagaaggtttgctacaaatgtggtaagcccggtcattntattgctaaatgtcctatgtctagtgacagtgaccgaggcgacgacaagaaggggaaaagaaaggagaagaagaggtactacaggaagaagggcggcgatgcccatgtttgtcgcgagtgggactccgacgagagctcaagcgactcctccgacgacgaggacgccgccaacatcgccgtcaccaagggacttctctttcccaacgtcggccacaagtgcctcatggcaaaggacggcaaaaagaagaaggttaaatccaactcctccactaaatatgaatcgtctagtgatgataatgctagtgatgaggaggataatttgcgtattctcttttgccatcttaacatggagc

SEQ ID NO: 77853 - DNA, 494 bp, Zea mays
  unsure (1)..(494): unsure at all n locations
tgacaaatctctttatgggcttaaacaagcaccaagagcattgtactctcgtcttaactcacaattaatgaatcttggcttctcaccatcaaaggttgattcatccttattcttctataacaagggtaacactacaatttttgtgcttgtttatgttgatgatataattgntgcaagttctacagaagcagccaccgcagcattgttgaaagacctagaggaagaatttgctcttaaagatcttggtgaccttcactatttcttgggaatagaagtaaacaaagtacgtgatggaattattctcacccaagacaagtatgcttcagatttattgaaaaaggtagggatgtcagattgcaaaccagtcagctcgccactatccacctgtgagaagctatccttgcacaaaggatctttactatgcaacaatgatgcaactcagtatatgagcatagatggggccctaccaatattaactctcactaagcctgaca

SEQ ID NO: 77854 - DNA, 505 bp, Zea mays
  unsure (1)..(505): unsure at all n locations
gcttttctgtctgggggatggcgagtttcggtctctgttgttttgaactnttgatcctcgagatggagagtggagaacggctgccttgtggggttgcttgcagagttgcaggtttctttgcaagagttttctactccctccctctcttccaaattataagcatctcagagttaaccaaaaataaataataaacaattgtgatattaaatcaataatactccgtagtagattntttatttattatatatgtatatactccctcctatttgatatcttttattcaaaaaactatccgcgtcaaatatttaagaatggagataataatatttatttggcgtcataacctttntatatttttacagatcttaatagatttaatatactttgattggctaagaaatttagaatatttataatctgaaacggatgaacgatggatagcgttcacgctgacctatagattttggctttctttaggtacatnnctttctttggatcccacacc

SEQ ID NO: 77855 - DNA, 446 bp, Zea mays
  unsure (1)..(446): unsure at all n locations
tctggagatattcattcgttcatcacaggcttgttctcgttattcttgggcctctggctccttggtttatgctcctccattntcctgtcatcatccggagcaagcaagacacaaatcaaataacttgctggaaagaatacggaaaatcaaaaccacataacgataatcaacttcacaagactcgttgtaattgacgtgaaagtatttttcattattataatgtgttgtttcacaagactcgctgcctttttagatgtatggttttatgtttacaaaacctgctgtttcattgcacaatgatttcctttcaacttaagctaccaaaacgaaccaagcaattgctttcacataaaggtttggatgattagaatatatgcttatataacatataagtgagcattctccccctatagaaagcactgtatgtagcagcacacaactagatc

SEQ ID NO: 77856 - DNA, 468 bp, Zea mays
  unsure (1)..(468): unsure at all n locations
tcgtcagttggagccctaatggacttagcttcgtaggcatgggttcagtcattacctntaanatttcctccacgtcgctggtagaaggcggtgtgggggtcccctcttcttcgggtgatttgcgctttggagcagatatttttccttttttgagaattttcttctcctttgctggcctttcttcatccgtgatcggagtttcggctattctttttcttttaaggccctcggcacccttgttcaattgttcatagtctgggtattcgaagcctanggcgtcaagtactcggttcaaccttcgtttcggtcgggcaccgaaggctgctgtcattagttgatcctctttnttggagtaattccccaggatttcgttgcacatcacctcaacagtgtctaaccattctttgcagggtttntttgagaacttctcgaacttgaagtaatatggaagccggacaagctccccct

SEQ ID NO: 77857 - DNA, 401 bp, Zea mays
  unsure (1)..(401): unsure at all n locations
taatacatcacatagtggagtagggtattacgctccggtggtctgaaccactctaaatccttgtatgttcttgtgttctccccattttccaactaacaagcaaaacgcttaggcccctcctcatcttatgatttatggcgggtgcattccgccacccggccggagattttcctctctgacaatggttaatatcgatatcttccctttattggtggtccctcaagaagtgatactggatgtctacgtgcttagtgtggctgtggtcaataggactatccgccaagtggattgcactctcattatcacataggagtgggactntgctcatattgtagtgaaagtcccttagagttttcctcatccaaagcaattgcgcgcaacaatggcctgcgcaatatact

SEQ ID NO: 77858 - DNA, 406 bp, Zea mays
  unsure (1)..(406): unsure at all n locations
tttgagggaaatntgagtggttgtggggatgtctgttccttctcatgtgccagaggaattgtggccattntggagaagataggttgcgaacatgtaaaatctttggcgcaaaacgaagctgtcttatctattgaagatacaaaagacccctcggtcgaagcaagcttagttggtggaaattttttcaccgacatctgggaaaatggcggccgagggatggcccacaaaattataaagaaaagtgaaaaagatactcacgatgctagagaagcagcanaggcagctgaaaagactgcagaacttgaaaggcggataagtattgcctaattgcttttgactntatgttttatttttgtgacttcggacttacccatgttttatatcgcagccgaactatcttcttccc

SEQ ID NO: 77859 - DNA, 477 bp, Zea mays
  unsure (1)..(477): unsure at all n locations
ngagacattatngcttaatggtcatgtgttgtcttatngtcttacttgaggncatcatatagatgcaccagagaaccatataaagccttcaatgtccatacaatctctgtaatggaccacactcgttcctttgaaacaattcaaagaacttaaccaattcagatcagattgtaagataagagggacttagaatctcattcccaatgatactaatcaagtatctatcttatgggaaaaacatgaccaatagaattgctcataacctttcatttcatcccaacaatgggatggccaattcaatcttacccggcatggtaagtatcataacttgaaaagttataacatacgcaacactctgtatgggaggatgtatgtagaatacaatccattagaaatgtttctgagaaacatatgcaatatccatcactatcaccttgtgtntccacatgatagacattatatggatatttctataat

SEQ ID NO: 77860 - DNA, 398 bp, Zea mays
  unsure (1)..(398): unsure at all n locations
ctcagctgtgnctgaanttacgctatatgggcttattcatttttctcaatcatattaaatacgcatatttaaattgtaaataatttaaaaaaattattattctttcaatctcatctaatccacgtgggataagaataaccgaactaggccatatatggacgaggatcacctatagacatacgcaaacagcgtgtgttacttgttgcaacaagcactgctaactcttgggcattctagtagctacttataaactagttatgctgggcagtgacggtgtgctctaccgcaacatcgatccacaagggcgccaaatttatgcccggtgcatatattccctgtgttccttttatcagctttggaatgttagcaattactgaactattctattctcgggttca

SEQ ID NO: 77861 - DNA, 479 bp, Zea mays
  unsure (1)..(479): unsure at all n locations
tctaaagggagaacacattntangattaacaaatgttcattttgagaaagacaggatttgtagcgcatgccaagcagggaagcaagttggcactcatcatccgcataagaacataatgacgaccgacaggccactggagctcctacacatggatctattcggcccgatcgcttacataagcatcggcgggagtaagtactgtctagttattgtggatgattattctcgcttcacttgggtattctttttacaggagaaatctcanacccaagagaccttatagggattcttgagacgggctcaaaatgagttcggcttaaggatcaagaaaataagaagcgacaacgggacggagttcaagaactctcaaatcgaaggctttcttgaggaggagggcatcaagcatgagttctcctcttcctacacgccacaacaaaatggtgtagtggagaggaagaatcgaactctattggacatgg

SEQ ID NO: 77862 - DNA, 497 bp, Zea mays
  unsure (1)..(497): unsure at all n locations
gacctatgaaactcaagcttgaaggattntaactcaagatnattgaagcgatgttagtcctcatgcaaatgcaaccactagatgctctatgaggcactaagttntacacagatcaaagtcattgacccctcttaatagtacggctatctagcctactaatccggttaagtatcttctctaaactcctggagaccggcaaaaaacaaaacctatgttatacctttgccttcacttgatccacaactaatgcttataaatctctaagatttcctgttctatgtggtccaaccctgcattcttatttctccaagaaccgttagtccacaaacagttgtcattaattaccaaaacatcactaaggggcctagatgattcacaccaatgttcattntgagaaagacagggtttgtagcgcatgtcaagcangaaaacaagttggcttccaccatccacataagaacatcatgacgaccgacaggccacttgagctacttcac

SEQ ID NO: 77863 - DNA, 373 bp, Zea mays
tcacttacggcgatgcccagtggcttggtctcgctgacttctgggtacataatcttgtgtgcgttatatggaagcgatcattaaaaagttagataacattgcattctttttgtaagcacgttttcggatggccgacggtgatgacgctaaccacgccgagaaggtgtttcaagtaaatgcctatcggttggtgaaggaggccctgtacgaggcaaagattcacgccacgtgcgtgtattatcaacaaactttatggctgaagatgaacaagaagacaggggcctcgagtatataccttcacgaggaagagtatccgaaggctatatttcaatcctttcctttgcgttgcttcatttgaatacggactgatata

SEQ ID NO: 77864 - DNA, 405 bp, Zea mays
tctcttcttcatgtgagggaacgtcttcgctgatagagactgtctgcttgtgcgtggcctgatcgagggggaccgtcttggtcccgtcttggctctgcagctgtgccttgtcgtgctgtatatcggttgggctggcgggcgcagggacctcgcactgggtcgtgagacagtgcacgttcctctgaccgggcacgaagtcccgctctatgttgcgcgccgtctgctggttgccgtagaccataatagcgcctagcggacttggtatcttcatacataggtacagtccgtggatggcagcttcgaacttattgatggagccccggcccatgatggcgttgtatggatataccatgtcgacgatatcgaaggttacttgctcacttccggcattgggtgctacaccga

SEQ ID NO: 77865 - DNA, 404 bp, Zea mays
  unsure (1)..(404): unsure at all n locations
ngagtcagttcttcgacagagaattattgatgcccaaagatctgactatggtatgaagtgcattcgtaagaaaatggaagccggcaaagcaaattgcttcagaaaggatgaccaaggaataatctgtgttaaagaccgcatagttgtgccaaagaatgccgatgtccgccaacaaattctggacgaagctcatcttagtcgatattccattcatccggggagtactaagatatatcaagacttataacaacactattggtggacaaaaatgaagattgaaattgcacgctatgtggcaagatgtgacacctgtagacatatcaaggcagtgcatatgaagaccgctggaccattacaatccttgcccatcccaacatggaaatgggaagatattattatggatt

SEQ ID NO: 77866 - DNA, 497 bp, Zea mays
  unsure (1)..(497): unsure at all n locations
tcggaaatcccatgcctttggctatctcccagcaaacggattattctttgttgtccgggagacagtataggaaatcgtcttcgtttgtgccattaaacaccaaggccccctccggatatttcagtttccgggcataatatttggcttccaagacttcttcttcggataatcgtttccccgaagcatgtcgaataatgtaattaatatcttcagacggagcttcgggagcaggagcttcagctttntctgttacgacctgccctgctgctttgccggtatccgaagtttgttgctcagttttatcctcaggcgcagtaggcttcgtcttaatgggcactgaaggcccagcttctgcttctgcctggactttgacagcctcggcaactttcttgataggagcaagggtcaaggcttttgcggcttataatacccaatttgttaacgatcagaagagagtagatctcgttatgtgtgtggcccatactcattgtaacata

SEQ ID NO: 77867 - DNA, 416 bp, Zea mays
  unsure (1)..(416): unsure at all n locations
ggggctgagaacgcttncacatncacacccctactacatgcaatggttctactacagnggtaagcttaaggtaacacgtatggtccgcgtggaatatacaattggttcataccatgattatattgattgtgatgtggtacctatgcaagcttgctctatgttatttggtagaccatggcaatttgataaggacacctgtcggngaccataattaggggtaccctcaaggctcctaattctcagttggtaacccccatcagcacaaagctgcaaaggcctgatgagtgcgactaagtcagggatcggtccattcgagggactcgatcacgcctcgcccgagcccagcctcgggcaagggcagacgaccccggaggatcttcgtctcgcccgaggcccccctccagcgacgaacatac

SEQ ID NO: 77868 - DNA, 411 bp, Zea mays
  unsure (1)..(411): unsure at all n locations
ntaagagaaatggacttcatggtggctacttacattggggtattcgtagtaggtcgaagcgaagccagatctgccgcccgttgccaaacgactttgttgttcctgtccaccttgaagtcggccaggaatttcgactttgcttcctggatcagctgctcctagcgctcctcgaataggagctgttcttcagccggtaaggtttcccatgtcggcttgatgatattgctggtggaaacttcagagttatccttggaaccggccattgagggccgatctcgataggtctatatgaaatcttccccagcggagttgccaaaaagtatgttgacacctttttagggtgccaatcactcaacacgaaccagtggcggtgctctctgcacaggagcggatggtccgcggcctggcacg

SEQ ID NO: 77869 - DNA, 419 bp, Zea mays
  unsure (1)..(419): unsure at all n locations
cggaactatgaaactcagctatgacanatacacagacatttatgccagtttgcactactatttacgcagtcatttttgtacagtcatggttcacaggcttaccctcttttgcattacacaacgcatagttacgcaggttttcacatacatttatgctaagtacatatacagtcagactgctgcattactgttaaagcttatgacaaactacacatccatttataccagtttgcaagtatatttatgattctttctggaagtagacaaacgaacacaggaatcacatttacacaaggaaatatttgtatcttatggtcttttactctctaccagatgaatcatcatctccgacatccaccgttcgttttttcgacgttgatgtctcattccattgcggngctgcagctatgattttgttc

SEQ ID NO: 77870 - DNA, 438 bp, Zea mays
  unsure (1)..(438): unsure at all n locations
tcgtgatggtggaaggaagtttctcaagaaagttcgcagtgttgtaagtgcagggtntattcattttccatccaaatcatccagatataggttgcatcagagattcatagttggctatctattgcatgtagttaaatacacagtcatgttgttatctcttctgttattgaagtgttttgtatcttagagtccaactgcattactgacataaatgcccctcttctattgtaccacggcattgaagcaagcattatggctgaagtntggcccttcctactaggagtgtgagttacttgatctcttttacctatcctgtaaatttataaccgatgatttttttgggtgcaagtttaacagtacacatgtgcatgtcaataccttccanagcatcatgttacttatttgattaaggtatcaccttgtaattattggtctagt

SEQ ID NO: 77871 - DNA, 452 bp, Zea mays
gcgcaaatataccttaatatcttcctgtactgccaggtcattctttacataaaaccattctgtcatccagtcgtcgggccatctcttccgaaaggttggcacgggacagcttgacccagaccgagaaacgaaactgtagcagccaaaattattgtgatactgttctttaccccaagggtttgtttcgtatgataattcgtgtatattgcagaaacttttcgcatcaggctccagaccttggcttctcacggcccacacgaagatattcagccttatgattgcctctggggtaagttggtgaagatatacttcgaatattttcagcacctctactacaaagttgcttatgggaaatcatagtccagctttcaataagcttccgtacactacgacttcattctcttcaaggtgtggacaagtatttttctcttcgtctggcctcacaacggaca

SEQ ID NO: 77872 - DNA, 480 bp, Zea mays
  unsure (1)..(480): unsure at all n locations
ttacggaactataaaactcagcttgccaggcttanaccgaggacctcgccaccggaaaagcgctttcgtgctcgccggagttcaaaaccccgccggcgcacgtggaccaggtaagtctctgcgccattttccgattcaatgcacatatagcctctacgtcaccccgtggagctcaccgtgccgcctaatcgaactagatcgccgtggttaggtcggagctaccgccgacgagatcacccgcctgcgctcgtggaccggacgattccggccacctccgccgtcgagctgtacaccgttgtgaccgccaggacctcccggagccgaccccgcccctcgccggacctctctcgccgccggtaagccgcgccgcccttttcttttccgcgggtactggttaaacctatggagggaccgcgagggagaagaagaaaaggctanggggttttgtgcattgtcagtgactcangggaatagtagcac

SEQ ID NO: 77873 - DNA, 256 bp, Zea mays
tattcattatcggatgtgagattctatgcatatttactttattcggtctcttggatgggggactggttgtgtcctaatttgaatggatggatgtatgtatgcttgcgatcgcatatagaacgaatccgtcgaagagcccgaagaactatccagagaagcccctgaaccgcagtccggtggtggagggaagtgtcccttgacctatctttgtcctactcattctttaattcaccttccgcattacacatttattcct

SEQ ID NO: 77874 - DNA, 399 bp, Zea mays
  unsure (1)..(399): unsure at all n locations
tcgcgagagagagagagagagagtgcgcncttgagctgagccgtctgagttagccttctctgcgttttctctccttctccgcctgcctcctttgggatggccctggacatcccttttatagatacaaggagatggtccagctgtacatgggggtgtagctatgtgctaacgtggccggcggagaagtacttgagccctgtagaagcgcagctggcggtgcgacccggggtcctgctgacgtttctttgccttcgtagagagttgagaacaatcgacgtcatggacgcatgcagtgaaccatcattacctgttgccggagtaatctaaatggggcatcggtcttgttccttcgtagcctgaggcagctagctaggggtagggtaatgatgtatcacctgt

SEQ ID NO: 77875 - DNA, 436 bp, Zea mays
tactcatgctaccctaatattctacaaatcttaaactggtataaatatttggttacataactataaaacaagaagcagagcctcccactacccttgtctctgttctaaagccataccaaaaacaagctctcttctggatgtctaaattggagaagggaattgatgctaatgaagagacaaaaactcttaatccgtgttggagtgcctacaatattgcagacaggtatgctgtcttttttgataaatcacagaaatgttgactagattatgttgataaatatgaaaaccgctgttgtttgcaggagagctcctccagtctatgttaatctttttactggtcaagcaacaacacaatttccaagtatgactgagactgtaagaggaggggtaagcttgtttcaaagggtgttcttgtgcttttcttgcataatattct

SEQ ID NO: 77876 - DNA, 491 bp, Zea mays
  unsure (1)..(491): unsure at all n locations
cgtcgatggggagtctacttggtgtagactcgttcttcttctcttctgttgctatgaatgcaacgggttgtacctcgggtgtggaggtggcgccttgctccaagttgataatgtgtgtgaagtctttgatcataagttcaaagctcacaaacttgccaataacctcctcgggggacatttgtttctatctaggatctccatggattagttgaaggtgagtaggattacaaaaacaagagatcttagaataaccttgaccatttaatggtcatcccatttggtgctcccgaggatgcgcactcggttgaccatcgtcttgagccggttgtacattgctcgtggctcttctcctttgtggaggacgaatcgaccgagctctccctcgatcgtcttgcgcttggtgatcttggtcacctccgcccctttgtgcgctgtcttcangacataccacaattctttatcatttttcaccctcggaccatattatactc

SEQ ID NO: 77877 - DNA, 446 bp, Zea mays
  unsure (1)..(446): unsure at all n locations
aactaagctttagaacatctctacaggagagatgtatagaactctagctcataatattcttcaacgagagttctattntacaaaaattcatcanaattataggactctgtccgatattgttaacattttatttcctaaataatatgatataggactcagtcttgttggagccgtaaatatttttatggccttgaacactctaaatcaggtcttattttaaattntagaacttaaatatatgactntttgttgaatatactcttaaaaaacttgaaaagatgctctaagatagtttgtgtgcttttagtataaagcgcagatctctagagtttttgtagttagaagaagcaaccctcttatatatcaagcttatggcttttcgaactttttgagaaaagcaaaagctggcggaagcttctccaaacaaggatcttaaaaatggtata

SEQ ID NO: 77878 - DNA, 424 bp, Zea mays
  unsure (1)..(424): unsure at all n locations
tccatcgatatcgccgtagactgttgaacaccagctgtaagtcttctatttattttttctaagttctccgttgtgattaccacatcatctacataggctttcacacacttgccccagtgatcggctacgcatgtttgaatggctctctgataagtcgctccagcatttttgaggccgaacgacatggaggtatagcagaaagcaccgaacggagtgatgaacgctgttttttcctcgtcttcttttgccatgctaatctgatgatatccggagtagcaatccgggaaagacagcacagaacatccagcggtggaatctaccacctgatctatcctatgaagcccgaagggatcctttggacagtgcttgntgagatccgtatagtcgacgcacatgcgccaatccactttattccttttgagta

SEQ ID NO: 77879 - DNA, 484 bp, Zea mays
  unsure (1)..(484): unsure at all n locations
tcgcacctctgaactaactcgggtgcgtcattcttctctgttggccaatanaatcctgacctgaagaccttctcgactagtgtcttggatgctgcgtgtattccacattgcccagcatggacctcatccggaagttgcttcccggtagatgagagaatgcacttcatgaagacgcctgatgcaccccttctgtataatgtctccccaatgagtgtgtagtgagccgactgtctggcgatacgctcggctgtatttttgtcatctggttcctcttcattctttatatacctgatgattggccttctccagtcatcagagtctgactctggttgattcacgatattacactcttccgcttgatccgntgagatgctcggctgtagtatttcttgcacaaagattccaggtgggacatgagttcgactggatcctatcttggacaatacatcggctgtcgtgttccgatctctttctacatgatgaa

SEQ ID NO: 77880 - DNA, 471 bp, Zea mays
  unsure (1)..(471): unsure at all n locations
tctanagggagaacacattntaggattaacaaatgttcattttgagaaagacagggattgtagcgcatgccaggcaggaaagcaagttggagcccatcatccacacaagaacatcatgacgaccgacaggccgcttgagctactccacatggacctattcggcccgattgcttacataagcatcggcgggagtaagtactgtctagttattgtggatgattattctcgcttcacttgggtattctttntgcaggaaaaatctcagacccaagagaccctaaagggattcttgagacgggctcaaaatgagttcagcttaaggatcaagaaaattagaagcgacaacgggacggagttcaagaattctcaaattgaaggcttccttgaggaggagggcatcaagcatgagttctcttctccctacacgccacaacaaaatggtgtagtggagaggaagaatcgaactctact

SEQ ID NO: 77881 - DNA, 491 bp, Zea mays
  unsure (1)..(491): unsure at all n locations
tgcacgggaactccagaagacgccttcaatnttctttgtcttcggagctaagagtcgaagtatcagtcttaggtgaagccaaactgcagcttccatcctcattaacttctttcaagcttgcagtattattatttggtgttatcagctcctgctggtccaccgccaagttacctgcatcatgttaagaacgttttgattcaaaccacattaaaaattgaccaattttacatgaaaggatagaacatgcacataaaaagctttctgaacgtaccataatctgtagtttcacttttgatagactgaagaaacactgcagagctgatttcaggatcaaattgaccattaccagcatcagtctgatgcatcatgtttccagtagcacatttcaagaaacggtcactggttctggtgggtgtatcagagcgaatcttagtcatcccagaaaccaattgattaccagacatgctnttctcactggtcataagctggat

SEQ ID NO: 77882 - DNA, 461 bp, Zea mays
  unsure (1)..(461): unsure at all n locations
ntaccanatggacgtganaagtgccttcctcaatggaccaatcattgtagangtctatgttgagcaacctcctagctttgaagacagtgagtaccctaaccatgtttataaactctgaaaggcgctntatgggctcaagcaagcttcaagagcatggtatgaatgcctaagagattttcttatcactaatggcttcaaagtcggcaaagccgatcctactctctttactaaaactattgcaaaattttctttgtatcccaaatttatgttgacgatatcatatttgggtctactaacaaatctacttgtgaagagtttagtaggatcatgattcaaaaatttgagatgtctatgatgggggagttgaagtatttcttatgagttcaagtaaagcaactccaagagggtaccttcatcagccaaactaagtacattcaagatatactcaccaagttggaatg

SEQ ID NO: 77883 - DNA, 398 bp, Zea mays
  unsure (1)..(398): unsure at all n locations
ttaggttntctcatcttaggttaagtgttacccctttaattcctatgtagggntaaagcttcctatccagggtcctatttgcaaaacattaaaacaatacaacttgtttgaaatttttgcctagtgaatgcactctatgtgtatcaaacatatgcaatgccaatgcttatgatgccatgctcaagttttagttacagtaacaccaggggtgttacagcttttgctggatcggcctcgcctggggataaaccttcaacttgtgctcggccagttctcttgggactcccggcatattcgcaggttgccatgcgaatacatctcggttatcttgcangaactggacgagcgcgctttcctatttgtcgtncaagctggagctgatgatggctgtcttgcgc

SEQ ID NO: 77884 - DNA, 326 bp, Zea mays
  unsure (1)..(326): unsure at all n locations
atatatttatttattatgtcgaatttcacttaaaagttgctcacttgccgcgagttttaataatgaaaatatatgctgtccagattctttgacaaggctgccataatcaccggcgagaagggtgcagcagcgccgacgagcccgtggagactgtgcacggtgtcccangtggaggagctgaagatgctgctccggttgctgccggtctgggcatccatggtgctcttcttcgccgtcagtgcgcagacggtaaccacgttcattgagcangctagggtgatggacaaccgcatcggcccgttcaccattcctccggcgtcgatagc

SEQ ID NO: 77885 - DNA, 453 bp, Zea mays
  unsure (1)..(453): unsure at all n locations
tcttaccacgtgttcgtagatatcttgatgaagtcgagcattgcatcttcttcttaattgtctttgnttcttggttccaagcaatttcctttttgaccctacaactatgtgctcattcaaacattcgcttcctttngagcgacaggggttagcacatggtgatatattatccaaatgtgcacttgtgcaagaatgagggtcacatgaatttaagtttgtaattacaacctcatgagcaacatcaagcatgatatggtcatcaactactttattatgagaatatgacaacatatcatactcttcacctagagcaaggttttctaaatttatcatttctacttgactcctaagcatagaattttcagtgttaagttgagcaacattagataaaacatcatcattatttctttgctcaattaaaactgaataataccgtnggatcaaatcatcatg

SEQ ID NO: 77886 - DNA, 477 bp, Zea mays
tgcctttgtcccaaaggtggatggttcttaagcctctctgaaatccttaagggaaaatgcttaaaatatttataacatgctttcataagtgcataaactgtcatgagcatcacacttatactatgacacaatgcacttcacattctgtatggtatagaatatgtctctttaacctcattatgtgcaattggcatttcaaggcacaaatatgtattcctatcaatgcacatatttatggggagcaatctatattatatagatctatgatcattcttaattgacatatctcttgatcatatctctttacgtctatgactaatgtgctttcgagagatctctatgctaagtcgtagattgaaagggaaatggagtcttcggcgaagacaaagctttcactcaactctatcgatactatctacccttcgccattactccacactgtgtctcctcattgggacaatctctcactcatatatt

SEQ ID NO: 77887 - DNA, 495 bp, Zea mays
  unsure (1)..(495): unsure at all n locations
ctatcaccgacactatagaaactcagcttcgtaanacatcattgcttcgtaacaatagatctcttcttccatatcatagctgangaagatgtacttttcagcttattttgttccttggcgcccctttcattttgtaaagcattctccaaagatcgtgttattggtgtgatatgatgtatgatgtgatgctatgcgagatgatgtgatgatatgatgcacagaatgatgctaatgtcgaagacacacacccacactgaaacacacgatctctgtgtccccttatgaacgatcaaaatctctttgcccgttatttttcggcttcaccgcttatttttcggtgtaagttctgcatccccttatgaacgtcttctgaacttcttcgccttctatttcggcggtattcgcattgactattcgcactcttgcttatattttggcgggatttggctctgcattcccttaggaacgacttttgagcagaaaacatacactgcg

SEQ ID NO: 77888 - DNA, 461 bp, Zea mays
  unsure (1)..(461): unsure at all n locations
tggacagattctgcgatggttcttggggaaccttcggggcatgtgcatctaccgntttaattgcaccttcaaaagctagaacatgctatgcagtgaaacttgattttagttgtacaaataatatcgctgaatacgaggctttgcttttgggtcttcggaagttgaaagcaatggggataagaagggcggtcctcataaccgattcccaagttatttctggccatgttgacaaaagttgcaaagcaagagatccgaagcttgaaaaatacctggatacagttcgaagacttgaagcctgcttcgaagggttctctgttaagaatattccacgaggagaaaatgaacatgctgatctgctagccaagtcagcggcacaggggctgccattaccttcggaagttttctttgaaacaataaaagcaccttcggttgatcttcttgaaagtgcagtgctcaatata

SEQ ID NO: 77889 - DNA, 429 bp, Zea mays
  unsure (1)..(429): unsure at all n locations
gacactatgaaactaagctatgccgagattaaaatatgggcaagttaaatggaaatcatgcttatctatgcgtgcggntaaataataactaatttggcttgtgtagtgaggcggtgacatgccgaagtantcatcgcttcctctatgtttttaagtcgagtcaaaatgcggggtactagtagtacgctaggcaagcggtgttccaaatagataaatcacgtgatgtggtagttgtcaagcatgatagaggttgagtcacttacgttattaattcatgctcgacatgtgaggtctcctaaaatatggtgttttaagtgacttgtgcgttgtccagtttaagttgagaaaatggttaagaaaaactaattaacctgctcccacctatgtgtttgagttgcgaagactaaaatactctgctaagtgttatac

SEQ ID NO: 77890 - DNA, 440 bp, Zea mays
  unsure (1)..(440): unsure at all n locations
tccttcttgtcggaagtcattatcaacctggatgttctcatccattntctgaagcagcttctccagagtctgagggggattcctggcaaagtattgtgccatatgtcctggccgaagaccctngatcatggcctcaatgacgatattattgggcactgtgggcgctcgtgctctcagtcgcaagaacctttggacatacgcctgaaggtattcctcatggtcttgtgtgcattgggacaaggcctgagctgtgactgtcttcgtctgatagccttgaaaactggtaaccagcatgtccttgagcttctgccatgacgtgattgtccctggccggagagaagagtaccatgtattggccacattttggactgccatggcaaaggactttgtcatgacagctgcgtttcttcatatgaggatattgtgcctcatagctcatc

SEQ ID NO: 77891 - DNA, 458 bp, Zea mays
  unsure (1)..(458): unsure at all n locations
tattatggaccatgaaactcagcttctaagggagatcatgtgttaggactaaccgatgtctgttttgagaaacacagaccttgtgcagcatgtcaggcagggaaacaggtgggaagcactcatcacagcaagaatgtgatgacaacatcaagaccactggagctccttcacatggatctcttcggacctgttgcctatctaagcatcgggggaattaagtaagcatggtcttgtaattgttgatgatttttcccgcttcacttgggtgttctttttacaggataagtcagaaacccaggggaccctaaagcgcttcttaaggagagctcanaatgagtttgaacttaatgtgaagaagataagaagcgaaaatgggtccgagttcaagaatctacaagttgaagagtttcttgaggaggaaggcatcaagcacaagttctccacttcctatacaccac

SEQ ID NO: 77892 - DNA, 494 bp, Zea mays
  unsure (1)..(494): unsure at all n locations
tanagccatggtaagtagcataggcaagtaatatatgaattgactcaagcctagctacgagtgcataggtttcaccgaaatccaaaccttcgacttgtgaatatcccttggccacaagtcaggctttgttccttgtcaccacaccatgctcatcttgtttgttgcggaagacccacttggttcctacaacattttggttaggacgtggaactaaatgccataccttattcctcgtgaagttgttgagctcctcttgcatcgccagcacccaatccgaatcttgaagtgcttcctctaccctgtgtggctcaatagaggaaacaaaagagtaatgttcacaaaaatgagcaacacgagatcgagtggttacccccttatgaatatcgtcgaggatggagttcacggggtgatctcgttgtattgcttggtggactcttcggtgtggcggtcttggaccgtcgtcatctttcttgtcttgaacattaacatctccc

SEQ ID NO: 77893 - DNA, 398 bp, Zea mays
  unsure (1)..(398): unsure at all n locations
tcgtcatgactcatgacaagacccctctgtgatgtanacgtacacgtacttgcaaattgcaatacaacagaaccgtgtttgctcgtgttcacctttcatcagttggagtggtgccgctccgacggaagaccctcgcgacccacgcctgcacgccatctatgggttgcttggcggcacggtactgtcgcgtgccaagtaagaagacgacaaggcatagcaccatggcggtccagcacgcgccgaaccccaaggtccagccggcgttgtcctgtacgtagctcagcccagccgtcgcgatggcgtagccccaggacatggagaagtggaaccacgtgaagtatgagctcccgagtgtgggcgcgctgatgtcgtccatgtctctaggcgtgaactggtct

SEQ ID NO: 77894 - DNA, 366 bp, Zea mays
tgtggcgcctgcctaatgccatactatagcggttaagcttacacaccatacccgagcgagtggtcgacaaagacgacggactatctgcagtacaccgtctcattaagagtgccatgaaggaaggcctctttgatgtctagttggtggaccgcccaatcccgggagggcgaggaagagggtggtccaaacagtggcgggcttgacgacgaggttgaatctcttgtcgtagtccactttgaggcgctgagtgaagcctcgaagaacccaacgggccttgtaccaatctagagagacatggcaccaagtcccagatgtgattggccagcagagtcgcatagcacgacgacagtgaggatcaacaagcgt

SEQ ID NO: 77895 - DNA, 426 bp, Zea mays
  unsure (1)..(426): unsure at all n locations
tgactggaatggaagacgatcatgactaaggatgaaacgatcacgaagctatgtgtagaggagcttccgcatgacagcagaaaggggaaaccgacttaaagatgaaaagccaaatcaaccctcgaagaattactatagagttattgataaaagtaaagggcattaatgtaattttatacgggctgcgtcccgtgcctataaatagatgaacagtattcctgtactgttcacgctgacttggcattggcatcacgctngtacccttacttttcttcaagccgaaggtacatatgtaatttgtcatcatttatataagaaaaatgaatagaaataagtcaataacaatgtttaaagtagtcatgttatttttttccgtattttatacataaatcttttcttatcttttattacgaatatgaaggtata

SEQ ID NO: 77896 - DNA, 485 bp, Zea mays
  unsure (1)..(485): unsure at all n locations
actcagcttcaggatcctgcccaccaaaggtttcgagattttntaaactactaatagacnttgaagagccgttgcatgaacacacagatgtgagtatactcgctnttgtggcctggctcatggccattaagtccaagtactttttctcgaacaactacaatgagattttaaagttattcatggatgtgctgtcaaagcccaataagttgtctaaatacatgtaccattcaaagacaattatcaaaggtcccaatatgtattatgaaaagatttatgtgtgcaaaaataattgtatgaatttcacaaaggagcatgcggaagagaaaaaatgtctgatacgtggacactctatatttgtggaaattggtaatgatgagggtgacaaggtgatgacagatgctgcacataagcagcttcgctactttccactaactactcgagtgagactgttgtttctatctgaaaaaccaccatgcacatgcgat

SEQ ID NO: 77897 - DNA, 452 bp, Zea mays
  unsure (1)..(452): unsure at all n locations
gcttcgcatctctgaactaactcngctgcgtcgttcttcgccgtttgtcaatataatcctgacctggaaaccttcccgactaatgttctggatgctgcatgtactccacactgccctgcatggacttccttcagaagttgcttcccggtggacgggagaacgcactttatgaggacgcctgacgcgcccctcctgtataatacctccccaatgagtgtatagtgagctgattgtctggcaatgcgctctgccgagttcttgtcatctggttcttcttcattctttatatacttaataatcggttgcctccagtcatcagagtctgactcacggtgatctatgtatgtgcactcttctatttgatccgtccagatgctcggctggagaaattcttgcacaaagatatccggcgggacctgagtccgaccggatccgagcttgacagtacatct

SEQ ID NO: 77898 - DNA, 459 bp, Zea mays
agcaagaattcaaatgttgtaatggctgtattttattatgcctataccacttgatctcattagacccatttaatatatgtggcataacttttctcaactgaagttctggggggaagatgagttccctttcatagtatgcactcccatcaatttcattgtatgaataaagtgaatatctttccacaaacgatgataacgaggactcattaacattgacatctgtctcattcctgcaggaacatggttttccagtagaagggcaaatagcttggtcctttgcatcttctgaacatgaattggtgtatgccaaaatatctgtcttggcatacacaccgaatgcatctataattggtccgtagtcagtacaactacataaatttcctgcagggcatcttcaatctggcttcattgggaggctgttggttgatctcagcaatgcatacattgacatcacaaaac

SEQ ID NO: 77899 - DNA, 500 bp, Zea mays
  unsure (1)..(500): unsure at all n locations
ggacctataaaactaagcttctnagggtagaacacatttgggactaaccaatgttcattntgagaaagataggggttgtagcgcatgtcaatcatggaagaaagatggtgttcatcatccacacaagaacatcatgacgaccgacaggccgcttgagctactccacatggacctattcggcccgatagcttacataagcatcagcgagagtaagtactatctagttattgtggatgattattctcgcttcactngggtgttctttttgcaggaaaaatcacaaacccaagataccttaaagggattcttgagacgggctcaaaattagtttggcttaaggatcaaaaagattagaagagacaatgggacggagttcaagaactctcaaattgaaggctttcttgaggacgagggcatcaagcatgagttctcttctccctacacacctcaacanaatggtgtagtggagaggaagaatagaactctacttgacatggcga

SEQ ID NO: 77900 - DNA, 419 bp, Zea mays
  unsure (1)..(419): unsure at all n locations
tgctggacgtcaccctcgtacctgagacgatggtgcgatcagttcccgacgtgactntatcgccgctcgtcgaccaagaggtaccgaccgattcccatcccacgtcatttggatcagcctcaacccgcctagcgacctcgctntggcgggcgctctcgtagaggcgagaccaaaccctctggggtttcgcatgcggtcgccttgggaccggctgacggacgtctcgacctacgggccctctgggtccgaggaagacgacgagcccagcatctgttgggatttctctggacttggcaaccccagtgccatgcgggacttcatgaccgcatgtgactactgcctctccgactgttccgacggtagccgcagcctcggcgacgaggactgcagcccaagccgcgaatgtttcacgtcgatct

SEQ ID NO: 77901 - DNA, 481 bp, Zea mays
  unsure (1)..(481): unsure at all n locations
tctgcggntggtggctccgtcggcgaccggtggtcatatattatttgttcctttttttaaaaaaaaaaaactgctgctataataagcgctacatatgaggcggtatgcagatccaccgtgcataattcaggccagttcttggccagcacttcatcgtaacttcaaagacancgaaggcctgngcctggccgaacccacggggccatgggttgcgagtgccacaacgtgtatttgacttttctagattcaactgttaagtaatcctagttagagttatgtgggcaaataattgttttgctcctgaggggtctcacatccctatataaggaatctgtacaccctctataatacagagaagagaaagaggtcagaggtccaaccctatatcccgtgtctcgtgcgtttcttctgtcgtgcttatgggaagagagacgggtcatctacatcttcttgcgcctctactgctgacgggagggaacga

SEQ ID NO: 77902 - DNA, 472 bp, Zea mays
  unsure (1)..(472): unsure at all n locations
ttgcattagtaggtggttgactntattttcttgtaatgtggatgcagtagnataataacttcattggatntaattattgtggcatcattttctactccgagacacctgttgaatctggaagtacatggtgccttattcctctcttttctccttatggtacaaggatgattactttaattgaattggtaaggaaatgttggttntctcgtccaattcagataatctcgtttccatttgatcacacgtgcttcgtacatcacgtggatagtctgtatgaatcctaanaagatctaattgaacatcgtcatttaattaatataggtcggtcattntgcaacccttggtaacaataaccagactgatggattttctaccgccgaaatttcaagaaaatttatgtatgatgtcaactttcttgcatgtgggcggaacataataggctgataaatagtttgaaatttatgctaacatg

SEQ ID NO: 77903 - DNA, 487 bp, Zea mays
  unsure (1)..(487): unsure at all n locations
agaaggagatgatatgaagctctgtggtgcttgttaaagtcaattcaattcttattaactcaagctatcaatctttaatgatttatatatccaagattgacccacagttgttttgaattattatgtctaanactcatatcatctcggtgaagatattgatgttgtatgaaataaagaattatcctatgaggaaaatcaaggcctacaacatggaggaaagccaaaggatggtaacatttatgcttttaagtgcaagtatcttaaattaccatttcttatgtgtcttgtgtagtcacatagaanaggaagcacttcaaatgtcttttaaattatgtcacgattctctgaagaaattcctctcatatggtagatcgcatattcaatttctattctatggcaatctacatgctctacattgttggaactacctcatggcatgtgttacactaattatcctattattgcactgtcagatatagagagatat

SEQ ID NO: 77904 - DNA, 442 bp, Zea mays
  unsure (1)..(442): unsure at all n locations
ntattgntaaatagtgcttatattggtgctcaagttgtagcaactcttccctggacctcacaagtccaagttgtaatgatgcacacttttatggggaggttttactacatcttgaccctctgagactaatgttgtgttaactttattatgtagtctcaatggagaattgaaaggagaaaggtgaatttggacaaaagaagaagctttcactaccaaacgtgtatcattgtcctttgtttcaaattcatttggattttcattgccctttgggtttaattcgattctttggtgaggcaatgaggataggccgctagtttctctgttttggcgcttaatgccaaaggggagaaattaaatgccaaagcaactggatcaaccaccgcttagagatttattttctttgagttntaactcgtattttttatcgaaaccatcttgatag

SEQ ID NO: 77905 - DNA, 347 bp, Zea mays
  unsure (1)..(347): unsure at all n locations
tgacaacaccattngacattntacatataatttctgagatcaagaatatttagttcattcctcaacatacaaaagcgggtcttatcaagaggcttagtgaaaatatccgctaattgatcttccgacctcactccttctaaaatgatatctcctttagcaacatgatctctaaggaagtgatgatggatatcaatgtgcttggtgcgagagtgttgtacaggattattagcaattttaacagcactctcattatcgcacaacaaaggtaccttttctagaactacgccatagtctagaagaagttgtttcatatacaaaatttgtgtgcaacacgcacctgcggcaat

SEQ ID NO: 77906 - DNA, 416 bp, Zea mays
  unsure (1)..(416): unsure at all n locations
tgccctcnttaaagtacacccatatatcttanactaatcatgcacttgtgtactcaatcctataccaatgaaataaaatgccctacatgtgtacctttactntgtaccttcaatttcatttctgtattagtggtgcaacacaagcatccaacctccatattcattgaataatgagcaatgatgatccatcaatgtagccaattatgctatatttgatcgttgctgatagcataaagctcctccatcattctccataaaggcacttgactatcaatacaaataaacacttggcttgatctcagttaaatgatatgatccacttcatgtcatcacatgatcttattggttcatggatcatagtttcgttttctcttcaccattgacttggttcattgactccaagctctctactcata

SEQ ID NO: 77907 - DNA, 271 bp, Zea mays
  unsure (1)..(271): unsure at all n locations
gctcttgtcacccgcaacctgactccaaagatacctgttcacatgtttcactcggaaaatattgtcaaatcatgtttttgaggaccttcggaagccgaatgcccncaacagtagcccctcgcaatattaatttactgtaatgataaattcatattgcgacatggacgaaggctttaagccgaatgtccgaataaacaccttccttctgctagaatagcaacactcattgacaaacggngcccttcagttttcgacatactgggtgtataaa

SEQ ID NO: 77908 - DNA, 272 bp, Zea mays
  unsure (1)..(272): unsure at all n locations
tatctatttaatattatctntataaactacatattaatgcactccttaaataatgaaataacttatgggaaaaatattggtgtgggttgcataattagatcattttttctcttctttgcatgaataaatgaataaattaattaatataaattatacctacatcatgttggagtttgttgtgcatctaacttaaaaatttgaaattcaaacctggatttgaattgaaatagaanacaggaaataaaatagaaaagataaaccctacctatacc

SEQ ID NO: 77909 - DNA, 458 bp, Zea mays
  unsure (1)..(458): unsure at all n locations
ctcggctgcatcactcttcgctggtggccaatagaatcctgacctgaagaccttcccgactagtgttctggatgctgcatgtattccacattgcccagcatcgacctnctncagaagtcgcttcccagtagatgggagaatgcacttcatgaggacgcctgatgcaccccttctgtacaatgtcttcccaatgagtgtgtaatgagccgactgtcttgcaatgcgctcggctgaattcttgtcatctgggtcctcttcattctttatatactngatgattggccttctccagtcatcagagtctgactcgggttgatctataataatacactcttctgcttgatccattgagatgctcggctgtagtatttcttgcacaaagactcgaggtgggacctgagttcgactggatcctagctctgacaacacatcggctgctgtgtccgatctctttctac

SEQ ID NO: 77910 - DNA, 278 bp, Zea mays
atctatgttatggatgggccttgaatctgtccagtttccttcagtccttctatcagcctcttgatttccatgcacagcgataggaccttggtcagatggtatcttcatgcacaaatatgctggatggagtattgcttcgaaggcattcagtgtccctcgaacaatgattgcattgcaaggatagtccatatcgataatgtcaaatacaacttgttctggtcttgtgttgtgaacataaccgaaggtgattggcattggtatctttccaagtgccacta

SEQ ID NO: 77911 - DNA, 239 bp, Zea mays
  unsure (1)..(239): unsure at all n locations
tgcacccacgataaatagaatacaattgagtagatcgatttttcaatatggttacggntcaagtctacgtgtctataatgcaggcacacacccctgntaattgatctatagcttaccactgctgagaaatgtatatatagtcaaagcctatcgagtgcacatgtgaaggttaatgggggcagggcgcaatatttttgtaagtacgaatggtagctaatacttcctccgcggggatttac

SEQ ID NO: 77912 - DNA, 430 bp, Zea mays
  unsure (1)..(430): unsure at all n locations
ctaagctcgaaacacangataccgaattggtatgatctanaggaagctctagattaccttgtctcactcctgcttagcttccttcattnntatctgattctcgaggagagtttctgggttctggtgatgcaaccgtgacgtgctgctgggctgtggcgcccgccacgcttggcaccaaaccggacgcgagcccgggcagtgcagtggtcctacaaatagtctcccagcatccgcacactgcatnccacgaaaacaagcacagagagagagagaaccccagcgggcaaacgccttcctcccctttgctctgccccagatcggggcatcggtagctcagaacttctccatgcggtcanggctacgtcggtagtatgcccaccgcccgcccattcctactactcggttttaaaactcccgcacaatattacac

SEQ ID NO: 77913 - DNA, 431 bp, Zea mays
  unsure (1)..(431): unsure at all n locations
gcacccaaatgtcctttgtcctatcatatggtaaactcattacctttctagcataagtngcaattntgggtctnctaagcatacattattcaattgacaagctaggctcgggataggtacctatggggcaatctttgcatagatgtcccttttttcgacatatgtagcaaaggcgataattgcaagacttaatcttgctccttgtctgctacatggttagtagatctatttttttctagaatcaagctattttcttttatttggggacnaagattanatgtgtggtccctctcaatgcatttaaaacatttntatcattnntctcaagatcaagccattttctatcatgaagggaaatgacctattcaaatgcctctttttagagaatcataacacttcctaactattatcttagaatctttacttggaag

SEQ ID NO: 77914 - DNA, 431 bp, Zea mays
  unsure (1)..(431): unsure at all n locations
atcgtagttntattccgctgcattccgaacaatgatcactanctttactaaaactccgatgatgttgtaataaatntaatactccttcatgtatgggtttatgttntattgtatttgctctatgcctcaccatcgagtgagtacgtggtacttgatcctgttagtggcctcgtcggactagatccgaaggactgacgtcttattcccatttaagtgtggtctatcctttaaagtgggacttatgcacttaagttggaataattcngggcggttccgccactagtcacattttcacattnttctattttctgagcataaagcattttaaccttaaacatgctctttatttcttaataangaagtcctcttgactatccaagagttcatccttctcatgaatagcacctatcaattcattttaattttctttt

SEQ ID NO: 77915 - DNA, 184 bp, Zea mays
  unsure (1)..(184): unsure at all n locations
agctatgcgatcattctgttgttaattaaagctaggtgatcatgaatagcatcaacattaatatctctacatctagttccaatagaaacatgatcaacactagaagtagagggtttgaaacatctagttgatcaatcttagcatgtaacatgngcatttcatctctaagattgaaatggtatca

SEQ ID NO: 77916 - DNA, 245 bp, Zea mays
  unsure (1)..(245): unsure at all n locations
ctcagctatcgcttctttatgaaaaatgacgttggctccttctcgatgactagctttctttgattatagaactgattcttttgagacagcagatgaataacttgtgcatcacactgacgcttccagaagtagctgccgagtaatcttgtagtcggtatcggcgttttagaagcaacgccgagcgatggaaggtcgacgtcagcattntagaagtaatacagagcaatcgaacacgagatcaacat

SEQ ID NO: 77917 - DNA, 523 bp, Zea mays
  unsure (1)..(523): unsure at all n locations
tctatagcttccgaaagtgttcaaaaaactcgaagtgttagtgagttcaccggatgtgggcgccaatgttgtggacttgttctcaaatgctaagagttaagaacaggcaacatataaagtgttaaatgttaaagtccttcgtccttcgaagcattatgtcccttcnggaaataatgagtttcggacgaaggtcataagagacataccttcgtaaacataacaagtaatgacgaaggattcatataaagcatgaaatataatataagcatcatcatagaatcatttctattttattaacatggggaaaatagaaatgatttcaaattacaaatgtaccttcggtcctgagagaaagataaaagtacaagtgtgacgcanaagcaaatgccaagtcagcgtgaacagtacgggagtactggtcatctatttatagacgcgggacgcagnccacgtaaaaatacatttatgtccattacattngtcaatgacttatggaaatctgacaggcccacgtagtctttca

SEQ ID NO: 77918 - DNA, 114 bp, Zea mays
  unsure (1)..(114): unsure at all n locations
cacagctaacacatgatggcacagntatctgctaagatgatgggaaggaaacagtggaaaggtattaatgtccgttgtatctcttgtgcacacacaaattaatctaagtgggtg

SEQ ID NO: 77919 - DNA, 449 bp, Zea mays
  unsure (1)..(449): unsure at all n locations
tcgagaatggcatggcattacactgcanaacccagcattaccaataaaggcacatagcatgcacaaccaggtaacctaaagtgcgggttccttcctcccagatatgtacaaaaggataaggccaggcgtacccaataagcaaatactgtggngcaaccccgcttatcgatcatgagttangaataatgacgaggcattcacaaactgcattntcttagcaccttcaaatgccgcaatttaaacgtttgctgtgaaaacgaggaattaaacgagcatcaatgtatccctgcagaccgagaatcgattaatgacgaatccaggaagatgcgatttcccatagccgccaacgggcactgcacatgcacggactcaccggaaccgcatcaagcagaatccgacccagattgaacagaacatggcgctggcgcccagaacgggagcatgcacat

SEQ ID NO: 77920 - DNA, 278 bp, Zea mays
gccgagtatgccaccggagcaccaacatttgaaactttactcctgaggatcatttcaagtcggcttaccaagtcaacagaaggaattctcctattggtaacccgagttgagtcggccagccctcgatacagatatgctggataggccctgtctttcagtggctgaatgttcttgaaaacaaaattattgaccacagcttcggcagtcagacctctctctttcagtaatccgacttcaggtagcaacacgccttgctcgggcactttctgatctgtggg

SEQ ID NO: 77921 - DNA, 331 bp, Zea mays
  unsure (1)..(331): unsure at all n locations
ccttgatctcacttctcatctcatacaaactcaggtgtgagtgtgtctgctacgcggagcatccttgcctctgcctgccatgcggcggaagggaaatgacataaaaatagagaaggatcaggcgatgaaaaaagcaggctacggctattaaagtgttgaggggaccgccacttctaccccgtcgttgacagtncaagaattcatagcaattcaggcgctgaaatgggtaagcactgtcgcgttcgcgtacacgacacggttgacccagcaactgctatgcaatgattcacccctctggcattcagctctacttcggacacgagataacact

SEQ ID NO: 77922 - DNA, 231 bp, Zea mays
  unsure (1)..(231): unsure at all n locations
tcatgcatctagaccgacctcttcttttgcaaatcaactaagtaaagtttgccgtctagtacacccttaatagctagtgaaccatcacatcttctaaagacagacacatctacattngtaaataaacaattatatcccatattacataatngactgacagatagtaaattatatccaagagactcaactaataacacattagagatagagtgctcattagatattgcaatc

SEQ ID NO: 77923 - DNA, 401 bp, Zea mays
  unsure (1)..(401): unsure at all n locations
gctgggattggtatgattggacctttcaagaaagctcaaagaggatacacccatgtattggtggcgattgacaaattcactaaatggatagagttccagcccattgcctctntaacctctgctaaagccatggaattcatacaaagcataatattcagatttgggataccaaacagtatcatcactgacttgggatccaacttcaccagttcagaattctttgacttctgcgagcaaataagcattcagatcaagtatgcatctgtagcccatccgagagccaacgggcaggtngagcgagccaacggaatgatattggaggcacttagaacaagggtctttgataaaaatgataaattcgcaggataatggataagagaatcgccttatgttggttggag

SEQ ID NO: 77924 - DNA, 293 bp, Zea mays
ctcttataccttcaatgcataatgcatcctcagtctgcgccaaagatttcacatgttcgcagcctcttctctccaaaatagcggctatccccctagcacccgagaaggcgcatatgtccccgcggccactcaaagtttcttcacaagcttcggcctcgccgctgatccagtcaattggaccttcgagatctcccagtacgaatgtgccttcattcgaatatgcgccgacgctagtgaaacaagtcttaattgtttccacacatttcatggattcttcataacatctttctttt

SEQ ID NO: 77925 - DNA, 449 bp, Zea mays
  unsure (1)..(449): unsure at all n locations
agtaatggatggtatcaaaatatctatgcggatatcttctgtagaagcaggcattagtttggaagcaaccttaacacattgccagtactgacaatgtttttaacaatagccatgaagaactagaataaatgctacaactcaagacaacaggggatagtacaacacccataatgttcccatcaattcatcttatccatcacgatccaacaaactggaaatgtnacttcggtgacacatgcacatagttatggtaagctgttccttttcacctcttcatactctatgaaatagcgtgaaatctatgaatcattannatattcatatagtattagctattactatgaacattgcgtgannatcattattttagctactgatatatatgtagttcgaanacatgattgcgtagagcataactacctggagtggttacttaaacaatctacaaa

SEQ ID NO: 77926 - DNA, 128 bp, Zea mays
  unsure (1)..(128): unsure at all n locations
aacaattggatatattctccangcacctattgttatgttagctcctttttggatcatttatgtcaatatcttttataggtagaaaacaagtgataacacaattaaatcggtaatttgtgtgagcattt

SEQ ID NO: 77927 - DNA, 453 bp, Zea mays
  unsure (1)..(453): unsure at all n locations
gcggtcccgcactggcgtacaaatattgatccanatgtacatgtattgtgcactcttaaaatttaattaatttctaggacaattaatatacgaataatgaataaaccacacgcaacatataatagcatgtacatctagtagattaaatctaatcttgaatcaaatcattattactcacgacacatattaatacacgaatagagaactaaattaaactttgtaacaatctgtagatatgatggattcaattcttaacttggtacaaagttggaaacatgagtgggtctttgagattgttcttggaaatattataaagaaaatgtancataaaatctgacaattcgtagatctcatggattcaattcttaacttcacacaaagttggaaacatgagtgggcctttgagaattgtctaacatatattattaacaaaatgtacaacanaatctaaca

SEQ ID NO: 77928 - DNA, 399 bp, Zea mays
  unsure (1)..(399): unsure at all n locations
ctatgttcatcaacctcctggctttgaagatagtgagtaccctaatcatgtttataaactctctatggcactctatgggctcaagcaagccccaagagcatggtatgaatacctaagagattntcttatcactaatggcttcaaagtcggaaaagccgatcctacactctntactaaaaccattgcaatgaatatgttgatgccaaatttatgttgatgatatcatatttgagtctactaacaaatctacatttgaagagttagtaggattatgattcanaaattcgagatatctatgatgggggaagtgaagacttnctatgatttaagtgaacaactccagatggaccttcatcaccaaccaagtcactcagatatattactatgacagaacctcca

SEQ ID NO: 77929 - DNA, 367 bp, Zea mays
  unsure (1)..(367): unsure at all n locations
ctttatctcacttagttcttaacggcgagtctcagcatctttcatgctatgcacatgtttattagggctctaattggagctaaaacacttaggcatgcaaaactgtgacacatgtntgtcaaactgaattttgagaaccacagtcggaactgactactccacaatcgataaacagttctttgttacaagcagtaaggaatagcatgctgagctgggagtactaatcaaatcaagcccatttttcaattctgagtctgagtctacacatgcaatgaatcttaatgagaatgcnatgctgggaaatgatttgaatggctgcagatagatctgtatgcacgactttaataggagagcagtagtttcagac

SEQ ID NO: 77930 - DNA, 310 bp, Zea mays
atgaagattcttcatcccaacatgtgcaagtcggcgatgccagagccagcccatgttattcttagcaatttagcaagtgtcaagttcagctctatcaaaattcactaagtacagctgaccctctaacactcccttaaatgctattgaatcatcacttcttctaaagacagggacacctacatcagtgaatagacagttgtagcccatcttgcataattgagaaacggaaagcaaattgtaatctaatgaatctacaagaaaaacattggaaatagagtgggcaggtgatatatgcaatttaccccatcct

SEQ ID NO: 77931 - DNA, 217 bp, Zea mays
  unsure (1)..(217): unsure at all n locations
atatatatgatgtttgaaatattgcatatgcattntgttattcgactatatctattggaaaataacaatatttatgatactaattngagtctaaaatcattaaaccctgtgatagatgtggttcgactacttgtatatatgatgtccaatgcattgcatatatgccatagtgtcgntgatatacctgtgaatatcaaccatcgtgctgctactttta

SEQ ID NO: 77932 - DNA, 281 bp, Zea mays
  unsure (1)..(281): unsure at all n locations
ggcggtcgatggcgatgaaccanaacggcgccgtggcgcccatgatggcttcttccgaagacgacacccattgctcggcccacgctacgagaccggtacctgcggtgagcacgagcaatcccggcaccgcattgcgcaaccagttctttcggatggtgatgcgctcgccgccacccgcttgccatgcgagcaagaccagcccggtcagcatgaagcgcagcgcggaaagcatgaagggcggaaaaccgcgcagtccatatgaaatagcgagaaacgtggag

SEQ ID NO: 77933 - DNA, 239 bp, Zea mays
  unsure (1)..(239): unsure at all n locations
tcactttgtacccctgagataccagaaaccctaattggaaccctggataaccctgaaaccaaaccctangggcttattngcaaaattagtccacttttggactaaagtgcaaaaaccaagtcaaataagtgtcttaagtcctttggttcacaaatatgtggacttgaaagccaaaccctaagttttggacttaaatgcaaaatggacctcatttgagttctacactaagtctgaaattc

SEQ ID NO: 77934 - DNA, 370 bp, Zea mays
  unsure (1)..(370): unsure at all n locations
taagtagcataggctaataatattcgaattgactcaagcctagctactggtgcataggtttcaccgaaatccaaaccttcgacttgggaatatcccttggccacaagtcgagctttgtccttgtcaccacaccatgctcatcttgcatgttgcggaagacccatttggttcctacaacattntggttaggacgtggaactaaatgccatacctcattcctcgtgaagttgttgagctcctcttgcattgccaccacccaatccgaatcttgtagtgcttcctctaccctgtgtggctcaatagaggaaacaanagagtantgctcacaaaaatgtgcaacccgagatctagtggtacccccttatgtata

SEQ ID NO: 77935 - DNA, 184 bp, Zea mays
caaagcattcttccgaagatcgatattgtgtccccttcttgtgccatatgcagcatgatgtatgatgcttatgctatgtgaaatgatgtgatgatgttatgctatgtaaaatgggatttattccgaagatacacgcacattcccgcaataaaacacataatctatttaaatcagcggtgacttt

SEQ ID NO: 77936 - DNA, 149 bp, Zea mays
ccgaaaccttgtctgcagtacataatgtgttccaagtgtctcaattgaagaaatgtctttgggttcccgatcgaaccattgaagtacggatgttgccttataaccagacctgacatattcagaacaccctattcgagtcttggatcaaa

SEQ ID NO: 77937 - DNA, 163 bp, Zea mays
agtcaaacggactcgttgaaagagccaatggcattctaatgacaggaataattgaagtaatcttcaatcaacccaggggaaagttgccagatcaattaatcaaagtggtatggagccacaacacaacaatatcaaggtcaacaggctttactccattcaaact

SEQ ID NO: 77938 - DNA, 388 bp, Zea mays
  unsure (1)..(388): unsure at all n locations
taatattcgaattgactcaagcctagctactggtgcataggtttcaccgaaatccaaaccttcgacttgtgaatatcccttggccacaagtcgggctttgtccttgtcaccacaccatgctcgtcttgcttggtgcggaacacccatttggttcctacaacattntgattatgacgtggaactaaatgccatacctcattcctagtgaagttgttgagctcctcttgcatcgccaccacccaatccgaatcttgaagtgcttnctctatcctatgtggctcaatagaggaaacanaagagtaatgctcacaaaaatggtgcacacgagatctagtgggtacccncttatgaatgtcgccgaggatggtgtcgacggggtgaatctcgt

SEQ ID NO: 77939 - DNA, 87 bp, Zea mays
tcttcactctcgaatatgcaggaatgcgctaacttatgtcgatgacatcatagtgaatagcacgaaacaagaaaataacattggcga

SEQ ID NO: 77940 - DNA, 463 bp, Zea mays
  unsure (1)..(463): unsure at all n locations
cacttgtccagccggtgggccacttggtgcggtatccaatcatatgggccttcgtatcctttcggtatgcaaaattgtagcatccgaagttcttgtggagaccatctgctctcgccttggtcttgtaatggagttcatggaccctgcaaaatccttcatcattagcacttcttccctggcttcgaagagcccatatgtacacgctaagcctgactatagcgtttggagtcagttgatgaagatagaatttaaatttcttcgaaaacttcaccgatcattcatatagagggaacccgagccctgctctaaagtgctcttataaacacaacttcatcatcccttggctctataaccacttcgtcgctagcgaaccttaactactcatcatcattttccaanatatccaagcttcttcattaaaactaaatcttctgtctacatagtggattttcaaattcaatat

SEQ ID NO: 77941 - DNA, 460 bp, Zea mays
tcgcttaattggaaccccccccctcttaattcattcaatcatatagactgtaacattctacagagtccaaactggttaaaattcacatatatgcaaccaactgtatcgacgtttcttagaaaaattgtacatactaccttgcattgagttctttttcaatcattcacatatatgcaaccagatgtatcgacgtttcttaaaaaaatgtgcatactttcttgcatcgagttctttttcaatgttacataccatgtttattgattggcaaagatactactacttctctcagacttttttctcaatgtcacattatgcaggttagctaacattgattaaccgctaacactatgtctacttaaactatgtacaataggtaaagatattatatgtatacattactcaatcaggatgctctaaaatacagtatgcttctaattacttataacagggatgaatatat

SEQ ID NO: 77942 - DNA, 278 bp, Zea mays
  unsure (1)..(278): unsure at all n locations
tttaggacatctacttaattcatgaatatcatcgtcacacacatcgtctcgatntanattatccacacatgtctatcacatgaatggagcatttcaacaatatcctaaaacaactaacttcatcacacatctttcattatgaacctacttgacttatttgaagtgtctattcgaaatcgtgagtacaatcatacgctatatgcgaaacataatttaatgaacgcataatacgcatcgccatgacttgacctataaatatatgaaagcgatgactactc

SEQ ID NO: 77943 - DNA, 188 bp, Zea mays
  unsure (1)..(188): unsure at all n locations
actttgcttggatcaactgcaatccccttggtagacaatacgtgtcccagaaattgaatttcctccagccaatatggcgcattactgaatntagcatataatagatgctaccttaagcgcgtaatacgatcccgtaatgctgagcatgctcctcttcattctcggaatatatcaagatatcatcaatg

SEQ ID NO: 77944 - DNA, 321 bp, Zea mays
  unsure (1)..(321): unsure at all n locations
attctcagcttaacattatgagggtcgtctactttatcatcgcacgcaagaacatatatgctatatgaacaagtagaacattaagaatggcattcacaccaacagtgtgattcggtatggctttgctgtcacatggtgatccccatctncaataatctgtccatcatgatgatctccatctncatgatatangtatgccatccttcaggtgatgagtccttcaagacctatctaacgtatgctggtaaacaaattacatatacgctntggatcatcacatgttgacacgcangtcattacattaatattggacaatacatg

SEQ ID NO: 77945 - DNA, 330 bp, Zea mays
  unsure (1)..(330): unsure at all n locations
atcagatgatgttgcaccactaaattggtcagaacactctggagcagagtcgtctttattatcgctttttgagcaagaagacgcaacagaatctncactcgcccactcttcttcaggtgacatcttgcttctttgtgcagtctgttggtggtcaggtttcatgatgttatcagccttagcagcactatcctttcttaattggctttctcttcacaggaattatacatctcggccgaacgcctcagactgagtaaaaatatctgatatcttcacgtgtatattcctctcttgatgggtgactggaatatgctgcagtatacctctttcagt

SEQ ID NO: 77946 - DNA, 431 bp, Zea mays
  unsure (1)..(431): unsure at all n locations
tcanatgagcactgcttatcacccctagagtgacagacatatagaacgtgtcaacctatgtctngagacatttcttcgcagattcacacattcctgcccaacaaaatggtcctcctggcttgccctcgccgagtttgtgataatacctgtcctcactcatcgntgggtatgtccccatttcaggtcatgtacgaccgcgctcctcgctagtttgggttagtccctgcggatgttgtcacaattctgatctggttgaatgggtagctgaccgggaactcatgattcgggtgattatgcagaacctgctactggcacagcatatgatgaaacaccangccgataaggcaaatctgaccgtgagttctctatgggggcctttggtatgttaagtgcagcctatgttcaagatagtggttgtcgtgctgcataac

SEQ ID NO: 77947 - DNA, 255 bp, Zea mays
  unsure (1)..(255): unsure at all n locations
ctttacaacatgactcaggttattatattctggcccatgtnggctaaacttgtgatctccttacttaaaggagctgtacgtcaagcaattatctagctactaatctacaagtatacaacttaagcataataacatggaagggtacccacgccaacatctaatctgggtctggttctccatttcacaacagcaaccctagcctctattagattggcgggactcgcaccgcgaatttcttcacaagtataagtttat

SEQ ID NO: 77948 - DNA, 440 bp, Zea mays
  unsure (1)..(440): unsure at all n locations
gagtgcggaggcgatcccacatgaacgtccatggaagtacaagatggagaccncactcggacaccctcggtggctgggtcacggtttgcgctgcccacttgagccggatcatctccggcagtaccctcgggggctgggcagtggcttgcgcttcccacccgagccgagtcatccncagcaacatcctcgggggctgggcaagtgtcaacaccgtccctgaggaccaagttctctgcagtagccgcttctaaagctgatggaccctcagttacttccatgggaccaagatgatccaagtcagtctcctgaccctcaagaaacgcgtctagggtcgatgatgcacgggatgacctcaacccaacatcgagcacatcagcacannacctcatcacaccatcatctgctggctctgataacagatcctctggaaccatatcctc

SEQ ID NO: 77949 - DNA, 485 bp, Zea mays
  unsure (1)..(485): unsure at all n locations
atatggctggactgataagtaaaataaatcgcttctccattggccctntgcctaccttctattcttcatctatgtaaggtttaaacagtacatttggcaatgaaattggtcatatgtaaaagttttcaaaccatctttcttgtttgtttggaaatattatccagggcatggctagctaatgtaccattntactgttgaatacaggaaaacacttatcaaaagcatgttgaggaagagttctgaacatcggcctactgtaagctactaagcanagagatatacctcccctgcaactngcatactttgttgtcacgcacattattagattcttagagatctgtacatcttgttacagcatcgagattataaaatcatacctcaacctatgaaatcaatccgccatttgctattatacatctggtcatcgcagaaacctgcaccatcacgagcatcaaaatatgctggagcatgtgtacattctgact

SEQ ID NO: 77950 - DNA, 476 bp, Zea mays
  unsure (1)..(476): unsure at all n locations
tagtgcaatagcaatggatgctgtggtatcttcacacctacccgtctgtttatatagtgccgcaagtgggaaggtgaatcgtcaagtcttccgcaccggacgaacagtcgcccgcacccactgaatggtgggccacagaacccaagaaggtgaatcgctatgacgcacgtacccgttgtatggtgggaccatttcacgttccaaatattgtgatcgtttctcggcaacgagctcatggaaggtgttttctgaccttcggcattccgaagcctttgagatntttcacggatcnaagctcgtacgaataacgatctggcaccgcgaaggggctactggtgtgggtatgcttcatcgccgaaggtcccataagaagaaacaccttcngaagattgcacatagccgaactatcaatcagaaggcttcgagtacatttccaagcactgactcaagatgaaatgacaatcacccatgataat

SEQ ID NO: 77951 - DNA, 209 bp, Zea mays
  unsure (1)..(209): unsure at all n locations
ctagaccggcttcttcttttgcaaaatcaactaaataaagttagtcgtctaatacacccttaaaagctagtgaaccataactgtttctaaagacagacacatctacattnggtaatagacaggtatatcccatattgcataattgactaacagataggaaattatatgctagagactctacttataacacattagagatagaatgctca

SEQ ID NO: 77952 - DNA, 301 bp, Zea mays
  unsure (1)..(301): unsure at all n locations
ctcagcctgccacatagctcatttatatacctttgatcatatctctttatatgctatgactaatgtgttntcaagtntatttcaaaccaagtcataggtatattgaaaggggaatggagtcttccgcgaagaccaaagcttccactccgtaactcatgcttcgccatcactccgagcaacttcctcttcttcatgggagaaatgagcatcaaggaaaaggacttcatccctggnggagagagtaaaagctcaaacgcaaaaagacntccgctttggtataatcttaactcactctattatg

SEQ ID NO: 77953 - DNA, 210 bp, Zea mays
atcagattacccccgaagctataattaggatgaggatgtttgtttgggctgtaagaagccacgggctggagccgagcccgaagtgcttctgcaatatgcacgagttattatacgagacgaaagctacccgtcaagaacagtaccacaacaacttcgggtggtacgaattcattgctcgctctaatgcaagctatcccgtgcccacatacc

SEQ ID NO: 77954 - DNA, 325 bp, Zea mays
ttttgcccttaactactgggccatgggcattggaatctcttttctgctctgatgcacgtggctggcggagatacaccgtgattctgacctgtatacataagtacaaatccgaacttctgggcattggatattagatacacaatatgactgaggggtagaataggactaaaaactaacactgggatcacttctgtccagtgccatggtacaattgaccgtgactgttgggtctcctggcaacaacaccactccctgtgttccgtgtactttagtatcctggccgctggagcccattcttgcttactgactggatctttttaaagca

SEQ ID NO: 77955 - DNA, 337 bp, Zea mays
  unsure (1)..(337): unsure at all n locations
gacctcagcagataccggcagcaacatatcgtcggtagctagttntattctaatttaaggtaaagttcttaccttaactntntactgttntaaagatgaatattatttctgatgaaggtatttttcanagtctactattaagtaaaaccttgaggatgcaacaagatctcgaggtcaagaaaaatgagattataattgagggcttatagggcaagttaaagaacacgaagctgctctggagaagaaagatttcgtgattcaaacaatggagggttcgctggcagaagcccaagacgagattgctagattaaacaatgaactcttcacgaaatcaaaa

SEQ ID NO: 77956 - DNA, 405 bp, Zea mays
  unsure (1)..(405): unsure at all n locations
gcttaccgcatntgaagcacgaacgcttccccttggctttggtcttgctnggctgtcccttgcgacctttaagcgccgtcttgaatcttttgatgatgagggccatctcttcatcattaagtctggctgcctcaatntgtgccaccctgctaggtagcatctccttgcttctttgtgccttgagagcaaggngttgaggctcgttgattggtccattcaaggcgtcgtccacgtatcttgcctccttgatcatcatccgcccgcttacgaattttccgagtacctnctcgggcgtcatcttcgtgtacctgggattctcacgaatattgttcacgagatgaagatcangaaacggtaatgaccttatcattatgcggacgacgtcgtgatccgtccatcgcgtgc

SEQ ID NO: 77957 - DNA, 271 bp, Zea mays
ctgcagtgagtcaggctagtgccgaagctgggccttcacagcctgctgtaaacaaccctcggaaattaaagagaatgcagcagacgaagaggctatagaacagactttgcctgagaaagctgtcgctgttgctcccgaagctctaaaagaaaatatcgagtatatcatctgtcatgcttcgggaaagagactctctaaagaagaagaacaagaagctcaacactatccccagaagctgaaatatccgaacggtgcattatatgtcaacggc

SEQ ID NO: 77958 - DNA, 177 bp, Zea mays
ttaaaacgttccttactgacatgggataccaacttgaagcgctacatcaatgcttccatgatactaaagagtgctgaggaaattgtatgggtttgagaaatcacaaactaggatgacccagatgtagtaaaaaaaccacgcgataaattaaagtctagggtactattttctccccag

SEQ ID NO: 77959 - DNA, 213 bp, Zea mays
  unsure (1)..(213): unsure at all n locations
ttcgccgttgtctgataactctttgacgagcttgngctctcttcatattatgaantattctctgaactttttcttcgatttctttcaccatatcacgcctgaagaagtacctttcaccaagttcagaccaatttatccgagtacgacatcgttggtcatataaagcttcaaagggtgccatcttgatgctctcctgatagctattattatatg

SEQ ID NO: 77960 - DNA, 357 bp, Zea mays
  unsure (1)..(357): unsure at all n locations
gttctcacggaactgatttggcccatacacgttgttgccccgagtgggtatcacaggaagaccataagatcttccatatgccatcacaagcatttcaaccccagcttttgtagctgaatacggatttgttggaagcagctgtgaggcctcatgattaccaaccacagcatcttcatcagtttcttcatagacctcatcagtactgacatgaataatacctctgatctggccagttgaccttgcaagccctcaagaatgacgtgggtaccatatatatttatttttgtgaactcaaatgaatggccaaatngaatatctacatgagtctgagcaacaaagtgcatgatggtgtcaatc

SEQ ID NO: 77961 - DNA, 246 bp, Zea mays
tctaacacgattatggaacatggtgaattggtccctaacgtggcacaaccgatgaagccggcagccaccaaagtgacagccgctcgaacacgtcgtcgtcaagtctgcatggtagcgcagagccccaattcaacccctcggatcttttcaccctaccaccgatcttttttatcactgtgtagacgtgcttcttatgcctgcacgaattaccgcgccgagcgtggatcacggctcatgacacaccgg

SEQ ID NO: 77962 - DNA, 317 bp, Zea mays
  unsure (1)..(317): unsure at all n locations
aataatatattacatgaagtacgaatactacacatttacgttcaaggttctatatacatcaatcttttaacactatttgcacttattaatattggtgacacctgtcataggctcggcatattctattctcggcccttaggtgggcccgaatcctcacangtctgaggaaaaagaacngtatatctatacaactgcacagagcttgattaatatatactgataaaccctattatcctattgcttcactcttattttcgcacttcctattctacatgtgatgctttactcttgatattctgcccatctgacgcgttcca

SEQ ID NO: 77963 - DNA, 430 bp, Zea mays
  unsure (1)..(430): unsure at all n locations
aaatctatcgccgattgtgaaatcttaaccaccagaccctcatatatagtgtatctgatacactcnctncatgatatcaacatgtntcatcgtcagttcttgatcaattggtcaccanattcttcaacaaccncattggacttgattaaccatcatttgacttggtcgagatggcccagcctttcggaatctcttgtccctcagtctatgcctggacattncgccttgatcattcctagtcccatcatcgtgattggctccaagctccacacttgcgcatcaaaagccanaggatatgttgaacaattctacactcacactaanggtactctacatacttcaaccatacgcaatcatctnctttacgatcactcatcatacttgaacatganagatacatnctanacatatgttcacaagtgaatattat

SEQ ID NO: 77964 - DNA, 164 bp, Zea mays
gacgccactgaagacgtggttggcacccacaggcacggtccggtaatctcctcctttctagctttacgacatggagtcataattgtttgctgttgtgcaattactgcactgtgtgatacaattttaccgtttaaaaactgaaaaaagtaatccatctataatgc

SEQ ID NO: 77965 - DNA, 417 bp, Zea mays
  unsure (1)..(417): unsure at all n locations
gccgagtaagccactggagcaccaacgtttganactttactcctgatgatcagntcgagtcggcttaccanatcaacagaaggaagctnctataggaactncggttgagtcggccagccctcggntaagatatgccggataggccctgtctttcagcggctgaatgtntttgaatacgaaatctgtgaccacagcttctgcagtcagacctctctctntcatgtaatccgattcagtaagcaacacacccgcctcggccacttcttgatccgtgggagactcagtccaactcagagtacgaacatctggctgtcttcctgacggggggggagagaattccataatatcaattataaccactccagaaccaaccttaatgctgtcctgaggggatctcgagatactcgcttccgccac

SEQ ID NO: 77966 - DNA, 255 bp, Zea mays
accagctggcggaggtcgctgacctggaacgggtacattctttctttgctgaggatgtctggcagaaaggaccactgacacatttgctgctacaagattcgctgatgagattgccctataaattggtgtctactatcaaatgttggtcgatgtcgctactgggactgagggtgaacacggccagtgaccacgtactactatgaacatgcaggcaatttcaaattctgggaagctaacatctctatgagaaccttg

SEQ ID NO: 77967 - DNA, 112 bp, Zea mays
  unsure (1)..(112): unsure at all n locations
acaccacaacttcattntcttcanggtgtggacaagttnnttcccccttcgtcgccctcacaacggacagatgccggagataccttcctctcatattaacaagatgattctc

SEQ ID NO: 77968 - DNA, 490 bp, Zea mays
  unsure (1)..(490): unsure at all n locations
tatctatcgaaggatccatatggtgatntggtgtaatctcttgtacttggaggaatgatctantgtcaattangcttgtgtatatatcatatatngncatttcattgntgntataataaaagagagatgtacaaactcctgtcatgagatatatgatactctncaaaccttcngtgagtcatgtgagttgtgcggactcatagatntgagtcgccatactatttgntgtanagnntgttctatattngatgtgaataaatggttgatagatcaagtgcatacnattctattaaatgcttattatcatgcatatgatgcactaacgaaaagaatatgtctgtgacagtgtacacnactctatctatggagacaatatcaactctaaaagaatgganagtntgacatcggggcgtatgcatatagtgctctgatgacactattcctccatggtctgaatgtatcaggatgcattgatctattcactgacctc

SEQ ID NO: 77969 - DNA, 440 bp, Zea mays
  unsure (1)..(440): unsure at all n locations
tgagtagcagtccaacatgctcatgagctccgaagtggctgccgcatctacgatggagtctattcttggcaaggggatattcatccttcggcattgcctatngagatatgtganatcagtacacattctccactgtcaattggccttctttaccataacgagtgtagctagccattctgggtatgttacttctctgaccactccagcactgagaagccgtttaacttcatttcttgccccttcngctntatcatctgacatcttctaaagcttcttgcttctcggnnctgatagtgcgtctacattgagagagtgttcgataacatctctggtgacaccacacatggcatttggtaaccaagcanaaaatatcattgtattgaacaagaatntaatagagctnnttcttgtcatcaaataggtgggaccccacaacacct

SEQ ID NO: 77970 - DNA, 225 bp, Zea mays
ccttgtttatggtcgccgcttcaaagatacgccaaatgtcaggaggtgggccatagaaagcctgctatcagagatactgctcctaccaaaaacgagaaaaacagcctagaagatcaccaatctcttcaagtaaccatcaaaaaacgtattcttttatcttgtctaaacagattcttctcatgtactctttgtgagacgttgaccaacgacctgtctttctcactt

SEQ ID NO: 77971 - DNA, 254 bp, Zea mays
catgctctgacggcttctttgcaacactaataagttgcgctatcaccttaagctggaacatatttttaagacgaccattacttgaataacgcatccatgtgctatgctcaatagaataatcaaacttcaaaccatagagatgtataaatgatttctacttactgctgatccaacgaatatgaattggatctatttgacgagagacattttttcccgctatggtggctcgtgcatatcactgacccgagctaact

SEQ ID NO: 77972 - DNA, 328 bp, Zea mays
  unsure (1)..(328): unsure at all n locations
tctgcgcatcgatccgtccttcgtccgagcatgcgctgcgcccttncacaggatcatctctgngaagcgtgtctagccccctcggcgactcgatctcncagtctgcttctggacacccttcaacttccgaatggagaccctgacgttcgaagtggtcnggttccgaggaacctaccacgccgtgttatggaggccatgctacgcgaagttcatggtcgtccccaactacacctacctgaagctcaagatgtcgggccccaacggtgtcatcaccgtcggncccacgtacatacacgcgttcgaatgcgacgtggagtgcgtggagtac

SEQ ID NO: 77973 - DNA, 342 bp, Zea mays
ggccataaccactggggtgacatctgcgccatgcccgaacccttttattgacgtgccgtgggtgcggcgcgccacagaactggctggcacagaactgcggggagagactttctcccgaagctccgagctcggtgggtaagattgccatatttgtcaggacagcaaactatgctagcctactgccgcaatggaaagatattcgcggggggtgaccgctaatctaatgagaggtagagttgtgacatggaaaccagaaacctgttaagggtcgcgcgacgatacctctcacgggagatgtggcctgtactgcagctagggacacatcgggggacgccatctcct

SEQ ID NO: 77974 - DNA, 149 bp, Zea mays
ataccttgctctcatgttgacaagatgattctctttgatagtcgatctaccatataactgatggctcggtcgccagtgacgatcttccgagtcttcaccaccactgtccacatcatatctggcacttgcaccagtatcttcagacaaac

SEQ ID NO: 77975 - DNA, 408 bp, Zea mays
  unsure (1)..(408): unsure at all n locations
gcaaatcactaaataagttgcatctaatcaccttaaaactagtgaccatacttcttctaagacaacacagtctacattgagatagacagtatagtccatattgcatattgactcacagatagcagatatatccacatactcaactagaacacctatatatggagtgctcatagaatatgcaattttcctagacctttaccttgcctgactccatcacgatataatgaatcttngaatcttattcttgacgaggaggtaacatnatctctacccgtatatgtttgtgcatcgtgcgatatcatctgaaccccgatgataacctgaggcaattatgttggactatgacccactctgttggtctacatgtagcacaattctatgaccaatgcagttatacttgatatgcct

SEQ ID NO: 77976 - DNA, 406 bp, Zea mays
  unsure (1)..(406): unsure at all n locations
atgtattcgcttccgatttcttatctccangntctgtaatgtcactagnatgtgtgagacgtcctggaagggaaggaaagataccgagcttgtcaacgacctcacgcgcacctacngngttgtctgatgtctgtgagacaaggacaactgtangtgggcctaattacttgtgagggtccgtcacagctggtatcgaagcgtatcccttcttgtcagatattatgaagcatcttcnaaaggatatttaagagtcttacctaanaattcttttctcctcttacctaagtattctgaagaagtctattttatagaccagatatgaagagtggcacatatagaaggtggaatcgactaaaggtgattctgttattatacantgcatcatgctagaatcatactaataaca

SEQ ID NO: 77977 - DNA, 98 bp, Zea mays
aagctcactggcagatggattgcatcatagtggtaggcatgcgccattgaattcactgggaattggtcgtcagtgtttgttgcggcaccctgtacgtc

SEQ ID NO: 77978 - DNA, 299 bp, Zea mays
  unsure (1)..(299): unsure at all n locations
ctaaatctgatgcccattagaactcctataccaggtctaatctggatccttatctgacctcatccaattcggatccttatagattcacgtacatatagacatgggctgagtactactcaacccaatagttgacagcgtgctctagcaagacgtgtcaactcccatgcacacgtaagtatcatatcagacgggtcatcacaacatttatgtacatgtattcactctgtctcatgatattnaggctagctctaagacaacctctctttctcgatgtggtgactcgaaaatcctttatgggt

SEQ ID NO: 77979 - DNA, 365 bp, Zea mays
actcgctcgtgcaaagagacactttgaaatatgaagctcccctatacgtgaaaaatatttgagactttccggtatgggtgtggataacggataagccggccatattactatcgtgtttatcaaagtccgtgtgccactacaaatgattatactatccgtcactcagtttcttgtccggatggtatgtacataggaaacacatgctattaagagttggaaaccagtacagatgaagaatctactgatatagtgattgaacggaattgattaggacactacaaccaaggcgccagacaattgttctcgatatactaagcgctatgagatacgaaatcttgagtcattagcgggggatgtccatctga

SEQ ID NO: 77980 - DNA, 139 bp, Zea mays
  unsure (1)..(139): unsure at all n locations
tcaatcacagagatgacacggtgtgtatcccgtggttcgccaagtacanaacttgcctactccacgntgtggcgtcccaacggacgagagttgcactcaactcctctcaagtgatccaatgatcaactcgaataccacg

SEQ ID NO: 77981 - DNA, 287 bp, Zea mays
  unsure (1)..(287): unsure at all n locations
taagcatgtgtcgagttcagctctatcanaatctactaagtatagctgaccctctaacacacncttatatgctatngaatcatcacttcttctaaagacagtaacacctacatcagtaaatagacagttgtagcccatttgacataattgtgaaacggatagcanattgtatatatagaataacaagaaaacattggaatagaatggcaggagatatacaatttacccaacctttgacaaaccttgggttcatcncgatgtgacgctcttgggacttggtttctata

SEQ ID NO: 77982 - DNA, 348 bp, Zea mays
  unsure (1)..(348): unsure at all n locations
cttcatcaccaccaccacctgaggaacatcatgcatgcaactggttctatttngatatctacggaacagagcctaattcactagtaacacaaggcaagccccggtgcatttgtcacctccttagtcctnnttaaagtttctcacttgcttgatcattaagaataagagtgcgtgctaaccatcctgcattcctccttgattgatacttctctcaatccctgttacataaagtntctatgctacttgcttaacaacaaatgtttgtttccaaagatatgctcaagtggatgatgtttcaaatatacttgtggcgatcatatggctgatgatcacatcgaaaatgtcttg

SEQ ID NO: 77983 - DNA, 392 bp, Zea mays
acctgaacagacgcaatatacgtagatacaaaatgtccctacaaatacaagcaaccaaggcaacctcacgtgagcagttcgagtatctccatgaactactattacgaactgattctacattgcaacagaagaatatcttcgtgctctcgatccaaaccacgggattcactctacataagcggttcgcagtgcttgtgaactgttctcaacatgcaacaatattcacacctggaaggctcggagaggagggcttttgggattcttatacttatacgaccccaagcctgttacatacagaaacctgcacgtactctgcttcattatatgaactcacgacagacgcactatgatgaatactcaacctactttcttttagacgtgtgcaataactc

SEQ ID NO: 77984 - DNA, 307 bp, Zea mays
  unsure (1)..(307): unsure at all n locations
tcagctatcatcaacaaatcagatttgtaatctaatggtcacanagtatattatgatgtctgtcagtaatagttgcaattcttgatatttcagtattgttcagtatcagtgttagttcttcnatgattgcgttgcttttatgtgaatatgaccttgggctttgggccattgttatttgctttgtgattggattgctatttgtgaccactgatatctgtattggtgtacatataatcaaatacttgcatggacttagtgtttataataacaataatttcatgaagtgggatcatatatttatatttta

SEQ ID NO: 77985 - DNA, 517 bp, Zea mays
  unsure (1)..(517): unsure at all n locations
cttcttgcacttctatnccacttgaatctctccctttctncaaagcgatgtcatatgcttatctaatttatagaacccttcaatatatctccataatatcctgcgagtcccaagaaactccgaatctgagtaactgtagtgtgcactctccactccattatctccttcactntagcaagatccactgctattcctccattggatataatatgtcccaggatatggcacctcgccaatccaaaactcgtattngctatacttggcgtaatttcgaatatctcgtagcttctgtagcaccaatctcagatgttcttcatgatcactntcattcttagaatagataagaatatcgtcgatgaacaccacgacgaatctgtccatatactccatatacaccttattcatcnaaattatgaaataagctggtgcattggtaatncanatgacatgacagtgaactcgtataatccatatctgggtgagaaagctgtcttggaatatccgatggctaatctca

SEQ ID NO: 77986 - DNA, 262 bp, Zea mays
ataaatacatcccatactttgcagttctggatattggactgctgtctgccactctgatacaatcaaccgcgcagagtttgatgcagtcgatgcaaactcatgtatggatcccactcgaagccacttgctatctgccatggcttctgttggaaaatgtctctatggaaaccagtactactatgacttgtggtcgcaacattgaacagctgcggcagtagaagactgatatatactttgaactgtgaacttttcttcaggccta

SEQ ID NO: 77987 - DNA, 203 bp, Zea mays
  unsure (1)..(203): unsure at all n locations
caattaaacatgtgtcgagctcagctctatcataatctactaagtatagctgaccctctaacacacccttaaatgctattgaatcatcacttcttctaaagacagtgacacctatatcagtaaaaagacagntgtagcccattngacataattgggaaacagaaagcaacgtgaatctaatgaatcaacaagaaaaacatttg

SEQ ID NO: 77988 - DNA, 382 bp, Zea mays
  unsure (1)..(382): unsure at all n locations
actagctaatgtgttagagtacaacttctcgaagggtgaattatcttcacaattacacataccatcttttttnagcgtgtggccttgatttactgtaatgtgccagataaatttgatgtgggctagtgttttaccgtcattttggacggctcgccttttatttgtcaaacttgatgtcatcatttatggactngctttgacactgcacaagtgtcgggtttactcgtgcaagattttaaatcgaccactggtagaccggcggataaattattcttttagcttgtgagacatgactctttgaaatattttctttgtcgaggaaaatcaggaaaaccagtaaaccatacttctttgctcagtgtctgaattcgctataacacat

SEQ ID NO: 77989 - DNA, 232 bp, Zea mays
acaaggaaaacactctgactcattgacagaccttggtgtacacagctctgtgtacaacacgagaaaacattaaaaatcaccggcacaccatcttattgaaaccctcaggacctatggaaggctaagaaaaaacgatcttggaaacaccaccgaaaaaaggttaagttcacgtgatctaaaaatgagcaaagtgaccttttactacagtgtagtccgctcacagggcttcagt

SEQ ID NO: 77990 - DNA, 378 bp, Zea mays
  unsure (1)..(378): unsure at all n locations
tcttaatggccctaatntgctcgntcttgaagctgatctatgtgactacctctcttttacctggactagaaaccttaccttgtgaatatgttgggcttatcatcctatctctggatcttatcattctgcccgtatctggtatctgcttacccgtctagatatngatgtgactcgctaatcttattctacatctaactctctcgagacagacaggtattacaggatcctggtcatgatatgcgtgcttaattctatgctacaagtgcaactgactctggtggtctctatatcacctgataaaccaactggatcactgtgacgaaaagtcttgatgaaaatctatgatgtcttgcaaatcatgtacctgatactatttca

SEQ ID NO: 77991 - DNA, 279 bp, Zea mays
  unsure (1)..(279): unsure at all n locations
cactgaagacactatngaccactgctccggtattagctcataccgacatcactataccttntgacgtatattgtgatgcatctagcagtgggctcggctgtgtactgatgcaataagtgcgagtgattgcgtatgcctcaatgcagttgcgccgacatgaggagcactatccaactcatgatctggagctatctgctgtggtcatgcnctaaaaattggcgtactatctgctgggaatatctgcacatatatcagatcatactagttgaagacatttca

SEQ ID NO: 77992 - DNA, 401 bp, Zea mays
  unsure (1)..(401): unsure at all n locations
acaggagtcacagaggtctaccatacacattctcataaaccaagctctatacatatatnggatgcacacnatattaaataatacatcaacagtaaaatggtcgttggttcataaaatgtaaagtaaatggatatggaataattcacactcgaataccggcgataacaaatntgaataatacggtgtcaatctatagtgtaagatcgattgcgggtgatntaagcacacataaattatacgtatctgttatccattacattatcaatacgtgagccanacggcacctatatacaacggctaaccaatgtctattgcctatgctactcgtgtcggactgtnctgtctatttcacaactctctcattccacataacacanacaacangcataaatatgtctttc

SEQ ID NO: 77993 - DNA, 374 bp, Zea mays
  unsure (1)..(374): unsure at all n locations
ctttgctgttttctctgtcaacactcttgcatgcttctcattcttcattcacggaggcctctgtatgcccttgaaatatgtgagtcccggtgtactcatggcaattaatatcccgctggggcttctggcattctangaaaacattcgaactccagacactgaatcttcttcatggcactcttcatggaaagcacatatctataatatctgctgtgacaacaatgcatgtctcatgttggagacggatatcaagctctgcagctcatctacaccactcgtgttgagtcatctatcactcgatatgatgtcatccctctatcctcaatctgagtgcggttcgagatctactaccaggaatagccattctgtaattg

SEQ ID NO: 77994 - DNA, 368 bp, Zea mays
  unsure (1)..(368): unsure at all n locations
gaaatgagcacgctgatctactatccaagtcagcggcacacgtgcttgccttaccttcagaagtattctatgatacaataaacgcaccttcgggtgaccttcttgatagagcagagctcaatatatctcttggttatagcgaagatcggagaactgagatcatcgtctttcttcatggcaatgtcctctcagatgacgaagcttatcataagagaatagcggctagagctcgtccatatgtaataatagaagggtgagtatacangcatggagtctggtctgcattactcatatggttatccagagctgaatggttagagctgatgaaagaaatacatgcaagcctatgtggatctcacatcggatct

SEQ ID NO: 77995 - DNA, 195 bp, Zea mays
aagacctcgaccaggttcaacctgtgtgagataaccaagttgttttgtcaaggggccactataaacataatatgggagggttgctctaaatgaaatagtccctcacccgatgaaaccattattctaatatgaataatatgatcttcgtatcttattatattgaagcgcgatggtacacttgcgatataaatcaat

SEQ ID NO: 77996 - DNA, 310 bp, Zea mays
taaacaccggcgggagctgaagtataatgtaacaagtcaaatgacaccagtctgttaatacaccacgacacactatgtcacaccagagagaaggtgatggacacgacatcctctgccacatcacacaccgccatgtcgcatcatggtatggatgtagatgctaatccagataccggcatgaagttgtttgtttatacacggtctatgcaagaccctgactgactacagagattgttagtcatatttgtggatatatagcattaatgatgattaatacatataaacataataaagttgatgtccatgtgca

SEQ ID NO: 77997 - DNA, 184 bp, Zea mays
  unsure (1)..(184): unsure at all n locations
ggtgatctatgcttcgtgcgtgaacccgctggcttataaacacgtggggagtaacatatcagggtaagtgtacatatgtcgtatgattggagatccccagctaggtattaatcgattcggatcgtcgntacttctctgatatgaagactctggcactgccctacacgtagcattcgagtgaaca

SEQ ID NO: 77998 - DNA, 288 bp, Zea mays
atctgaactgtatgacgtgcgttcactgtactcgcgctcaacgaactgttgcaaaattggcactatgatggaacactcttatctgggaattacgtcaagaactagtcctacggcaggcccattcacccccgaagctttgcatattgttgaggtgctacataaacttgagttcaactgaccatggcaaatggccaaactgcgtactgaccggctgctctcacactgatggatcgagatgtctcgtcgacctactgtataccttgtatgctatttgaccgttgtagcttc

SEQ ID NO: 77999 - DNA, 383 bp, Zea mays
ctaactgcatactgaagcacgcctacagacagagtcaacctcctttctgtcttgctgcgggaaggattatggccttcagaagtaagagaacccctgttggggcatgacaatcactaaggaaagtcagcatgctctttacttgtaaccgggattatcaagcataaatcaattcgatacaacaatatactgctgaatcacttacagtagattcttactttgcacaaaacatctatattccattgagccatcaggcacggcagtgagcacacggatgtttgagcctagaaaggcttataaacaaattcagaaatggaaaatgctatgtgtgactaaccaacaccggctgatgaaatctttatgcatgggagatgtctgtattattg

SEQ ID NO: 78000 - DNA, 266 bp, Zea mays
  unsure (1)..(266): unsure at all n locations
gactgtcgacaggcacgacgtggccangccaacgtcgtacattctggatgcggatgangctctgctcctatcacatgcaagcatcgagctttctctatcggcatcggctgcagcggcactcctccaccttgatgagtcgagagcacgcgctctcctcggtgatggctccaacanagacatgatcgaatgatggtgcctcgacaccggcgccacgcatcacatgaccggccgacgggagtatttcaccgagcttaactctagcgtct

SEQ ID NO: 78001 - DNA, 280 bp, Zea mays
gaagtggagcttctttttgtcacatttgcttatttttacttgtgaatttgtcgcgtcactaaaaaatctggacgccacttccatgaatgtattgtctgctagagtggattattttcacctgacaccttatattctaatttgactaactttttttgaagtattattactttatgctacagtttttcatgcatcagacgttgtatgaattatcggccatatgacttatcttgtttactcactgtttgaatcttctaactcctgttttttatactacctttgt

SEQ ID NO: 78002 - DNA, 385 bp, Zea mays
  unsure (1)..(385): unsure at all n locations
gtcgctcgatactcaccattcaccatatactaatgtggatagacagacgtaactctaccactctagatggatatgggtactcatncggtacngaatatccgacgagtccaagtatgaatgtggaattgtactcgcccacgggtacgattattgaagcgagaagttttattctataagggcacatctgggtacagactcggtggtcttcaccaattaccatctctagtgacgtctttgcccccanaggatccttctcgacatgttgtcaacgatactttgctagttgtaaataacaanaactatccgtcttgtcacgtagcgtgatttgtttttttttgcctgttgtanatcatcacgaagtgtgaatatctatgtgtctatgtac

SEQ ID NO: 78003 - DNA, 90 bp, Zea mays
caggtggaggctctcatacaccaatatgtgatgagacatcagaccctggagatgctgatatggacctcttctgacccgtcgcctatctga

SEQ ID NO: 78004 - DNA, 425 bp, Zea mays
  unsure (1)..(425): unsure at all n locations
ctatgttgatctctctctcggctntgaagacagtgagtatcctaaccatgtctataggctctctaanggcgcttatgggctcaagcatgccccaagagcatggtatgaatgcctaagagatntccttatngctaatgtgttcataatcggaaaagccgatcctactctatntactannaactcttgacaatgatctgttgtatgccaaatatatgttgatgacattntctttgggtctactaacgaatctacatgtgaagaatctagtaggatcatgacacatatattcgagatgcaatgatggggagttgaatacttcttgggcttcaagtaagcaactcaagatgcaccttcattaccaacanagatatcaaacatttaccaagttgaatgaggatgcaagccatcagacaccatggaaccat

SEQ ID NO: 78005 - DNA, 163 bp, Zea mays
  unsure (1)..(163): unsure at all n locations
gcaagtggcactcatcatccacacaagaacatcatgactactgacagggccactggagctcctacacatggacctattcngctcgatcgcttacataagcatcggcgggagtaagtactggctagttattgtggatgaatattctcgcttcactcgggtggtc

SEQ ID NO: 78006 - DNA, 183 bp, Zea mays
  unsure (1)..(183): unsure at all n locations
gttccgaagcatcatgagtatccttcntctttcttctgatggcttcgtcagcggcttctcgcccgcccttcagccatacctctgagtaaaattaccacttagcgcataagcctcgactgatggatatttcatgtcgtcgactgagagagcanactctggctgaacaacagcctttgcatgatc

SEQ ID NO: 78007 - DNA, 401 bp, Zea mays
  unsure (1)..(401): unsure at all n locations
actcagcttcatctcaagatctatatcagattgaccaagtatttgatggtatattaaactatatatctcgngaaatatcaatgtgaggaaataaagaataatcctatgtncgaaagtcaagggctacaacatggaaggaagccacatgatggtaacaattatgcctttaagtgcangtatcttanaatatcatntcttatgtctcttaatgtagcacatagataaagaaagcacttcatatgttnntaaatatgtcaccattctctgaagaaaatcctctcatatgcgagatcggatattcatcatttctataccatggcaatctacatggcttaaatngntgtaagtatctcatgagcatgctttcactaatcatcctatttattgccatgtctcgatat

SEQ ID NO: 78008 - DNA, 203 bp, Zea mays
  unsure (1)..(203): unsure at all n locations
atggcaagaggctggacgatggtgtatctgtgctctctgttagcgtgaacctgatctggtcttaagaacaccggtggcgcagtgacatatgcaatggttaagngctacatatgtngtgtgaatggagatccacagctaggtattaatctattcagatcgccgttacttctcggacatgatgactntgtcactgacctacacgt

SEQ ID NO: 78009 - DNA, 218 bp, Zea mays
tctatgcacatagtcaatactgaatatcgtaagctacacagtccacttttcaatccttccatgagcttatctattactcataatatccttcaggggctgtgatgaaagaacaagtatgtggtatgctcgaatataatgccgaagcttcctggatgccattaacacagcatacaccaccttctacaactctgtatagttttttagataaactagaactt

SEQ ID NO: 78010 - DNA, 233 bp, Zea mays
atgcatctagaccggctctctttgcaaataataataagttgcgctatacacctaaactaggaacatattcttaaacaaccattacattgaataacagtttccaattgtatgatccaatgcgatatatcaaactactaaaccatgattggggccatggaatgcattactaactttactgctgatccatacatgtgggactgttaagcttgataaaacaagacacgaaagtagat

SEQ ID NO: 78011 - DNA, 289 bp, Zea mays
agcccaaaccctgccgtttgacttttctgagacgcaggtttctatccaactgtgactaggtcactgacagaaggctgtacacacctgctaggttgctaatcatgctttaccctatcactgtcaagcgattccagaattcattccatcggacaatcattagtctgaataactttaaaattcacttaccctatgaatgtctgtgaaagagcccaccctgcgccaatagataacttgtcttctatgcagttatcgacaacttgggagagccctgtctaaactctattaactg

SEQ ID NO: 78012 - DNA, 204 bp, Zea mays
  unsure (1)..(204): unsure at all n locations
ctgtacatggnnncgtcgcgtgctgggactggatatgaatggacccttcaagaaggctcaaggangatacactcatgtactgtgtgctatcgacaaaatcactaagtggatagagttcaagcccattgcttctctaacttcagctaanggcagtggaatcatacagggcataatattcaggttcggaataccgaacagcatcat

SEQ ID NO: 78013 - DNA, 275 bp, Zea mays
  unsure (1)..(275): unsure at all n locations
atacataatcccattntactactcattactngtgaaacctngctctatggtgctccatccctacacctgcatgcaaaacangtcactgagtatttctggccatctattattgtaaccatggagttcctcaagcataactatctttcacaaatatagatagaagtggcatcatgttcacgaactatcaaattcacgagtaaatattggctagtaagcaatggattattcttctaaaatggcactaaattatctatcatgcgaagcctgacatctga

SEQ ID NO: 78014 - DNA, 159 bp, Zea mays
  unsure (1)..(159): unsure at all n locations
acattcttctgcaatatcgatattgtgtccccttcttgtgccatatgcagcatgatgtatgatgcttatgctatgcgaaatgatgtgatgaatgtatgctatgtaagatggtatatattncgaagatacacgcacatccctgcgatgaaacacataatc

SEQ ID NO: 78015 - DNA, 523 bp, Zea mays
  unsure (1)..(523): unsure at all n locations
tgccttcgnctcagtctatcatccgcagtccaacggtgtcgtggaacgcgccaatgtgaatatcttctcatctgtcaagaagatgctccttgacgaanatagggcagatggaccgatctgctacctgatgcagtctgtgcactaaacacgactgagtgcanggcgactgggttactcccttccgccttctatacggatcggaggccatgaccncgcatgaaatatatgcatggtccccacgaacagntccgtcagctgttcccgacgtggacgagccaacttcataggatctcattgacggagaccgagtcttcgccctacatgccctcaacanataccaagcccagaccanagcatggncnaccacacagtcatcccgagggagtcaacgaatgtacctctactcgtcgaacggtcggcagagtcaaagcaagctggaaccagtggatggccttatagcaaacaaagcttcccagcgctacagctacacgcaacggatgactgacactctgactcacacctc

SEQ ID NO: 78016 - DNA, 391 bp, Zea mays
  unsure (1)..(391): unsure at all n locations
tccgagcccgcatctgaccgtggtgaccgtctcaagttggtgttcttctgcagtccgaatccagcatgttcanatacctttccctttctgtcttctccctgattcctaagcanaacaagagtgcacggggctccatggtctatatatgatggacatgaactcaagagtgttatcacctcgatggtgagttgacgagcacgagcgcgagtaatatgaccagaaattggacttgtattggatagatgcatcagatgtgtggatgtcttcatcacgcgcgaaggccacctttggctgcagcatgtgccacccctgcatcaccggcgcggcggagagcctcgtttccccagcgaactacaccttcctcacggtcaccattcaatgagtaactacc

SEQ ID NO: 78017 - DNA, 207 bp, Zea mays
cttatctcagcttgttgggcgcgatgtcggacaccgcatcctgttgttgggacatgggccgacttgtgccgccgctatggtcagatcgtggccatccggtcgatgacgacaccaggcaccgctgcgggattcgattccggggatccactgagtctggcgtttctgggacgacactgcggcaccacagcggatatccaggcttgaatc

SEQ ID NO: 78018 - DNA, 218 bp, Zea mays
  unsure (1)..(218): unsure at all n locations
ctccctacttctctcatcttcagcaacttcatcaggggcatatctggataactggataaacttgtcgcggtctcgctgaccgacatacttacttgcttcagcgacagaaaatcctctttcttaatcttcattaatccagcangtatatgataattccggaactgtgtactgaactctgcccaataataatatcagcagcatcgtgggcagcagtatat

SEQ ID NO: 78019 - DNA, 334 bp, Zea mays
gattgtaccggagcagcttggcctaacacaactgatgccggcactgtgtactctttcgctttatcagatcgagcatgaccccagaataagcatggtccgcgtcagtcgcaccgtccgcgggacaccactcaaagattatgacgaaccgtctcgcctcagcctacaatcatccaacaacatgacgacccagcattcaggatcacaggggacctctttcgacgtcgacgatcaggcactgaccatggaggcctttatatacaagctccaccttcagtacacgcaacgagacgaactcgactacacttaatttgtgatatggcatccctgatccaaa

SEQ ID NO: 78020 - DNA, 393 bp, Zea mays
  unsure (1)..(393): unsure at all n locations
ctaccgcagttgagcatgatcgctttcccttggtctaggacatgcttggctgtcctttctaccttttagcgccagcttgaatctggtgatgatgagagccatctcttcatcattgagtcctgacgcctcaacttgcgccaccttgctaggaagcgactacatgcttcttggacctttatagcaatgggttgaggatcgtggagaggaccgtacaacgcgtcgcaacatatctagcctgcttgatcatcattcgctcgctcacgaaatntgcaagtacttcctcgggcgtatcatcgagacctgagttctgacaatattgtcacagataggatcacacggtaatgacctgacattggcggacactatgattgtcactcggctccagactcttat

SEQ ID NO: 78021 - DNA, 375 bp, Zea mays
  unsure (1)..(375): unsure at all n locations
gagaacatgtgttatgactaacatatgtctatgttgagaaagacagaccttgttctgcgngttatgcanggaagcacgcacgacaatatcatccaagcatgaacgtgatgacgacatcaagaccactggtaagtatggccttgtaattgttgatgttatgtctcgcttcacttgggtattctttttgcaggataaatcagaaacccacagtacattgaagcgcttcctaaggagagcccataatgaatttgagcttaagataaagagatcaagagcaacaatggatctgaatgtaataatcttcacgtagaggagtatcttgaggaggaacgcatcaagcatgagttcttcgctcctacacgccacaacaaaatg

SEQ ID NO: 78022 - DNA, 486 bp, Zea mays
  unsure (1)..(486): unsure at all n locations
gatgctacacttgacaatccatctactcgatgaagcaatccttagagggccagcgcaatatggctggatgtacccaatagaaagacgcttatacactttgaaacattccgtgaggaacatggctcatcctgaaggttcaattgcagaatcatatgttgctaatgaatgcttaaccgcgtgttcgagggtatttgatgatcttgatacacgacacaacagggagggaagaaacagagagcgtgttgatttgaccaacggtgagttgtctgttttcaacatggtgtcatttacttggaccccctagatacatatgtagaaaaagttctgaacagatggttggacgtgtanacaattgccggaggtgagccatatatatgatgtactcccatgacatgtttttggtcttaccgataactatgggtcaatttttatctgacatgtatgcngctgtcagaaagagttgagacgacaactctgtgttgaaaa

SEQ ID NO: 78023 - DNA, 315 bp, Zea mays
  unsure (1)..(315): unsure at all n locations
tctanagggagaacacgtgatatgtctaaccaatggtcatttcttattagatagaccttgtgcagcttgtcaagcaggtaaacaggtgggaggagcgcatcatagcaagaatgtgatgaccacttcaagacccctggagctgctgcatatggacctcttcggacccgtcgcctatctgagcatatggggaagtaagtatggtctagttgttggtgatgactnttcccgcttcacttgngtggtctttctgcangataagtctgaaacccaagggaccctcaagcgcttcctcaggagagctcanaatgagtttga

SEQ ID NO: 78024 - DNA, 390 bp, Zea mays
  unsure (1)..(390): unsure at all n locations
cgtttcagttatgtaaacatagcattgtttatctcagcttcgtcatcctgtatataccagacaacagagttagaaaggtacacatttcacaggagaaggtaatagtaacaaacataagtttcttaccggcttaagatggcttcgagcttcgtcgnctgccattntccgcccgccacttacccagatctgggtcatgaatctatttccgatgcttctggataagcttgngatatctatcaaatctgaagctgataagctgaagttggtctgttacaatgttccatgcgtgcagcagccttcanaaagcagtaactgtgctcgagaactaccaggcgtagagtcgggtgccaccataactcgtcagggcataactcnccttcatatattcta

SEQ ID NO: 78025 - DNA, 331 bp, Zea mays
  unsure (1)..(331): unsure at all n locations
gcttctcctgtgtattggcatcattatatccttcacagcaatgacattctcatgccggatattgttataggagttcagcttccgcaacgtccgtagtgcatccacaccgatgtcgataacgttgtgtatcttctttattgctactctctcatttgtgtcacgattaatggatgaacaaactattccataagcttctctaccaatgggcttgatcggcacatatatggcgtctattctaaataaggtctgccacattgagtagtaatgcctttcttggntcccgattccattcggaggatccaccatcatcgccattttgtactaacgaaat

SEQ ID NO: 78026 - DNA, 287 bp, Zea mays
  unsure (1)..(287): unsure at all n locations
ctaagcttgcttatcttgtatgntagccttcaatccgccaacttatttagctctcctggcagcctcttgactcccgtgtaccgcaatgggcccttgttccgaaggtatcttcatgcatagatatgctgcgatgaagattgcttcacaggcattaagctgtcctcgaccaataattgcattatatggatactccatatcaacaatgtcaaagacaacctgttctgttcttgtgttattaacatagccgattgtaactggcattgttatcttgccaagtgccacaatct

SEQ ID NO: 78027 - DNA, 291 bp, Zea mays
  unsure (1)..(291): unsure at all n locations
tggtgccgatggaaaagcaaanatccttgatatcttggctgtcaaactgctngccgttgtcaactgttagctcggacggtactccaaagcggcaaacaatggtttgccagaagaatttctgggcagtctttgatgttattgtagaaacagccctcgcttcgatgcatctggtgaagtattcgacggctacgaaggcgaacttaaggttcccctgagcggtgggcaggggcccgacaatgtccaggccccagcgctggagaggccatgtatgggcaatcagctttgtatact

SEQ ID NO: 78028 - DNA, 363 bp, Zea mays
  unsure (1)..(363): unsure at all n locations
tgagcatgctgatctgttagccaaatcagcggcacaaggaatgcccttaccttcggaagtattctntgagacaataagagcaccttcggtagaacttcttgaaagagcagtgctcaatatatctccagttcatagtgaagattggagaaccgagattatatcttttctccaaggcaactgcctttcagatgacgaagcttataataaaagaatagaggcaagagctctaccatatgtaataatagaaggggaattatacaagcatagagtctgttctccactgctcanatgtctatccagagctgaaggtatagagttgatgaaagaaatacacgcaggatgtgtggatctcacattggatct

SEQ ID NO: 78029 - DNA, 416 bp, Zea mays
  unsure (1)..(416): unsure at all n locations
cttaatgngcacgtgtcgtccgaatgacacacttcaagtcatcatatatatgcaccatatataccatataatccttcaatgtccataccatcctctgaatggaccacactcgttcttatgaaacaattcagagaactctaaccaattcagaccagattntaagatatgagggacttaaaatctcattctcaatgatactcatcaggtatctatcttatgggaaacacatgaccaatagaattgtccataactgtcatctcatcccaataatggaattaccaatncagtcttaccgaacatggtaagtatcaacatatgagaagcttaacatatgccacacattgtacgagaggatgtatgcagagtaccatccataagaaatgttccgagaaacatatgcaaaatccatcactatc

SEQ ID NO: 78030 - DNA, 280 bp, Zea mays
  unsure (1)..(280): unsure at all n locations
tcctctaaccatgtctntctttagaaccttctttagtgtgctcattccaacatgtgcaagccttctatgccatagccatccaaagatttttggtaagaggaagtccttaagtttgcatcttcagaagagaaatccactaagtatagattgttgtatctaaatcctttaaataccattgactcatcatccatttttgacacaacaacctctatatgagtgaataagcattgaaggccaagatcacaaagatgacccactgatagcaagttgaaacttaatg

SEQ ID NO: 78031 - DNA, 277 bp, Zea mays
  unsure (1)..(277): unsure at all n locations
agtaccctaaccatgtctataagctctctaaggcgctttatgggctcaagcaagccccaagagcatggtatgaatgccttagagatttccttattgctaatggcttcaaagtcggaaaggccgatcctacgctctttaccaaaacacttgagaatgatttgttgtatgccanattatgttatgatactgatttgggctactaacgaatctacatgtgaagagtttgttgatcatgaccacaagttnagatgttatgatggcgagttgaatattttgt

SEQ ID NO: 78032 - DNA, 442 bp, Zea mays
  unsure (1)..(442): unsure at all n locations
ntaagctctttgacagtaaaatcacttcatctagttntaacanaagatgcattgatgcatgagtgagaattttgagaagttaaactacgtatgaagcagggttaatgcatggacatgctntctcnttccttttatacaagatatgcaaagaatgtatataaaagggagatntatgtacatgtataaatgagatgaagtagttttaccctcttgtaccttcacatggagacgctctcttcatagtgctctgtgcttagtcttagatgcttaagacctatactcaagacaatatgtggaagatatttgcagaagagagagtattacaactagtgatccttcttcaagtcattgtangcatatatcaaatggatcacaaatngcataaatgtatcatgaattctccttttaacttagtgcatatcaagagagatgatagtatatg

SEQ ID NO: 78033 - DNA, 455 bp, Zea mays
  unsure (1)..(455): unsure at all n locations
tctcagctgagacggagttctcgcaagaaattatttgcnagggttatttctaacttagccaggaagattgatgctttcacttctattcttcgtctaaaaatgatgttgatttcacttggcggtnaacaacaggaagcatttgatcttattaaaaactatntgccttcggctccagaaatgaaagcaccgtangcaggagtaccattcaggctatacattgcagccgaagataacgttatcggagctattctgacacaggagactaaaggaaaggagcacgatgtgacctacttaagccgaaggctggtggatgccgaaacaaggtacaccttcattgagaannatatgctatgcctattttatgcangcaccaagtgtaggtgtatctattgctagtccttgaccgttctggcaaaccgatggataaaacatgttganaccaatatagtggagag

SEQ ID NO: 78034 - DNA, 282 bp, Zea mays
  unsure (1)..(282): unsure at all n locations
gaatactgtatgaagcattatcagaatgacagccaaggttcttcactctcaaatacgagggaatgtgctgacttatgctgatgacatcatagttaacagcacgaaacaagagaatcatattgtcgacttgcaagagacgttngccaatttcaggcaagctggtcttaagttacatccacaaaagtcgtgttttggagtatagaagggcaagttccttggttgtctggtatcaacgaagggaatcatagctaacccaagtaagatcgaagctatccttccgat

SEQ ID NO: 78035 - DNA, 298 bp, Zea mays
  unsure (1)..(298): unsure at all n locations
ctcccacagacngatatttctttattatccgggagacagnacaaaaaattcttctccccgctgccattgaacactaatgcccccttcagatatttcagtatttgggcataatgtccagcttctccttcttctctcctataaaggacttttctcgaagcatggtggatgatgtaatcaatgctttcttttatagctctgggagcaggacgtgttatcgcttcagtctaaatatgctctgcgaactctttctctgntgccacatcttcaattcggcatactctttctcaccagactttga

SEQ ID NO: 78036 - DNA, 498 bp, Zea mays
  unsure (1)..(498): unsure at all n locations
gcttctctatacaagtgccgcactcactgcagagtgcaaagctgccacgtacaacagcagattgacccntggcgtgggtggagttagcgtcgttagatctatcacgtactgcttcagctcttcgaaggctttctgctgagctgatcctcattgaaagacttcggccgacttcaacacttcaaagaatggtaaatttctctctgctgatctagatatgaatcggttcanagatgccagtcttcctgttagccattgagctcncttctttgtgcttggcggctccatccacagaatagctncaattatgtttggattagctctgatcccttttgttgaaactcaacaaccaagagatttccccttctttactccgaagacacatttttctagattcaacttcaatccagctagcctaanatagcanatgttcctgcgatancaatggatttcttgctcggcttntactatatatcatcacatatgtagccatttctgcta

SEQ ID NO: 78037 - DNA, 303 bp, Zea mays
atggatgtgattgcacccgggctacacctgtgcctataaatagatgaacagtaacaccgtactgttcacgctgagctgtaatcacttgcatgtcactcttggattcttacctctctgtcagccgaaggtataaatgtgatctaatattgttaacaattggtcatgatcacattatgagaatataaataagggttcgatatgattattcatgttcactatatgtcttatatggtcctgcttttaataatacacattgatatgatgaaagttatcattcataaccttcgtctaaagatcattata

SEQ ID NO: 78038 - DNA, 366 bp, Zea mays
tgcttgagctgtatgatcctttatatcatctacgaagaaggcagcttctgtctacgtcatggtcttgatgtgatcacatcctcgcttatacaagataactgagatcgcccacagaccggaaaatgcgcaaatatccccgcaatcgcccaacatttctatgaagctcttggcttcttcacttatacattcaataacgccttcggcgtccgctcgtatgaagttttcttcggtagagtaggcacccacgttggcaaagctagctcttattttctttacacagtgcaaggatatttcaaagcatctttacttggatgtgcgaagttcttcaacatatttctctaaatgagtcttccaatattcgctgat

SEQ ID NO: 78039 - DNA, 303 bp, Zea mays
  unsure (1)..(303): unsure at all n locations
tgccttcgcctcggtataccacccacaatccaacggcgtcgtcgagcgcgccaacggcataattntcactgccatcaagaaaaggcttctcgacgacaagaaaggtaaatggaccgaccagctacctgaagtagtctatgccctaaacatgaccgaatgccgggtgaccggattcacacctttttgtctactatatggatcggaggccatgacgccgcaggagataaagcatgggtcgccccgaacaagcacatcagcagtcctcgacatatatgaaccaacgtccaaagacctcatcgatgg

SEQ ID NO: 78040 - DNA, 430 bp, Zea mays
  unsure (1)..(430): unsure at all n locations
gcttgcctacagctgacatctcgtaccttttaattcttttctcatatgctcctcatgctctngctcattctgggaatatatgagaatgtcatcaatgaactctactacgaacttgtcgaggcagtccatgaacaacgttgtcatcaagtacatgaagtaaactggcgcattctcaaaccgaatgacatgaccgtgaactcatatagtccatacttggtgatgaatgatgtcgtcgatatatccgagggtcagattctgagctgatggtagcttgacctcagatctatcttcgagaacacactgtgtnctctcaactgatcgaataaatcctaattctgggcacggggtacttgtcttgatagtaacttcattcaccgatctgtatcaatgcacatcatctttgtgccattctcttctcacaacaacactg

SEQ ID NO: 78041 - DNA, 180 bp, Zea mays
  unsure (1)..(180): unsure at all n locations
aagttggtgttcatcatccatataagaacatcttgacgactgacaggccactcgagctncctcacatggacctattctgcctgatcgcttacataagcatcggcgggagtaagtattgtctatgtattgtggatgactattctcgcttcactcgggtattctttttacaggaaaaatctc

SEQ ID NO: 78042 - DNA, 318 bp, Zea mays
cagctgttgtccggcttaaatctgggacatgaacgccttccaggaggatgttcttgtggttccttggcatccgcgtaccaaacaccaagttgccactggagttcagaccaaccctcatgcgtggacgtacacaactgctgataccggcgaggtagtaggcatgtccgaccttttcgtggccaggagtctctcgtggttggtgcttggcgtttacccttgtctcggaacgatttagttgggaaaaagcttgccctaacacataacggggagccgggttgcttgctctctcaatttaccatatggtgtctcttctcctgc

SEQ ID NO: 78043 - DNA, 210 bp, Zea mays
gtatcgtccatcgtcacttcctgttcctatccttggataatctgtagctcttgctggatggaagtgcttcactgatgaattgcaagaacacacgcccttggggccctgttggaatgcctctgctggcgtgtagatgggcaagctattgcagcaactggaatctgtgaccatctttactaaccgaagctgctcgtcgtgagttggttcatt

SEQ ID NO: 78044 - DNA, 112 bp, Zea mays
  unsure (1)..(112): unsure at all n locations
tggctcagtatgtgttattacaagtataatattgtcggcgtttcgagaccggngggtccctaagccgacgagtgaatgtcgccgcatgccccagcccacatgggtcgacgcg

SEQ ID NO: 78045 - DNA, 294 bp, Zea mays
  unsure (1)..(294): unsure at all n locations
cctcacggctntgaagatagtgagtatcctaatcacgtatataaactctctaaggcactntatgagctcaagcaagccncaagagcatggtatgaatgcctaagagactntgttatcactaatggcttcatnagtggaaaagccgatcctactttatntactaaaacacttgcaaatgatttgtttgatgccaaattatgttatgatatatatttgggctactaacgaattacatgtaggaattagtngacatgaacaaaaatcaatgtcatatggggagtgagtctcttagat

SEQ ID NO: 78046 - DNA, 349 bp, Zea mays
  unsure (1)..(349): unsure at all n locations
tcttcccacgcgcccgtggatatctngagagagtagagcaaggcgtcttctccttagttgtncttgctccctggtcccacacaatattcttttgtgaccctgcatcttgatgcttattcaaacattggctgtcttttgaacagcaggggctagcacatggcgatatacaattcaaatgtgcactcgtgcgagagtgaggttcacatgaatttaagttcgcaattataacctcatgagcaacattaagcatgatatggtcatcaatcattntattatgagaatatgacaacacgtctgactcttcacctatagcaaagctttctatattagaatttctacttctctctca

SEQ ID NO: 78047 - DNA, 319 bp, Zea mays
  unsure (1)..(319): unsure at all n locations
ctacagtccttcttctttttctccatagcangaaccatactggaacactacnccacttaataagaatgagtgtagaactcttgaatcttgtggatttgaacttcttgaagtacctcataacaagggtgttacaaggccttcttctgctgttgctgcttgaacaagctgtatagaaatgactgacacacggctgattctgggagaaccttcttcttatcttctcttcactatcttcttttctcttctcacttttcgcttttcactggctctttctttctctttgctcttcccactggaggattctatcaaagagtattac

SEQ ID NO: 78048 - DNA, 145 bp, Zea mays
ttcgcatgcctatcaccaattgtctgggcaagcagatgagtcacttattaaaaactagatactgccttatctccttatgtctgacatctttttagaagacccattccgaagacgttacccattggtatgaaacgaacagttatct

SEQ ID NO: 78049 - DNA, 373 bp, Zea mays
  unsure (1)..(373): unsure at all n locations
gctctaagggagaacacgtgatanggttgactaacgtgcatttcgaanaagatagaccttgtgcagcttgtcaagcaggtaaacaagtgggaggagcacatcacagcaagaacgtgatgaccacttcaagacccctggagctgctgcatatggacctcttcggacctgtcgcctatctgagcataggagggagtaagtatggtctagttattgtagatgaattttcccgcttcacttgggtgttctttntgcaggataagtctgaaacccaaaggaccctcaagcgctttctcaggagggctcanaatgagtttgagctcaaggtgaagaagataaggagcgacaacgggtcccgagtcaagaaccttcaagt

SEQ ID NO: 78050 - DNA, 313 bp, Zea mays
  unsure (1)..(313): unsure at all n locations
aaacgcgcncgcgcccgcgcccgcgcgcgcgatggcagttntgcgataagggcctcgtgttcttggctaactggagacaggttcattaactggttcactgtgtcactgacgatttgcagaagagtcctncnggtttctattccttcgcagggtgaagtccacgacgaccgcgaacgcggctgagctccggtgagctagcagaccggccgaacggggccatgaccggcgctaccgagcggcggacacgaaattggatccaccccgactaattctccaacataattcactaacggcacacagttggtctaccacg

SEQ ID NO: 78051 - DNA, 234 bp, Zea mays
gtcattcgaaagaagaccttgtcttcttgtcttcatggaaacatgtgtgatgagcgcatcacagcaagaatgtgtgaccacttaagaaccctcgagctgctgcatattgacctcttcggacccgtcgcctatctaagcatatggggaagaagtatggctaactattgtgatgactctcccgcttattggggtcttttgcggataattgaaaccaggacctcagccttctcggag

SEQ ID NO: 78052 - DNA, 144 bp, Zea mays
  unsure (1)..(144): unsure at all n locations
actgcactcaccaaccgttccatagcgagcgactctttcatccttaggagcaaaacctaaccccggtccgccagttcccctcnttgacttactgaccatcatgcccaactggggcttactacacgacacccaactcaagacaaa

SEQ ID NO: 78053 - DNA, 333 bp, Zea mays
  unsure (1)..(333): unsure at all n locations
atgccatatctctntcatttggtacaaatgcatattacttattcttcttgtgcctatactacagactaatgtgcttccaagtgtacatctataattatgtctagaatgaaagggaaatggaattatttaagttactntgaactgctatcttgtgccaaattggatataattaatcttatatacttagaactgctttcatttcaaagtaacttatgcacatctgtcaaaatgcaaactacctacatatctctactttgatctgctttggattgtgttgcatcaaacacccaaaagggggagatgaaaggcgaatggctcaactatttctatatt

SEQ ID NO: 78054 - DNA, 434 bp, Zea mays
  unsure (1)..(434): unsure at all n locations
cagcttgaccatcaacgcgtacaataaatntacttgtcagaacgatgttctatacaccgattgtgtggtacacctaaaggtagcatacagatgaactatgggccataaggctagaactctcaccaanaccaaatggaaagagataactagaaggtcatggcgacgtcagatattacatgttccatgatataagcatctctcgtcatagtttcacttattggatcccttgagccaatgtcatattcctgtgtcaatcatagtcataattaatagtcacaggcatcacagtgtgcgtgcgaaccatgtgaccgcacacgctcccaaattgataacaatgtacatatatatgaagtaaanatattatcttgcataatatatcggtcaaaatatggtctaaaatcggaagaacattgngataacattgttcttctcat

SEQ ID NO: 78055 - DNA, 284 bp, Zea mays
tgagatagacaggatttgtttcgcatgccaagcatggaagcaagttggcgcccatcatccacacaagaacatcatgacgaccgacaggccactggagctcctacacatggacctattcggcccgatcgcttacataagcatcggcgggagtaagtactgtctagtaattgcggatgattattctcgcttcacttgggtggtctttttgcaggaaaaatctcatacccaagaaaccttaaagggattcttgagacgggctcaaaatgagttcggcttaacgatca

SEQ ID NO: 78056 - DNA, 325 bp, Zea mays
  unsure (1)..(325): unsure at all n locations
ctcagcttgacttggccacactaactcttttggatcctctttatataccacgattcctatcntcaagttaaataaaacataactaagtacactccctgagtcattggggtctcatgtgtgatctcctcatggcgctgcttcataaggatcacacacacttttgtctcacctcttgaagcaaacataaatcaaaccatgtgacttgtaccatatcaccatatgtgagttcaaatcatggcttcaagtcactgtactgatgcatcaacatgttataactcttcatagctgattagatcatcgacttagtgcaagtactctcttcttc

SEQ ID NO: 78057 - DNA, 316 bp, Zea mays
  unsure (1)..(316): unsure at all n locations
gctcttctacngcgacacatgcgcggnggngcatgtgatccacagcggcgccctcacctgtgtgacgcgattgtgcgaccaagagttcaattgacagtgcagctaaatgctaaacgagtatgcgacgaaccgaatgaattgggtcttaccctagatagtggtgacagagatgctggccatggagatctgctgttcggtggagagaacgaagaattgtgagtaatctcggtggcttcaagcgcatactgtctacggcaaagcttcgaacaccttctacgccgcaatgcgaggcttccggcaccacacccgagagtgg

SEQ ID NO: 78058 - DNA, 406 bp, Zea mays
  unsure (1)..(406): unsure at all n locations
agcaatttatcaagtggcgagttcagctctatcaaaatctaccaagtatagctgaccctctaacactcccttaaatgctattgaatcatcacttcttctaaagacagtgacacctacatcaatgaanagacagctgtagcccattttgcataattgagatacagaaagcaaattgtaatctaatgaatctacaagacacacattgganatagaatggtcaggagatatagctatnttaccatgacctttgaccaaacctcgatntccatcctcgaatgtgatagctcgttggggatcctgggttctctcgtacgaggagaacatcttcttctcccctgcatatggntcggcacctgctgcgagtaacaacttgagccaccgatgcatatactacaaacaatttagt

SEQ ID NO: 78059 - DNA, 278 bp, Zea mays
aatcactgggccacgagcgtgctactaagctaagatgacggtgtataacttgtcacaacctggacaagtgtcgcgtgggcaatctgataagaggtttgtattgtggtgctcgaagacatctctgccgatgttcttgctgcactagctgtcgtgatcataccttcttcttctgctactcttgctggcgagggttcctataaaaatgctcctgcgccgtgatttgttcggatgaataacactcttcattgcagtagtatttatagcgagacagtgtatca

SEQ ID NO: 78060 - DNA, 296 bp, Zea mays
  unsure (1)..(296): unsure at all n locations
aaaaaagacatttattatttgacattataaaagcttctagtctatatttaaccttcagaatctaaagcttttctaatgttagtaaatttgattcctatataacactatatntagntctggcatctaacgatgttaactttcatatgataaaatgttttatccctgttaaatataaatctcaataattatttatatatgaataactataataacaattaacgatattatagtcactatatatatgagtaattggaataattattacaaatattcatacgtacataattatttaatat

SEQ ID NO: 78061 - DNA, 346 bp, Zea mays
taggcctaaaccaccgtgaccggcgacacactaaatctttttttccaccatattaggctatcacagtgtatcacatcatactgtcatgaacagagcgaagaacttctctatggaaccatgataacctgagaaacagctaagcaacaggacatttacaattggattcctggtgcgagctaaaaagacctagcgggttgtaaggatataaattattatgataagacacgagacagtgaatatcgaggacatgacaatgacacgtcaccgtgactcggtatcttgctgaatggtatactagaagcagcaggttggaggtatatatatagtatcggcaccatatgcctgc

SEQ ID NO: 78062 - DNA, 446 bp, Zea mays
  unsure (1)..(446): unsure at all n locations
tactcagcttctgcacatgcaccaattgtatacgagacataactctgnggttatgaacaatatctctctactttggctgctacagacttcgctctcggtctgggtcaagctgcccagtgccgacctcttcaaagagatggcctgtcgactgtactacggaatggtttacgtgaaaaatgacttgaaatctcgagaggatataaagaagatcattatgtaccctatctggcaacgcttcggcctgcgaaggccgaatgtggaaacgaatgaagcatccaaagaatgccatagagccttctgagctgtctgctcttttattggtacaacggaattgactcaagaacacattgccttcagagattgcctcttgcanataatcgggaaatgccgaagaaactgtaaagaaattgacaaggtggctagttcgcttgaatatacattcagta

SEQ ID NO: 78063 - DNA, 177 bp, Zea mays
  unsure (1)..(177): unsure at all n locations
atactcacgcttatgcaacatcgctggagatggtgtggacatatncaacgaagacctgtagaggcacctctgcatatcggaataattatgcgtcccgaaaatgtgaagagaggtagaggtcgaccaactntgacatggacagaggctgtgaagagagacctgaacgagtggaatatt

SEQ ID NO: 78064 - DNA, 535 bp, Zea mays
  unsure (1)..(535): unsure at all n locations
catgcacatcctcttcgtgccatccttcttctccacanatagcactggtgcttgccaatgcgaggtactcggtctgatgtagcctttctctgacaactcatcaatctgcttcttgagnttccaccaattctgtgtccggacactctgatagtgctcnttcttggaaataggggtggtgcnnctggtataagctctatnggtgannattcaacctttnctttttaggggtggcatacnnctagcaannntcctcgggaaaacatatnnctgggaattctngatanctacatnnntcatagcctcttganntggtttaatctccttcaatatngggaaggtgacnnttggtgacaacttcctttcccttggtctangcaagaccaactctactaacacttnnttctctgatagggacactaacttcaccattctcttgcactgctagactggctggtactgggtagcaattcatctagatagatcataggtgatctggtaccataatataaatagcgggactctatccctattgact

SEQ ID NO: 78065 - DNA, 274 bp, Zea mays
  unsure (1)..(274): unsure at all n locations
gaggcgctgtgcattatcaaaattactaatgatgctactgaccaagctgccgacagtcttctgaacgaagctgcctataagtccttacggaggactaaaatctctgtattcttgctagntaaatgccctgcgaaatgattcncaggtatgcaagatacacttgttaacaatttgcatcgatattgatgtaatatatttctttatgacgcgtggaaccttcatacataacatttctgagccggcggcgaataaacaacctttctttctttttcac

SEQ ID NO: 78066 - DNA, 354 bp, Zea mays
  unsure (1)..(354): unsure at all n locations
tctgagattctggtcattgattggcatggagcattggagctgaatggaaactaataaggaccagtctagctataggagggcttgtcccagctgcttctgggtcatttggagaaaagaggaaacaatttcttgtacaacgcaccaagcttctctagaagctggagccattntgggaggagaaccactcccaaagagtaaatgatataatagataaatctcttcatcgacccgccatgtatctgtctgttccctcaactacatattagactagcatatatcgtatgtgcttgctcaataaaaaggacaccactggatcttgttangatataacagacataacagaacatcgattac

SEQ ID NO: 78067 - DNA, 428 bp, Zea mays
  unsure (1)..(428): unsure at all n locations
gctnttgactnggagaaatgtgtagctcgctgattcccgcgaccttacacgagaggctcgttcggctaattacatctacatagtacaatatgttgaacacctccgattaagctgcgcatagtggtcgtcgtatctcaagatgagtgcaccgtgaatgatgtgagtgccttttataattgccaaaacttaatcatgactacgccattgtcacgctgattggttaacgggatgttgttgatgaaagggatgactctcgcctcgtcggtgcccagtcgtatgttcgccagctctcatcagcatgaacgtagtatttgcttcgcctcgtcggtacccagcaacaatgtgtntgatctcgctacacaagacgtgttggcggataataatgataagcttgctataaattgcaacacttcatcatactttgtaat

SEQ ID NO: 78068 - DNA, 261 bp, Zea mays
cgtgggccactgtctgtactcacaaactacggtaccccttactactggataaagatgcagtacccacgcggctatctttagtcgcgtggtaaaagagccgtatgtggaaccatgtcatgactcgccccagcctctggcgactactctgggccagcaacagtgcctgaccccaccacgtaggcgggtccggtgcccgcacatgtccagagaaagtgatatactccaagacatcaatagtgagtctgggacctcatgtgaaag

SEQ ID NO: 78069 - DNA, 336 bp, Zea mays
tcgcgtcatatgaactacaagccttgcgggaaagagactgcgtggatagttctccacctgaaacaatgacactgtaaaaaaatatgcacggtgcacactgaccttataataaatgcatgtaaggcaatcttttatcatctgcttgaactgacacaacatgcgtggatttttttatggagctgttggaagtcacttataagactgtggagaccaggctaatcctcgtgcgctaaaagcataatggttccataaaataaaagccgcactattttttgatgatactaaaatagatcatattagactgtgacacaagctttttgtaaatgttagaacttt

SEQ ID NO: 78070 - DNA, 272 bp, Zea mays
  unsure (1)..(272): unsure at all n locations
aagatagaccttgtgcagctggtctagcaggtaaacaagttggaggagcgcatcacagcaagaatgtgatgaccacatcaagacccttggagctgctacatatggacctcttcggacccgtcgcctatctaagcataggaggaagtaagtatggtctagttattggtgatgactnttcccgcttcacttgggtgttctttttgcaggataagtctgaaacccaagggaccctcaagcgcttcctaaggagagctcanaatgagtntgagctc

SEQ ID NO: 78071 - DNA, 376 bp, Zea mays
  unsure (1)..(376): unsure at all n locations
ctccgctgtaacagtcagtcatgaggaaaacacttcgctgacgccaagccatgctgctgggagattacagacagaagtgctttggctccaattatctgaatcagaaaacttgatacgttttatcacaataagatgttttcatggtcagcatgatctttggagtacatcgatgtattgaacattcctcatgtgacccatcttcaacccgcagcagagcttccgaaatgctgatgacatgccaagggctccacaataaaaaactctaatgcngagtatanagaacgaagttcaaaaggctgctacactgtatgggaagaagcaatggaagtgagatgtgatgattcacgactcacatgcttgtcaagatagtccctgc

SEQ ID NO: 78072 - DNA, 320 bp, Zea mays
  unsure (1)..(320): unsure at all n locations
ctcagcttaccctgatangcataaaggggtaagacacaacccaagctgagaaaacctaaaggctntaatggaaaagtcataaaatgaccctaagaataaaacttgaatcacatttatactcctaaggtaccagaaaccctaattggaaccctggaaaaccctgaaaccaaaccctaggggcttatgtgcaaaattagcccacttttgggttaaagtgcaaaaatcaagttaaataagtatattangtcatttgggtcaatcatatgttgaattgcaatccaaaacttgagatttggacttaagtgcaaaagagccatact

SEQ ID NO: 78073 - DNA, 521 bp, Zea mays
  unsure (1)..(521): unsure at all n locations
tcgacagtatanaccgacttaaagatagaatgacnttttagtccatgaaggtctgagtcaatgttgtaagctnttataaggggcatacttgtaattcctcacacgctgcgttctgtgcctataaatagtgaacagtattccgttgctgttcacacattctggtatttttgcaatcgcatctgtcggaattcaaccttttgccaaggcaaaggtatttctgtatccaataattcaatatattaagtaattataatgtgaattgtacatgttttatttgtccttctcataccttntattntatgttatcttaataattccgctgagatttaatacgaaggttaagcttcgaactatgctcttgtcaccttcgtcgaaaacttattctaagagaataatgttcatggcaaaggatgtaacattaacatntatgttgcttgtctaattatacattaagacagtctcacagtcaattgaataaacacttgagtctagtgaatgattcgattgtctactgttatatg

SEQ ID NO: 78074 - DNA, 259 bp, Zea mays
  unsure (1)..(259): unsure at all n locations
gcgagtgaaaagcttaacttgcgctcanactngacaagtcttagttttaagcttttagtacttaaattcttacttactatgcgattgctggttcttgagatatgcatgaggcactacacttagagggagtattcaaaactcaaatctttcgtgaaaacccctagtgcaaagccaaaatgcacatctcaccatttgcctattttctcctaaaaatatctagcctatggcanaatatcttgaacactatgagaaaatgtat

SEQ ID NO: 78075 - DNA, 181 bp, Zea mays
  unsure (1)..(181): unsure at all n locations
tagtatgtggcaagatgcttaaagaataccgatgtgatcacatcgagttaagatgctnttggtttgcttagctccaccaaaaggcagggggcatatgtttggcaccaaanagagctagcggacggtccggtcctggagccagacggttcgcggtccggacagtccgcgcctgtgggcatgg

SEQ ID NO: 78076 - DNA, 311 bp, Zea mays
  unsure (1)..(311): unsure at all n locations
ccttgctgggtcttattgacccaagcgaatgctcatccggtctaagtgaccgcttgagagaagaaaggagtgaaatataccccgcctttgtggcctcctctacngcgactagggtctttggatccgaagctcggtaaaacaaatcaccgcgttcacttgtgttgatttccacttgatttggtntcatctctcctctctctaaaggttccttgctaatattgatctgagtntgcttccgaagntatccgcatcaatttgagcaactcatatgaagagaaacaatctttcgcactccgaattaattctaacac

SEQ ID NO: 78077 - DNA, 246 bp, Zea mays
  unsure (1)..(246): unsure at all n locations
gcttgtagttagctgacgaacagacattcgagatggtttcaatgatttcgagattgctgactgcccctgaagaatgtaattcgaattgactaagccggtcggtccatttccgagatcgacctatgcccctatgagtggtggattgagattattacagattactgatanggattcatcggcagctcgcccatgggtgcccgcattttgtagagaagatcaactgcaatgtgctgatatcaccctgat

SEQ ID NO: 78078 - DNA, 214 bp, Zea mays
  unsure (1)..(214): unsure at all n locations
gcanccgaagaccaagtctccacttggaagccttttgccttacccttcaagcatggtagcgtcgcagggactgctgataccgcgccgagtgtaataaggtcacgtctcgagcctcttccagctggtccaacgaagtttcttcggtggtctaggtgctttggtcgtcgtaagcctttgtcctgcgggaaccatattctaagtccgtgtgtatgat

SEQ ID NO: 78079 - DNA, 365 bp, Zea mays
  unsure (1)..(365): unsure at all n locations
cttcatcttctctatatgcatgaattggggggcgtgcacggacgttggtgctatccaatcgagagatgtctaaagactattctaaagaaatgtagaagtaaatgccaaatcgaggctctcattgcagaggcatacattctagaggaggtctcaaacttcacaacaacctattatggtgacanactgccgagcgtgcataatccaccnncctcgtacaattgatggcgacatgaatccgaccttagcatattctgaggccaactcgaaagcgcaagtggctcgaccaccaagacnctgacacatgaagagtggtgcatatcatgctatatgtattgaccaaccttgaagaggtgacgccatacatg

SEQ ID NO: 78080 - DNA, 265 bp, Zea mays
  unsure (1)..(265): unsure at all n locations
gtgctaagcggcgatgccacagccagcccatgctantcttatctattaatcatgcatctagaccggcctctttctttgcaaaatcaactaacataaagttgccgtctaatacacccttaanagctagtgaaccatcacttctttctaagacagacacatctatatttggtaatagacagttataccccatggtgcataattgactaacagatagcatatataaccaagagactcaacttaaaacacattagagatagagtgctca

SEQ ID NO: 78081 - DNA, 312 bp, Zea mays
aactcagcttgaacatttacttatggcatgtgttgccgaagacaccttcatgtatcattatatgcccacaaacctatcagcattcaatgtcatatatctatgaatgacccactcgtcctttgaacaattccagaacttaacaattcgatcagatttaagataaaggacttatatctcattccaatgaactcatcatatcatctatgggataacatgaccaataaattgtcataactttcattattcacaatggatgacattcatttaccactggtagatatacttgcagtatacatatcacacttgttggag

SEQ ID NO: 78082 - DNA, 513 bp, Zea mays
  unsure (1)..(513): unsure at all n locations
tcggaatcaaactgcgncccattatccacagtaatagcactgcacactccttatcatttacaatatttcgctagaaaaactttcgaatagtgaccgaagttattgtggctaaaggctttgcctcaatccatttataacaatatnccactgccactacaacatatcttaagctctcttgtgctggtggtaacgggcctaacanatcaaggccccacctttgcaacggccaagtgggttgtattaactgggttagagataaaagttgtttctgatctcttgcacatttctgacaaccttcacacttttggactatattcgctgcatccgaagctgccttttgcccaataaaaccttgaccaaaaactctncctagcacaggcttagatccaatgtgagatccacacacgcctgcgtgatttccttcatcaattctatcccttcngctctggataaacacttgagtaacggagaacagaccctacgctngtactagtccncttctattataacata

SEQ ID NO: 78083 - DNA, 526 bp, Zea mays
  unsure (1)..(526): unsure at all n locations
tttcttgcctccgnccttggctggatcagatgtctgcgagctacgcacccgagtctcttttatgcaatgtncatcttacttgcgatgtccattatgtatccataatccagttcttggaccatcacatcttgctcactctgtgttgaaccctgtaagctttaccttaagcacctggtcaacacttagtacacttggtagtactttaattgagttgtcatccaaacaccaaaactcacaagagaagcttcactcggtcctcgcactangaagatcaaacatctcggcaacctcaacccgcggcgaggactcttgcgcggncacatctaatgcagcacaatattgcaagtcttcatncgaagactcttctgtctacgaaaacggactcccaaactcaccatcagacgaaaaggacctagattcacaaccagataattatcatcggtacgcactggcggtgcgagccccacaaaatcagtatcgtcagctacgatcgcttgcgcggtncacacgtccgaacctatgcagc

SEQ ID NO: 78084 - DNA, 324 bp, Zea mays
  unsure (1)..(324): unsure at all n locations
tagccanataactanatagaaccccaaatcaagcttctcatgtggggacttaatgtgaattctgaatttcagaattctgaaattcagaccttgagccaaatatcaaggatgttcaccttgatccctaactcgaatcctaatggtcccattgacaaaattgtgtctaactaacccctctgtcgtgtgccagaagatggcattgggacgcgagccctagacacgacaaaaccttggatttgcctcgggtttgggcagggagacagaccggatttcctggcttcatatctctgcaaccagtaggcaaaatcctatgacccccacaca

SEQ ID NO: 78085 - DNA, 336 bp, Zea mays
  unsure (1)..(336): unsure at all n locations
tactacaatagctctacaatggtgctataatgaccaataactaaagactcatgggttaaaaagtacagtatttcaaagctgaaccaacttcactgaaattcagttttagcttctgaactaaactccgtcaccaacatctgacagttcaactttggacatttgtttctccaatttttgcatatgatcaagccaagcccacttaagtaaaggtgttcatcatcttatggtcttcgcttcctccatagacacccgaacctaaaaccttatagaatatgcacaaaagaaccccanaacagcacacacaatactanattcagtttcagtactgttcacaat

SEQ ID NO: 78086 - DNA, 313 bp, Zea mays
  unsure (1)..(313): unsure at all n locations
gtgttctctgtagnggcttttatctggtntctatggatccctggaanacnntttaattggaatgtgangnggatgaattcctctgntaggcangactcaataaaagaattggtggactccctccacgttgatgtggtgtgctttgcagaaacaaaaatgcagaacatctctaggagaaacattctgtctatgttgggaagctgattttttgagtatgtgtacctcccatctgtgggggcaaagtggtggtattttgatgctnggangagacacattggtcacacaggacagacaaaanttcacaatcacagta

SEQ ID NO: 78087 - DNA, 118 bp, Zea mays
tacactctttactacaactctcgaaaatgactctgttgtatgccaaatttatgttgatgatatatattttggtctactaacgagtctacatgtgaagaagttagtatgatcatgacac

SEQ ID NO: 78088 - DNA, 501 bp, Zea mays
  unsure (1)..(501): unsure at all n locations
ttgacaaagaaatacgccggataacgaggtcagcctttggtctttcaagttaatgatcatgtatatcttgaaagtgtcaccaatgaagggtatgaacctgttcacggtaaaaggaaagttggcaccccggtatattnggctcgtccttattcttgaacgatacagaccagtggcataccgacttcaactaccagaaacattatctgtagtgcataatgtgttccatggatctcaattgaagaagtgccttcgagtccctgatcgaaccattgacatagtggatattgctttggaaccagacttaacatattcagaacatcctattcgaatcttggaccaaacgcacatgattacctgaaaaggacccttaaatttataaagacaatggaccagcatacgaagatgaactacctggagatgcaggcttttaaaaacatttcctaggtctagctcatgaacttgtagaatgtcatcattgcaagagaataaccccatacacct

SEQ ID NO: 78089 - DNA, 335 bp, Zea mays
  unsure (1)..(335): unsure at all n locations
acagtgcacatagcaatgaatactgtggttacttctctcctactcgcctgtntatatagtgctgcaggtaagaaggcgaagcgccaggatttntacaccangcggacacccgctcgcactcgctgcgtggtggaccgcagagaccgaacagtaactctgaaaggtggggccgctacacgctgagaaattgaatcgtttctcgacaacgagctcacggaaggtggtttttagaccttcgacgctccgaagcttaagagactttnttcacgaatcaagctcgttacgaanaacgatctatcaccgcgaaaggggctactgttgggcctatgcttcgt

SEQ ID NO: 78090 - DNA, 308 bp, Zea mays
  unsure (1)..(308): unsure at all n locations
ngaaggccanatcananagcaagccccaatatactntgtatccgacgntcttatttnatctcagacatattataccgaattggagaatgtgttgtatgctgtcttgatggcctccgggaagcttcngcactattttcaagcatacaatataaattgtcgcttcttcacaaccattgaaggatattatgagaaatagagaagctactggaagggctggaaaatgggctgcggaactcaatgaattcggcattgattatgtgcatagaatttcgattcacacccanccgtggcagacttatcgctgactg

SEQ ID NO: 78091 - DNA, 498 bp, Zea mays
  unsure (1)..(498): unsure at all n locations
cgactgcatgatctagtgtctctaatgcatagtgcctntattaaaggcccgttcatccaagacaacttcatngtggtccagcagactgctagattgcttcaccagcaaggccaaccaaaggtacttttaaagcttgacatcactaaagcctttgattctgtatcttggccttttctacttgaagtcctccagcaattgggttttgggcagaattggagagataccttgtgtggccttntagcaactgcctccacataggttctactcaatggagttcccgggcacaccatncancactngagaagactgcngcaaggggatcccctctcccctatgctttttaatttagtaatggacatccttggatgtatggtggctaaagcggatgaggagggacagcttcagcctctcttctnncaaaccactacagcatagaattcactntatgctgatgacgcagttctattcttccacccaaaggagagtgaaatccatact

SEQ ID NO: 78092 - DNA, 452 bp, Zea mays
  unsure (1)..(452): unsure at all n locations
tgtgaaggaccagatcatccaagcatataagttcatggatgataagtggtcacccatgttttattgatgaagcaccagaagaccaatcaaggaaggaatccatgtgggagttcgcaagaagaaagtttgcgtgtcggcatcaatgcttcttcaataagctagctgccaagcaaaacctagaagcctgaagatgattctttgagtagccagaatcagcatttgcaatcagcaaccagatgctcctcaaagaccagactttgttgaagttccatctcctcgaagagttgcacagtgaagatatgtagctgaagtaaagctatacccataacccttctaagccgaatctcgaggacgagaattcttttaagtggggtagatttgtagcatccaaaattcaatcttgaatttctanactcccctacatcaaatgaattcagttatttcaaatgttg

SEQ ID NO: 78093 - DNA, 179 bp, Zea mays
  unsure (1)..(179): unsure at all n locations
actatagatactaagcttggtaatgctttaagtcagaactctcttggtaatacatggtctccaagattctatatgctcttctncttaagtttcttccacatgtgatcacagtcattagtgcatagatgtgccataaccatggtaacacttggggtggtacaacgccctcccactgactg

SEQ ID NO: 78094 - DNA, 448 bp, Zea mays
  unsure (1)..(448): unsure at all n locations
ttcttcttctntagtcactggttctagcactnggatanacatgttattacacataacaattcaccaagtctagaaaccataccttttccttgatttacacttctcactntatttggcacattagaacttaatcaaatgtgttgggcacttaatcaccaaaacattatagaaattgcccaagggcacatnttcctttcaaatctcccctttttagtgatngatgccaacacaaccaanagcaaccaaaagaagtacaacatcaatgcaattgaagaccaaatgtttttacataatttggatatttggacgctcttgccacacttggttatttttgcaataaattcattntctatctctangcaaacacactcgtttgncacatagagagtattccagagtaaaattgatcagtgccaaaactccccttctccataatcaaatctcccca

SEQ ID NO: 78095 - DNA, 326 bp, Zea mays
  unsure (1)..(326): unsure at all n locations
ggcacccatcatccacacaagaacataattgacatggacaggccactggagctactccacatggatctattcngcccgatcacttacataagcctcggcgggtgtaagtactgtctcagtattgtggatgattattctcgcttcacttgggtattctttntgcaggaaaaatcacaaacccaagagacctttaaggatcttatgacagctcanacgagtcagataaggatcaaaagatagaagcgaaatgggaggagtcaagactctcaatcgaagcttttactaggtatactacacacanggctatagatcttaacaatcactga

SEQ ID NO: 78096 - DNA, 368 bp, Zea mays
ttggtagcaactttgggtactcatttttttttactaagaaggtgcgatttagacttaaaagaagcccaacagtaccctcacagatagttgtttttgaaaaattaacgcgaagacaagcttaccaagtcaaaacaccttctcgtaatacagctgttattgtggcctatgtcaggggcttgtgatatatataagtttgcgtgaaatatttttggctataagctctggttggttgtcatttactctctgttttgaaacgggttgccttgagcttggctcttgtgcatcacacatatggcgagaaagaaagcgtatcccttggtgttctacaacttgaggacatgtgaaaatactagaagtattgatgctga

SEQ ID NO: 78097 - DNA, 476 bp, Zea mays
  unsure (1)..(476): unsure at all n locations
tcggaacagtgacatgtctcaagacgaaggtgtgaaccgacttanagatgatttgtcttataagaccatgatattctgtgtcattattgtagttcattgtaaagggcataaatgtaattatacacaggctgcgccctgtgcctataaataggtgaacagtacccctgtactgttcacgcgctcctgtaattacgcattgggcattngctcttgcttcacgctggtatttctactttccttcaagtcgaaggtacattttgtaatttggcattatctctataataatgaaatagacatgagntaataataataatcatgtgtttaaattatctttcatattctatatagatccttcttcattatttgctggtcttatgaaggtatgaccttcataaccttcgtccggatccattatatcccaaggggataatgctttaaggacgaangaatatacattaacaattctgtgtgcttgt

SEQ ID NO: 78098 - DNA, 493 bp, Zea mays
  unsure (1)..(493): unsure at all n locations
gtagcataggccaataatatacgaatngactcaagtctatctacttgtgcataggtttcaccgaaatccaaaccttcgacttgggagtatcccttggccataagtcgagctttgttccttgtcaccacaccatgctcatcttgcttgttgcggaagactcacttggttcctacaacattttgattaggacgtggaactaaatgccatacctcattcctagtgaagttgttgagctcctcttgcatcgccaccacccaatccgaatcttgaagtgcttcctctatcctgtgtggctcaatagagganacaaacgagtaatattcacacaaatgtgcaacacgagatctagtggttacccccttatgaatgtcgccgaggatggtgtcgacggtgtgatctcgctggatgcttgggcactcttggtgtggcggcttggtctcatcctctttgctgacattgctctcccctgacattgcgcatctgaggtgctatt

SEQ ID NO: 78099 - DNA, 86 bp, Zea mays
acctacatatgatagtgaggagattaaggctgatgacttgttgtgagactaaactgtcataatgaggtggatataccacccttcta

SEQ ID NO: 78100 - DNA, 256 bp, Zea mays
  unsure (1)..(256): unsure at all n locations
atctctagatgatgagagccatctcttcatcattgagcccggccgcctcaacttgcgccaccttgctaggtagcgacttcttgctcctccgtgcctttagagcaatggcgtgaggcttatggagtggaccgttcaacgcgtctgcgacgtatcttgcctccttgatcattatccgcccgctcacgaatattccaagtactttctcgggcgtcatcatcgtgtacctgggattctcacgactatngttcacgagatg

SEQ ID NO: 78101 - DNA, 474 bp, Zea mays
  unsure (1)..(474): unsure at all n locations
acttatatcatcgcacgcaaggacatatatgctatatgaacaagtagaacattaagaatggcattcacacaacaagtgtgattcggtatggcttgatttcacatggtgatccccatctccaanaatctgtccatcacgatgatctccatctccatgatatangtatgccatccttcangtgacgaagtcttcaagacctatctaacgtatgctggtaaacaaattacatatacgctttggatcatcacatngtgacacgcaggtcattacattaaatttggacaatacatatgggctccacgccgaattgccanggctacgacacgcacgtcatgaataattcatttatatgcatcatatacacaatagccataccgatcacaagatgccctgcaaaaacaggttagacanacacgtttctaaatgttcgccactacagcagatagccacggcggtccctgaaacctcacagga

SEQ ID NO: 78102 - DNA, 319 bp, Zea mays
  unsure (1)..(319): unsure at all n locations
ttagcacactatgaaactcagcttgcacacatcgagaatnntgtgatgtacttcctccttctgtatgagtcttcanaacctgaatcagngcgtacctctgaaaatgacctgcacaattgatggtattggttcttattanaagctatctcatttcgagtaagccaaatagaccaanattaagctgatattccagtaagtagtaactctttgtatactagaccacaatcacttagtgtcggtgaccataattatgggtacccccaagactcctaatctcagctggtaaccctcatcagcacaaagctgtaaaggcctgatg

SEQ ID NO: 78103 - DNA, 500 bp, Zea mays
  unsure (1)..(500): unsure at all n locations
gacagctcgcgagctatcactatttatcanatataaactatatgcatatcnattacataataattgatgaatatattatatgtgtgtgatgtctatagcctataagttaataattgatgaattgtgtctatgtgttaaattggtctatatgaataaaactgtgggttaaactaataaacatgtgtgtgaattgtaaattgataagtgatgagttgtgtcaatttggagttacattgatgtagtctgtgaaattatgagtacaattactatttcttgttgttaaattagtttaggattaactagaaattgattattatatacatnattgctttcgagccagctcgagctcgtaaacggtccgaatcgagctgactctgtgactcgttagcttaacgagccgagctgactcgatatccggccttaagtttaggtaacgagtgaattactagacattgtcttatacacaaactggttcgggacgttgtagtgtcatacaatac

SEQ ID NO: 78104 - DNA, 272 bp, Zea mays
  unsure (1)..(272): unsure at all n locations
tacacaacgtttggaacatccaacagctacgtcgctcttacccttaaaatgtttcaagtcgtttatgtatctcacttttctttacatacataaataaagtctaaccgtcaaagaaaggtcagcatttgcctcngcannagccgaccctccctcggnggctagaaggggggaaccctctctgcataaaattnttcctcgcaaaagtcttttaccaaaatgtctctcgcgcctttcgactgcatcgataacataatcctaaaaacgagcgagag

SEQ ID NO: 78105 - DNA, 315 bp, Zea mays
atgtgtaggattttctttctattagatcaacagagccggtatagtctaacttacctgtcttcatagctgttgattcatgtgctaacttataaggtgagcactgagaatcaagcctaatatcacgctgtgcaatgtgtcgctcgttacatataagactctattcatcttataaaattagaaagcacctatggatatgctgtgcccaaattgaacaaagagcgatcccactttacaagatacttaactcccacatgagaatataggtgtcatataaattctatagtcagagctacctaaagacgtctatctatctgc

SEQ ID NO: 78106 - DNA, 296 bp, Zea mays
  unsure (1)..(296): unsure at all n locations
gcactggtggaacagtcacatgactcaggtggctgggatctttgattgttatgagcatggcatatanggggtcaagttntatactccctgaagcattgatgaaggggggcgacaacannggcatcgtgaccggggtcttcgttgaatgttggtgaagcccgttacggttatggatcgggcatcctaaggatgcaatgtggttgggggctgaggcaatggtgtgaggtcttctctaccggatgacaagctcgggagtggcactttatcctggtagagacgtgattggcggcagcatg

SEQ ID NO: 78107 - DNA, 431 bp, Zea mays
  unsure (1)..(431): unsure at all n locations
tacatgcctntaatgtcttccttttcggtggttgatgctcaatgtgtagaagtttangggccaaagcaatgaanactatatcaaacaccanacaccaccaatttaaaattntatatctacaaatgactntntaagtggttttggttatttggtccanaaataggaagtaagtgaattatggagttagggggaggcttaagtccataatgtcaaattgtggggacaatcatgcatcctagcaagtagattgcacattttaattcaaatacttgtattatntactttgctttggtgtgttgcatcaatcaccaaaaagggggagattgntaggaaaatggaccccgggccatntggctaattgagtnttggtgtttgataaacaacacaatccgtgaactaataagaattctagtgtttggtgttgtagtcac

SEQ ID NO: 78108 - DNA, 340 bp, Zea mays
  unsure (1)..(340): unsure at all n locations
ctcagcttgctcccttcgctgaacatcggatgtacttcaagcggagagaggcngttcctttcttgctgacacgatgcatcgcgttgcctcactgtcgaccgagtgtcgccaacacatggtatgcaccgtggtacgcgccccgcattctaaaccgacggatggtgaatacagacatgccaacgggtgataaaaagtccgactggtcgatcttcatcgattggtatacctgatagcatcagaagacaggttccacccacgggatcacattggtcatgcaggataggtaggacctcgaatgcttgtgaaccaggatctacacaatcgcatttcccttctctac

SEQ ID NO: 78109 - DNA, 455 bp, Zea mays
  unsure (1)..(455): unsure at all n locations
cttgatacatggattaaacatcgccatatcactgggcgtcaagagatngatggtatactgagattctctggtagtcatcagccagataaacaaggaatgggatcgttcaagtgattcaatgggaaaatactgtgctgccgtccgaaagctggaagataaattcgagggtctggaatttcatcatatagaaagagatcggaacacggcggccgatgtactgtccaagctcggatccggacgaactcangtcccaccctgagtcttcgtgcaagaaaatttgcagccgagtatctcaatggatcanacagaagaatgcaatattattnnnatcactcgagttagattctgacgactgangaagaccgattattatagttataaagaacgaagaagaaccagacgacananactcggcagagcgcattgccaggcagtcggctcactatacactcatt

SEQ ID NO: 78110 - DNA, 419 bp, Zea mays
  unsure (1)..(419): unsure at all n locations
cacttacgcgagcctaatgatacccttttgtttgagaagtttgaatggtaagaagaaactgctcagctactaagaaccccggtcgtagtgcctgaacaaagggagaagatgcctggaaaagagaacgagcctgccgaagatgcttcggaagaaggaaattntaactttcaaaacataattgggcaagaattgtcacaggcttgaaaagaagagctaagggactatgtcatatcttgcgggtaccagccaggggcgctgctcttcngtggtgtcgccgaagagagtttaggatgccttcgggaccgagttggagcgaanggtgtcagcactttatcgaaaagtgttggttttccgaagttcgagccgatctcagcagatactgacgacagcatatcatcggtagccttgtttattctaac

SEQ ID NO: 78111 - DNA, 488 bp, Zea mays
  unsure (1)..(488): unsure at all n locations
ctaagctgtctttaaatttagaataaatngataactccaaaaatcataaaactnnttgatttatctcaatatgataattaaaaccttcgggtaaaggttgacatggtttggacattggtttatcccacaccctagctttctaaggtagaatntgcctgaccctaatagagtactaactcaaggaaactttagtgactcaagtgtaccgtaaaggaagttgtattcaaaatacaacttgatgtatctctattataactacatattcatagcatcacatgagcattcatgtatatatatnggtatgtatagaanacgaagaagaagtgagtgtcgaagaagaagagactgcaccaccaactgagactccacctgtcnggaacaatnnttatntcgatatctatggaatagatcccgaatccnctacaacacaaggcaagcnccagtgcatntaccttttccttgtgatntanactctntatcacttgaat

SEQ ID NO: 78112 - DNA, 155 bp, Zea mays
  unsure (1)..(155): unsure at all n locations
gtccacggtccactccacacacacgcaccacgtgcactagcaaatgagtctgggaaatatgcatatgaatgatatgtctttggatgaccctacttagtgatntgtgtaccaggtaggttcgcactctctactgtaagttactgagaaacattact

SEQ ID NO: 78113 - DNA, 251 bp, Zea mays
cgcaccatcccggcactttcgaagtggacgacactgctcgacaaacaaacgacaccaagtatatggacgtcttgcccagctgttcaaaaaatcagatatacaaactctgctcagctcaacctggctttccggccacacaaatattacctaaatgctcgagaagtataacaaacccaaaattacactcccacaactgccaggaacgatcacttaaaacttaacacccactattttaggggacagcttccctc

SEQ ID NO: 78114 - DNA, 289 bp, Zea mays
  unsure (1)..(289): unsure at all n locations
actcagcttggcccacctgcaggctcgcatnctncnctaaggtgggcccggtggccactatcggtaccctgtatctanggtaccccttactactggataaggacgcaatacccacacggctatctttagtcgcatggtaaaagagctatatgtgggaccaggccatgacttgccccagcctcgagcgactactttgggccagcaacagcgcctgaccccaccacatgggcgggtctggagccaccacgtgtccagagaaagtgatatacttcaaggcatcaacagtgag

SEQ ID NO: 78115 - DNA, 498 bp, Zea mays
  unsure (1)..(498): unsure at all n locations
actcagctgagtcgttcttctgcnaggataattgatgcataaagaagcgatgatgttatgattctcattcatgaganacaaaagggcggcaaggcaaactattttagaaaagatgatcaaggcgttgtatggnttaacaactgcatagttgtgaccaagagtgatgagggtcgccagcaaatcttagatgaagcacatcttagtcgttattctattcatcccggaagcactaagatgtatcatgatctatagcaacattattggtggaccaagatgaagattgaaattgcacgctatgtggcgagatgcgacacttgcagacgtgtctaagccatacatatganactactggtccattgcaatcattacctattccaacttggaatgggaagaataagcatggacttattgtggactacccagacggcaaaagtatgatctatttggtatcttgacgactaccagaagccattttgcgtcaacaatatcagtgtgctt

SEQ ID NO: 78116 - DNA, 457 bp, Zea mays
  unsure (1)..(457): unsure at all n locations
aggngaaaaagaacactaactcaagntcttttcttgcggagtgttgcttcactcaaatgagatttaactngaagcaacaccaaatgatatgaacaaagaatagtgcaagagaacttatagtaagggaaagcanacanatcacaatcaaaagcacaatgaacacgggtgaattggtttaccgaggatcggccctctaaggcctaatccctcgtgaggagtccacttaaggacgaggtcttttcaaccctatccctctctcccgatcacacaaggatcggcgagctcttcttcttctcaaggatcactctcgatcccacaaggaccaccacaatcttnggtgtctcttgctagctttaccaacctccaacactttggacgaagttcgaatgggagtcgaaaactccacgcgcatatgaacacatagatgtagcacacactatctctcaatgaatctcac

SEQ ID NO: 78117 - DNA, 314 bp, Zea mays
  unsure (1)..(314): unsure at all n locations
gctttgctcattntaccgacaccagattcggggagcaggctgcgtccttgacgcctggttgctgtgttttacngntactcgaaggtaatggttatgacctacctgaagagtaaagataaaagaaaccatgagttagttcataatctaactctctctggtatgtcagggaataggcgtgtagattccatttgtaaggatccctccacaattgccgtctgttgctggagagggaaggggaccattaacgttatggtttctccctcggataggaaggatctccttgaaaggatggcgtatcgaattggatgatggat

SEQ ID NO: 78118 - DNA, 387 bp, Zea mays
  unsure (1)..(387): unsure at all n locations
tctanagggagagcacattctaggattaacaaatgttcatttttgataattacaggatttgtatcgcatgccaagcanggaagcaatgtggtgcccatcatccacataagaacatcatgacaactaactcagcaacctttgcacttacattatgcaaactagttcatttatgcatctctatattctgcttggtttgtggtggcatcaatcaccaaaaggggggagattgaaagggaattaggcttacacatagttnctaaataattttggtggttgaattgaccaacacacataattggactaactagtttgctccagtgcataagttatttaggtgccaaaggttcataacatgccaattaaaaagacccaatgtgggttcaaaat

SEQ ID NO: 78119 - DNA, 478 bp, Zea mays
  unsure (1)..(478): unsure at all n locations
tctanagggagaacacattntaggactaacannatgtcattntgagaaagacaggatttgtagcgcatgccangcangaaagcaaagtggcactcatcatccgcataagaacataatgacgaccgacaggccactagagctcctacgcatggatctattcngcccgattgcttacataagcatcggcgggagtaagtactgtctagttattgtggatgattattctcgcttcacttgggtattctttntacaggaaaaatctcanacccaagagaccttatatggattcttgagacgagctcanaatgagttcagcttaaggatcaagaaaataagaagcgacaaccgaacggagttcaagaactctcanatcgaaggcttccttgaggaggagggcatcaagcatgagttctcttctccctacacgccacagcanaatggcgtagtggagaagaagaatagaactctattggacatg

SEQ ID NO: 78120 - DNA, 298 bp, Zea mays
  unsure (1)..(298): unsure at all n locations
actagcttgcatacattctagtaccatggttcnggtttggacctcctctctttatttttcactgaatacatgcatgagtacagtaggagttaggcctggtacactgngtgtacatgacgacctcttgcgatatcatgccacactaccttatgttgtcgaaatagccataataccattttaatataccaatgcaacattacgaattttaccataaatggtctcccaaaatcaagatgtattatggctggaacatatgtggtgtggatatgaccttagtcatatcaaggcacaaaccccc

SEQ ID NO: 78121 - DNA, 247 bp, Zea mays
tgaaattgtattgagccatgataagggcttcacggaccttcacgcatactttgcaggaagccaccacaaacgttggagaagctgcttcagaagatggacgaatacattcgagctgacaatgacttctgtcaaagaagggaataagcattcatgttctctgaaatgacccagggcttccgaggaagaattcacccgaggcacgttacgtcgattcataactctgctcacactgatgatcgagggagtc

SEQ ID NO: 78122 - DNA, 176 bp, Zea mays
  unsure (1)..(176): unsure at all n locations
agaattggagaaggtgttgtatgcttgtntaatggcttccaggaagcttcgacattatttttaggcataccatataatngttccttcttcacagcctttgaaggatattatgagaaacagagaagctactcgaaggaatggaaagtgggctgcggaactcaatgagttctgcattg

SEQ ID NO: 78123 - DNA, 189 bp, Zea mays
  unsure (1)..(189): unsure at all n locations
acccaacataagacttncctagttatttagccaagaccagagccatgatagttctcatggtagcacttgtttcccgggtggtcactccatgatccaattaatatgccataatccttgttaaccatcgggttaacaacaataattgtaacttaccatttcgaacattaatatcataaacgggagtgactg

SEQ ID NO: 78124 - DNA, 506 bp, Zea mays
  unsure (1)..(506): unsure at all n locations
ctcagcttgacattgtctncctgtnggaagccaatgccatccttaatgccanngtgtctctcattttatagcttacttctagcacatgtcaattgttcattttctatctcatgctcattaattttactagttagttgtgctatgtgatcatcttcgttgttaattaaagctaggtgatcatgaatagcatcaacattaatatctctacatctcatgcacatagaaacatgatcaacagtggatgtagagggcttgcanacatttaattcatcattcttagcatggtaaatatcattctcatttctaagaatggaaacaatatcatggcaaacatttaaattcttagccttagtaattacgttatcattctcaatcttaaggctagacattgattcattcaacttgccaatctagtaattaaactagcattatcatctctaacgttgacaagagaatcatcacaaatatttgagttctcaaccttagcaattaattagcatttcaat

SEQ ID NO: 78125 - DNA, 384 bp, Zea mays
  unsure (1)..(384): unsure at all n locations
aaagcgaaacagatactcatgacactagagagcaacaaagcagctgaaaggttgtagagctcgagagacgaatatgtattacttaatgattcttaactttgttgtttacttttgtgactttgaactgatttacgttntctaccgcagctgaactatctcctcccncagagcccttcgagtcactggccgaagcagaggcaaaggaatcatcacaaattttaacatggctgaactattatagacgaagtcgntacccaactgctgaccgaagctgcagataaagttttgaaagaagagaaatagtattgaataacattgtagatattaatgtaacattgctgactatgctngtaatatttgtgctatgggttngaatgaatatat

SEQ ID NO: 78126 - DNA, 411 bp, Zea mays
  unsure (1)..(411): unsure at all n locations
aagatgtttctaacatgctttcataagtgcatatactgtcatgagcatcacacttatactatgacacaatgcacttcacattctctatgatatagacatgatctcattaacctaattatgtgcactcgtcatttaagaccaacaattngtattcctctcaaagcacatatttagggagagcaatctatattatatagaattggttaaagcttaattgacatatccttctaatcatgtctctttacttttggacacttgcatatttcctatctctattgtgcaaggctaagactaatatgttccatgagtatttatgattaagtctagattgaaggaaatggagattcggaaaacatcgttccactcactccatggtattatcactcttgctggtatgcgccatcttcaatt

SEQ ID NO: 78127 - DNA, 420 bp, Zea mays
  unsure (1)..(420): unsure at all n locations
acttagatactaagcttgtggagaaggaccaattgaccttgtcgtatgccttctcaaagtcgagtttaatgtctacgccatcaagcttcttcctgtgtaactcgtggaccgtctcgtgtagaataacgaactcctctataatgtttcttcctgacatganagcagtttgagaaggcttaatgactttntgtgctactagagccacaccgttcgtcattaccttggtgaaaatcttaaagctcacattaagccggcatanaggtctaaattgttgaatttgtntggcctctctttgcttggggagtcaagtaattataccagagttgagaattgatgttatgcattggggtacctggaacaatgtactttgccttgactgaaacataactgatggagcgaataattgtagtgattaatttt

SEQ ID NO: 78128 - DNA, 463 bp, Zea mays
  unsure (1)..(463): unsure at all n locations
ttacatatcagttaataaatgaattggagaatatggatattggatgtctagccatcttntatgtcagatgaggtacgattatggcaagttganggtgtagcaagggtataataaggaaagatttcatcctanactctgggtcttgattcctctcgcgatccaacttgatctttgaggacttgagttgatgtttgtcctcctatgacgtggttggtcttctttggccttcatcgttagagttgccatctgtgttaaagacatatggctaaggtagttgtatgtggtctagtctaaattggaatattagtccaacttggataanacatatttatanggtagatctgatcaaattagatgggatcatgatttanattggtataaccagatcagactanataagatctacttnaattagtttgggataggtcatgtnntgtactctagtgtgggataaatatgctta

SEQ ID NO: 78129 - DNA, 484 bp, Zea mays
  unsure (1)..(484): unsure at all n locations
ngcctgcatagatcttttagaggcatttgaattatctttgtaanagacattataatcaagaattgaacatcactctatatattngntcataccttgtaatatattnntaccttttctttcatgtgtaaattgctntgctgtggacaaaacttataccttttgagccgaaggcgaagaacaccttcccttcttttcgtacacaatgaagcatatcttgcttctttatgctcatcgaagcattgatatcaaagtcgaagtatctatttgtactttatgttatgatgatgatgatcctacgaatgtctacatgaatgtgtatgaatgcaatgaatgattgtatgtaatgtgcaaatgaatgtccaaacacacgcacacgaagccacatncagaactctgcatcccttanngaacgtcttttgggtcttaagctctgcatccccttangaacatctttngagattcttcaccttctattttggtggat

SEQ ID NO: 78130 - DNA, 188 bp, Zea mays
tactatacgctcacacgcccgaattggaggtccgtctgtcttgctattgtatctaccacaagaacgcgttttcagaccttcgttaagcctcatcatgtccatctggatcgtatttaaacaataatctgcagggctactatgggaccttctctcaacgcctcaaaagtattaacaagcttcacatgcta

SEQ ID NO: 78131 - DNA, 189 bp, Zea mays
  unsure (1)..(189): unsure at all n locations
ttaagggacactctagactacaatgtcatttgagaagacagattgttcnctttgcaagcacggaagcacgctggcactcatcatccgcataagaacataatgacgaccgacagaccactggagcttctacacatggatttattcggcccgatcgcttacataagcatcgacgggaggtagcactggcta

SEQ ID NO: 78132 - DNA, 503 bp, Zea mays
  unsure (1)..(503): unsure at all n locations
acggatcaagctcattacgaaagacgatctagcaccgcgaaggtgctactgtgngcctatgcttcgncgccgaaggtcttatatgaagaagcggtcttcgactgaagcttgttgtataatatggccgacagtttctcttcgtgaagcttcggcattacaaaccaacttatagatagaatgaccttctagtccataaaggtctgagtcaatgttgtaagcttttataaggggcatacttgtaattcctcacaggctgcgtcctgtgcctatanatagtgaacattattcctttactgttcacgcattctattaattgcaatcgcatattctggattcaacctttgccaaggcagaggtattattgtattcaatgattcaatatactaagtaaatataatatacttcgtctatgatttgattacccctcttgtacctcttatcttatgtcgcttacaatatctattgcaatttattaccaagacttaagcttcgcaattatactc

SEQ ID NO: 78133 - DNA, 195 bp, Zea mays
  unsure (1)..(195): unsure at all n locations
actcagctgngacccatgtgcattttgtcgacaccacacagacgcgaggtatggcacgtgccctgtgantatgaatcatctncaaaacagctgtagcattcttgccaaaggcttanggtgctgcctaagaacagcttgtccagattgtccttctccgggaataggcttcaaagtagacgaacactgacgtggcga

SEQ ID NO: 78134 - DNA, 505 bp, Zea mays
  unsure (1)..(505): unsure at all n locations
gcttccccagcagttcacctttactgctagtgccaccagccaagggacctccttgtgcattttctccctgctatggatggattagtgaagagtccgagtctgagagcgaatcacaggatggagaaatgctttccgatgtaactgggcctggtaatttcgccaaaaaagatataccacatcctgtgggaacattgccttctatgaggaagtgacctagtagatgggatgtgcacaccctagctggtaatgattctgactcaccctcgctcttctctatgtaatttcgtattgctgacacaattgtcgtgagtcgtgacaagtccgtcatttctttatgtgccgctcggttggttgggattggtgggttctctcaattatataaactntgattagctggaacgatttcgggtgcantccggcacanacaaacgaggcccttacagtacaaagttttaaccgacactaccatatccacttaacatgacgatnncatgtatctttattt

SEQ ID NO: 78135 - DNA, 344 bp, Zea mays
  unsure (1)..(344): unsure at all n locations
gagcgccagagcacaagaagattgcctttttatcatacattagaggatccaagcactatattctctatgtccctgggcccacttgtcggngcccagtccttttgtgcattgccccttcaactataaaaggggaggcatacgacgttacaagaggaggctctcagacctatctctangcagacactcataagttcatacaagctcccaagcaatacatcacacagtggagtagggtattacgctccggcggcccgaaccactctatacactcgcgtgctctcttgtgttgatccaccagcctcgtaacaagcaaaactcttaggcccctcctctctttatgatta

SEQ ID NO: 78136 - DNA, 315 bp, Zea mays
  unsure (1)..(315): unsure at all n locations
ntattcatcaagcagatggccagatacatataanaggacanatatcttaatagttcatggtcacgtccattcaaaggacgaggcacttacataaaagaaacaccatatagcgaaagctgctcaccaaaacggccggctacatacgtagctacactacgcgtgttcgtgcggatgcacgtactcatgcatgcagaggtagcagagctagctagtaagcacgtacgtacgtagcacatgataagaaattaagaaggctgcattgagacagtaagacgaagaatggcaagcagaagagcacgtcggcatgctccccgc

SEQ ID NO: 78137 - DNA, 292 bp, Zea mays
  unsure (1)..(292): unsure at all n locations
gaaacaagttggtgttcatcatccacacaagaacatcatgacgactgacaggccgctcgagctgctccacatggacctattctgcccgatagcttacataagcatcggcgggagaagtactggctagttattgtggatgattattctcgcttcacttgggtgttctttntgcaggataaatcacaaacccaagagaccttaaagggattcttgagacgagatcaaaatgagtttggcttatcgatcanaagattagaagcgacaacgggaccgggttcaagaacttacaaat

SEQ ID NO: 78138 - DNA, 431 bp, Zea mays
  unsure (1)..(431): unsure at all n locations
tctanacggagaacacgtgataagttcgactaacgtgcaattctgaaaatatagaccttgtgcagctngtcaagcacgtaaacatgtgggaggagcacatcacaacaagaatgtgatgaaccacttcaagacctctggagctgntgcacatggacctcttcggacctgtcgcctatctgagcatangaggaagtaagtatggtctagttattgctgatgacttttcccgcttcacttgggtgttcttcttgcaggataagtctgatacccaatggaccctcaagcgcttcctcaggagagctcanaatgagtttgagctcaatgtgagaagataatgagcgacaccgggtccgatttcaagaactctctagtggaggaattccttgaggaggaagggatcnagcacgagtttctcgctcctacacaccaca

SEQ ID NO: 78139 - DNA, 249 bp, Zea mays
  unsure (1)..(249): unsure at all n locations
tgttcacatcctctaacattctcctagccttcaaaccagcaatgagcctctcgagcatctcatctatatgtacgaccgcatcggtgattgagggatcgtcatgacccacctggtgcccctggtgatcaggatcctcaaagtacagcgtcatgaactgtgngcattggttatgcgggagatcaaaatagccaaggatggtgtcgaccctctcctcaaacggcaccgagccattgtagtggcggcagtact

SEQ ID NO: 78140 - DNA, 232 bp, Zea mays
  unsure (1)..(232): unsure at all n locations
ctcgctcggcagtgatacaacgcgaatgcaaaccttgttctgcctaagacaggctatcagactatgcttagggggcgttgcgaaaatgggaatgccacagaaaccgctaaagatgccgaccaatgtggacttgtcacggttaagtacacttttaaatttgaagataaattcatgagccagagatgagtggttgaaagcattgaaatntaagtgatgagctgcttggacatac

SEQ ID NO: 78141 - DNA, 269 bp, Zea mays
  unsure (1)..(269): unsure at all n locations
ctaagctgacttgctnctgttgaaccatgcatcctatgccggcgcttgagcgtccatccttggatcaagtgatcaatctatcccaaagctgtatacatcttactcaatagtacagagtctgaatatgtggtacattccgggatacagctcgaagtgaccgaacaaataagtgcgtggagacaaatagcccatgcacaggcagaactgggtgaagacacagccccattcataagcatagcagaaaagaagtcttcagctgctgaaaacat

SEQ ID NO: 78142 - DNA, 224 bp, Zea mays
  unsure (1)..(224): unsure at all n locations
attttcgggtcgtgcccgggcctcanntttcngctcgtgcgccatgggcgaaccttcattttctgccgtgcgcaaggccgaacagccattgccgccgtcgcctttgcgcctcgtgccgttnatcctccggtccgccatgccctttacccaagacatacatattaccttcggtgtctttccacacgcttggacttagcttatnttcggggccatgcgcgaacctc

SEQ ID NO: 78143 - DNA, 438 bp, Zea mays
  unsure (1)..(438): unsure at all n locations
tctanagggagaacacgtgatacgtctaactaatgtaactctctanatatatagacctttgcagcttgtcagcacgtaaacaggtgggaagctctcatcataccaataatgtgatgaccacatcaagactcttggagttgcttcatatggacctcttcggacccgtcgcctatctaagtatatgaggaagtaagtatgggcttgtatagntgatgatttctcccgcttcacttgggtattacttntgcaagatataactgaaacccaagggaccctcaagtgcttnctaaggagagctcaacatgagttcgagctcaatgtgaagaagatanaagctgacacgggtcaagttcaaaaactttaagttgaggagtaccttgaggangagnggatcaagcacgaagttcttccttcctacacaccacaacnaaatgttgt

SEQ ID NO: 78144 - DNA, 355 bp, Zea mays
  unsure (1)..(355): unsure at all n locations
cggcttcgaagacagtgagtacgctaaccatgtctattagctctctaaggcgctttatgggctcaagcaagccccaagagcatggtatgaatgccttagagatttccttattgctaatggattcaaagtcggaaaggccgatcctacgctctttaccanaacactcgagaatgatttgttngtatgccaaatttatgtcgatgatattatatttgggtctactaacgaatctacatgtgaagagtntaatacgatcatgacacacacactcgagatgtcatgatggtggagttgaagtatttctatgatccaagtaagcactccaagaggcacttcctagccaacgaagacacta

SEQ ID NO: 78145 - DNA, 213 bp, Zea mays
tatgtgtaattgtatgactattagaaactattccttgggacctaaagatcaggttggcttgcgtttgagatgcgcttatgcttctttaaacaagattgtatgacgatcccggtgtacacatgccacagcggatgatgttgcggaaacacattgtttgacaaccagttcaaagagccaggttttgctcccccatgtaatacatataagtccagg

SEQ ID NO: 78146 - DNA, 224 bp, Zea mays
tgctgactcatatcaacaagccgagaaatggcttctgtagttttgttgtacaacttgcttaccgaagattgaatctcggtggtagcttccaccagtggccaaccggtggaaaatgagtggttttatgttatggcccacagagaagacgagggagaagctcaagacgctagtacttgacccgttgagcttaagcttcgagttgactatggcccctgtgccgcatg

SEQ ID NO: 78147 - DNA, 458 bp, Zea mays
  unsure (1)..(458): unsure at all n locations
tcctntaaccncganacgcgatatacccttcattggtganactntcaagtagacataatcgcctaccagaaagcataaggggtgtcgtcgtcggtctgcataactctnttgtcgagtctgagctttcttcatattatgaataattttctgaaccttttcttcgacctctttcaccatatcaggcctaaagaagtacctttctccaggttcagaccaatntagcggagtacgacatcgtcgtccatataaaacttcgaagggtgccatcttgatactttcttgatagctattattatatgagaattccgctaagggcanacattcatcccatttttgtgngaaatccagaacacatgcncgtagcatatcttccagtacttgggttaccctctcagtctgcccactggtttgaagatgataggccgaactgtggagcaacttagtacccagggatttat

SEQ ID NO: 78148 - DNA, 450 bp, Zea mays
  unsure (1)..(450): unsure at all n locations
agaacacgtaataggtctaactaatgttactttctanaaagatagaccttgtgcagctngncaagcagggaaacaggtgggaagctctcatcatgccaaaaatgtgatgacaacatcaagaccccttgagttacttcatatggacctcttcagacccgtcgcctatctgagcatangaggaagtaagtatggtcctgttatagttgatgaattttcccgcttcacttgagtattctttttgcaggataaatntgaaacccaagggaccctcaagcgctntctaaggagagctcanaatgagnttgagctcaaggtgaaaaagataanggagcgacacgggttcgagttcaagaaccttaaagtggaggagttccttgaggaggaanggatcaagcacgagttctccgctcctacacaccacagcanaatggtgtggtagagagaaagaat

SEQ ID NO: 78149 - DNA, 460 bp, Zea mays
  unsure (1)..(460): unsure at all n locations
tccttttagctattactatgtaagagtagaatcctganatttatatatcaatgtgcagacgagacaattttttgttcattctatacggatgctctaaactgggcattttcctgaaggtttgaatttgattgtcaacttttagttttgatggcaatctagtcttaattgtgttgtttattccatcaagacagcacggcccaaatgatttgatttaattaccaaactgttttgaaacaagttatgttntgcagtattgttttggtatgtactcctcaattnttttctcttcctgttcttgatcacatgtgttacatttgaaattcgttgttatccttagtaatatggattggtttggcttgtgccacatttacatcttgcttattgcatgcaaagctatcatgctcatcgcattggtatgacacacaatatgtacaccagcataaacttggatggaattcat

SEQ ID NO: 78150 - DNA, 479 bp, Zea mays
  unsure (1)..(479): unsure at all n locations
tcttcaccatgtgatgacgggtatcttgagaacgttgggcaatgtattccccttatagttgggtcaagctcatctttagcctttcattttcttctttgagcttttgatatgcatcatcatttggtcctgcgaattctagctcaaaagaagatttgcttgtcgacggacaacaagcattagcacatggtaatatagtatcaatatgaatacatgtgcatgagtgaggtttgtgggattctaaattttctatcacaacctcatgagcaacgtttaatatgatatgatcatctctaagattctcatgagagcataggagcatgcatatcatatttttcttgaaaagctagattntcaatctttagcttttacacttggtctttaagcaaggtattcttatatactgattgagcgatacaatgttaagcgttatcttgctcaattganatagtttcatacctttggaccaaactgacatgaga

SEQ ID NO: 78151 - DNA, 491 bp, Zea mays
  unsure (1)..(491): unsure at all n locations
cggacaaggtanatntcttactccccctgaggatatatcttctgtctcgtttgaattctaaatatggatttggaagtagcattaaccttgtaatggtaaaacagctcaaagctatcaatctttcgttagttagataagtagttttgatcacatcgtcttgttccattgatatcatggatactgccagtggacacttactgtatctatgaaattgatgtaaagttgtgagtgcttggtagtgtcttcacttgcctataacgaagtatttcgaggctgcgtatctgtttctgtttgtcgcagaataatgcctactccgtgtagatatagatatgaccccaagcgatgcttacatcggtataaggggctatgatgtttgaaaaacatgctgatgattgagtaaattctagcttggagatcatactgttctttctcgcctctttgttgacattgccaagattgaaaataacgctcattaactattgtgtcaatgc

SEQ ID NO: 78152 - DNA, 353 bp, Zea mays
  unsure (1)..(353): unsure at all n locations
catctacggcttgtctaacctaattcacataaccgccaacaaagcaagtgaagaagcttatctcgggcttcaacttgacaagccttagttttaagcttntagtacttaaattcctacttactatgcaattgttggttgttgagatatgcatgacgcactacacttagggggagtattcaaaactcaaatctttcatgacaacttctagtgcaaagaaaaaatgcaaatctcaccatttgcctattttgtctaaaaagtatctagcctatggcaaaatattttgaaagttatgagaaaatatatgatggtgccaataccagtcccaacaggtattcttttgtgtgatataagtt

SEQ ID NO: 78153 - DNA, 278 bp, Zea mays
  unsure (1)..(278): unsure at all n locations
agtcttctggaaccttatttactaatccggctgtgaatagcaccaccgcatgtggcgcgaccggacatcatattgccagtctaaacactatgtgggtcctaaaacctgaaccaccttgagctctcttacggttcacgcgggcgaaacgctcgagtagcgacccgtcgatgggcggaccccatacgctcagtcatccagttgaacaggtcatccaggtgcgacgctcttggatatgacacgccacanactaacgacatattgcgatcagaattggattg

SEQ ID NO: 78154 - DNA, 280 bp, Zea mays
  unsure (1)..(280): unsure at all n locations
actatgtgtttaactgtcaaaggcgccttatgggctcaagcaagccccaagagcatggtatgaatgcctaagagatttccttatcactaatgatttctaagtcggaaaagccgatcctacactctttactaaaaccattgcananntgatagttgtatgccaaatttacgatggtgatatcatnattgngtctactaacaaatctacttgtgaagagttagtaggataatgattcacaattcgagatgctatgatggggagttgagtatttttatgattc

SEQ ID NO: 78155 - DNA, 503 bp, Zea mays
  unsure (1)..(503): unsure at all n locations
attaggaactataaaactaagcttctaagggagagcacattntaggactaaccaatgttcattttgagaaagacagggattgtagcgcatgccaagcacggaagcaagttggcactcatcatccacacaagaacataatgacgactgacaggccactggagctcctacacatggatctattcggcccgatcgcttacataagcatcggcgggagtaagtactgtctagttattgtggatgattattctcgcttcacttgggtattctttttacaggaaaaatctcaaacccaagagaccttatagggattcttgagacgagctcaaaatgagttcggcttaaggatcaagaaaataagaagcgacaatgggacggagttcaagaactctcanattgaaagcttccttgaggagganggcatcaagcatgagttctcttctccctacacgccacaacanaacggtgtagtggagaggaagaatcgaactctattggacatggca

SEQ ID NO: 78156 - DNA, 458 bp, Zea mays
tcagcagaatgaccgccagggtcttcactcccaaattggcatgaatgtgctaacatatgttgatgatatcatagttaaaagcacaaagcaagaaaaccatgttgctgatttgcaagaaatatttgccagctttagacaagctggtctcaagctaaatcccaaaaatgtgtcttcagagtgaagaagggcaagtttcttggttgcctggtatcaacaaaaggcatcgaagcttacccaagcaagatcgaagctatccttgggatggatccaccaaattcaaaaaaggaggctcaacagttagcaggaaggctggcatcgttaaacagattcatttcaagatcagcagagagggaattacctttctttgaaatactgaaatcagccgaagtcttctaatggtgtctagctcaacagagagccttctaagagctgaagcagtatttgatagatctaacaac

SEQ ID NO: 78157 - DNA, 449 bp, Zea mays
  unsure (1)..(449): unsure at all n locations
tgtgaagattcttcatcccaacatgggctagtcggcggtgctctagccaacccatgttagtcttagcaattaagcaagtgtcgagttcagctctatcaaaatctaccaagtatagctgaccctttaacattcccttaaatgctattgaatcatcacttcttctaaagacagtgacacctatatcagtgaatagacagttgtagcccattngacataattgagatacagaaagcaaattgtaatctaatgaatctacaagaaaaacattggaaatagaatggtcaggagatatagctattttaccaagacacttgaccaaaccttgatttccatccccgaatgtgatagctcgttggggatcttgtgtnttctcatatgaggagaacatctttntctcccctgtcatatgggttgtgcacccgctgtcgagtattcaacttgagcccccg

SEQ ID NO: 78158 - DNA, 281 bp, Zea mays
tcttggtcccaggtgccaccaccaccactcgctagtacctgtcttgggtcaccgttagcagccataacggaaacgccacactcagtagcaacgtgacctttgggaagagtccgaagctcacccattcgatagcactgtgcctgaatcaaagcacatatactcaagaagatacactgttgccactaaagaatatagtgatctgatgcatctcaaacactgttgcctttatattttcttgcacgaaagacaattcccgaagaattaatatgcaatatgatgta

SEQ ID NO: 78159 - DNA, 381 bp, Zea mays
  unsure (1)..(381): unsure at all n locations
actcagctttgatctcttgcgtgcaacttttgtcaacatggtcagaattatcttcggaatcagctgtgagaaccgcccttcttataccctctgccttcaactttcgaagaacccaaaacaaagcttcctattcagcaatattatttgtacaactaaagtcaagtttcactgcgtagcatgttctgacgttggaaggtgcaattaaaacggcagctgcacctgccccgaaggttcccaggaaccattgcagaatactgtgcaagctttggcatctttagttgcttcttattcctgagcccctggcgtacagtcagcgatgaaatctgctatcgcctgggactgaatcanagatctatgcacataattgatgcagaactcatt

SEQ ID NO: 78160 - DNA, 180 bp, Zea mays
tgagcttcggatgtaaatggatcatcaagctccgtgatcttcctcgagccttcgatcatgcactcaaaacttacaaaatgcccgattacttcctcgggggtcattttagtatatctaggattaccacgaattaattgaacttgagtagggttaaggaaaataaaagatcttagaataacc

SEQ ID NO: 78161 - DNA, 435 bp, Zea mays
  unsure (1)..(435): unsure at all n locations
tgctggagtagctggtttggtcagcgaagaaagcttccaccctagtgggtggaggatttgggggattcatctatgattctagattaactgttgtccttgttcgaccatctagggttagagatagataggtaagatagatttgcagataagacaaatagttaggtacaagacacatgacttttaggttgagatcttttgggtcacaatagctcaattgggtaaagtaatcctaccaatcattattgcactacttctatgttggtacatgctagaatgtacctactatactaggttntattgtggatataatcccacaaatatttcaatcaatcaaagaagtgaatcaacagttatcataagaacaatcattcaagtgcctaaatgcccgactaaatagtttttctaagatttagtctctatctattagagaatcat

SEQ ID NO: 78162 - DNA, 493 bp, Zea mays
  unsure (1)..(493): unsure at all n locations
accttgaaactcagcttctaagggagagcacattntaggactcacagatgttcatgttgagatagacaggatttgtagcgcatgccaagcacggaagcatgttggtgttcatcatccacacaagaacatcatgacgactgacaggccgcttgagttactccacatgaatctattcggcccgaacgcttacataagcatcggcgggagtaagtactgtctagttattgtggatgattattctcgcttcacttgtgtgttctttttgcaggaaaaatctcagacccaagagaccttatagggattcttaagacgggctcataatgagttcggcttaaggatcaaaaaaattagaagcgacaacgggacgaagttcaagaactcacaaatagaaggttttcttgaggaagagggcatcaagcatgagttctctttctcctacacgccacaacaaaatggtgtagtggagaggaagaatagaactctacttgacatg

SEQ ID NO: 78163 - DNA, 478 bp, Zea mays
  unsure (1)..(478): unsure at all n locations
tcgtccccattatgatgtaatcattgatggagtcagcaatgctaccgttcataagcatatgtagggcgactctgcacttctggtgggagagaattcatggttgactgcatcggttcaaagagtgaagtaaaacgagtgctcatctaacctctccaagatgtgaaggaagaggctcctccgcatgcagtatcttcgatgaaagtagagcggtgggtaaacgcatgggtcgttgcagtagtcttgcatcaactgtttgtgggcggcttcacgattctagtcgatgtacctctgacgttacctcagttgcctactcgacatggaagactcgacaacaacctctgtcacctactgcagcaactgcaacaactcttctttggtcatgttgatgtccgagtcgaacgaagacatcatgacaacagatgattcanaggatactactgtatgaggagaatgacgatgtgatataaatatttgaagt

SEQ ID NO: 78164 - DNA, 411 bp, Zea mays
tgagtgttgctcttatgtcattaacaatcttgatgaacacatggtctccaatgttcttatgttctcctcaaggttctaccacatgtgatcacagtcatcagtgcatagatgtgctctagccatggtaacacctgaggtgttacagccctccccccttaaaggaatctcgtctcgagattatatgcagagtcctctagatggtgctacgagggcacgttgatgggctactctctcttatactcaagtctctctacgtaactgctcttcgaatgtcattctctttgcaacttcagaaggaagccctttgtaagttaaattcacaacttagactatccttgatatctaagattttcttataattgtattcaaaggcatgtggcggtggggtttggggtacgtaccgacttcttg

SEQ ID NO: 78165 - DNA, 369 bp, Zea mays
aactcaagcttctaagggagaacacgtgataggtctaaccaatgttcaattctataaagatagaccttgcgccagctgtcaagcagggaaacaggtgggaggagcgcatcacagcaagaatgtgatgaccacttcaagacccctggagctgctgcatatggacctcttctgacccgtcgcctatctaagcatagggggaagaaagtatgggttagttattgatgatgattgttcccgcttcacttgggtgttctttttgcaggataagtctgaaacccaagggaccctcaaacgcttcctcatgagagctcaaaatgagtttgagctcaaagtgaaaaagataagaagcgacaacgggtccgagttcaa

SEQ ID NO: 78166 - DNA, 470 bp, Zea mays
  unsure (1)..(470): unsure at all n locations
tgacaatgaggaaatggcgctcgtcatcaagagctttcgccatatcctcaaacaaaggcggtggaaggactacaaaccccgctccaagaaagtgtgctacaaatgtggtaagcccgatcattttattgcaaaatgtcctatatctagtgacagtgacaggggcgacgacaagaagggaaagaggagagaaaagaagaggtactacaagaagaagggcggcgatgcccatgtttgccaggagtgggactccgacgagagctccaccgagtcctcctccgacgaggacgccgccaacatcgtcgtcaccaagggactcctcttcccaacatcggccacaagtgcctcatggcaaaggacggcaaaaggaagaaggtaaatctaaatcctccactaaatatgaatcctctaatgatgataatgctagtgatgaggagaataatntgcgtacccttttcgccaaccttaacatg

SEQ ID NO: 78167 - DNA, 434 bp, Zea mays
  unsure (1)..(434): unsure at all n locations
tagaaaaatctggtatgaatctgcgataatacccagctagttttagaaaactccgganctggtgaacagttgttgggggtttccattctagaatatctttgactntgctaggatctaccgcaattcctttagctgataacacgtgccccaaaaattgaatttcttccagccagaacgcgcacttgctgaacttggcatatagctgatgttccctgaggcgcgtcaatacaatccgtaaatgctgagcatggtcttcttcattcttagaatatatcaagatatcatcgatgaagactaccacgaacttgtccaattcaggcatgaacaccgagttcatcanataggtgaaatgggcgggagcatttgtgagcccgaaagacattaccaagtattcaaacaatccatatcgcgtagtaaacgcagtcttcggtata

SEQ ID NO: 78168 - DNA, 349 bp, Zea mays
  unsure (1)..(349): unsure at all n locations
gggctgacgacgtgaccactgctcctgcccgcctgccaccgccattactgtcggcctatttgtggtggtattgaccgtcacgcctggctggcactgctgggtcacacgcacggttgcctctagtcgcggtactggctccgcagtcgaggaggcgtggtantgccgcgagtggcggtgcagttgctcgcacgtagcaaccggcgcgccggttgcatgacgtgtgggcctgggcctccatgctgggcgcgttggagtcgaaggggcgcgcccacttggcgcggttgcatgccgactgcatggctatccaccctttcacccgctggtctgggcgaaagtggaggaatgcttg

SEQ ID NO: 78169 - DNA, 225 bp, Zea mays
actcagcggctaacggagaacacgtgatacgcctgtctacttacaattcgtaaaacatagaccctgtgctacttgtctggcacgttaacaagagggatgagcgcatcacaccaagaatgtgacgaccacatctagagccctcgagctgctacatatggacctattcggacccgacgtctatcttagcataagaagaagctagtttggcttaagtattgacgatga

SEQ ID NO: 78170 - DNA, 460 bp, Zea mays
  unsure (1)..(460): unsure at all n locations
tgtgatgctccatnttcaagcacttaacaaaggtcttcattttgcgtaactgtgcttgatgtcaataactgagttcctgccgggctgctagcctgtgggatgttatatgacccacagcctgctcacctcccttacccattagagttctagtagcattatgaataaatgtgcatccagttgcagttccaaaccatgaaactgaaacaattccttattgcgaagttcaatcatcagttaagcaaatccatatacatcatgcaaatgtcaagtgagacccagtacacaattgatgcataggagcctcatgccctcatgtaacattattggtcctacacatttagtacacaaaatattttgctcatacaactggttacatatcataagtattcatgacactggagtaatctgcattgtgtgagaatgctgaaacacatggatattccaccttgacttcatcttc

SEQ ID NO: 78171 - DNA, 354 bp, Zea mays
  unsure (1)..(354): unsure at all n locations
tctacccatctcccgacanacagatatctcnttgctatccggaagacagtacaaaaaatcttcctccccgctgccattgaacactaatgcctcgttcggatatttcagtttttaggcatagtgttgagcttctcgttcttcttctttagagagtctttttcccgaagcatgccggatgatatattcaatactttcttttaaagcttcgggagcaggagtggcaactttttcaggcaaagtctgctctatagcctcttcctctgctgctttctcttcaatttccgaagggtttttcttagcgggctctgaaggcccagcttcagtatcagcttggattattggagcttcaatttc

SEQ ID NO: 78172 - DNA, 436 bp, Zea mays
  unsure (1)..(436): unsure at all n locations
tggatctaaattntaatcattgtgctgctntacaccccaccagtccgatcatcttacgtaggtgtcacaattcatgaactatgtgagtaaggtacctgccacacaattgagcgatgatgatgtccagtagctacaacgtactctgcataagtgaagtcccagctgcagaaaatataggtgcgtcaggtgacttcgacgtcaggggatccgatccccaaatntacatgttgcctgtagtaactacaggcagatcgcccagacacttacctgacgaatcaaaattaaatatactagactatagcgtattctagtggttatcagcattccttcatgctcttaacgacacgcggaaacaaagaagcaacaagaccgccgcttacctgaaattcgtgacgcacacggatcgaatgccagcatctgtagctgccctacacac

SEQ ID NO: 78173 - DNA, 479 bp, Zea mays
tgtaccttgcctcaacatggcctgattggtgattggcgcgctgttttatcacgtctgctgacgcacccactgtcaatccaccttcggtcacgtcaactgccatatctgtccctgcggctgactgacccacggtccccacgcctggtggtttcgtcgggccacgcgcgaggcgcctcgttgctgctgcattggtttaaaataactttttgtcttctgcagcggccccaaggaggcgcgctatcgcgtgcggcggatcgctctttccgcacccaaaatccggcacacaaactgtatgacttgtggacccaggcccccgtgtcacagactggggtgcctatgtcctatgtgcccgtcgaacgggatttactgcggcgattcacgggcgcgcgggagagtttccctgaaaaaggattcatgtttccttgaaaaacggttcatccccgcgtgcagcagttaccttttcacattctcttccaatc

SEQ ID NO: 78174 - DNA, 467 bp, Zea mays
  unsure (1)..(467): unsure at all n locations
ttaagcttgtcgtctctgacttncgtttaagattcgtttacaacagaatatgtgttactaggtcactagaacaaagtggtggaagcttaaaggggatgtggcccaaactttcaaggagagagttatcgaggagggcccttgggctgaagagggagacgcaaacatcatgtggaggaagatggcaacatgcattcgagagatagcttcagaagagtttggtgtaagttcgggaaacagaagggaagttaaagacacttggtggtggaacgaagatgtccaaaaggctaccaaggagaagaaagattgctacgaacgcttacatcatgacaagtgtgcagacaacatatagaagtactcgatatcgaagaagtctgcacaaaagcgcggttagtagagcccggagtcgcctatgacgactcttatcaacggtnggacacaacgcagggagagaaggatatctataggat

SEQ ID NO: 78175 - DNA, 385 bp, Zea mays
ctcatctttcttcttcacaaacagggctggacatcctcaatgcgaagtacttgggcgaataaatcccttatccagcaactcctgcaattgcttcttcaattttgccaactcagcgggtggcatccggtaaggcctcttggaaattggtgtcgttcccggatgcaactctatggcgaattcaatatcccggtctggtggcattcctggcaattcatcacggaagacatctgcatactcacagaccactgagatcttcttcagaggtaactccatcatagagaaaccacatgactgagtagaaccttgactgggcagaattaatgtgaagttcccacagaacagggaattgatttccacgatgcggctggctacatcaagcactact

SEQ ID NO: 78176 - DNA, 270 bp, Zea mays
gctgagcttctggctctgccatttggactgggtttatctgtatactgacgccctggaatggccggcgggcaacatcatttggttgcgggtgctaccatagagatgcgccgagggaggaagtctgattatcttgtaatccctctcaaggacacccttaagagacggcacttggagtggattactgttgagaaccacggaaggtctctccccccacagtcatggagacagacggacgttcgcaccccgagttggacctgagtccccacagat

SEQ ID NO: 78177 - DNA, 367 bp, Zea mays
  unsure (1)..(367): unsure at all n locations
tgaataagttaanacaacactgcattatgcatcgaatgatagtgttgacccaaccaatcttctagtagtactatttgttgtgcacaagtgtctttgccttagtgaccaagtggtcgcattatgatccaatatattaccatctaacgattaaataaatcaactagcataagaccacaatatgatccaacatgactaatgtaggctagaggaccatccatgatgcttacatatgatggtttntaactagtagcctctttactctctatataagtactacccttattccatttggagctggtatttctcctctttggtgctaacaattatagagaggctattaaagaattggatagccacccaagaagaa

SEQ ID NO: 78178 - DNA, 413 bp, Zea mays
tggaggcgtctattggttgtcggcttggtgtagacttctccttcttttcttccgtcgccttgaatgcaacgggttgagcttctgatggctcgccaagctcgttgattttcctcgagccttctatcatgcactcaaaacttacaaaatgcccgataacttcctcgggggtcattttagtatatctaggattaccacgaattaattgaacttgagtgggatttagaaaaatgagagatcttaaaataacatttaccacttcgtggtcatcccacttcttgctcccgaggttgcgcacttggtttaccaaggtcttgagccggttgtacatgtgttgtggctcctcccctttgttaagccggaaccgaccgagctccccctcgatcgtttcccgcttggtgatcttagtaagctca

SEQ ID NO: 78179 - DNA, 408 bp, Zea mays
  unsure (1)..(408): unsure at all n locations
gtctatcatcttgcaaaggataattgatgctctaaaggattatgtgggtatgaagcacatacgggaaaagataatggctagaacagccaaatgtttcaaagaagacgatcaaggtgtgatatggttcaataaccgcatagtagtgccgaagaatgaagaactccgcccgcaaatcttagatgaagcgcatcttaatcgctattctattcatccgggaagcactaagatgtatcatgatctatagcagcactactagtggacgaagatngaaaatgaaattgcacgctatgtggctaagtgtgacacttgcagacgtgtcaaagccatacacatgaaaactgctggtccattacaatctttgccgatcccaacatggaaatgggaagatataagtatggacttcatcgt

SEQ ID NO: 78180 - DNA, 417 bp, Zea mays
agcttggaagggtcttcatcgctacatgtgctaagcggtgatgtcacagccagcccatgctagtcttagctattaagcatgcatctagaccggcctcctcttttgcaaaatcaactaaataaagtttgtcgtctagtacacccttaaaagctagtgaaccatcacttcttctaaagacagacacatctacatttgtaaaaagacaattataacccatattgcataattgactaacagatagcaaattatatccaagagactctactaaaaacacattagagatagagtgctcatttgagattgcaattttacctaacccttttaccttgccttgattcccatcaccgtaaataattgaatcttgggaatccttattcttgacgtaggaggtggaacatctcttctcccccgtcatat

SEQ ID NO: 78181 - DNA, 331 bp, Zea mays
  unsure (1)..(331): unsure at all n locations
ntacttanattgatttgcaaaagaagaggccggtctatatgcatgcttaattgctaagactagcatgggctggctgtggcatcgccgcttatcacatgtggggatgaagaaccttcacaagcttctaaagggagaacacgtgataggtttgactaacgtacaattcgaaaaggatagaccttgtgcagcttgtcaggcaggtaaacaggtgggaggagcgcatcacagcaagaatgtgatgaccacatcaagatccctgtgagctgtacatatggacctcttctgacccatcgcctatctaagcataggaggaagtaagtatgggtgtagt

SEQ ID NO: 78182 - DNA, 327 bp, Zea mays
  unsure (1)..(327): unsure at all n locations
taactttaaaactcttaactcagagattatattattttattttcattagctatcatgttacatatataattgtcggcgtttcgaacccgatggatccctggaccgacgagtaaattgtcgccgcgtgcccccacccanatgggtcggcgcgagacggatcgcgaaggggggaagatgagccggatggagacaggcgtgagaggtgaaacccgtggccttcgtgtttgtcccgcgcccaggtcgggtgcgcttgcagtaggggttacaagcgtccacgcgggagggagcgagcggccctgcgcgagcgtcgtctcgttcttcttcgcg

SEQ ID NO: 78183 - DNA, 460 bp, Zea mays
  unsure (1)..(460): unsure at all n locations
ctctacagtcttaggagcaaanctagatcttctacctctnttaacaagatataagcatttgctaccaaagactctaaaatatgaaatattggcctttctaccggttaggagttcgtatgatgtcttcttgaggattcggtgtacatacaatcggttgatggcgtatcaagcggtgttgactgcctcggcccaaaaccgatccgacgtcttgtactcatcaagcatggttcttgccatgtccaatagagttctattcttcctctccactacaccattttgttatggggtgtagggagaagagaactcatgcttgatgccctcctcctcaaggaagccttcaattcgagagttcttgaactccgtcccgtcgtcgcttcttattttcttgatccttaagccgaactcgatttgagcccatttcaagaatccctttaaggantcttgtgtatgagattttcct

SEQ ID NO: 78184 - DNA, 404 bp, Zea mays
  unsure (1)..(404): unsure at all n locations
tatctaccattatgggattttctgaccactcgagttaatcaatttcttttatgaccctagcattaaagagttgtnttactttggtccttgcatctttgactcttccttcgaacatttttggagcttctgctatcttggttntatttttagatcaatagtacgactatgcttttatcaactccgcacatgtcatttgttgactaagtgaatacatctttattgtggaacatgaacttctttagttggccttggtgttcctcagataactaagtgtcaaagaggactttctgatcaattatatctttcacacatgagaactagctntggctactatgtgggtgaaaattttctttggtttataggttctttggttctttttctatttcatcgatgttggataccac

SEQ ID NO: 78185 - DNA, 406 bp, Zea mays
  unsure (1)..(406): unsure at all n locations
gctcggccgcacaagtctttcgccgcagtttcttggtcataggctgccagggcttcngnggaaggtttggagatcatccaagaacaatatattgcctattctgtggtgaagacaagggccataccaccaggatgtgtcacgttaccatccagaagcagaaggagatagcagaagcagctgcgcaacaaagtcagccgaagcaagtcatgcatactgcttcgtatcactcgccttatattccagaatatgtaggcaaccaccccgcagcttctgttgcttcggcaagccaaccccaagcatcttggcagcaccctccaccaccaccgccgacgcagcgaggacagcagtcagaagggagtcagaacaatcaccttcagagagacttcagagaggagttcgaagctcg

SEQ ID NO: 78186 - DNA, 299 bp, Zea mays
  unsure (1)..(299): unsure at all n locations
ttcttaaatgctacataattcatggttggggctaaaaatcttggaactatttttattaaatacacaggaatttagaagtctagtaaaattagtcccatatttttatcatctttctagaatttcttatggatttccaaacttagtcataaaaagaaaagaagatattatccacagtactggaccgaaaccagcacaggccgacccattaccaggcgaaacgtgcctgcgcgtgcactcgcgctggcgattntgcgcaaagatcctaggggattngaaacactagtaaagaacccacacac

SEQ ID NO: 78187 - DNA, 441 bp, Zea mays
  unsure (1)..(441): unsure at all n locations
tcacgaagaggaaccttcggctatcttatataaacagcttcatccgaagaccacttcttcctgtaagaccttcggcgacgaagcatagacccaacagtgctgttgaaccagatctctcgtaccaatgaaggcgcaaacattgttgaaagccttctaacatgcttcggtatcattttcaagagcagtggtcggcctttgaaggccgaagcgagaccagatggggcgttcaataatcccctttatgtcttccctttcaatcaaattattcttgacataaaaccattcctccatctaggccctgngccacctttttcgaaaggttggaacgggataactcacattggagcaaggaatgaagccataacaaccgaagttgttgtgatattgctctttaccagtggcctttgtctcgtacagtaattcgtgcatgttgtagaagca

SEQ ID NO: 78188 - DNA, 403 bp, Zea mays
tcgcaatgcttacaacgggccaacttgtcatcctccttaaagaataacatgcaactggcgggacacacgtttatcttctcatatgtcatcccaagaccagccgacatcttctttgcgaagtacatattctctggcaacttatgattctccgggagaacctcgcccagctgttggggaccataattaggggtacccccaagactcctaaatctcagctggtaacccccatcaacacaaagctgcaaaggcctgatgggcgcaattccgataaaggctctgtccactcaagggacacaatctcgcctcgcccgagcctagcctcgggaaggaacagtagaccaaggcagattcacgcctcgctcgagggtctcctcaagcaacgggcgcacctccgactcgctcg

SEQ ID NO: 78189 - DNA, 430 bp, Zea mays
  unsure (1)..(430): unsure at all n locations
nggtcattttattgctaactgtcctgataatgaaagtgaccatgataagggaaacaagagggaaaagaagaagcattattagaaggcaaagggtgaggcgcatctangcaaggagtgggactcggattgctcctcgtccgactccgacaatgaaggactcgccgccaccgccttcaacaaatcaaccctcttccccaacgagcgtcacacatgccttatggcaagggagaagaaggtatgtactcgcaactctacctatgcttcttcaagtgaggacgaatctagtgatgaggatgaggtagattattcatgtttgttcaagggcttagatagatctaagatagacaaaattaatgaattaattgatgccttgaatgaaaagaatatactnttagaaaagcaagagggattattgtatgaagagcatgat

SEQ ID NO: 78190 - DNA, 449 bp, Zea mays
  unsure (1)..(449): unsure at all n locations
acacttaaaactcagcttgtaagattcttcattccaacatgtgctagtccgcgatgcttgagctagcccatggttgtcttagcaattaagcaagtgtcgagttcagttctatcaaagtctactaagtatagctgaacctctaacactcccttaaatgctactgaatcatcacttcttctaaagatagtaacacctgtatccgtaaaaagacagttgtaacccattttacataattgcgaaactgaaagcaagttgtaatctaaagaatccacaagaaaaacattggaaatggaatggtcaggagatatagcaattttacccaatcctttgaccaaaccttggtttctatccccgaatgtgatncgctcttggggatcttggtttttctcatatgaggagaacatnttcttctcccctgtcatatggttngtgcacccgctatcgatgat

SEQ ID NO: 78191 - DNA, 419 bp, Zea mays
  unsure (1)..(419): unsure at all n locations
tgcacttacgaccaaaccgcacccgcatccatatcacattctatggctcaacaatagtggtaaggtcaaggtaaccaagctggtacgaattaattttgctattggttcatatcgtgatgttgttgactgtgatgttgtgcctatggatgcttgtaatattctgctaggtagaccatggcaatttgattcagattgtatgcatcatggtagatcaaatcaatattctctcatataccatgataagagaattattttgcttcccatgtcccctgaggctattgtgcgtgatgatgttgctaaagctaccacagctaaaactgagaacaacaagaatattaaagttggtggttataacaaagatgggataaaattgagaggacatcgcttgcttgcaacanagactgatgttaatgaattat

SEQ ID NO: 78192 - DNA, 470 bp, Zea mays
  unsure (1)..(470): unsure at all n locations
tactcagcttcctgcgtcagcttcggctgcccccgaccttcgtctggctcagccttcgtcctggtcgtgctccatatccataattctgaatccgaaaatacctgttcatataattcacttggaaaacattgtcaaatcatgtttttgaggaccttcggaggacgaaggcccccaacagtagcccctcgcaatattaattngtaaataataaattcagattgcgatatggacgaaggccttgagccgaaggtccgaaaaaacaccttccctttgctagaatagcaacattcactgacaagcggggccttttaacttttaacgccctatgcgtataaataagaacacaccgtgaattcatttggtacacacgcctgccttttgcttctgcccacttaaaaaatattagctcttgctcattgagatttgctggtcttttgatttcgaagcttccgcctcgggaacaaatttta

SEQ ID NO: 78193 - DNA, 476 bp, Zea mays
  unsure (1)..(476): unsure at all n locations
tctaagggagagncacatttgggactaacaaatggttcatttgagaaagacaggatatgtagcgcatgtcaagcagggaagcaagttggtgttcatcatccacacaagaacatcatgacgactgacaggccgcttgagcaactccacatggacctattcgacccgatagcttacataagcatcggcgggagtaagtactgtctagttattgtggatgattattctcgcttcacttgggtgttctttttgcaggataaatctcaaacccaagagaccttaaagggattcttgagacgggctcaaaatgagttcggcttaaggatcaaaaagattagaagcgacaacgggacagagttcaagaactcacaaatagaaggctttcttgaggctgagggcatcaagcatgagttctcttctccctacatgccacaccanaatggtgtagtggagaggaagaatagaactctacttgacat

SEQ ID NO: 78194 - DNA, 433 bp, Zea mays
actcagctttccttgtcgcatcaaccttgacatagaaccactctgatttccagcctgctgtccacttgcttcggtagctaattacagggaacttggtagttttccggtaggcaaaggtatagcaaccaaaattatcgtgcaatccatcttttctagctattgtttgataatgcaactcgtgaacccggcagaagctgtccgcaaatggatccactgcttggcttccgagtgcccagatataaacaataagcctaacgatagcgctaggggtcagctgatgaaaatagataccgaacctcttcagcacctctgcaatgatcccatgtagggggaatcttaatccagcctttaaaaagctcttgagataacaatgtcatctttctccggttgtggggtagtctcttctgccccgaagcgcataagcttcttctga

SEQ ID NO: 78195 - DNA, 439 bp, Zea mays
  unsure (1)..(439): unsure at all n locations
ttcttgcgcacaggttcngctctgttccatccttcattctctatgtgtttcttcatccagcaatattgacttgtccgaagggttcgtgtccgaaggtacctgctcatgtattatattccaaaaacattgtcaaatcatgtttttgaggacctttggaagccgaaggcccccaacaggtccgcagttcaaaaaagaaaaccaaaacagaacttctcgagttctgtccaaacatcagtccttcaactacggacgggccgcaatctgggaccagacggtccgcagtacaaaaacttcacgtaacacagaaacactgtgtttctgcccatcacctcaagttatacctgcggacggtccgccatgctggcccggacggtccacggtacctcaattcagaccacattcaagaaatcgctgttgaataagtttttctttcacgaac

SEQ ID NO: 78196 - DNA, 364 bp, Zea mays
gaaactaagctggatccgatgcaggtccttctgctcctgctggtgagggagtgctctttccatatgtcgctgaaactgaacccaatgggtgtgacccgactgatgctgtatccaatgtgtgtgacctagatgacacttgaaccaatgggtgtgagctagctaaagctgaccccattgggtgagccgttcgccttgttgatgaaaatgacgaagaggaggatgaaatccctctagttatgaagaatgaactacgctacataatcaatggcgaaagaaacggtggtcattctacagccttatatgctctcattggtctgcaagaactgtttctaacacactatgatcatactcttgtagacatggt

SEQ ID NO: 78197 - DNA, 434 bp, Zea mays
  unsure (1)..(434): unsure at all n locations
agcttatgattcgggttcttggcctttgatgctagaagttcttcacaaacttgggtttggacagatctggagagatattatcagtggtctattggcaacttcctccacacaggtgctgttgaatggaatccccgggaaaatcattcgtcttacaagagggctaatgtagggcgatccactatctcccatgctctttatcttggctatggatgtgcttgggagtttggtttccaaaactgaacaggaaggacttctccaacctttatcctcaagagccttacaacatagaatatttctttatgtggatgacgtggttcttgttttgcaaccaacagaaagtgatattcaggtagtgctgaacattctgcacttatttggggacgcttctggattganaacgaacgttcagaagagccagtgttatcctattcatt

SEQ ID NO: 78198 - DNA, 481 bp, Zea mays
  unsure (1)..(481): unsure at all n locations
tggaggcgtctattggttgtcgacttggtgtagactccttcttcttttcttccgtcgccttgaatgcaacgggttgagcttcggatgtgtcgccaagctcgttgattttcctcgagccttctatcatgcactcaaaacttacaaaatgcccgatgacttcctcgggggtcattttagtatatctaggattgccacgaatcaattgaacttgagtgggattaagaaaaataagagatcttaaaataacatttaccacttcgtggtcgtcccacttcttgctcccgaggttgcgcacttggtttaccaaagttttgagccggntgtacatgtgttgtggctcctcccctntgtgaagccggaaccgaccgagctccccctcgatcgtttcccgcttggtgatcttggtgagctcaatctcttcgtgcgcgggtttgagtacattccannacctctttggcgtcttcaacccttgactttgtat

SEQ ID NO: 78199 - DNA, 477 bp, Zea mays
  unsure (1)..(477): unsure at all n locations
tatatgctctctgagtattgtatccgatgggccatattcagcgcacatctgacttcactgtgttcgactgaaaagtgtgtaatgtgtattaacctattttatgtccagtgcatcacaccagatacgtcaggtatatatatggtaaaaaaactacaccgaanatacattttcaaacatgttagctcttgcatattttgccactactatgagacgcatcactagctaggataaagggagccaccgataagaaaagtgcggtgggtaaaaagatacgggagtcaggctctaactcaggctatgtttatttcggattataatctgtctatattatataatctatcgtaaataatccagctagcaaataaacaactagaatatatgttcagattgataatctagaatttagatatgataatctcataatcttctcgtgaggagattatttgagattatnntttagtcaaagactcactactc

SEQ ID NO: 78200 - DNA, 373 bp, Zea mays
  unsure (1)..(373): unsure at all n locations
actaagcttctaagggagaacacattttaggactaacaaatgttcattttgagaaagacagggattgtagcgcatgccaagcagganagcaagttggtgccaatcatccacacaagaacatcatgacgaccgacaggccgcttgagctactccacatggatctattcggcccgattgcttacataagcatcggcgggagtaagtattgtcttgtaatagtggatgattattctcgcttcacttgggtggtctttttgcaggaaaaatctcaaacccaagaaaccttaaagggattcttgagacgggctcaaaatgagttcggcttaaggatcaagaaaatcagaagcgacaacgggacggagttcaagaactc

SEQ ID NO: 78201 - DNA, 397 bp, Zea mays
  unsure (1)..(397): unsure at all n locations
gtgggaggggccctacatcgtcaagaccaaaatatcgctgaatgcttacaggctcacctcaccatccggagaagacttatagcgttcgtggaacatagagaacctacataaattctctgtctagtcccaacgctagaacgcctttgttactctcaaacaatttgaatcacgcccgcactcttttcctcccagggggtgaggtttttaacgaggcagagtcatgtgatatactaccacaaaagccccgcaagaaaagcaaagtcaaactggcaccacggctactggtgtcgaanaagaccgcaacaccggccttcgacatttgatgcataaacagtcaccgcaacaaggcagctatactgcctttgcatgccacacgtgccagcanaagtcacccgaa

SEQ ID NO: 78202 - DNA, 355 bp, Zea mays
ctttattttctactacatgtcatcctcaaactgatggtcaatctgaagttgcgaatagaactctgtctactatgttaagggcagttctcaagaagaatagtaagatgtgggaggactgtttgcctcatattgaatttgcttataatcgatcattgcattctactacaaagatgtgcccatttcagattgtatatggtttgttacctcgtgctcctattgatttaatgcctttgccatcttctgaaaaactaaattttgatgctactacgcgtgctgaattgatgttaaaactgcacgaaactactaaagaaaacatagagcgtatgaatgctagatataagtttgctagtgataa

SEQ ID NO: 78203 - DNA, 437 bp, Zea mays
  unsure (1)..(437): unsure at all n locations
gcgctggcagantaagactcgcatgtggctcactgacctaaaattattttgggtagtgacgtcngctgttccacaggctgcatcagatgattctgatgatgcagcgaaggccgccgcactatcggagaaagccaagtgggacgaagccaatgaggcatgcttgtctcgtctgctgaatgtcttgtcgaaccgcttatttgacgtgtactctggttttacctccgctaaaggtctatggactgaacttgagaacgagttctctgaagttgacaatggcaatgagtcattcacaacggataactacctcaactataaaatggttgagggaagatctgttatggagcagctacaggagattcaactccttggtagggacttggtccaatatggctgcatcctaccagacacgtttcaagtgaatgcaatactggcaaagc

SEQ ID NO: 78204 - DNA, 481 bp, Zea mays
  unsure (1)..(481): unsure at all n locations
tcgggtctcttgccttgctactnttgtctacatggctagaaatgacttgacaatcagtttntaggatgacccttcttattcccattgctcttaacttttgaagccccaacagaagtgcttcgtattcagcaatattatttgtacaactaaagtcaagcttggctacgtaacatgttctgaccttcgaaggtgctattaggacagcagccgctcctgcaccgaatgttccccaagaaccatcatagaacactatccaatcttcagcgtctttatttatttcttcttcttgagcccatggcgtccagtcaacgatgaagtctgctaacgcctgngactgaattgaagatctatgcacatagtcaatagtgaattcgttaagctccgcagcccattttccaattcttccagtagcttctctgttccacattatgtccttcanaggctgtgacgaaggaacaattatgtgatatgcttgaaatag

SEQ ID NO: 78205 - DNA, 185 bp, Zea mays
acagtgccatagcaatgaatgctgtggttacttcacacctactcgtctgtttatatagtgctgcaggtaagaaagtaaatcgtaagtttctacacccgactaacagtcgctcgcgcccactgaacggtgggccaccatacccgaagaggtgaatctgcatgggggaccattctgcgctcggaaat

SEQ ID NO: 78206 - DNA, 478 bp, Zea mays
  unsure (1)..(478): unsure at all n locations
gaccttgaaactaagctttaacccccccccccgcgagaccctttcccggttgtttctaaccataatgaatgcgatatcgaatgtcatacttgatgcatatttactttatttgttcccttgtatgatgtactgtttgtttcccaattctaatggatgaatgtatgtatgcttgcaatcgcatagagaacgatccggtcgaagagcccgaggaactcgcaggagaagcccctgagcagcagtcggttggtggaggcaagtgtcccttgacctatctctgtcctattcattatttaattcacctgccgctctacacatttatgcctaaggattgactagcttttgttacccatgtccttgtctacctatctgggttggattattattgtttagctctatgctatngcttaactctaatcaatgaacatgatgagattatctatgatacgctgttttgccttctcttattatgatgttgtac

SEQ ID NO: 78207 - DNA, 120 bp, Zea mays
ctaagctttgtgtggagttgggagaggatatgatctctctggcgcgccttgtatttatatgctagctcttgtaagtagttggaaggtgaaaaacttcgatgcctatgaatgtggggtgca

SEQ ID NO: 78208 - DNA, 409 bp, Zea mays
  unsure (1)..(409): unsure at all n locations
ctagtgcgatgtgtattagcaacttgctgtccagcttgacatgcactgcatgacttgnctttctcaaaaaccacatcctctaatcctctaaccatatctttctttaataccttcttgagtgtgctcattccaacatgtgcaagccttctatgccaaagccatccaagagaagctttggtgaagaggcaagttcttaagtctgcatcttctgaagtgaaatccactaagtaaaggttgttgtatctaaatcccttgaataccattgattcatcatccatttttgttacaataacctctgatggagtgaataatcattgaagtccaagatcacagagttgtcccactgataataaattgaagctcaatggtgcaacttagagaacatntgatattgataagtcatttgaga

SEQ ID NO: 78209 - DNA, 397 bp, Zea mays
tgtggacccgtagcctatcaattggaattgccacctcacatgtcagcagttcacaatgtatttcatgtatctcagctgcggaaatgtgtccgcctacccactgaagtgctacctgagccagacattgagatagagctagacttgtcctatcaagggtaccccgtcaaggtattggatcagaaagaaagatcaacgcgggcgaggtcaatccgaatgtataaggttcagtggagtcaccattcagcagaggaagctacatgggagactgaggattttctacgctctcgctatcccgactttctgcccaaaagagtcggtacgtaaccccaaaaccccacccacacctgccctttgaatacaattataagaaaaacttagataacaacgatagtctcag

SEQ ID NO: 78210 - DNA, 413 bp, Zea mays
  unsure (1)..(413): unsure at all n locations
ntagtgactagtgagagagatatgcttgtgtgctctcgagctcttgcgctnggattgctttcttctttctttgattcttcattgcgatcaaactcatttgtaattaaggcaagagacaccaatcttgtggtgatccttgtaggaactttgtgttccaagcatttgagaagagaaagctcactcggtccgcgggaccgtttgagagagggaaagggttgaaagagacccggtctttgtgaccacctcaacggggagtaggtttgcaagaaccgaacctcggtaaaacaaatcctcgtgtctcacttcttattcgcttgcgatttgttttgcaccctctctcgcggactcaattatatttctaacgctaacccggcttgtagttgagattgttttgagaaattcagtttcgccta

SEQ ID NO: 78211 - DNA, 304 bp, Zea mays
  unsure (1)..(304): unsure at all n locations
tacagcatcgggtngatcgaaataatatataaatacacgtaagtatactgcagaatgtatgtttataatatacaaaagggaaagttacaatgtcgtattgactattgaggtacatgcaaatgttatctgacgctgctacagtggctatattagaacttaacaacatacaagcttcagtttacaagtgttcacctgagtagtactacgactgaaaaacagctttatatcacacccaaaatatggtgtatttgtcgcaaccacccaaagcacaaagggaagagagttactaagagggtgtttaaat

SEQ ID NO: 78212 - DNA, 450 bp, Zea mays
  unsure (1)..(450): unsure at all n locations
ngcataacanaaacgtgaatgccataaatctgactcatcagataaattaacaaaattcaccattntattacacacatcatgcagtgataagcgaaacaagcctccgcagtcatatcctttaccaacaaaagtaccatgtttcgacacaacacatttattagactcaagaacaactttgtatccatctcgacatagcatagaagcgctaacgagattcttcttgatagagggcacatgctgcacgctcttcaatgacaccgtctttcccgaagtaaactgcagaatgaccgtaccaacaccaagaacatgagcacgcgacccatttcccattaacaagacgccagacctcccgtcctggtaggaagtgaacatagaggcatcagcacacacatgaatggttgcccactatccatccaccactcaggttgaatacanactgaaagaacaaat

SEQ ID NO: 78213 - DNA, 405 bp, Zea mays
  unsure (1)..(405): unsure at all n locations
tctatccctaaacaggttacacaagttgaaaaatggagctcttctcatgcgcagcatgctaatacattctacatcattacaattgtaaattctgttcagatttgcttgcctttcctcatccatagcacttaacgggccatatgtgatttgaggacgtgcagcttgtgctaccctaaacctactcatgaagtatgcataaataacagcaacaaaagcagccgcttgattgacaagcattgttctctgatccacgggtgccatctaatacatagcaagattggaaattgcatggctcagaacatgtgctcacataaaaaatgaaacatcaatgactaagacatgtgctcagaaaacanattganacatcaatgactaggacatgtgctcagataacanagatgaaca

SEQ ID NO: 78214 - DNA, 472 bp, Zea mays
  unsure (1)..(472): unsure at all n locations
ngacaactaccagttcgacctctggaagcagtcctacgtggtcgcatgagccgctgtgtatgacaagctctgacgcagccgccgcttggactcggtccagagcgactgcaccgcgttgtccatcgtcaagcagagggacctcatggtcgttgccaacgtcgacgactctcgggttgttctatgcaccgcatccaacgacggcgccatcatgccgtctagcttatcgtccatttgaagcccaacctgtcatgtaagccgctactgaccggccataaattcttgtgcgctcggacgacggtcgttgctaacgttgtgtgagtgtcctcgaacatgatgtatgtagaggagtagcgcatccggtgatgcaacgaccaggtgtactaccttgctgatgagcccgaggtgcacttcgtctgcaacccagccaagagtatcggtacttacatgtcggcacgtcgaaactactatatat

SEQ ID NO: 78215 - DNA, 430 bp, Zea mays
  unsure (1)..(430): unsure at all n locations
atgcttcgggaaagaagctctcttaagaagaagaacgagaagctcaacactatgctcagaagctgaaatatccaaagggggcattagtgttcaatggcagcggagaagaggattntttgtactgtctcccagacaacaaggagatatctgtctgccgagagatgagcagaagcttcggattcccagcattagaagatgggctttcagtactgtcgaaggatgaattggccgacagtttagcatataatagtataaaggtgtgaaaatncaattttgtacttaaaaatgattcttttcatttatttatgcttaatactatgctccttttgcagggcttgatccttagcaatgccctcagggcacagaanaatatcgaagacgaaggatgcactatagccctgaacaaccttcgttcggaagtatttgaact

SEQ ID NO: 78216 - DNA, 464 bp, Zea mays
  unsure (1)..(464): unsure at all n locations
nggacagtgttctgcgaccgttcctgaggaaccttcgaggcatgtgtatctgctgtcttggttgcaccttccaaagtcagaacatgctatgcagtaaaacttgatttcagctgcacaaataatattgtcgaatatgaagcctttctttnggggcttcggaagttaaaggcaatggggataagaagggcgttccttaaagctgattcccaagttatttctggtcatgttgacaagagttgtagagcaagagacccgaagcttgagaaatacctggatacagttcgaaggcttgaagcttctttcgaagggttttctgtcaagaatattccacgaggagaaaatgagcacgctgatctgctagccaagtcagcggcacaggggctgcccttaccttcggaagtattctntaagacaataagagcaccttcngtggaacttcttgaaagagtagtgctcaatatatc

SEQ ID NO: 78217 - DNA, 433 bp, Zea mays
  unsure (1)..(433): unsure at all n locations
actcagctcgnatctgaaggaatttccctgaaggtagagatgatctcagttctccaatcctcgctataaacaggagatatgttgatgactgctctttcaagaagttctaccgaaggagcttttattgcttctaagaacacatccgaaggtaagggcagcccctgtgctgctgacttagctagcaaatctgcatgctcattttgttctcaagggatatttctgacagaaaacccctcgaaggaagcttcaactcttcgaaccatattcagatatttttcaagcttcggatccttagccttgcaactcttgtcaatatgacccgaaacaacctgtgaatcacgtttaagtatggcccttctgattcccatcgcttttaacttccgaagacctagaagcaatgcttcgtactcggcaatgttatttgtgcaactaa

SEQ ID NO: 78218 - DNA, 485 bp, Zea mays
  unsure (1)..(485): unsure at all n locations
actaagcttacacctctggactaactcggctgcgtcactctntgttgtctgccagtataaaccagacctgaagaccttcccaaccagagtcctagatgctgggtgtatcccgcactatccggcgtggatctcatctagcagttgcttcccagtaaccgagggaatgcacttcatgaggactcctgttgctccccttctgtacagtgcgcccccaatgagggtgtagtgggttgactgccttgcaatgcgttctgctgtgactttatcattcggttcctcttcattctttatatatctgatgatgggctccctccagtcattagagtctgactctggctggctcaaaacattgcactcttctgcttgatctgnggaaatgctcgggcgtggcacctcttggaaaaaactccgggtgggacctgagttcgactggatcctagtttcgacaaagcggcagctaccgcgttagatctctttccacatga

SEQ ID NO: 78219 - DNA, 386 bp, Zea mays
tgtggccattgatcattgaccagaggctcatacacctcaccccacatatgttttcttgccatagatcacattcttggattaatggcggagaccatttattggtcaaaaatacatatgtgttagccttcggtattattaacaatggtcgatgatggctctctcccacacaaataggggttatgtctccttgtcatacagcacattattgcctttctggtggacaccatatatttggtagaaattcgcaggtgctagccttcgtattattgaaaaatgtcgttcatggctatctccgacataaatcggcggtttggaggcctttgatcatctaccagagccttgtacacctttacccacatatgtttgcctttcttacgtgacattca

SEQ ID NO: 78220 - DNA, 470 bp, Zea mays
  unsure (1)..(470): unsure at all n locations
ggagtcagtccttttacaaggataatgcgtgctcatataatatttgatggtatgaaacacattcgtgagaagataatggctggaaaagccaaatgtttcaaagaagatgatcaaggtattatatggtttaataaccgcatattggtgccgaagaatgaagtggtccgccagcaaattcttgatgaagcacatcttattcgctattctattcatcccggaagcactaagatgtaccaagatctgaaacaacattattggtggacgaaaatgaagatcgagattgcacgctatgtggctagatgtgacacctgcagacgtgtcaaggccatacacttgaaagctgccggtccattacagtctctaccaataccgacatggaaatgggaagacataagtatggacttcattgtgggattgcccacgaccgcanaacggtatgactctgtctgtgttgtcagtgatcgactcac

SEQ ID NO: 78221 - DNA, 428 bp, Zea mays
  unsure (1)..(428): unsure at all n locations
ntagaccacgtcgctgtgaatcacgtctcgcatgcacggtaatctcctgtgtacttccacggggaaagccactcatctcgagcgctagtacccttttttccctccggccgccgcgcgtcttcgtgcaattcatcggccgccgctcacggactctataaattgagtgtgccatgagcttcgtaggataattacgcatccaaagcaccagctattgcccccaatcgttcaccagagaccgcgaatttcttactatccccaatcctgtttcctccaccgcagagacaccctcgctgcggccagcttgttccaggtatgctcataccccctgctcccttgttctagcgtccttaagtcctcctgatactcctcgaccaattcaatggtgtttggttaccttagatcgccgggaatacatctgttcccttgac

SEQ ID NO: 78222 - DNA, 417 bp, Zea mays
tatcaagtctactttcatatggatccggaattatattcatatctgttctgaggccgccggaatcattgtattcttaccgagacatttcctgccttttctgcccatggtgctgcgtcaccctattttggcccaatgggtcgtgtatcaagttaggtccattatggacgcatcctatggttgcagcacgaccccaatacccttgtggtcgttctcccatgtttataaaccccctagccgtcaccaagaacagcgggtatttttagatcaagttagctctcgctacttgcttgcaagcgcgcgtgctagttcagccgcccgtcttcttgtcttcggaaccccaccatattgtagtttgatctttaaacctacatttagatctggtaattcacgacttgttctacttgatcttgctagttc

SEQ ID NO: 78223 - DNA, 382 bp, Zea mays
  unsure (1)..(382): unsure at all n locations
gtgtatactctactacgagcaccccggngcaagagaatataagtcctatcctccctcttgtgtttcatcttgcatcaatccatctgggcagggacacgcggcataaaattcactagtcggttgagggtcccccgggtccgaaacaccgacagttggcgcgccaggtagggggcacgctgcgtgtcgacaatactttcccattaagttccagatgaacaatcttcagcagccgcttcagcccgggatggtgctccactttgggagtctcaagttcatgtgccccgacggcacttacgacatgatactcctcccactgcagcacgacaacaatgactgtcgtcggctcttcctgcggaggcgagcccgacgacaacctctgccc

SEQ ID NO: 78224 - DNA, 410 bp, Zea mays
tcgacaacatccgagttgtggcggacactactcatggttctatgtcggagcgcaatgagtacatcaacaatatgtacgagcaactgcatgatcccatgaaatatactcagttgcaggttgatctaatccaccaccactgggcactgattggatccggagctgcttaagtatgaagtttatgtttgcatcaacaataaaatgacaacattttattaaatgttgtaatgtcatgtgtaatgtgtcatgtcgcaatttatgtttgtcccaagctgcttgtgtactggaaacataacaagatcttgtaatttgtgcttgtgtcatgcgctggaagcaaagtttatgtaatatgtgcatgtgtcatgctcgaatctcgaataaaataacagtctactatctttacccacatgaca

SEQ ID NO: 78225 - DNA, 438 bp, Zea mays
  unsure (1)..(438): unsure at all n locations
tgtgaagccaatcacaagtttattgaagaacgatgttcaattcaataggtcttcaaagggtgatgaagcttttgaacaattgaagacattgttaaccactgctccggtattggctcaaccggacatcaccaaaccctttgatgtatattgtgatgcatcaggcagtggactctgctgcgtgctaatgcaagaaggccgagtaattgcatatgcttccaggcagttacgccgacatgaggaacactatcctactcatgatctggagttagctgcggtggttcgtgccctaaagatgtagcgtcattatttgttgggtaatgtctgtcatatntatacagaccataaaagcttgaaatatatcttcacccagtcagaattgaatatgagacagagacgatggctcgagctaatcaaggattatgaattagaaatccatta

SEQ ID NO: 78226 - DNA, 393 bp, Zea mays
  unsure (1)..(393): unsure at all n locations
ggcagcaaaacagtacaatatctatgaatgttgnggtaacttcacacctacccgtctgtttatatagtgccgcacatgggaaggtaaattgtcaagtcttcggcaccggacaaacagccgcccgcacccactgaacggtgggccacagagctcgagaaggtgaatcgccaggacgcgcataactgctgcatggcggggccacctcgcgctcggattatattaatcgcttctcggcaatgagctcacgaaaggtgttttttggatcttcggtaccccgaagcctaagagactttttcacggatcaagctcgttacgaaatatgatctagcaccacgaaggggctactgttgggggtatgcttcatagccgaagatcctgaagaaagaaacacct

SEQ ID NO: 78227 - DNA, 434 bp, Zea mays
  unsure (1)..(434): unsure at all n locations
cttttctcctacgcatcaaccttcttctcggcatcagccttcttcttcacaacttcttcagctgcagccattctcttaatctcagcttcttcaacctcagcctttctcttaatctcagcttcttcggcctcagcctttctcttaatctcagctttttcagcctcagcctttctcttatcctcagcttcttcttccttcttcttctcagcttcttcagctgcagcctttctcttcatctcagctacttcggcctcagcctttctcttattctcagcttctacttccttcttcttctcagctacttcggcctcagcctttctcttattctcagcttcttctgccttcttcttatcagcttgttccgcttcagcctttctcttctcagcctnctcagcttcagcattcttcatctcaatctcagcctttttcttctc

SEQ ID NO: 78228 - DNA, 367 bp, Zea mays
  unsure (1)..(367): unsure at all n locations
caattcaattnttggtgactcaagctaccgatatccaagattgacccaaggttattntaaattgttataccttaaactcatatcatctcgacggaaagtgctgatattgtacgaaataaagaattattctatgcccgaaagtcaaagcctacaatatggaggaatgccaaaggatggtaacatctatgcttntaagtgcaagtgtcttaacttatcatttctcatgtgtcttgtgtagtcacatagaaaaaggaagcacttaagatatttttaagattatgtcaccattctttgaagaaattcctcccatatggtagattgcatattcttcatttctatattatgacaatctacatgctctaaaact

SEQ ID NO: 78229 - DNA, 399 bp, Zea mays
gtggcatctactagcctaactaggatttaatcaaaggtggattaacacttagattatttcctaatggtcttgctgtgactcatgtaggttgctgatatctattaacttaaattggttaacccttgctttctctcttttccctttttcctattgagctattaatggtggcttgaactacacttatgatttagaattttccaaaacttctataaaaattacagcagctttctactaattaaattaagttgcactaaaaatttgaggtcctaaataattatggtccagtttggacaaaaacaacaaaagctatggcagaaagggcatattacactacacctctaatttagaagtggctactgccctaatgggtatttttcctggttattagatgtgataaca

SEQ ID NO: 78230 - DNA, 460 bp, Zea mays
  unsure (1)..(460): unsure at all n locations
tgtgaagatgcttcattccaacatgggctaatcggcggtgccagagcctacctaaggtagtcttaacaaccaagcaagtgtcgagtgtagctctatcaaaatctaccaagtatagctgaccctctaacacttccttgaatgctattgaatcatcacttcttctaaagacagtgacacctatatcagttaatagacagttgtagcccatttgacataattgggatacggaaagcaaattgtgatctaaagaatctacaagaccaacattggaaatagtgtggacaggtgatataacaattttacccaatcctctgaccaaaccttgatttccatccccgaatgtgatagctcgntggggatcttggctntttcatatgaggagaacatattttctcccctgtcatgtggattgtgcacccgctgtcgagtatccaacttgagcccgcggatgcataaacct

SEQ ID NO: 78231 - DNA, 456 bp, Zea mays
  unsure (1)..(456): unsure at all n locations
ttagctctgtcagcgcgtacaggtgtctcaatgtggtgcactaatcgccgcacgggttctcgctttcgtcgtcgatcgactccaagctcgccacctgtacagcgtgcagggacaggaaaggggtcggtcaagtactggctgaaaacaatgttgtggtgaataatggagctagctacagggacagcatctgaaaagaagtgacaacgaaggaatgctacaaagcgcgcgttgttcctaccaaagccgcaaattatatatgagaattgagcgatggttgcttattgtgctgcgctcttcgaattatttcatgcggtacgggtggttattagcgtctgttattagttggcgctaccattgggcatcgctctccaggatccataaagtaggctgtcagcttgattctattgaaaaatttngagaggaatcgagttcttttttcccggactatatccattg

SEQ ID NO: 78232 - DNA, 284 bp, Zea mays
  unsure (1)..(284): unsure at all n locations
tatctagaacttccaccgatagttcaataccatttcaaatggaagaggatctacagcaactgaaagttcttgaaaacaactatcagatgaagcgattgtggcatggaacgctacaatcttagatagaccgtgcctggtatggagtgctctgatgcaagtngatctgcatattcatgaggaactcgtatggtatgaatgctactatgtttttaatgtgtgcacaacgcacctcttccattcttttttatttatcacaggttagttcaaaaataaactaacggatg

SEQ ID NO: 78233 - DNA, 491 bp, Zea mays
  unsure (1)..(491): unsure at all n locations
ctattaggacacttgaaactcagctttatatgtaatgtaactagtgtngacaggtagatcattatggcttttgtttgtaaaagagtaaaatacaattccagtccttaaacttgtttggttgtatcatcctggtccataaacttttaaagtatgcctcttaaaatcttgatcactattcgggtttcaattaagtcctaacgggtccaaacagaccgatacaaccaattagaaaagtgtttcctcctttcctatgtttatttttctccccgacgtctcctcgactccatcgctctcgacggtggttggtgcacatgacagcgaacgtggagcgatggaggtctgacgatgaagacctatgagtcatccttcaaggcttactcgacggtcaggaacactgaaggaagatggcaccatgattatggccaaggggatcttcngccncatgtatggtaaggacacttngaccctacacattngcactaatcattcat

SEQ ID NO: 78234 - DNA, 378 bp, Zea mays
tgcccttatatcgaggctccggcgagcgtatcacgtggtggttaatgtggagccacacccaatcaccaacctcgaacttgaactcgcgatgttggtcgtcatagtaccgcttggcatactgttgagcctaaagaaggtgttgatgaacctccatgatgaaggtgtcgtggccacgaaagagtccaccacctccatttgagcagcccttgcggtgtgtggtaatagaggtgttgtgggccggtcgtacaccttgcgcaagcacacggtcggtcctccatggtgtaacagaggtacatggctatcaccttgttgatgacctctgattggccatccgtctggtgtggaatgctatgctcaggcagtagttgacgccgagca

SEQ ID NO: 78235 - DNA, 387 bp, Zea mays
tgtgaagattcttcatcccaacatgggctagtccgcggtgccatagccaacccatgttagtcttagcaattaagcaagtgtcgagttcagctctatcaaaatctaccaagtgtagctgaccctctaacactcccttaagagctattgaatcatcacttcttgtaaagacagtgacacctatatcagtaaaaagacagatgtagcccatttgacataattgggaaacagaaagcaagctgtaatctaaagaatcaacaagaaaaacattggaaatagaatggtcaggagatatagcaattttaccaagtcctttgaccaaaccttgatttccatccccgaatgtgatagctcgttggggatcttggtttttctcatatgaagagaaca

SEQ ID NO: 78236 - DNA, 382 bp, Zea mays
actcagcttggaagaatttatcccacatgtgctagtctgtatgccatagccagcccatgttagtcttagcaattaaacaagtgtcgaggtcaactctatcaaaatctaccaagtatagctgaccctctaacacccgcttatatgctattgaatcatcacttcttctaaagacagtgacacctatatcagtgaaaagacagctgtagcccattgtgcataattgagatacagaaagcgaattgtaatctaatgaatctacaagaaaaacgttggaaatagaaaggtcaggagatatagctattttaccaagacctttgaccataccttgatttccatccccgaatgtgatagctcgttggggatcttggttttctcataggag

SEQ ID NO: 78237 - DNA, 391 bp, Zea mays
  unsure (1)..(391): unsure at all n locations
acatttgacaaataaaaatactagtttgatgccttatctaccttcactagacagtgttgcagacttatgcaccaactataaccttatgccttatctacaacatctttcataaccaatgttaaaccaaagctggcaccaaaaactagggtgctaagagatacacaatgcttagtcatggtcaaaaaaggcactgattgataatcatatacttatgcagttngttgaaatggaagtacaacgccactagactgaaggcgagatggggatgctattaaatctgagtattatcggccatgtatanttgaaactatgggcagattgagtacaatatatagaaccatgacctatctccattgctatntaacaccaaactcatcattgtctcacacta

SEQ ID NO: 78238 - DNA, 327 bp, Zea mays
  unsure (1)..(327): unsure at all n locations
tctgcgcgtcgatccgtcctccgtccgagcaggcgctgcgcctcttcacgggatcatacctgagaagcgcgtccagcccctcgggcgactcgaccttccagtctgcttcgggacaccctccaacttccgaagggagaccctgacgttcgaagtggtcgggttccgaggaacctaccacgccgtgctagggaggccatgctacgcgaagttcatggccgtcctcaactacacctacctgaagctcaagatgccgggccccaacggngtcatcaccgtcggccccacgtacaaacacgcgttcgaatgcgacgtggagtgcgtggagta

SEQ ID NO: 78239 - DNA, 334 bp, Zea mays
tctgcgcgtcgatccgtcctccgttctatcaggctctgcgcccttccacgggatcatccctgggaagcgcgtccagcccctcgggcgactcgacctcccagtctgcttcgggacaccctccaacttccgaagggagaccctgacgttcgaagtggtcgggttccgaggaacctaccacgccgtgctagggaggccatgctacgcgaagttcatggccgtccccaactacacctacctgaagctcaagatgccgggccccaacggggtcatcaccgtcggccccacgtacaaacacgcgttcgaatgcgacgtggagtgcgtggagtacgccgag

SEQ ID NO: 78240 - DNA, 332 bp, Zea mays
tccgggccggtggccccgccgcctgctggtgccgtttcgccttcatcttgcccagcgcgcggcggagctgctgcgcggggcgccggctcttgaagagccccctcggcaagcactggcccgtctggccgttgcatggcttgcactctacgcagcacaacggcatggcaatcgatcgatgatggatggaagcgcgctcgcggcttgcgcaataatggtttctgctggtgtgtgattgattatatatgatatgatggtggattgacgccgagtgcggagtggccatgggtggaggtggtggcgttcacgtagctagctaggttggctcggctgag

SEQ ID NO: 78241 - DNA, 349 bp, Zea mays
cactatacaatactcatgcttcaagcgggtgtgacaagggttcgtttaaaaaagcttaaattctcttgccatcctaaaactatggacatccctgatggaactgtaattggcgccgatgacgatggagggcttgatgcgtatgttcttgtacgagtccatgggctgcatgacgctttaaaggtccgctgcttgactgtggggagggtatcatatggtcttgcctctggagactaggaagttttccatctatgtttttggaaggcataatgcctatttgtctcttgtaatcgaacacttggcaattaagtaataagcaaattacttgcccaatatcccttccggctaatct

SEQ ID NO: 78242 - DNA, 332 bp, Zea mays
ttctgccgggtgcacgatctgcactatctaacattttcctaagcagatggtcttcataagaacttcggctgctacaacttcacatattggaaagatacgaaggccccggttattggctactgtaccaagtggtcgaccagttggacaagcgaacggttttatataagagcagacaagaagaaaagggagaagctaatgattatggtcatgagtccattgaagttaagctttgggatgacaaggcccttgtgccacatgcagcttggctccccatgccatctagccgaagtagaattcataatggtagcagccgaaatcagcacaaagatcta

SEQ ID NO: 78243 - DNA, 326 bp, Zea mays
tctaaagggagaacacgtgataggtctaaccaatgtttatttcgaaaaagatagaccttgtgcagcttgtcaagcaggtaaacaagtgggaggagcacatcacagcaagaatgtgatgaccacgtcaagacctctggagctgctgcatatggacctcttcggacccgtcacctatctgagcataggaggaagtaagtatggtctagttattgttgatgacttttcccgcttcacttgggtgttctttttgcaggataagtctgaaacccaatggaccctcaagcgcttcctcaagagagctcaaaatgagtttgagctcaaagtga

SEQ ID NO: 78244 - DNA, 332 bp, Zea mays
  unsure (1)..(332): unsure at all n locations
ctccatcttttcgaaaccaattctttttgactttgtaccganaaccttcgctccgatttgatctcgtacgcagcccattttttcatcgtcaacaccgccgattagtagtgcccctggttgatacccgcaagatatggtgtattctctcaactctcctttctcaacctccgacaattcttgcccaattaagttctaaaagttaaagttttcttcttctgaagcttcttcagctatttccttctccttctcaagtactgtagccatggcttcttcagcggctgaggcagcttcttctgtggccatgtctataagtatcttatcaatgttagaaa

SEQ ID NO: 78245 - DNA, 325 bp, Zea mays
tgaagccatggtaagtagcacaggctaataatatgcgaattgattcaagcctagctacgggtgcataggtttcaccaaaatccaaaccttcgacttgtgaataccccttggccacgagtcgagctttgttccttgtcaccataccatgctcgtcttgcttgttgcggaagacccacttggttcctacaacattttgattaggacatgggactaaatgccatacctcattcctggtgaagttgttgagctcctcttgcattgccatcacccaatccgaatcttggagtgcttcctctaccctgtgtggctcaatagaggaaacaaa

SEQ ID NO: 78246 - DNA, 325 bp, Zea mays
tcgatccttcggactgtgtctaggtatttttcaagcttcgggtctttagccttgcaacttttgtcaatatgacccgaaacaatctgagaatcagttttaaggatcgccctcctgatccccatcgcctttagtttccgaaggcccaggagcaaggcttcgtactcagcaatattgtttgtgcagctgaagtccagtcttgctgcatagcaagttttaaccttggacggtgaaaccaaaacagcagctgctcctgctccgaaggttccccaggagccatcacaaaacgctgtccaagcttcggcatctttattcgcttcttcgccct

SEQ ID NO: 78247 - DNA, 324 bp, Zea mays
tggaggcgtcgattggttgtctacttggtgtatactcctccttcttttcttccgtcgccttgaattcgacgggttgagcttcggatgtagatggatcatcaagctcgttgatcttcctcgagccttcgatcatgcactcaaaacttacaaaatgcccgattacttcctcgggggtcattttagtatatctaggattaccacgaattaattgaacttgagtgggattaaggaaaatgagagatcttagaataaccttaaccatttcgtggtcgtcccacttgacgctcccgaggttgcgcactgggttcaccaaagtcttgagcc

SEQ ID NO: 78248 - DNA, 322 bp, Zea mays
tcttcgtggcacgcaactctctgatgacagaatctcttgaagacaacaacctattaagctgtgacacttcgttctgggaaccttcaactcgtctctatggcggtcaagctccaacatagtaaaatgatgactcttctccaaagtagtgagggagatgctggcatcgcggtacaatttattcagattgtcttaggaatcaagaagtttccacatctcctcctacggacaagaagagtactaaacatccaagcaaaaagcacgacatgaggtactatgaacaatcaaaagaagttacctcacgagctctcttttctgaatcaag

SEQ ID NO: 78249 - DNA, 318 bp, Zea mays
tcacgaagaggacccttcggctatcttatgctaacagcttcagccgaggaccacttctttctataagaccttcggcgacgaagcatagacccaacagtagcccctttcgcggtgctagatcgtttttcgtaacgagcttgatccgtgaaaaaagtctcttaagattcggagcgccgaaggtctaaaaaacaccttccctgagctcgttgtcgagaaacgattcaatctcccagcgtatagcggccccaccttgcagagttactgttcggtctttgcggtccaccatgcagcgagtgcgagtgggtgtccgcctggtgt

SEQ ID NO: 78250 - DNA, 321 bp, Zea mays
tgagccgaggcattgcctctccggttaagcagaatcaccctcgccggacgtttatcaggccaagtttaagccttaacaaatttgtagagttactatagtagtccaagtttgattaagtgaatgagccctagaactgtacagaaatgggaataaaatgccccagaagttggattgtcagccgggtcaagcattgaaacttgtctgtcagtgatctctgattaactttgaggccaaattataatccagtgagtatccaatcaagaaccttataacaaagttgaagctggtatatagggcaacaactttgatgcagtcggatta

SEQ ID NO: 78251 - DNA, 335 bp, Zea mays
ttatgtggagttagggtcaaagcagttgcttttagttcgtcaggtatttattattattagaagccaagtttttgcaataaccaacccatgaatcatttcctcatcaaggaacatcattatcatcatcgtaaccaaaaccatcaataaaaccattgtatctcagatcatctgtatctctaatcaaagagaatcccaaggccgctcttaaccgtgagcacgattgatatatcagtttcattcctctgtagaggtcgcacacaacacatgagtcgtgatccctttccagcctatgttttgcaagacccgttcttcactaccaaggtaaatagcaaggg

SEQ ID NO: 78252 - DNA, 335 bp, Zea mays
tatgaagattcttcatcccaacatgggctagtcgtcgatgccagagccaactcatgttagtcttagcaattaagcaagtgtcgagttcagctctattaatatcaactaagtatagctgaccctctaacactcccttaaatgctactgaatcatcacttcttctaaagacagtaacacatattttcgtaaaaagacaattgtagcccattttgcataattgagaaactgaaagtaagttgtaatctaaagaatctacaagaaaaacattggaaatagaatggtcaggtgatatagcaattttaccaagtcctttgaccaaaccttgatttccatct

SEQ ID NO: 78253 - DNA, 332 bp, Zea mays
tatcataagagaataacggcaagatcccgtccatatgtaataatagaaggggagttatacaagcatggagtttgttctccattactcaaatgtttatccagagctgaaggtatagagttgatgaaagaaatacatgcaggcctgtgtggatctcacatcggatctaggcctttgttgggtaaagtttttcgtcaaggattctattggccgaaggcagcttcagatgcagcaaagttagtccaaaaatgcgaaggttgtcaaaaatgtgcaagagataaaaaacaaccttcgtctctaacttaattaatacagcccacttggccactgccaag

SEQ ID NO: 78254 - DNA, 333 bp, Zea mays
tctaaagggagagcacattttaggactaaccaatgttcattttgagaaagacaggatttgtagcgcatgccaagcatggaagcaagttggcactcatcatccacacaagaacataatgacgactgacaggccactggagctcctacacatggatctattcggcccgatcgcttacataagcatcggcgggagtaagtactgtctagttattgtggatgattattctcgcttcacttgggtattctttttacaggaaaaatctcaaacccaagagaccttaaagggattcttgagacgagctcaaaatgagtttggcttaaggatcaagaaaat

SEQ ID NO: 78255 - DNA, 221 bp, Zea mays
gatattaccgcattggaacggtactagatgggatactcatctattccgatgagtgaagggcaatttgagtgtactcgggacggcttggataaagaggttccggtcatatttattgagggaggagggggaaacagaggtgccatgatgctgaaccgccgtgcggatccatctcccatgccggcgatgatcaatggacggaagatgggggaagataaagccga

SEQ ID NO: 78256 - DNA, 325 bp, Zea mays
tgagaaatatttggatacagttcgtttgcttgaagcttcctttgaagggttttatgtcaaaaatattccacgaggagaaaatgagcatgctgatctactagccaagtcagtggcacaggggctgcctttaccttcgaaagtattctttgaaacaataaaagcaccttcggttgaccttcttgagagagcagtgctcaatatatctcctgtttatagcgaagattggagaactgagatcatgtcttttctccagggcaatttcctttcagatgacgaagcttatcataagagaatagcggcaagagcccgtccatatgtaataata

SEQ ID NO: 78257 - DNA, 324 bp, Zea mays
tctaaagggagaacacgtgataggtctaactaatgtgcatttcgaaaaagatagaccttgtgcagcttgtcaagcaaggaaacaggtgggaagctctcatcacaccaaaaatgtgatgaccacatcaagacccttggagatgcttcatatggacctcttcggacccgtcgcctatctaagcataggaggaagtaagtatggtcttgttatagttgatgatttttcccgcttcacttaggtattctttttgcaggataaatctgaaacccaagggaccctcaagcgcttcctcaggagagctcaaaatgagtttgagctcaaggt

SEQ ID NO: 78258 - DNA, 326 bp, Zea mays
tgtgcaatttccttcatccgatctgtttgtgtggttggcattgtaaggagcacctgcttgcaatcaccaaaatatgaatggtatatggctgatacttaagatatctattctgttgattggtccaccataattaataagcaaagctattctgttgtggtaccaaaccgaagttacacaaagaaatatataagacaacatggcaatgatgttgtttatgagaaaacaacataccacaacaaactgaccccctcacccacccacacatgcaacccatgatacctatgaaaaaactgaatgcacatggaggcatgcggtggatgaaggat

SEQ ID NO: 78259 - DNA, 323 bp, Zea mays
taccttaatcaaggaagacggaggatatagatagacctagcgctcatagaccaacaattactttcggcgagttttcaccgctcaatcttgattacctagtcaagaagccaaaggtcaacttgtacatcacaccaatggtgcaactccgtgaccgtgtgctcgtagcgcgtacgagggcgttgcgaagtcgagcattggtcatgtcacacttggattgagcaagagcggcctcgcgttctgcctttgtcgcgcgggcgagagcatcacgggtggccttggccactcactcgcgatcctcagcacgagtctcttcatcggcgcgc

SEQ ID NO: 78260 - DNA, 321 bp, Zea mays
tgacccagggacccttgtcaccggtttatcccaatcgtgcgcaccggagttcaagaacccgccggcgcacgtggaccgggtaagcccctgcaccattttccaattccttgcgcgtatggcctctgtgtcaccccgtgaagctcctcgtgcaccctaattgatctatgccgccgtggtttggccggagcaggagccgccgacgacccccgccgcctgtgctcgtggccagggtagctccgaccacctccgacaccgacccgcacatcggcgtgaccgttgcgacctcctggacgtcactgaccaccccgccggagctctact

SEQ ID NO: 78261 - DNA, 320 bp, Zea mays
ttaccctgtggactggactataagttggttacggtaggtgtaccttatgcagttgaccatttccaacatttgcgtaatgaggactctagggagaagcctcatagtgagaccctggccattcacctcgaaagtgaatacgggtctagctaacccgggctagaagggaatcacgactcatgggtaaagatgcgccacctctagagagtgtaaaactgatatatcagccgtgctcacggttaagagcagcctagactcctcacatgataattgaacttgaagatggaaataaatcaagatccgatgatctgctaatggtttgc

SEQ ID NO: 78262 - DNA, 321 bp, Zea mays
tatgaagattcttcatcccaacatgggctagttggcggtgccagagccaacccatgttagtcttagcaattaagcatgtgtcaagttcagctctatcaaaatctactaagtatagctgaccctctaacacacccttaaatgctattgaatcatcacttcttctaaagacagtgacacctgtatcagtaaaaagacagttgtagcccatttgacataattgggaaacagaaagcaagttgtaatctaaagaatcaacaagaaaaacattggaaatagaatggtcaggagatatagcaattttaccaagtcctttgaccaaac

SEQ ID NO: 78263 - DNA, 332 bp, Zea mays
tttcttcaattggtgttacccctagcctatcacatatattatcattctaggcttgatccattcttgtatggccacaaatctaacgtagcatacacatttctggaacacctatctattgaacaagtcagctttttgtaggccagccttctgtaccatacaacatagcatgtttaatcgttgtcctataaaacttggcctttttgttactctcttgccatatagaacatcgtatgtttgacgccacttcatccacctgttttgattttatgactaacatcttcatgaatatccctatatctctatagcattgatccgaattacctacttgatct

SEQ ID NO: 78264 - DNA, 331 bp, Zea mays
tatatccatctatagagtaacatgtttttcacataccgtagttggccatgacccttagcaattccgtatcatccttggacattgcagcttcccggaactgtagaatgaaaatgataagtcaagagagtaaaatgcattaccattcgccacaatatgttgagagatattggcagccttttcttgagggcgagttgcctaatgtgttggaacagctctcttatggcttgtttgtaaggggattgagggcctgggagcaaaggaattgaagggaattgagggcttgtttaaaagtaagggaattgtagtggattgaaagctagtttgggaacaa

SEQ ID NO: 78265 - DNA, 331 bp, Zea mays
tgtaatattgattgtggactttgcttctcatttattgatcctatatcaaacatagattcttttgaattctatcggatggtgggctcgataaacgaacgaatttgagttaatcatcatttatttgcctaatggttggcaagtaagattgtgattagattaaaagcggtgtttctacaccatgtcatcttcgtgtcctacgttatcttcgtgggaccattactcgtcatctcttcttcatgtaccctatatctcttcaactctaagcctactttgatgctatttaattcatcaactcctctattcgtcactcttttctacctattatattttt

SEQ ID NO: 78266 - DNA, 332 bp, Zea mays
tgtgcctcccttggtttgtataatattactactctgcactcacttttagtcctggtctgtaataagtaccttaatcttactttcttaataaatgtaagtttatgtaattgcttccgcatttctttatctccgatgttctgtaatgtctgcaagacgggtgagacgttcctggtaaggtaaggaaagataccgagcttgtcaagtaattcaggggcacctacagggttgtctgatgtccgttggacaaggacaactgtaggtgggcctaattacttgggaggttccgtcacatcggtagccttgggcgggttgagggaatacctgtagcaccg

SEQ ID NO: 78267 - DNA, 328 bp, Zea mays
tgtgaagattcttcattccaacatgagctagtctgcggtgccagagccaacccaagttagtcttagcaatcaagcaagtgtcgagttcagctctatcaaaatctaccaagtatagctgaccctctaacactcccttaaaagctattgaatcatcacttcttctaaagacagtaacacctatatcagtaaaaagacagttgtagcccatttgacacaattgggatacggaaagcaaattgtaatctagagaatctacgagaaaaacattagaaatggaatggtcaggggatatagcaattttacccaaacctttgaccaaaccttggtt

SEQ ID NO: 78268 - DNA, 325 bp, Zea mays
tcaacgtctttgtttatttcttcttcctgagcccctggcgtctagtcagcgatgaagtctgctaacgtatggggctgaattgaggatctatgcacatagtcaatggtgaattcgttaagctccgtcgcccattttccaattcttccagtagcttctctgttcctcattatgtccttcagagggtgtgacgaaggaacaattatgtgatatgcttgaaaataatgctgaatctttctggaggccattaacacatcatacaacaccttctccaattctatataatttttctttgacaaacttaaaacttcggagataaagtacactg

SEQ ID NO: 78269 - DNA, 239 bp, Zea mays
tcagctccatctatattatggattgcttttgagtcagtccagcttccctcggcccttctggcagcttcctgacttccatgaatagcaatgggtccttgatccgaaggtatcttcatgcaaaggtaagcaggatgaagaattgcttcgaaagcattgagggtgccacgaccaataattgcattgtaagggtattccatgtcaacaatgtcaaacacaaactgctcagttctgggggtggt

SEQ ID NO: 78270 - DNA, 325 bp, Zea mays
ttaacattgctttgtgaaacatgctctagcttcgtggaaaatagctccgcccgcctacgtgaaattttcaactcagttggggcagtgtcgggggaaaagaattattctaacgaagacattccgaaggccctcgactttgtggagaaggaaattaacaaatttgacgaagtaatgaaagggcatggagacttctgcgcgctggtggcctcttgtggcacaactgctgcttttgttaaggctgggtgcaaccatataagaactgttaatagtcctaaatttagtctctcaccgtctgacctggttaatattccgaccaaagccagca

SEQ ID NO: 78271 - DNA, 325 bp, Zea mays
taagctcagcgggctcaatactagcgtcttgagcttctccctcttcttctcatcggccttaacataaaaccactcatatttccaaccgattggccacttggtgcgatagctaaccaccgaagtcttcatatctttacggtaagcgaagttgtaacaaccaaaattctcatgaagaccatcttctctgcccttcatctgatagtgaagctcgtgcattcggcaaaaagcttcggcattcgggtctattccttggcttcggagtgcccatatgaagacgctgagcctaacgatagcgttaggagtcagctgatgaagatagatttcg

SEQ ID NO: 78272 - DNA, 322 bp, Zea mays
tggtgtcgatggagaagcagaagtctttgaaatcttggttgtcgaactgcttgccgttatcgaccgtgagttcggatggtactccgaagcggcaaacaatattttgccagaagaatttctgggctgtcttcgatgtgatagtggatactgtcctcgcttcaatccatttggtgaagtattcaacggcgacgaaggtgaacttgaggttcccctgagccgtgggcaggggcccgacaatgtctatgccccatcgctgaaggggccacgtgtgggcgattagcttcgtgaactgcgaggggcgacccgagcgtggggaaaattt

SEQ ID NO: 78273 - DNA, 321 bp, Zea mays
taagatgttgatgctccaagatcttcttcccaagtggttgacaagaggaactcatcactacttcaagcacatccataagatctaatcattgggagtccttcacaaggggttatgactcgttctcaaagacatgcttcatttattgaacaacactcttttgtttcttgtgttaagcctacatgtatagatgaggtgctacagaatctggattgggtgaatgccatgcttgaagaattaaacaacttcacccgcaatcaagtttggaccctagagaagcctccacaagatgcaagggtcattggaacaaatgggtgtttcaaa

SEQ ID NO: 78274 - DNA, 301 bp, Zea mays
tgtgttgcctttgttggacgctagtctgttgatcattaaaatgtgaccgctacgctggaggatggctctagcactaaagctaatagctaattgctgaaaatggttgaaggtctaccgaaaatgagccccgcgccatgaagattagcttgcaatgatggaagctgatcagcgtgtcgtgaaacctaacgcgtctgcttgagtttgcgtttgtagatcacaggctgctatggagacgaggagcatgacattgatgactgcaacacgatgaaagatggcattccgaacatcttgagagggactc

SEQ ID NO: 78275 - DNA, 335 bp, Zea mays
tgtgaaggttctttatccccacatgtgctaagcggcgatgccacagccagcccatgctagtcttagcaattaagcatgcatctagaccggcctcttcttttgcaaaatcaactaagtaaagtttgccgtctaatacacccttaaaagctagtgaaccatcacttcttctaaagacagacacatctacatttgtgaatagacaattatatcccatattgcataattgactaacaaataacaggttatatccaagagactcaactaaaaacacattagatatagagtgctcatttgatattgcaattttgcctaagcctttcaccttgccttgattc

SEQ ID NO: 78276 - DNA, 334 bp, Zea mays
taccgacctgccattccctcaccacttttttgccgtgtttatagaagtcatctctcacatctaacacacctttacaaaaatgagaatcgctatgactctttttgacccgaaataagaggcatccccttaatgtatttttctctaacaatttttgccataggccattcgaattttctatattccagatgcacttggctagtaaggcttcattcatgcatttgagatcaaggacaccaaggccaccttggtttttcggggtacacactatgccccagtctacaaggtgcatccttctcgagttatgatctccttgttaaaggagtcttttttcgtc

SEQ ID NO: 78277 - DNA, 331 bp, Zea mays
tgtagctattttatattgttacttttatttttcctgcaactaaccctatatatatatattacatgccacattgttcctaactttatttgatactcctgtttagtttggaacgaacaaattaagcaccaactccttttacctagatagctaggaacatgccagctttcttgcatgcttccaccacgttcggctaaagctaaagcccctttattcctctatctatatatgcgtctagccaattgacatgactttgtttttttttgcttggatcagaagaagaatctctgcaatttagaatgcaaagcatcttacaggtggctctcctaagaaa

SEQ ID NO: 78278 - DNA, 333 bp, Zea mays
tcggcatggcccactctttcatagctggaaacactttgaaagccaaaaattcctacactaagtccctagtgccgatgtgctctgcgacaaccctaaattcagccagcgcaatttgggttggaccctctggtgtcatattgcacgggggtctggtatctccgaagatcaactctaatggactctgaaccagcttttccttatcatcatcaactttgacgtagaaccatttagatttccagccagctggccacttgcttcggtaactgatcactggaaattttctagtcttgcggtaggcaaaattgtaacagccaaagttttcatgtaacccat

SEQ ID NO: 78279 - DNA, 329 bp, Zea mays
tctaaagggagaacacgtgataggtttgactaacatgcaattcgaaaaagatagaccttgtgcagcttgtcaagcaggtaaacaagtgggaggagcgcatcacagcaagaatgtgatgaccacatcaagacccctagagctgctacatatggacctcttcggacctgtcgcctatctaagcataggaggaagtaagtatggtctagttattgttgatgacttttcccgcttcacttgggtattctttttgcaggataagtctgaaacccaagggaccctaaagcgcttcctaaggagagctcaaaatgagtttgagctcaaagtgaaga

SEQ ID NO: 78280 - DNA, 325 bp, Zea mays
tctaaagggagaacacattttgggactaacagatgttcatttcgaaaaagacaggatttgtagcgcatgtcaggtagggaagcaagttggtgttcatcatccacacaaggacatcatgactactaacaggccactcgagctcctacacatggacctattcggcctgatgaaagtcgcctagagggggggtgaatagggcgaaactgaaattctcaaaaataatcacaactacaagccgggttagcattagaaatataatcgagtccgcgagagagggcgcaaaacaaatcgcaagagaataaggagtgtgacacgcggatttgtt

SEQ ID NO: 78281 - DNA, 323 bp, Zea mays
tacaacaagaaggtcttggctaagtcattccaggtaggagacctggtatggaagaccatcttgccactacggagcagagaccagaaattcgggaaatggtcgccaagctgggaaggtccttacaggatcacataggtaataactggtaacaactacatgttacaaacattgcaaggtgaagacttgcctaaggcactgaacggtcgttttctaaagcaatattatcctattgtgtggcaagatgcttaagaaaatcgatgttgtcacattgagttgattctagcctgcgtcagtgcttttggttttctcagcttctccaaaag

SEQ ID NO: 78282 - DNA, 324 bp, Zea mays
tgtagggtttgataatatcaggtcttctttttttccttgctagcctaaaatttctccattcatgcatatctgattttgagttttggtcatttgaattgggtcttactatatgagctcgatgattgggatatttttgttcaattcattggagggcacctgccaaagatacataattgctaccagtacacattttattttctcataggagaatgttttttcctactatgttgtatgtgtacaagttgttgttaagtgtagtgaagaattaattagtagcttgcacagaaccaaagattgagtgatttgtttaggcagaaatcagtg

SEQ ID NO: 78283 - DNA, 320 bp, Zea mays
tgcctgcgctagacttctggcgagccgagggtgtgtctgccgactgaggggaccctcgggcgaggcgtgaattcatccgagactactgtcctggcccgaggctaggctcggatgatgtcgcgtcccttggtagacgaagcccgcgttttatcgatcgtttatggtttgttctgaagatgttttccagccggattaaggagcattgggggtacccctcattatggtccccgacagtagcccccgagcctcgaagggagtgcaggtactcgcttggaggttctgccggatttttcgcaaggggaccggcccttctcggttat

SEQ ID NO: 78284 - DNA, 322 bp, Zea mays
ttatcttttgtgtatggacgtcgcgcagttttaggctagggacagggagttgtagcgtcaccaatgtgccagtgtcagaatgcctggtccctatgtcaaactgcgccaaaaccgtgtcaaatgaatttggtttgagttcaaacttttccaggatgtgttcaagggaatttggcacaactttgatatttggatctcctggctttgagtttcgaaaaacggagaacacagatgatcattgggaagaggtctgaaattcagaaattcagaaatctgaatttctccaagggttcatagttcaagggctgatttggggatttatttg

SEQ ID NO: 78285 - DNA, 320 bp, Zea mays
ttggatgtgcatcgactacaccatccttaataaggtttgtcccaaggacccgtatccacttccgcgaatagatcaagtcgtggattctacctccgggtgtgacctcttgtccttcttagatgcttactctggtttccatcaaatccagatgtctagggaagataggaagcataccgctttgtaacactggatgggctttactgctatgttgttatgccttacggtctgaaaaacgccttaccaacatttgtgtgggtgatgagtaagaccttcgaggacctgattagggacaaggtggaagtatacgtcgatgacatcgt

SEQ ID NO: 78286 - DNA, 328 bp, Zea mays
tgactcctttcgccttgtgacacctgattgtcacttctcggtccgagaataggtcggaagccttccttgtcttgactactatgtcatcgacgtaagcctctactgtgcgaccgatgtgttctccgaacacatggttcatgctccgctggtacatatcgcccgcattcctcaatccgaacggcgtggggacatatcatgacatgccgaacggcgtgatgaaagaagtcgcgaggtggtcggactctttcatccggatctggtgataccctgagtacgcatctatgaacgacagggtttcgcacccaccggtggaatccactgtttggtc

SEQ ID NO: 78287 - DNA, 333 bp, Zea mays
tgagcagtgactggcttcgttggattcccttggttgctggttatcaacatgtccttcagcttttgccatgaggtgattgtccctggccgaagagaggagtaccatgtttgtgcaacactcttgacagccatgacgaaagactttgccatgaccgccgtattaccaccatacgaagatatggttgcttcatagctcatcaagaattgcttcaggtctgaatgaccgtcgtacatggggagctggggtggcttgcaagactggggccacggtgtagcctgcagttctgttgacagaggagaagtatcatcaaaagcaaaatttccatgatggaaa

SEQ ID NO: 78288 - DNA, 331 bp, Zea mays
tgtgaatggcttgccgaagctacattttctgcatgtttgttgcccacatattctgctatgtagggagaatggcacgaagcagtatgtatgacctgcttcggctgattctgacgggcttgtgcttcggggatctctttttgtttttgaatggtgatctggcatgttcttgtcgtgtggcccttgtctccaccatagaataagcaatagatttttctgggctgatccccatatctacctccgaagcccctgccgcctctgccccttggagctggtggcctgaataagctttgctgctgccctgaatactgtgagctgtgttgtggcctctgaa

SEQ ID NO: 78289 - DNA, 329 bp, Zea mays
tcctatggcgcctgtagctggactctgctgctgtcttcctcaccctgtcgggtggcacagcattctgagcatggcatgcggcgttgttttcctgtcaggtcagtcagtggaggggcgaagtgactgcggtcacatcggccctgccgactgaggaacgcgcgtcaggataaggtgtcaggcgatccttgcattgaatgctcctgcgatacgatcggttggcaaggcgatctggccaaggttgcttcactgcgaatcctgcccgagctgggcctctggcgaattgaatgtgcgcccgttgcttgaggaggctctcgggcgatgcgtgaatc

SEQ ID NO: 78290 - DNA, 326 bp, Zea mays
  unsure (1)..(326): unsure at all n locations
tanagaaattcgggttttatcagctttttaaccagccaggccaaggaaacttcgaacttgatgtatagtggttggtggtttccactctataatatccttgaccttgctgggatcaaccgcaatccccttggcagacaatacgtgtcccagaaattggatttcctccagccaaaacgtgcacttgctgaatttagcatatagttgatgttcccttaagcgcgttatcacgatccggagatgccaagcatgctcctcttcattcttggaatatatcaagatatcaccaatggagaccaccacaaatttatccaactcatgcataaatt

SEQ ID NO: 78291 - DNA, 327 bp, Zea mays
tcatgtagctgctgttctaaaagataagtgaactgggtgcctctgtctgatactatcttctttggaacgccatgctaacacacaattcgagacatgtataattctgccaaccctgcgctgctataggtggtcttgactggtataaaatgggtcgcctttgttaaatggtccactactacccagatggagtcataaccagctcgagtgcggagcataccaactataaagtccatcccgatctcatcccatttccactgaggaatctacaatgactgcaacaaacctgcgggcctctgatgctctgccttgatcctctaacaactgtcg

SEQ ID NO: 78292 - DNA, 318 bp, Zea mays
tatccatactaaaatcatatattatctcagattaaacatgttaatccaaattaattattcatttttgaagacatgttaggtggtaaaacaagtttactaaagtgtaggtaatattattacgagactaacgtaatttgaacgagtcaaatcgaagttaaattggggaagttatggactaaacaagtttttatggcctcttttatagcaaaatataagtccaggggtgtatttgtaatttgcagggacacgagtgtaaaggtcttcccatggcgaatgacggcaggttttattatgcaaaagccgatgggctttttgtga

SEQ ID NO: 78293 - DNA, 322 bp, Zea mays
tggcatacaaatggcttatctcgtatcctctgaagtaccttcctcaaatgttcctcatgttcttgctcattctgggagtatacgagaatatcatcaatgaacaccaatacaaacttgtcgaggtagtccatgaacacactgttcatcagatacatgaagtaagatggcgcattcatcaatccgaatgacataaccatgaactcatatagcccatacttggtgatgaatgttgtcttcggtatatctgcgggttggattctgagctgatggtaacctgacctcagatctatctttgagaacacactggctcctctcaactgat

SEQ ID NO: 78294 - DNA, 323 bp, Zea mays
tattgtctatatccattgactccattttcctttcaatgagactactacatataacagacttgaaaacaggtattagtctcaaagacagattatagagtaacctccccctgaaagtgtgcatacaagttttgaatacttgtagcagacatgcactttgatttgatattaagacgggcaaattatttataatccgagctttggcacatataggttaaatgataccaagacataattgaagtattataccacttatagtatatgtcatatgaaaatatcaattgatgtatcatattcttagaaatgttaaataagctatgtgtcgg

SEQ ID NO: 78295 - DNA, 137 bp, Zea mays
tggccgaatgaatcctttattcattttatcttgtaattgaatcttcattcttgccactcattaaggggcttttggacaatcttccggaaatgggaaccgttccgggcctttacttaatttcaaatttttcatctttc

SEQ ID NO: 78296 - DNA, 320 bp, Zea mays
taatgttcattccattgtcccattcttctagcattccaaatattattacaatgaaatctattcttctctgagaactttttctgcaacttcgtttaaaagtttatcgacaacttcgtcaataatggagtctgccatgtttataatgtccagcgcttccttcatttctggatcagctaggggatcgtacggttccggcggcggagatagttcagctgaagtaggaaaaattgattagttcgaagccacaaagcatgtaccgaagctaaaaaaccaaaaaataatacctatacgcctttcgcgttctgcagccttttcagctt

SEQ ID NO: 78297 - DNA, 327 bp, Zea mays
tagatttagggttgagtactttacaccatagttaaccacacatcaagtcatatcagtacaacatatttgaaatttttacctagtgaatgcactctaagtgtgacaaacacatgatatgctaatgctcatgatgttatgctcaagttttagtgacagtaacaccattggtgttacagtatcggggctaaagggcctatgatggcatgcgtacctcggtctgagtaagttgctaggtaacagagtttgattctacttatatgttcttcgcgtgtttttttgagtcttcgtgcatcaacctaaagcttaaggagggtgcgtcgaccatca

SEQ ID NO: 78298 - DNA, 335 bp, Zea mays
taacagacgatgaagccgaagctctttagataatgttgaagcttgaatagatagctgtggaaaaaactctaagaactcttgtaataacctttgtaaagaatattgtaattagattttactctgtgaactttgtccatacgttgtaatatattcttacctttccatcaatgtatgaagtgcttcgatgtgaaagaaacgagcattttttgagccgaaggcaaaaaacaccttcccttcttttcgtacacagtgaagcataaaactgcttctttttttttgccgaagccttgtctttatagccgaagcaaccgcctgtgttatgatgatgatgatcc

SEQ ID NO: 78299 - DNA, 329 bp, Zea mays
tgaagccatggtaagtagcataggcttgtaatatacgaattgattctagcctagctacgggtgcataggtttcaccgaaatccaaaccttcgacttgtgaatatcctttggccacaagtcgagctttgttccttgtcaccacaccatgctcgtcttgcttgttgcggaagacccacttggtccctacaacattttggttaggacgcggaactaaatgccatacctcattcctagtgaagttgttgagctcctcttgcatcgccaccacccaatccgaatcttgtagtgcttcttctaccctgtgtggctcaatagaggaaacaaacgag

SEQ ID NO: 78300 - DNA, 331 bp, Zea mays
tcggaatattacgacttcattctcctcgggagtcggacaagttttccctccttcatcagccctcacaatagacaagtcccgaaaatatctacccctcatattgacaagatggctttgtttaatgcttgatttcccaaaaaccgcatggcttggtcgccaaggtagatcttcagaatcttcactaccactttccacatcatagctgtcactatcaccagtgtcttcagagagaccctctaaaatctccttagtaatcttctctgtgttagtctttgctattgattcaaggaagccgagattcatctcttcggaaaggcttagcttcgactca

SEQ ID NO: 78301 - DNA, 329 bp, Zea mays
tcatgggctcaattaccaccacccctaccactggctcctgccccaagtcatgatcagcagccagaagggcatcttctgcctcaacagcaacgtgaccttcgggagcagtctgaagctcgcacagttaatagtactatgcctgagtccaggcatatctactgaatatggcacaatgttttgaccaaaagagagctccgatttgttatatttttactctttttgtttttatatttccttctaaaaagacaatacaggaaggtttaaccttcatcttgatgtaataaacctatggttacaccatcgagtgtgacaagagtaagttctgaaga

SEQ ID NO: 78302 - DNA, 326 bp, Zea mays
tgccgatgccatactctcctggtgcttgctctcgccctaggccatggagcagcagcagccacgacactccttcgtgtcgcactatcgacgtgttcgaaagcttcatcttgatctatgcagtcccggtcacgtcgtcgtttaccccggtaaggaatagctgttctccttatgttattcatcaccagtacctgtaacccgcattaatttattagatgaatatgaaagcgaagtcccgaggtgtcgttcatcatgtgctcaacgtatgggctaaattgtagctcgacgttgtgcttatagttctctagttgaatttaattttggatgag

SEQ ID NO: 78303 - DNA, 324 bp, Zea mays
taaaggttctctgatatagctaggggcttcagagggagaatttatcctagacatgtcagatcgattcattccactcagaatgatgacaggggaagccagcagcagaggccgcaatattcctcccatgcttcggggcagcagcagagctatcctcggcccctatctccaaggggcagaggtgccaggggcttcggaggaaggtttggggatcagcccaggaaaatttattgcctattctgtggcgaggacaagggccacaccaccaggatgtgccatgtcaccatccagaaacaaaaggagatagcaaaagctgcagcccaacag

SEQ ID NO: 78304 - DNA, 324 bp, Zea mays
tggaggggaaagagatggtttggttactgtcagctccccgcagtcgctgatatacacggtcttaagcgggcggtcccacatagcccgggcagtttgagcccttccatcaccaatcaactgcgcaaagccgttgaagaggcggatcctttcagctggtttgtaggtaggtatggttgcgatgctggtgatgacatccattcctgcaggacaacaaatggcgcgggcatcacaacacaaaagccaatgagccaaagacatttcaagagctacacaaaagtattgtgattctagtataatatcttgtgtaacctatcagcatgagaa

SEQ ID NO: 78305 - DNA, 324 bp, Zea mays
ttaccctaaatagggattaagggggtaagtcttaacccaacttgagaaaatccaaatattttagggtaatagtcataaaatatccccaaaaacaaagtggagtcacatttatacccgtggatactataaaccctaaatggaaccctgtaaaaccctaaaaccaaaccttaggggcctatgtgcaaaaactgtgcacatttggaccaaagtgtaaaaactactatgtttaaacatattaagtcatttgggttacaaatatgtggatttgcaagttaaaccctaaagttttgggcttaagtgcaaaagagccacacttgaatcttt

SEQ ID NO: 78306 - DNA, 320 bp, Zea mays
tctaaagggagaacacgtgataggtctaactaatgtacatttcgaaaaagatagaccttgtgcagcttgtcaagcatgtaaacaagtgggaggagcgcatcacagcaagaatgtgatgaccacttcaagacccctggagttactacatatggatctcttcggacccgtcgcctatctcagcataggaggaagtaagtatggtctagttattgttgatgacttttctcgcttcacttgggtgttctttttgcaggataagtctgaaacccaagggatcctcaagcgcttcctcaggagagctcaaaatgagtttgagctca

SEQ ID NO: 78307 - DNA, 323 bp, Zea mays
tcctggaggccatcaagacaacattctgtaccttctccaattctgtataatttctctttgataaactaagaacctcggatacaaaatatattggggcctgcctcttaacttggccttcaagcctctcctggacaagtgctgcacttaccgctgagtgcgaagctgccacatataataacaaaggagcccatggcgtaggtggagttaatgttgttaaatctatcaaatactgcttcagctcttcgaaggctttctactggattggtccccattgaaagacttcggctgacttcagcacttcgaagaatggtaagtttctttct

SEQ ID NO: 78308 - DNA, 319 bp, Zea mays
taggaggtaatctcctattgagattttgtaaagtgggcaagagcctccaagttgtggagcgccttgtatagactcaatatcacttgagaaaagggaaaggggaatcaagtttgatattggctatcacttaaatgagggtagggttgagatatactcgatccttagtggacttctcaacggagacataagtttcattttgaaaccgaaatctaggaaacaaattatcgtgtctcttgtgctttgactttgctatttgttttccctctccttctcaagttcatacttgccttaatatccattcatgttgctaagatcatat

SEQ ID NO: 78309 - DNA, 335 bp, Zea mays
tgacaagagtatgctgattctgctgtttataccattttaacttgcgcccatggagtggaatttttttaagagcgagatcatctaccaattttttgaatcgacccatcatagcccgattaatatgcgagttgtttttatcctcggcttgcaatatgagattgaaatccccagaaaccatccaaggaccctgacaagctgctctaatttgtttcagctcttgcagaaattcaatcttggcttcattagattgaggtccatacacacaagtaagccaccaatggtgtccctccactgaacaaaactgcacagaaatactatgaatgtctgtcctggta

SEQ ID NO: 78310 - DNA, 332 bp, Zea mays
ttagctttgagagcaattgattcattcttcactttctttttcttacttatagcatcggcttgagatttcatgaatatatcttgagtaagaatttcccccaatacttcggttggagaagttgtagatagatcacttcttactaacatggtcacaatggtctcatacttctctggaagagatctaaggaacttatgagtgaaatccacatccggtacattaaaaccaagtcccttgagttcattcactatctcatttaattggttgaacatatcagatacactttcatcttctttcataatgaattgctcaaattttcctttgcacacatatag

SEQ ID NO: 78311 - DNA, 330 bp, Zea mays
tctctttatcatcatcaaccttaacatagaaccattccgatttccaccctgctgcccatttgcttcgatagctaatcacaggacactttgaagttttccgataagcaaaattatagcaaccaaagttgtcatgtaatccatcctttctagcctttgtctgatagtgcagttcatgaactcggcaaaagctgtccgcaaacggttccaccgcctggcttcggagtgcccaaatataaacattaagcctaacgatagcgttaggggttagctggtgaaaatagattccaaaattattcaatatctctgcaataatcccgtgaagggggaatc

SEQ ID NO: 78312 - DNA, 323 bp, Zea mays
tgatggtcaagtcaagaggcaggccccaatatattttgtttccgaggctcttagtttatcaaagaaaaattatacagagttggagaaggtactgtatgctgtcttgatggcctccatgaagcttcggcactatttccaagcttacaacataattgttccttcttcacaacctctgaaggatattatgaggaaccgagaagctactggaaggattggaaaatgggctgcagagctcaacgaattttgtattgaatatgttcatagatcttcgattcagtcccaggcgttggcagacttcattgctgactggacgccaggggctc

SEQ ID NO: 78313 - DNA, 353 bp, Zea mays
tgtgacacttgaaactcatcttgcagacttgccgactccgctttttgaacgttttgtgattggcgcgccggtttagcgagcgtgctgacgcgcctgctgtcaatccgccttcagtcacgtcaactgccatatctatccctgcggctaactgacccacggccccacacctggtggtttcgtcgggcaacgcacggggcgcctcgttgctgctgcattgatttaaaatattaccttttgtcttccgcagcggccctaaggaggcgcactacagacgcgcgcggcggttcgctctttccgcacccgaaattcggcacacaaactgtatgacttgtgggcccaggcctcgtgtcata

SEQ ID NO: 78314 - DNA, 327 bp, Zea mays
tttatttacttcctacatgctttttttgtcttccttttcggtggttgatgccaaagggggagaagtttagggaccaaaagcaatggaaactatatcaaacaccaaacaccaccaatttaaaattttatatctacaaatggtttttccagtggttttggttatttggtccaaaaataggaagtaagtgaattatggagttagggggagacttaagtccataatatcacattgtggggacaatcatgcatcttagcaagtagattgcatattttaattcaaacacttgtattatttgcttgctttggttgtgttgtcatcaatcaccaa

SEQ ID NO: 78315 - DNA, 324 bp, Zea mays
tatgcaacatcgctttttatggtttttacatatccaacgaagacctgaagaggcaccagtgcatatcggaataattaggcgtcccgagaatgtgaagagaggtagaggtcggccaactttgacgtggacagaggctgtgaagagagacctgaaggagtggaatattgataaagagctcgccgcagataggaaggggtggaagtgtgcaattcacgtgccagaaccctgatttatagtttcgcttttcctccttaatcgtttgacctttccttgtgcccattttatatcttgctggttcttgtgggttttatctcttttatgtgt

SEQ ID NO: 78316 - DNA, 322 bp, Zea mays
tcaacaacttaagcctgtaaagaataatattttcttcgtggcaacaacgaaactattacatgaaattttaaaaagtgtcctttattacacagaaaataaaactggatgggaaaaagctactatcaaggtaggatatttgtcaatagatgtgcttcgactctggcacagtgctgttgactgtacgagcttcggattgttctctgaagtccctttgatgttgatcatattggcccccttctggctgctggccttgttgcagtggtggtgggggcggaggttgttgccaggaagcttgaggttggctcgccgaagcaacagaaac

SEQ ID NO: 78317 - DNA, 319 bp, Zea mays
tgtcaacaatatatgcacataagatataaggctgcttcggcagatcatccgaagcctatgctcctatgtgaagatataacatatcaaagggtactgctgggatctcagttatctgatgagaaagaaaagattttgctaagatttttgttcaacaacaaagatggttttgcttggatagctaatgatctttgtggtgtcaacagagatgtcatcgaacattcacttaatgtggatccatctttcaggccaaggaagtaaagacttcggaagatgtctgaggataaagctgaaggtgctcggaacgaagtaaagagacttc

SEQ ID NO: 78318 - DNA, 273 bp, Zea mays
tgcataaactttctcaaatttttttttctgattccaggaaaaaacaggtttctgtgcgggttctagccgtccggatctgtgacacgtctggaaggcgtcgagcgggcgcgtctttgactggcatacctgtacgtttagcgcatccaggccatcgaacccgacccgacctcgcctcacttcactcgggatataccaacagttcgctgccgtatcctgcgccataccgtcgtcgcgactctagacaccatcgattatgaacaaggagcaagggat

SEQ ID NO: 78319 - DNA, 319 bp, Zea mays
tggtgccgatggagaaacaaaaatccttgaaatcttggctgtcgaactgcttgccgttgtcaactgttagctcggacggtactccgaagcggcaaacgatattctgccagaagaatttttgggcagtctttgatgtgattgtggaaacagccctcgcttcaatccatttggtgaagtattcgacggctacgaaggcgaacttaaggttcccctgagcggtgggcaggggcccgacgatgtccatgccccagcgttggagaggccatgtatgggcgatcagctttgtatattgcgaggggttgcctgaccgatgagagat

SEQ ID NO: 78320 - DNA, 335 bp, Zea mays
ttgaggatgcagcaagatctagaagattagaagcacgaagctataattgaaaatttagagagcaagataaaagaacaatcagctattattgaaaagaaagacttcgaacttcaatcaaccgaaggcttgctggcagagactgaagccaaagtagcagaattgaattcgaagcttctctgccaatcaaaacaatttgaacaagagaagctaaaacttgattcgaaacttgaagccgaagtccaagccaactcaaatttgaagaaatcattaacaagccttcaggataaatgtttgaattttagcaacaattgtatccaacaactaaagaagatctt

SEQ ID NO: 78321 - DNA, 335 bp, Zea mays
tggcatacaactggcaatcatgtattctctgcagttctttcctccagtgctcttcatgttcctactcattttgggaatatacaaggatatcatcaatgaacaccactacgaacttgtcgaggtaatctgtgaacacactgttcatcaagtacatgaaataagctggcgcatttgtcaaaccaaatgacatgaccgtgaactcatatagcccatacttggtgataaaggttgtcttcggtatatccaaaggccagattctgagctgatggtaattaacctgacctcagatctatctttaagaacacatcggctcctctcaattgatcgaataagtc

SEQ ID NO: 78322 - DNA, 332 bp, Zea mays
tatcaatcattgcatccatagcagttttcttgggttctggtacacccctactcattcccaacttagtttcattgcctgaaagtggagattatcaataatcaatctcctggtaaagctgaaatttaaaataaatccatgtcacaaaatctgattcatatataaaaagggtaagactgaaaaaaaaattgtcagttactctgcatattactataataccattgaaactaagtttgtaggaggtgtgtgagcaaaaaaaaaattaataataatgtgttctacatgattgttgtaacttgtaagactaaacagcattatatttactgattactgaa

SEQ ID NO: 78323 - DNA, 331 bp, Zea mays
ttgccaaatagggcgcataattatacctttgatatcttctcgtactgtcaggtcattcttcacataaaaccattctgtcatccagtcgccgggccatctcttccgaaaggttggcacgggacagcttgacccggaccgagaaacgaaactgtagcagccaaaattattgtgatattgttccttaccccaaggttttgtttcgtatgataattcgtgtatattgcagaaacttttcgcatcaggctccagaccttggcttctcacggcccacacgaagatattcagccttatgattgcctcgggggtaagttggtgaagatagacttcgaat

SEQ ID NO: 78324 - DNA, 319 bp, Zea mays
tcgttcctcagcttgataacctctgctcgtaggttgttgaaagcaatattgtagctctcgtcttcggcattcttttgcgctctcaaagcgttgctcagtattaaaccctatatgaaaaaagaattagtataagaataaaagaatgattcaaaaattgtaaatttccaaatatacaattctcacaccttcagactattatatgcaaggctgtccgcaagatcgtccttcgtcatagcgcagagtccagcttcaagcttcgaaaaccccatacttctagccatctcccggcagacagataattctttgttgtcagggaggc

SEQ ID NO: 78325 - DNA, 328 bp, Zea mays
tacaacattgactcataccttcattgtctaaaaagtcattctatctttaagtcggtttatactgtcgaagcttcatggagaggaaccttcggccatctcatacaaacagcttcagccgaaagccgcttctcccttgaagaccttcggcgacgaagcatagacccaacagtagcccctttcgcggcgctagatcgtttttcataacgagcttgatccgtgaaaaaagtctcttaagcttcggggagccgaaggtccaaaaaacaccttccctgagctcgttgccgagaaacgatttaatttcccagcacgtcgcggtcccaccttgcat

SEQ ID NO: 78326 - DNA, 327 bp, Zea mays
tataacaagagaatagaggcaaggtctcgaccatatgtcataatagaaggggagctgtacaagcatggggtctactctccactactcaaatgtttatccagagccgaaggtatagaattgatgaaggaaatacacgcaggcctgtgtggatctcacattggatctaggcctctgctgggaaaagtttttcgtcaaggattttattggccaaaggcagcttcggatgcagcagaattaatccaaaagtgtgaaggttgtcagaaatgtgcaagagatcaaaaacaaccttcgtctctaactcggttaatacaacccacttggccattg

SEQ ID NO: 78327 - DNA, 324 bp, Zea mays
taaacatttatgatggatcgtccttcttataacatcgcacacaaagacatatatgcaatataaacaagtagaacaataagaatggcattcacacaacagttgtgattcggtatggcttgctgtcacatggtgatccccatctccaataatctgtccatcacgatgatctccatctccatgatatagatatgccatcctccaggtgatgagtccttcaagacctatctaacgtatgctggtaaacaaattacatatacgctttggatcatcacatgttgacacgcaggtcattacattaaatttggacaatacatgtggctccag

SEQ ID NO: 78328 - DNA, 322 bp, Zea mays
tgtgaagattcttcatcccaacattgtctagtcagcgatgccagagccaacccatgttagtcttagcaactaagcaagtgtcgagttcagctcttttgaaatcaactaagtatagctgaccctctaatactcccttaaaagctactgaatcatcacttcttctaaagacagtaacacctgtattcgtgaaaagacagttgtaacccattctacataattgggaaacagaaagcaagttgtaatctaaagaatctactagaaaaacattagaaatggagtggtcaggtgatatagcaattttacccaatcctttgaccaaacc

SEQ ID NO: 78329 - DNA, 317 bp, Zea mays
tcgatattatagcctatcctaagattaagggtcaaaccgacttaaagatggaatgactttttagtccataagggtctgagtcataattgtaatcttttgtaaggggtatgattgtaatttcttacaggctatgtcctgtgcctataaatagtgaacagtactcctttactgttcacggaatcctgtagttgctaacgcattactctggaattattgttttctgtcaaggcgaaggtataaatgtaactaaacatcatgttttaatatttcaatttatattataaaatgagcaaatgatgttatttattcttggtatt

SEQ ID NO: 78330 - DNA, 321 bp, Zea mays
tagagtaatggtgggcaattagtgtcacacccggatttaaggggtaaagccgggtgcgtctcatgtgtgcgcgaaagaagaacaacacatataatgaccaagtgtatagagataaatgtcacaaatattattattacatagcggaagagtcttccaaaaataaatgataacaatacaacaaactagtaattatttcttggagccataaagctgactgggagatgccacctagattagctcgtatcttcattgtagacctcctcctgggccacctgttcttctcctatggggggtttatatatcacaagagtgagctcacaa

SEQ ID NO: 78331 - DNA, 319 bp, Zea mays
tggcatccacgatgactctcagattttgaccaagatcgccgagcttctgagataccactccaccaagagtggtgatgagctgaccagcctcaaggactacgtgaccaggatgaaggagggacagaatgacatatactatatcactggtgagagcaagaaggcagtggagaactcccccttccttgagaagctgaagaagaggggctatgaggttctgtacatggttgatgccattgacgagtatgctgttggtcagctcaaggagtttgagggcaagaagcttgtctctgccaccaaggagggtctgaagcttgatgag

SEQ ID NO: 78332 - DNA, 317 bp, Zea mays
  unsure (1)..(317): unsure at all n locations
tctaagggagaacacgtgataggtccaacanatgttactttcgaataagatagaccttgtgcatcgtgtcaagcagggaaacaggtgggaagctctcatcatgccaagaatgtgatgacaacatcaagacccctggagttacttcatatggacctcttcggaccagtcgcctatctaagcataggaggaagtaagtatgggcttggtttagtttatgattattcccgcttcactctgggtattcttttacaggataaatctgaaacccaagggaccctcaagcgcttcctaaggagagctcaaaacgagtttgagct

SEQ ID NO: 78333 - DNA, 318 bp, Zea mays
  unsure (1)..(318): unsure at all n locations
ctaagctaagtgaatagtctaaaaaggttactaagaagggacctatattatattcacaccccttatataccaaanaccctaaaaaggaccctagaaaaccctaaacctaaaccctatggggctaagtgcaaaatcagtgcatgtttggactaaagtacaaaaactatgaaagtaaggtatcttaagtcatatggttcataatcatgaagatttgcaagctaaaccctgaattttgcacctatttgcaaaaagaacctatttgagttctaaacctaagtctgaaattcaatgacattggctcaactctggagctctata

SEQ ID NO: 78334 - DNA, 452 bp, Zea mays
  unsure (1)..(452): unsure at all n locations
agagaattnngtggtcttttagctttgcgctggattgcttctttctcttattctttttgcgatcaactcaattgtaaccgacgcaagagacaccaattgtgtcgtggtccttgcanggacagttgattcccgtttgattgataagagaagctaactcggtccgagggaccgtttgagagagagaaagggttgaaagagacccggtctttgtgaccaccttaacggggagtatgtttgcaagaaccgaacctcggtaaaacatatccgtgtgtcacactctctactcgcttgcgatttgttttgccccctctctctcngactcgattttatttctaacgcctacccggcttgtagttgtgattaagtttggtaaattcagattcgcgctaatcacccgcctctatgcgactttcanaaacgaccgacatgagacaaccgcttctgttctttcc

SEQ ID NO: 78335 - DNA, 515 bp, Zea mays
  unsure (1)..(515): unsure at all n locations
cttagatactaagctntaagctcttgacataaaantacttcatccagtttaaacaaagatgtaanaatgaatgtttgataagctaaactacgtatgaagcagggttaatgcatgaacatgctntttcttccttttatacaatgatatgcaagtaatgtaggaagaatttacgtacatgtatgaatgagatagaagagntttacctttttgtacctttacatagagatgctctcttcattgtgctttgtccttagtcttagtcgcttaagacctataaaccacatcattgattgttgtgaagacctctatgtccangtagatggtggtgtccttgatgttctttctttttcatttgagtgtncctccttatatttgctctttaccttccaacttattgaaatactcaaagacatgtaatagcgcagggagctatggtgacgatgatactttagataatagcatacaagatcatcaccacaagtacacagacatgaagtaaattcgtaacattagtg

SEQ ID NO: 78336 - DNA, 517 bp, Zea mays
  unsure (1)..(517): unsure at all n locations
tagacactcagcttagcaacttcacactctnttntggaattgtgcttgaagacttaatagtctccaagacgtctagtacatttaccattcttttcctttttggggtcactgatggccccttttggttntttgctgtcccaatgattgctgtangactcacaacttctgatgttttggagccctcagttgcttctcttacctcctcaattttttctgtgagcggcgcttcggttntctcttttgtttctgacaacaaaatgttngattgttctgattctatctttggtggcacttcggccgtttctgcgatctctggcaacaaggctggctcgattagttnttcagcttcngtggctgaagaagttttctcggaaactccgacactgaagcttgttcaatataacgcggccgttgcgtaagaacctttatctttttccttttcggntctggctcgctaggagcagctgcagcttcttcttttgcagagatngtgttntntctcttctgccttcgaatg

SEQ ID NO: 78337 - DNA, 313 bp, Zea mays
tcagtcttagcgttagtctcagtcttagttagtcttagttagacagggtagtttgctatattctgtgcatctatgtttggcatgatgaactatgtttggtttggatctttgtaatgattgtcaccagagtgtgggtatcccctgcattttgcgttatctattatgttaatggagttagttatatagttgggaaaccccttttattccactttcctttctatctgagaagctgtgtggcctgtgttggagatcagtgaagatgctcacctgttcagtgcttgtgaggaagtctcttctcttctcttatgctgca

SEQ ID NO: 78338 - DNA, 313 bp, Zea mays
  unsure (1)..(313): unsure at all n locations
tctcgtacgagagccctggaccttttctttatatgcgtaaggagagggcccatgtgtattatgtgggatgtagcactgtgctaacatgtctagcagagaggagctagagccctaagtacatgccgtcgtggcagccggagaggttntggcaccctgttcatgtgatgtcgtggctgtcggaggagcgctggagccttgcggaaggacagctgtcggggctgtcgagtccttgctgacgtctccttgctttcgtaaggggctgagagccgccgtcgtcatggagcacgcggtgcgccatcattattctgttatc

SEQ ID NO: 78339 - DNA, 364 bp, Zea mays
  unsure (1)..(364): unsure at all n locations
cacaaaactcagcttaactaaactacaatctatgccaagagctaaatgagtgacttatcatttggccacagagcgtatcacatgagtntgcggtatggccgtatttatacgccaagtgcgttgaaaattgaaagaccccgcttgtcagtgaatgttgctattctatcaaagggaaggtgttttttcggaccttcggcgtaaagccttcattcatgtcgcaatctaaatttattattctaaacaaattaatattgcgaggggctactgttggggaccttcggcatccgaaggtcctcaaatacaggagttaacagtattntccggagtattatgtgtgaacatgtatcttcggattaagtcagca

SEQ ID NO: 78340 - DNA, 428 bp, Zea mays
  unsure (1)..(428): unsure at all n locations
tcagtcatcgtgcacatcatctccttcaattccatttgagagacacactcatcgtctttaagtttangccccttgtccttgtccatttgattctttggtcctatcattgttagcacaaaacagagacaaaaaaaggcaacaaacaatgtgaaccctacaactatctctcanggtggtggtggaggtggtggaatacaaattatgaagcgtcttaccccgctcttacaacgttcttaccagcactgcaggtggcaaacggtgaccgatgtgactgtccaacgagcgtgggtgtgattgcaaaagagtacctgttcttgttcgagagaaaaattggatctatgggaaaggctgactaatatatatatgtggcacacaagtcagtacagatagcaatgctgaataagtgttccaagtactcgtcctagttg

SEQ ID NO: 78341 - DNA, 394 bp, Zea mays
  unsure (1)..(394): unsure at all n locations
actaatcagacctagaagaatgctgaagcctggcgttgcagacagtccgatgggacaaaggtaccttatgctnaattctcctatatcaatagctatcaggctagcttgaagatgtgaccgtttcaggcactctatggacggagttgtaggactccgctgcattgggaccagcctggagagagacatgtgtttggcctcgacattctgctcgaagcctaatacaatatcaaaatgggttcggagaatctgaagattgcacacataacgccgccaacttattcggacccgaaaagaagacaactgagttttgaagtgggggtctcgttatctgaaagcgcaccgataggggatcacaatgcctgagttaacgcacctaacgccccggatgttgaca

SEQ ID NO: 78342 - DNA, 502 bp, Zea mays
  unsure (1)..(502): unsure at all n locations
tctaaagggagaacacattntaggactaacanatggttcatttgagaaagacagaatttgtatcgcatgccangcacggaagcaagttggagtccatcatccacacaagaacatcatgatgacggacaggtcgctcgagctactccacatggacctattcagcccgatcacttacataagcatcggcgggagtaagtactgtcttgttattatggatgattattctcacttcacttgggtattcttcttgcaggaaaaatctcaagcccaagagaccttaaagagattcttaagacaagctcaaaatgagttcggatcgagaatanaaaatattagaagcgataatgggaacggagtcaagaactctcacatcanaggatttcttgaggaggagggcatcaagcatgagttctcttcttcctacacacctcaacaaaatggtgtagtggagaggaagaatagaactcttttggacatggcangaactatgcttgatgagtac

SEQ ID NO: 78343 - DNA, 336 bp, Zea mays
agacactcagctatgagattcttcatcccacatgtgctagtcggcgatgccagagccagcccatgttagtcttagctattaagcaagtgtcgagttcagctctatcaaagtctaccaagtatagctgaccctctaacactcccttaaatgctattgaatcatcacttcttctaaagacagtgacacctataccagtgaaaagacagttgtagcccatttgacataattgagatacagaaagcatatcgttatctaaagaatcaacgagaaaaacatttgaaatggaatggtcaggagatatagcgaatttacccaaacctttgaccaaaccatgat

SEQ ID NO: 78344 - DNA, 482 bp, Zea mays
  unsure (1)..(482): unsure at all n locations
gagaagcagannatcttgaagtcttggctgtcaaattgcttggtcgtgtcaactgttatttctgacgggactccgaagcggcaaacgatgttttgccagaagaatntctgggcagtcttggatgttattttggacacagccctcgcctcgatccatttggtcaaatactcgacagcgacgaaggtgaacttgaggctcccctgtgccgtgggtaggggcccgacaatgtccaggccccagcgttgaagaggccatgtgtgggcgattagcttcgtgaatagcgaatggctacccgagcgtgaggaaaatttctggcacgctttccaggaccttgtgacccgatttgcggcgcaaatcatggcgggccagcagaaaccttgatggattacctttgcggctagttccctatgccctgcgtgagagccgcaagtcccgatgtggacttcatgcagatattggacgccttcggtctcggcgacaca

SEQ ID NO: 78345 - DNA, 504 bp, Zea mays
  unsure (1)..(504): unsure at all n locations
gctntagcgctagcgcgaggatagcctagtggattccacgttgtctagcttgtcgccgtcgttctttctggacgtggtggtctccgtgccagcaattatccactctagctctagaagacgaactctcctcanaatctcacggaaggacttgcaagcgatgatcaccagtgagcgcggaaaacgtctcatttgccctccatgcattgatgctgacggttggcaactggtggaatctcgaaggacaaaaagccgcgttaaaatcgaagcaggagcctcggtcccgccgtgtggcagtagaccttataggaaactgtttcaactggtctcgacacatcatnttgccagggattgctgggagagatcaaggtgcctcgttgcggtgccctgacacatctctcctacaagtgctatatctagcgtatagagccaagaaaggtcagttggtgtatgcttgagcctatgttgtgtctgtgccaagaagtcggtttggatccgctggcaaga

SEQ ID NO: 78346 - DNA, 353 bp, Zea mays
  unsure (1)..(353): unsure at all n locations
gggcagannaaagaaaaagggaaagaatgaatagtggtgggctgaatccagcccaagctggcccatcaacaggagaaacccgcgccagcgcgcgcccgcgttggccatcatgcgcagaggcccctggcgatntgaaaaccccataaagaggttgcgacactattcacgtgtctctctgacattcacacttaagccctcacacttctttctcttcacaactccatgtccccgatggtgaacgacggcgtgcgcgctccggtgaacctgtaccggccggaatacgcaacgaccaatgtcctaactcggtctacacctaatttcactcctggcgatcctaatctatccctcaattg

SEQ ID NO: 78347 - DNA, 304 bp, Zea mays
  unsure (1)..(304): unsure at all n locations
tgggaaaatctggaatatatcagcggtnataaccagccagtccaaggaaactttttacttgtgtacagtggttggtggtttccactctataatatccttgactttgctaggatcaaccacaacccccttggcagacaacacatgtnccagaaattaaacttcctccagccaatatgcgcatttgctaaatttagcatataattgatgttcccttaagcgcgttaatacgatccgcagatgtcgagcatgctcctcttcattcttggaataaatcaagatatcatcaatgaagaccactaccaat

SEQ ID NO: 78348 - DNA, 293 bp, Zea mays
ttcactcatatggaacaatacacactctcttatctacagcatatgatgagacagaacaagatattatgacatttcgcactcagacaatctctttcttttaacatcatggtgtatctataaatgtggcttcatttagtcaaatctcttaaattcatgtgcttctaccttctagcaaaatctgagatatcatttaagtggacagtgatgtgctaaccatgtcacatggtacaacacaagcgagaattaatcacagcaacaatgtaataaaaacaactgttctattttcatgcaaa

SEQ ID NO: 78349 - DNA, 475 bp, Zea mays
  unsure (1)..(475): unsure at all n locations
agccanaattataatacgcagnggaagatatactagcccangccacttgcttatctgggtgaagacacagccccccctcaatcaagcatagcagaaaagaaatctctagctgctgaacaacataaataaatctgggtgaatatactaggtattctgcaagcccacccgactccctgtaaaagaaagagacctatatcatacatgcttcatatggcggagctgaagtcactcttctttttcttagagaaaggcaatacttgcttttatggtttctccgaagaaatagaaataacacttgcttaaccaccactgagcttcccgctcccgtggaccattttctttccagaacacactccacacacgtatttcctgttccggttgttgagaacactaattgcatacccaccagactcgccataccagtggcacggactattcgataggtttaactctgccagaggggacctttaccact

SEQ ID NO: 78350 - DNA, 472 bp, Zea mays
  unsure (1)..(472): unsure at all n locations
ntaggcaagcgtctagcagagctcgagctctgtgagatgtgagacgacacatgattcttttatgggaagatgagggaaaggatgacacgtgggtcccacttaacggatgttaatagattgtaaattgtgatgtatcgtcttcatcctcatcccttcaaccaaacatagagaaggacatttctgtccctccaaaccaaacagaggcggaaccatcacatcccaganaactggaatggaaccatcctatccctcatatcctataaccaaattgctatgtacgaccaggcctatactaagcgcaacagggccttatgatagggtccaaggccatagtcattactatcatactatagcttacttatacttactagaagctacctccttatatacttgaagacccttggattgcaacagaacagatgttccgcttctttagagtggattcctcatctagcctaccacacttagccta

SEQ ID NO: 78351 - DNA, 453 bp, Zea mays
tagcaagtgcgagttctggatccgtgaagtcttggtcttgggtcgcattataaaccattaaggattggctgtagatccgaagaagataacaactatcttggactggaaagcaccaaaagatgtccgaggaatcaagagtttcatcggaatggccagttattatcggcgtttcattgaaggtttctccaagattgccaagccaatgacagccttgttggcaaagaaggttgagttcaagtggaccccagcatgtcagaagtcctttgaaacattgaaggagaagttgacaacggcaccagtactgattctaccagatgttcacaaaccattctcagtatattgcgatgcttcatacattcgactgagatgtgtgttaatgtacgaagggagagtagtggcatcctcgtcccgacagttgaagaatcatgagaagaaatatctactcatcttcta

SEQ ID NO: 78352 - DNA, 231 bp, Zea mays
ttcaccatcttcgaatagaagatgtctcattatatattattgttgctgagacgaagctgagcgaagaggagtaactccttgatgagaacactgctggatttattgaatcaatagctaagacaaataccgacaatattactaaggagattctataaagcttatctgaagatactgatgacagcgactgttatgacgcataaagtggaggcaaatactctgaacatcggtcct

SEQ ID NO: 78353 - DNA, 290 bp, Zea mays
cttataaacaattatgaacttaatggatatacatatatatgaccgctacatgcatttagtatgagttaaataaactaaaataaatctggtattaaacgcctgcgagtctggcaaatatagagcatttttggttcgtggctaactacgccacactttacttaaagttagtcgttcgaattgaaaaactaaccttggatagaaaagttaagtaaaatgtggcgagttaggtagccaaccaaacagtctcatagtgtgtccgtggatctctcgggtgctgtgcaacggtggga

SEQ ID NO: 78354 - DNA, 292 bp, Zea mays
  unsure (1)..(292): unsure at all n locations
acatgtgctaagcggcgatgccacaaccagcccatgcatgtcttagctattaagcatgcatctagaccggcctcttctttngcaaaatcaactaagtaaagtttgccgtctaatacacccttaaaagctagtgaaccatcacttcttctaaagacagacacatctatgttggtgaataaacagttataccccatattacataattgactaacagatagcaaattatatccaagtgactcaactagaaacacattagatatggagtgctcattagaaatggcaattttaccta

SEQ ID NO: 78355 - DNA, 480 bp, Zea mays
  unsure (1)..(480): unsure at all n locations
ggacgtgaagagtgccttcctcaatggaccaatcaaagaagaggtctatgttgttcaacctcccggctntgaagatagtgagtaccctaaccatgtgtataaactctctaaggcgcttatgggctcaagcaagccccaagagcatggtatgaatgcctaagagatttccttatcactaatggattcaaagtcggaaaggccgatcctacgctctttaccaaaacacttgaaaatgatttgtttgtatgccaaatttatgttgatgatatatatattgggtctactaacgaatctacatgtgaagagtgtagtaggatcatgacacatcaattctagatgtctatgataggggagtngaagtacttcttgggatttaagtaaagcaactccaagagggcaccttcctaagccaaacgaagtatactcaagatatcctaagcaagtttggatggaggatgcaaacccatcaagacaccatgg

SEQ ID NO: 78356 - DNA, 464 bp, Zea mays
  unsure (1)..(464): unsure at all n locations
tattgaactncatcgtgttgccaagtaattcactcatatggaacaatacacactcactctgcgacagcatatgatgagacagaacaagatattatgacatttcgcactcagacaatctttttcttttaacatcatggtgtatctataaatgtggcttcatttagtcaaatctcttaaattcatgtgcttctaccttctagcaaaatctgagatatcatttaagtggacagtgatgtgctaaccatgtcacatggtacaacacaagcgagaattagtcacagcaacaatgtaataaaaacaactgtcctatttccatgcaaaaaaggatcccaagagataggatcataccgaagaggtacaagtcaccatcctgcagagctggaacctgaccaaacggctgcagagagatagataaccatgtcaagagtcanggcaggcgcatacaagaatcagatgttcaaatg

SEQ ID NO: 78357 - DNA, 506 bp, Zea mays
  unsure (1)..(506): unsure at all n locations
ctgtggctattagtggtttgaatttataggatcacctattcacccncctctatgtgctctcaattggtatcagagctgttctcttcacgtaagggactaatcacccgaagagatggattctaagggaaaggggatggtggtcaacgacaaagagaaagagtccatcttcaacgagccaagagatgaaaagcccactgactctggctcgagtcacaagaaggacgggaagaagaagaggcgcatcaagaagatcatctactacgacagcgatgcatctttttcttcaccaagagacgacgacgacgactctttgtcaagaaaaagacgattaatcaaaactattcctttgattattccccattccgtacaattcagatgcccatttactttctattcctcttgaagaacccccacactttgatggagaggaatactcatnttggagtcataaaatgcatnagtcattattctctctccattcctagcattgggacatcgtggagaat

SEQ ID NO: 78358 - DNA, 332 bp, Zea mays
  unsure (1)..(332): unsure at all n locations
tctttggatttgcgtaatttgttttttttgttgtcttagaattatcagttatgtcgctgatttgtccgtctagatttatttctcatccagctcttttatacatatattttggcaatacaagcattcaatatacatctaaaacacgcacttntggcgctgatttgccgcactagctagcggacgtgagcagatagaaagatcttttttattggactcttcgtgtggtgcggcaatacaatgccggtatagtatagtaagtgtatatgcgccattgtcgtcgtcagcttgcattattattacccagaagtatcatatctctactactacttaag

SEQ ID NO: 78359 - DNA, 493 bp, Zea mays
  unsure (1)..(493): unsure at all n locations
ggctaaggcgtcgctatgaggacgccttgaaggtctgcaagtagtggtttttttcttgaacgcgcatgagagctgcgcaatgcacattattaaattaagagaagaaaagagtccaaaatggaccaaagtacaaagcccaaaaggcagaacagacagacccatcaacttcctgttgagcacagtgccccagccttctcctgcgcatgaaaaacagcacgaaacaagagggaggcaaacagcaaaagtgccagcagtctccacacacacatctccactacttacacagaaactcccttgatctaataatggcagcacctagacctaangccntcaaaatgctnggcgaccgcttaaacccccacaatctaactcttccangaaaactctntaatttctgcttatggaaggactgacactatcaaaaaccgccttattacgatgaagccataaacaccaagcccncaagatgataacactgttaatgcctcttctt

SEQ ID NO: 78360 - DNA, 287 bp, Zea mays
ctatcttaatcctaaagtacactgacacgtcatgtgcaatatggctgcgagcaacatgaatgaaaccatactaattccttgagcagaattcatatctagctcgcttcaataaccatgtcatactcaccacagaacgcacacgatcagatggagtatcaagaaacattcgccacagcaacatgcacaatcaaatccacgacatgcaaactgctgccaaactctgtactataaaagttgcacgggacgccatgatcatacagagtcattccagatgccctacaaaggag

SEQ ID NO: 78361 - DNA, 499 bp, Zea mays
  unsure (1)..(499): unsure at all n locations
tgaagtatctgcaacatatacacctcaacacaatggagttgtngaaaggatatatatgttcttgatcacacttgcaagaacaatgattgatgagtataacacaccggagaggtnttgggccgaatctgtcaacactgcatgttatgcatcaaacaggctatttcctcaccggctacttgcgaagactccctatgaactgctaaatgggaaatagccagacgtctccttcttccgggtgtttggatgcaaatgctacatctacaagaaacgccatcacctagggaagtttcaaagacgttgtgatattggttctcttttgggctattcattaaagtccacagcatatcgagtattcaatcatgccactggcgtggtagaagaaacatatgatgtggaatttgatgagactaatggctcccaaggagcactngagaactntgatgatgtaagtgatgagccacttacggaagcaatgaagaacatgccaattggagctatc

SEQ ID NO: 78362 - DNA, 416 bp, Zea mays
  unsure (1)..(416): unsure at all n locations
tgaggctgtgtatagattaccgccctcttaatgcggtaactatcaagaacaagtatcctttgtctcgtattgatggtctttntgactagntggtcggggccaaggtattttccaagatagaccttcgctctggctaccatcagatcaagatacgagcaagtgatattccgaagacgacattctcaaccagatatgggctatatgaatttttggtgatgtcattcaggctgacaaatgcaccagcatatttcatgtatctgatgaattctcgtttcatgccggaattggacaagttcgtggtgggtttcatcgatgatattttggtgtactcanagaacgaagaccatgtccggcatttgctgtagtacttcaacgtctgcgagagcaccacctttatgcccagtatccaagtgtga

SEQ ID NO: 78363 - DNA, 306 bp, Zea mays
  unsure (1)..(306): unsure at all n locations
ctaagcttctnagggagaacacgtaatatgtctaacaaatgttactgtctgaaaagatagaccttattcttcttgtcaagcaggtaaacaggtggggagctctcatcatgccaaaaatgtgatgacaacatcaagacccctggagttacttcatatggacctcttcggacccgtcgcctatctaagcataggaggaagtaagtatggtcttgttatagatgatgattnttcccgcttcactagggtattctttttgcaggataaatctgaaacccaagggaccctcaagcgctttctaaggagagc

SEQ ID NO: 78364 - DNA, 435 bp, Zea mays
  unsure (1)..(435): unsure at all n locations
ctcagcttggcgacgtaannaattggagcaaacaggaaatagcaagaagctgggtttttacctctctcgccgttatataggctgcggaagaagcgaacgccgaattttacaccgcggacacccgctcgcacttctgcgtggggaccgattaaccgacagtaactctgaaagtgggtcgatcacgctggagaagaatcgttctcgacacgagctacggaaggtgtttttagaccttctgcgctccgaagctaagagatgtattcaccgataagctcgtactaaaaccactagcacctcaaagcgctactgtgggcatgctcttctcgaagcttatgaagaagtggctcggtgaagtgttgataaatagcgacgtcctcttggaacttggattcaaccgattaagataaagacctttatcataaggttaagcaatgt

SEQ ID NO: 78365 - DNA, 498 bp, Zea mays
  unsure (1)..(498): unsure at all n locations
ctcagctaatgccctaaagatggtctaatttgtaagggcaggctcccatggttcaggataagtgggctatantttatatcctactaattatcccgaacacaaaattaggagaattcatgctaagaagtcgcattctgtttcccatcatgcttttatgtataagaatgaggcatctagctctaggcattctacacatgttaaaatgcctaacaagaaaactcctgctacatcaaatgagcataatatttcatttaagacttttgatgcttcttatgtgcttactaacaaatcaggcaaaatagttgccaaatatgttgggggcaaacacaagggctccaggactttgtgttgggtacccaaggtgcttggtctaacatcaaaggaccaaagactggttggatacctaagaacaagggcctaaatggtttgcaggtttatgcatccgcgggctcaagttggataatagatagcggatgcacaaaccacatgacaggggag

SEQ ID NO: 78366 - DNA, 268 bp, Zea mays
  unsure (1)..(268): unsure at all n locations
ttcagaagggagaaagcagcttcagcagatcagccgaagcccatgctcttatgtgatgacatagcagagcagaaggtactgttaggctctcaactatccgaagagcaggataaaactttgataaggtttttgttcaataacaaagatcgttttgcatggtcagccaatgatctatgcggagttaatanggatgtcattgagcactcgctcaatgtcgatccatctttcagacccacaaagcaaaggcttcgganaatgtcagatgata

SEQ ID NO: 78367 - DNA, 237 bp, Zea mays
  unsure (1)..(237): unsure at all n locations
aaccactcctttgcccattcattcggccacttgcttcggtatgcaagagccgganatattgagccccttcgacaagcaaaggtatagcaaccaaagttggtgtgaagggctccggtcgccttcgtctagaagtatagctcatggaattgaccgaatgcttcacagaaagcttcggcatcaggttcaaccccttgacttcaaacaacccacatgaaaatttcaagatgcactatatcg

SEQ ID NO: 78368 - DNA, 307 bp, Zea mays
  unsure (1)..(307): unsure at all n locations
caagatactaagcttgcggagaagagatgatatgaagcttgtggtgctcgagaaagtcaatctttcttttttctcaagctatcaatcttcgatgatctatatccatgattgacccaacgttatttctcanattactatgtcttaaactcatatcatctcgagaaagatattgatgctgtaggaaataaagaattattctacacgaaaaaatcaaggcctacaacatggaggaaagtcaaaggatggtaacatctatgctcttaagtgcaagcattttaaaattatcattttccatgtgtcttgtgta

SEQ ID NO: 78369 - DNA, 504 bp, Zea mays
  unsure (1)..(504): unsure at all n locations
gggaccggtcgcgggccgtctggagctagacaaatatgacacgcttcttcagccgtacttgttattcggtgaagaattcttgctctacctccattgccccattcccgtcgaaaggccttttctgcctcctccagggtctgatgggtccggagcagcactcgggaagagggaccggtgaaactgtctcctgtgtagagacgacgacctgaanactcttctagcacctctttggaagggggttgaagtccagagctaggtgcgtcggcggttagtgctaggtcctacgttgaatacccctatgaattctatgcacgtctatggtgctcgaaccacctttgtttaaatgtgcgaacatagtcgccgcatttgtcaccgatgcgcctgtcgccgccatgatctccccttcgcttttgctaaggtctcgctcaatgggtccattgtcaaagcactggtggcctangcactgcactagcgctagctgagcttgacaccncaacgatgtct

SEQ ID NO: 78370 - DNA, 504 bp, Zea mays
  unsure (1)..(504): unsure at all n locations
tctaaagggagaacacatgataggtctaaccaatgttcatttcgaanaagatagaccttgtgcagcttgtcaagcaggtaaacaagtgggaggagcacatcacagcaagaatgtgatgaccacgtcaagacctctggagctgctgcatatggacctcttcggacccgtcacctatctgagcataggaggaagtaagtatggtatagttattgttgatgacttttcccgcttcacttgngtgttctttntgcaggataagtctgaaacccaagggaccctcaagagcttcctaaggagagctcacaatgagtttgagctcaaggtaaagaagataaggagcgagcacgggtctgaattcaagaaccttcaagtggaggagttccttgaggaggaagggatcaagcacaagttctccgctccctacacacctcagcacaatggtgtggagagaggaaaacaagacgctatagattggcgaggctatgctcgagagtcaagaccccg

SEQ ID NO: 78371 - DNA, 498 bp, Zea mays
  unsure (1)..(498): unsure at all n locations
tctaagggagaacacgtgataggtctaactaatgttcaattcgaanaagatataccttgtgcagcttgtcaagcagggaaacaggtgggaggctctcatcacaccanaaatgtgatgacgacatcaagacccttggagatgctgcatatggagccttttggacccatcgcctatctgagcataggaggaagtaagtatggtctggttattgttgatgacttttcccgcttcacttgggtgttctttttgcaggataagtctgaaacccaagggaccctcaagcgcttcctcatgagagctcaaaatgagtttgagctcaaagtgaagaagataaggagcgaacacnggtccgaattcaagaatcttcaagtggaggaattccttgaagaagaagggatcaagcacgagttctccgctccctacacaccacagcanaatggtgtggtagagaggaagaacaggacgctaatcgacatggcgaggactatgcttggagag

SEQ ID NO: 78372 - DNA, 419 bp, Zea mays
  unsure (1)..(419): unsure at all n locations
tcacactgtatgcatccggctcgacagatgagcactacggctagcggcctgctgtctattagatgagacagctgattacagganactntgtggttntccgataggcgaagttatagcaaccaaaatcgtcgtgcaatccatcctttctagccttcgtctgataatgcagatcgtgaacccggcaaaagctgtccgcaaatggttccactgcttggcttcggagtgcccagatataaacgctaagcctaacgatagcattaggggtcagctggtgaaaatagatgccgaacctcttcagtacctctgcaataatcccatgtagggggaatcttaatccagcctttagaaagcttttgataataacaatctcatccttcttcggctttggggtagtctcttctcccccgaagtgtaatagc

SEQ ID NO: 78373 - DNA, 506 bp, Zea mays
  unsure (1)..(506): unsure at all n locations
tggatgaggtgtcatcatcatcatcatccgagctatcatccgagtcccattcaactaagtatggcttgccatctttcttcttggtatagtatttctttttcttcttgtcactntcatctttgcccttcttcttcttgcttgggcaattcatggcaatgtgaccgggttccccacactcaaaacactttctatcattgaaagcatttcttctagatgtttgacctcttctaggttgacctctcttcatcttcatgaatttattgaatttccttacaaatagagccatgtaactatcactctcactttcattttcttcatcaatactattcttcttttcaatagcccttgaggccttaagcttgagagcaanttgatcatttttcaccttctttgccaacttaaagcatcggcttgtgacttcttaaatatatcttgagtgagaatatcttccaatacttcgggtggagaagttgagatagatcactccttactaacattgtcacaat

SEQ ID NO: 78374 - DNA, 504 bp, Zea mays
  unsure (1)..(504): unsure at all n locations
tagttggtttacaaattatgccctagtggctattggcgccggcgagatgatnatgcattgttctatgtgcagactgttaataccatgctacaacgaatatgtctcagggtagatgttgtgatccagattataaagaatgtggncaagctggcgagcgaataagcgtagttacctcatttttaccgattgttccctactcagtttacgttcacttctataaatataattgtaagccaccaacgataattatctcattgtaagtgtcctacgatctgtaaccacccaaaaatagtgagattgttgctggacgaccgcccgcggttatataccttctgcttggagagaacatatcccgtaaaataaatgtcgtctctatgtttgaactactttgcgtcgcattgattcataacatcgtcgcacttgctctctaactgagtgcgttctgcattttagtattgcacttatcatgaatcacgaaacatggattactttaataaagcaaaa

SEQ ID NO: 78375 - DNA, 506 bp, Zea mays
ctagcgtctcgttcagctaatgcacagcgtctcgttgtgcgctcggccgcgcgacgagtctttgatttcttaattcgatatagagtgccatgtcgcgcgtctcgccgtgcgacaatcttttttattcaccttcatctgcttataacgattagacatgaaacatgactttactttatgctaaacatagcgtctgtattaatgcctctcaattgagcaagtggtttaattcataaatatgtaacgtgatcgttcctcgactgtctttttctctttctctcttaaccttaactgcgagcccccgtggaacgtctgtttacttactgcattctattggatggtgtactggtcgtttgattaaatgtgagggtgatgtatgtttgcgcttcatagagaacgatccggttgaagagctcatagaactcgcatgagacgctcctgagcagcagtcggttggtggaggcaagagtccctcgacctatctctgtcctattcattctttaattcac

SEQ ID NO: 78376 - DNA, 505 bp, Zea mays
  unsure (1)..(505): unsure at all n locations
ctcagcttagcagaagacagccaggttcttcgttctcagataggcatatatgtattaacatacgctgatgatatcatagtaaaaagcatgaagcaagagaatcacattactgatctgcaagaaacatttgctaatttcaggcaagctggcctgaaattaaatccataaaatgtgtctttggagtgaagaagggtaagttccttcgctgtctagtttcaacgaaggggattgaagctaactcaagcaagattgaagctatccttcggatggagccgccaagcacaaagaatgnggcccaacggttggcaggaagactggcttcattgaatagaatcatatctagatcagcagagagaaactcgccattctttgaaatactaaagtcagccgaagtctttcaatggggcccagctcaacagaaagccttcgaagagctgaagcaatacttgattgatctaacaacattaactccaccttgcgccagggctccattactattgtatgt

SEQ ID NO: 78377 - DNA, 456 bp, Zea mays
  unsure (1)..(456): unsure at all n locations
gcttaccttgtgaagatatgtgcttgtgaaaggcggngatatgccagattcatcanatgcaattgatgtgttatttgatggtatatttgaataatttctgttctgtcaattaactcgtctcattcctcccactttagcatcctcatacaagttctgacacatctcatcacgtaaggagttcactgagcttcgtggtctgcgtataaagacccgtaacacacatggaactggttgcacattaacttcatgtattgctgctgaattagcaaaaggcgcaacgatgctgcatgctgtccaggatagtttgcactaacatttaagttgtctcacactgataccctgatataatacaaaacaattggtgcaaattatctgctggagtgttattatcacaggaaaaattatttctttagtgaccaacaggacatagattaacaactgtctctaatcagggtc

SEQ ID NO: 78378 - DNA, 467 bp, Zea mays
  unsure (1)..(467): unsure at all n locations
tctaactgagactatcttgttctcactgaaagtctgatgccagaatgctactcttgtactatgttttcttgaaactcttgtgtctgtcagataacgtcatttcatgttgccctagagaatggcttgcacttgtaactatggntccgttcgccctagaaaatacaactatgagttacatgcttatttaaatggctcacatttgatgaatattacaatcaacacatttatattgttcgccttaaattaatttattataaatatacatttcaattccactgctatgactagagcttctactatgtcttttgctatggctggagcttcttcgtacaggggagccactactgatattgaataatggaggaaaaatgtattctgatcgangacttggtgatgagcatagaactcatgcattctgcatgccccccatctgatcacgctggaataaggtgaaaaattcagcttat

SEQ ID NO: 78379 - DNA, 285 bp, Zea mays
  unsure (1)..(285): unsure at all n locations
ngagaacattctccttgtctccacaattgatccctccaaggaccccattcgctctgggcttatacctaaccttgagaggcctgaggggtaccctaacggtgaggctggtcttaacgcgaatgagaataagctaaagatgagagcaaggagggtgcttgcaaagcttgctgaganaagaaaatcagctgtggaatcttcacgctcagaaaggagcttggatggaatngatctgacatgccagattgtggactttgngaatgcttgctgggctgacaagcaatttac

SEQ ID NO: 78380 - DNA, 498 bp, Zea mays
  unsure (1)..(498): unsure at all n locations
aagatactaagcttgaggcatcgattggtatctacttggtgtagactcctcctgtctttcctccgttgtcttgtatgcaacgggttgagcttcggatgtggtggcatcatcaagctcgttgatcttcctcgagccttcggtcatgccactcaaacttacaaaattcccgataactttctcgggggtcattttagtatatctaggattaccacggattaatcgaacttgagtagggttaacgaaaataagagatcttagaataaccttaaccatctcgtggtcatcccactntacactcccgaggttgcgcactagattcaccaaggtcttgagccggttgtcaatgtgttgcggctcctccccttgtgaagccggacctaccgagctcccctcgatcgttcccgttggtgatctgggagctcgtctcctcatgcgcggtntgagcacatnccanatctcctggcgctcttaacccttgactctgtatactccttctac

SEQ ID NO: 78381 - DNA, 505 bp, Zea mays
  unsure (1)..(505): unsure at all n locations
tctgtgccnanatcacaganagctaanggatggttatttagttgagatnttccaatatttaatgctcaaaggcactctccactaccttgttattngaaaaatgtcaaacagcaaatttcatattttttctatgttcttcataacaaaagattaactatcctacaggttggggtgttttcaccttggggtgattnttgtagggtttttctaagtttttcttgttttcttaaaataaaaggtatcctatttattttatactaaaccagcgtataataaatttttctagtaaactacactgaataagtatactaataaaaatatggcggctctctggttctttatctaaatcacctttcctattttcttaaccttaagcataatgtaaaataaatggcaaactctaccttaatggcgtgtacagagaggtttatcattctcaaacacggtagtangtggtcatgtacttctncaaantttcttaacctcagttaaatagtgcaactat

SEQ ID NO: 78382 - DNA, 324 bp, Zea mays
  unsure (1)..(324): unsure at all n locations
tcggcgtctttatttgtttcttcttcctgagcccgtggcatccaatcagcaatgaagtattcttctcctgngactgaattgaggatctatggacataatcaatgctaaactcattaagctccgcaacccattttccaatccttccagtagcttctctattcctcattatttccttcagaggctgtgacgaaggaacaattatgtgatatgcttgaaaataatgttgaagctttctggaggccattaacacagcatacaacaccttctccaattctatataatttttctttgatgaacttaaaacttcagagacaaagtatactg

SEQ ID NO: 78383 - DNA, 460 bp, Zea mays
  unsure (1)..(460): unsure at all n locations
tatgaagattcttcatcccaacatgtgctagtcggcgatgccagagccagcccatgttagtcttagcaattaagcaggtgtcgagttcagctctatcaaaatttactaagtacagctaaccctctaacactcccttaaatgctattgaatcatcacttcttctaaagacagtgacacctacatcagtgaatagacaattgtagcccattttgcataattgagatacagaaagcaaattgtaatctaaagaatctacaagaaaaacattggaaatagaatggtcaggggatatagcaattntacccaatcctttgaccaaccttgatttcatccccgatgtgatagctcgtggggatcttggttttctcgaggaggagaaatcttttctccctgcatgtggttggcaccactgcgatacccacttgagccccgatgctaacctacaaacagttagtcttac

SEQ ID NO: 78384 - DNA, 488 bp, Zea mays
  unsure (1)..(488): unsure at all n locations
ttaaccggacaagccctaatgatcatgagcttgaatgcttgaggacaacgtgatcattatctngatcactaagggggtgtttagtttgaaaaattactccatctacaataaagtaaaataaggtggtgcatatgagttcatttctcacatttggtaggataacccaatttctcattaaatataaggaatgatgtggtgatggattaattcatttcattctaaaacaaagtaaggagtgggaagatgatgtactagcttatttctcaaactaaacattgcataaggatctctttgatggggtttgggaaggcttacgtccatattcaaaccactaagaccgtccgcacagtctatccatatgttaccgaanatactgttttacactgtagactacactgttcatagagtatagtttgaatatagatatgagtatgagtaaactcttggagatagcctaatacgtattttctccacttctaattataatt

SEQ ID NO: 78385 - DNA, 472 bp, Zea mays
  unsure (1)..(472): unsure at all n locations
actcaagcttcctgcacgtcatactacgcagatcangatgtaggacgtaagaagattgctcctcatctaacattagtagctccaagtactacatctgttatgttcctgggcccacatgtcggngctcagtatcttgtacgtgccccctttgttataaaaggggaggcatgcaacgttacaaagggagttcacacactccaacactcacacagagacagacttagactctcagctctcaagcttccatagcaatccaacacacagtggagtagggtattacgctccggcggcctgaaccactctaaatacttgcgtgttcctgaagtcatcgtgcatttacaacaggcaaactcttaagcccctcctaccttangattagggcgggtgactccgcccccggccggaaattcctctcaacatttgcgcccaggtnggggcttgcattaagtttgcttgtttctcctcacatgat

SEQ ID NO: 78386 - DNA, 505 bp, Zea mays
  unsure (1)..(505): unsure at all n locations
gcttgaagccatggtaagtagcataggccaataatatgcgaattgactcaagcctagctacttgtgcatatgtttcaccaaaatccaaaccttcgacttgtgaatacccctcggccacgagtcgagctttgttccttgtcaccacaccatgctcgtcttgcttgttgcggaagacccacttggttcctacaacattttgattatgacgtggaactaaatgccatacctcattccttgtganattgttgagctcctcttgcatcgccatcacccaatccgcatcttggagtgcttcctctaccctgtgtggctcaatagaggaaacaaatgagtaatgttcacacaaatgtgctacccgagatcgagtagttacccccttatgaatgtcgccgaggatggtgtcgacggcgtgatctcgttggattgcttggtggactcttggatgtggcgcgctttggtcttgctcatcctccttttcctgatcatatgccatctccccttgatc

SEQ ID NO: 78387 - DNA, 417 bp, Zea mays
  unsure (1)..(417): unsure at all n locations
cactcaagcttctaaagggagaagcacatttaggattaacaaatgttcactgtgagaaagacaggatttttttcgcatgccacgcagggaagcaagttggaatccatcatccacacaagaacatcatgacgaccgcaggccgcttgagctgctccacatggatctattcggcccgattacttacataagcatcggcgggagtaagtattgtncttggatagcggatgagtactctcgcttcgcttgggtaatctctttacaggagagatgtcaaacccaagagactttaaagggattcttgagacgggctcaaaatgagttcggcctaaggatcaacaaaataagaagcgacaccgggacgagttcaagaactcctcaattgaagatttctttgacgaggagggcatcaagcatgag

SEQ ID NO: 78388 - DNA, 448 bp, Zea mays
  unsure (1)..(448): unsure at all n locations
gctggactctcgcaatcagacgaaactccagtntanagcctacttcgtcagaaggaanaaacttttgggagaaagtttttagctcccaagaaattcagaattaaatggccagagtgcgctctaccgctagagttgagcgtgagggaggcgaagccgaaggagcggagactgttcctatctncgaagcgatgcaatgatccggactggtgacctcggaagaaatccgcactgccgagacagagcagactgttgccgatacagaacaagttgttgtcgaagcggaagaatgagatattgaggaagctgactccgatgatgaaataccatattgccgtaccaagcaagcccagccatttggacttctgaaagacgactgtctccaaggctgatttctncaaaatggtgaagtcgagctatttcagtgagaatgagaagaagctgcttcgct

SEQ ID NO: 78389 - DNA, 272 bp, Zea mays
  unsure (1)..(272): unsure at all n locations
ctaagctgggaaaggagtcaactcaaatttctttactgccaaggtctaatgaagagacttttctatgtntttatgtatataggctatatgtacgtgtggatggagatgatattatgttatggatagattaacttctgtggtattagatgttatttaagttcaactctcgtggatattagatgatcatcgctgctgtatctttttagagttttagtgatggttcattgggtttttgtcttttctaaatattctatttttctttgatctttctg

SEQ ID NO: 78390 - DNA, 464 bp, Zea mays
  unsure (1)..(464): unsure at all n locations
taggatctcnttgcattatnnttgcacaagactgtgattgagaactgaacacaatattgtatatatttgtccataccttgcaatataantttacctttctgtccatgtatcaatagctttggtgtggacgaaacccacagttatagttgttgagccgaaggcgaaaaacaccttcccttctttttgttcacatcgaagtgttgtacaaagtgtatatgtattgttgtttgagacgaagcttcttcgtattcaatgaagcattctgtcaccgaagtcaggcaactctttctttcatgttaacgtttgtgcttcatgtcatgataatgatgatcctacaaatgcctaatgaatgtttatatgaatgcaatgacatatgcacatgtatgacccgaacacacacgagaccacacccagactctgcatccccttatgaacaacttttgagtctcttcaccttctatttc

SEQ ID NO: 78391 - DNA, 517 bp, Zea mays
  unsure (1)..(517): unsure at all n locations
caagatactcagcttacatgaccatccatagtgcanacagccagcagacacctatattagtcatccatattatatacatatgtaagtaaagtaggacggagatgagcttgtacataaaacttacacctagagaagatcatttagaatgtcaaagatttgtatacccagagttaggtgcaaatccttgttgagaccatgaaatcgatcgggcacatggttcagtctcacgcgctaaggaagtggacaataaacatggctccaagagatctgcaaatatagataaattgaaaattttagatcaagcagaattaatacacctacatggtctcactggacttnctgctgttttcactctgttagagtccctgtgtacgggtatcccgtgcgctacaacaaactggagtgagcggngatcaagtcatgggccctaccatcagcggtgggtcaagtcaacaagacctagcagcagagacaaggaaatgtgtggtcgggacccctgctacgtgcctacgtgcat

SEQ ID NO: 78392 - DNA, 476 bp, Zea mays
  unsure (1)..(476): unsure at all n locations
ttgatacacagggacaactgtaaatagaaatataatatgatgtgttattcaagcgccttttattggtgtttggaagcgaaaagacaagaatatatgttcatcctagcaaagcttatcataggtgatttcgtattgaacgtaattagcatgtatgtctcctaagtaggccacgataagagtgttaagagactcttgtaggaagacttatatgacatggtaagagccatatatattacttagaggcttttcattggacaagatctcaatagatatataggtacaataattataagttctaagctggttcataaaggttctggctatggtagcacgaattacgagagagagaggaagccttacactttgatgtagcttttgacatgttgatagccaacactcttatccttatgtagtagtatatgaaaaagaacgacctacacatagtnttcattgacttggagacgactcatgacaaa

SEQ ID NO: 78393 - DNA, 333 bp, Zea mays
  unsure (1)..(333): unsure at all n locations
tagatactcaagcttctanagggagaacacgtgataggttngactaacgtgcaattcgagaaagatagaccttgtgcatctngtcaagcaggtaaacatgtgggaggagcacatcacagcaagaatgtgatgaccacttcaagacctctggagctgctgcatatggacctcttcggacccgtcacctatctgagcataggaggaagtaagtatggtctagttattggtgatgacttttcccgcttcacttgggtgttctttntgcaggataagtctgaaacccaagggaccctcaagcgcttcctaaggagagnctcaaatgagtttgagctc

SEQ ID NO: 78394 - DNA, 464 bp, Zea mays
agatactaagcttctatataagggatgatggacacagtgtgtcgcgcggcatgggcgcactgtttgacaatggactatacaggtgcgccgtctgcaggatggccctggcgccgcctgctagcggagtggacaggacgcattaaatgctgagggggcacatcgcctatcagcagggtggacaggcggcgcgtcctctccgcaataaatgcagagaccgcgtggcctagaggacttacgtcaggctccgcccgttggcttatgttgcgggctacaagccacgtggcagcatcgggtctacgcctgagcggggagcgcaagcgcacaagataaagcctagacacgtgtcagtacccggacccttgcttatgccagggtctcccctatcccgggaccctgttgtggcccggaccttactcggaggaatctggaccccatccgagggacctggcatgcttacttgggag

SEQ ID NO: 78395 - DNA, 452 bp, Zea mays
  unsure (1)..(452): unsure at all n locations
ctaagcttgaatgaacttgtatcatgccttctgatgaatggcctatacctttttatcttttatggtactctgtcgcatgcaccgcctttantcacaagccactaaaagcacattttctgatcattgtcaatgtgttgtctggccaacgattatgcgagatgttatatgtaaatctttgttttgttcacacgataagtcaagaatatcaatggttggttcatggtcaacttcaagcatcttctggttgtactctaaccacagatcgctgtttgaaatatcctgctaagagccaccaagaaatgagtctctactttcacagattttgcgctcgtctaccgcttctgtaatactcggaaagatatctatcatctttcatggaaagagtgtacatattgctcggaacaccactgaaactatttgctctttcttggacaatgcatatgacatggctg

SEQ ID NO: 78396 - DNA, 310 bp, Zea mays
  unsure (1)..(310): unsure at all n locations
tctaaagggagaacacattntaggactaaccaatgttcattgtgagaaagacagggtttgtatctcattgccaacangaaagcaagttggtgcccatcatccacacaagaacatcatgacgaccgacaggccacttgagctcctacacatggacctattcggcccgattgcttacataagcatcggcgggagtaagtactgtcttgttattgtggatgattatactcgcttcacttgggtattctttctgcaggaaaaatctcaaacccaagagaccttaaagggattcttgagacgggctcaaaatgag

SEQ ID NO: 78397 - DNA, 434 bp, Zea mays
  unsure (1)..(434): unsure at all n locations
aactaagctgctctatgtattggagaccatggcaattgnaaggacaccggcatcatggtataattatcactactcttttatgcctaatgagaagaagcttgtatcgcaccccatgtacctcgatgctatattgaaggatgaagttgctagagctcgctaagagaaaaatatatctgttcataataaaaatctacgagctgcaaaggagttggtacaacatacgagtgacaattctaaatctactcaagtgaggaagacagaaatacaactgaaaagtgcttgttttcttgctctcaaatctgattcgctcgaattaaatgatgttgcttcaatctgctatgaattatttgccagggatgcttgttctcacttcacaacataccatctactntgccttctactgtcactaatctttcgcaggaatatgctgatgt

SEQ ID NO: 78398 - DNA, 418 bp, Zea mays
  unsure (1)..(418): unsure at all n locations
aaaccgcagcaagtgttaagctccataagaaggatgttcctaaagatgattatatcttcatgagcttagaaaaaggtaaagattcaattaatcatgttgtgtgcactgaccatctctctatgtcatccaaggacaaaaagagaaaaggaaanaggcggtgctttaagtgcaataaggcacgacacctcattgcgtcgtgtccatacaacgacaaggaagaagggataatgagatgcttctgatgcaatgacaagaaccatacgatcagntcttgtccgctattgatgaaccaagcatgtgctattctcaagatgactctcaccaacgaatatgacaaacagcaagcgtcatgtcaggttgagcgatgcttctgctatcagtgtggtgagcagggtcatctatccaangtatgtaataa

SEQ ID NO: 78399 - DNA, 352 bp, Zea mays
  unsure (1)..(352): unsure at all n locations
ctaagcttgcccantgcngctcgcatctcctgagtgggccgaggccactgcgtattttatataggtcccctactactgataagaccaatcccacccgtattttatccgtggtaaagagctgatgtggataggcatgatcgcccacctcggcgatatctggcatcacaggcctgaccacccatggcggtcggtgccctcgtgtcaagaaggactactcaagctcatatgagtcgacccctggaagtgcgacctccaacccgttatcgtcagccacaattgccagactccttgggaccgacataaaggatcgaccctgtgggtcaaccgcatagggccaggtcagaaactaccg

SEQ ID NO: 78400 - DNA, 315 bp, Zea mays
  unsure (1)..(315): unsure at all n locations
ctaagctgctaggcgtgctatgaagacgccttagatgtctgcatgagtgatcaaacttcattttactctccttaatgacgcacactgctcagaaacaacatatgacactgatactgctctgccttgtccatttgtgcactacgcacacgctgaacanagaggctctcataatgctctgcatcatctgcaccaatctgttcttctggtggttccttagtgcctacatcatcagccgcaagcaaagcaagtgtagcttcatccaaatcactagcagaggaatacccaccatcgtcttttaccaccaaaacacgctga

SEQ ID NO: 78401 - DNA, 347 bp, Zea mays
ctaagctgtgagagaagttaatggggttccacgatgtaggctggatacctgtttgttacgttgatgcccccctctatagcaagggggctgcacacaggactgagccccacatatggcccaggagctaacggatgtagtacttggatctactaatagtcccgctcgacaatctttttggccctgaatccgagacaagatagtatcggggtgcaggggagatctcttatatgatgatgacataagcgccggcagacggcgcctgttgacatggactgacagcggccaccgaagaggtctggcccactgcacgggtgacagatcattaatgtgagggcaattgctgcaca

SEQ ID NO: 78402 - DNA, 493 bp, Zea mays
  unsure (1)..(493): unsure at all n locations
taatgccnnctaaagaatggtctaattttttaagggcaacgctcccatggntcatgataatgaatgctatattntataccctgcaaactaccccaaacacaaaattaggagaattcatgctaganaacctcacattgtttctcatcatgcatttatgtataaaaatgaggcttctagctctaggcatacaactcatattaaatcgcctaaaaagaaaattcctactgcatcaaatgagcataatgtttcatttaagactnttgatgcatcttatgttttaactaacaaattacgcaaagtagttgccaaatatgttgtgggcaaacacaagagttcaaagacttgtgtttgggtacccaaggtgctttgttctaacatcaaaggacccaagactgtttgggtacctaagaacaaggcctaanatngtnttgtaggtntatgcattcggtggttcaagttggataatcgatagtgagtgcacaaaccacatgac

SEQ ID NO: 78403 - DNA, 491 bp, Zea mays
  unsure (1)..(491): unsure at all n locations
tagaatactaagcttctanaggaagaacacgtgataggtntaactaatgtgcaattcgagaaagatagaccttgtgcagcttgtcaagcaggcaaacaggtgggaggctctcatcacaacaaaaatgtgatgaccacatcaagacccttggagatgcttcatatggacctcttcggacccgtcgcctatctaagtataggaggaagtaagtatgcttttgttatagttgatgatnttttccgcttcactcgggtattctttntgcaggataaatctgaaacccaagggaccctcaagcgcttcctcaggagaactcanaatgagtttgagctcaacgtgaagaagataaggagcgacaacgggtccgagttcaagaacctccaagtggaggagttccttgaggatgaagggatcaagcacgagttcgtgcgctcctacacaccacaacaaaatggtgtggtagagaggaagaacacgacactcatcgacat

SEQ ID NO: 78404 - DNA, 489 bp, Zea mays
  unsure (1)..(489): unsure at all n locations
gggtggctgcaactgctcaggcttctttcaggcctagctcgcctctntggaccatatctgactgaatattctntggtgcagctctcaactgagacagacagaactctgaatcttttccatcaaaacgagcagcaaatctggaaccggcgaagtacgtactcgtctncgccgagcacaacaacacaagcgtgccgagctgtcgacgacgacgtcgtccatctctctcttttgcgctacctgcttctgtactgaagctgaagcgtgggtagcaactagcaaacaacgagaggagaaaatgcggtgcaggagctgatgaagagcctgcaccattgcaatctatgtatccactgtagtacgcataaactaggcctaaatgtgtcgtatcaaagttagtttctgttagntgtatgtctgccannaagtgcacacattntttnnttggttggacacttgacgaagttagacgttcaaaactacatctcacatatc

SEQ ID NO: 78405 - DNA, 316 bp, Zea mays
  unsure (1)..(316): unsure at all n locations
tcgggaaaccaatactctntgacagagtaccgattaccttcgctccgatttgtctctgtctctagcccatttttcatcgtcaacaccgccgaagagtagtgcccctgtgtgatacccgcaagatatggtgtattctctcaactctgctttctcaacctccgacaattcttgcccaattaagttttaaaagttaaagttttcttcttctgaagcttcttcagctatttccttctccttctcaagtactgtagccatggcttcttcagcggctgtggcagcttcttctgtggccatgtctagaagtatcttatcaatg

SEQ ID NO: 78406 - DNA, 378 bp, Zea mays
  unsure (1)..(378): unsure at all n locations
actcaactgagtcagcttttacgagaattttatgcccagaaaccgacagtggttgatttctttatgagacaaagagttgacaagcgattgcttacanaagagaccaagaataatatggtcaatgatcgcatagttgtgcctaaagatgctgaagtctgccaacaaatttggatgaagctcatcttatcatattccattatcccagaatactaagatgtatcaagacttataagcacactattggtggcaaaaatgaagattgaattgccgctatgtggaagatggacacctgtagacggtcaaagcatacatatgaagaccgtagaccattcaatcttgccatccaacctaaagtggaggatttagctggattcattg

SEQ ID NO: 78407 - DNA, 428 bp, Zea mays
  unsure (1)..(428): unsure at all n locations
tctctggcacgcttctatatcattcccaagagcagtggctggcctcctgatgtctattctagaccaaatggngcgctgaataatcccttntatatcttccctctcaacaaagttattcttcacataaaaccattcttctatccagactcctggccaccttttccgaaatgttggaactgggtaacttacatcagaacaaggaacgaagccatagcaaccgaagttgttgtgatactgctccttgccagtagccttcgtctcatatacagctcgtgcatattgcagaagcattttgtgtntggctctagcccttggcttctcaaggcccaaacaaaaacaacatcctgataatggcttcaggggtaatctgatgaaggaaaatttcgaaggtcttcagcacttcaactaggaaattgcttaacaggaac

SEQ ID NO: 78408 - DNA, 411 bp, Zea mays
  unsure (1)..(411): unsure at all n locations
agaaactcaagctntattccagtgcacccaggatcacgaagaataccttcaggcgtatgtccgaaggttcttgcgtctgatggcatatgcaccaacggtgcctaatgaaattgtcattgaggccatgatcaaggggcttcggccaggacctacggcccaatacttcgccaggaaaccccctcagaccctagaaaagctgctccaaaagatggatgaatacatccgcgctaataatgattntcgtcaaagaagagaggaagcttacaggttctccgaaatgaccatgggcttcggagggagaatccacccaagacatgtaagatcaatccattccactcanaatgatgatagaggaagtcagcaacagcgaccacaatactcctctcaggcttcggggcaacaacagagcta

SEQ ID NO: 78409 - DNA, 474 bp, Zea mays
  unsure (1)..(474): unsure at all n locations
tcggcgaccaagtggtcaggttcgtcgagttctacanagttgaagaccctgagcatcctttttgtgaatacaagtgtcatctgtcctattatgccccatttactttataattcatcaacctgcataccatgatcaacctaaggattgactagtattctattttcctgtccttgtttaccctttgggaattgattatcatgattagttctatgctagcgctctactttaatcaatgaacatgatgagatacaatgatgatactatgagtttattctggatatgatgatatacttgtggcattntatgggactcgagcggtttctcgagtgcctctcccgtgggacctgttcgttgatgaccacccgggaaaacagtgcaaccatgagggtggtatgggacacccttagctaattaattataggaactgacgtgtagttcgcttcgccgtcgtgccgtcaatggagctcgatgtat

SEQ ID NO: 78410 - DNA, 510 bp, Zea mays
  unsure (1)..(510): unsure at all n locations
tattganacaagggttaatgaagataagggctgaaaataaanaactgaagaagcagcatatatgctctagattctaagtccttcagcagaagcaacagtgctgaaggcagaaaaaagttctgcgataacccctagaaggaaaaggatggtaaatgtattagacattntggaaacaacagactctaaacacccttcttccataaagaaggttgccgaaagtgccgaggcacaggctgaagctaatactangcagatgaagggtaaaactgcaacaattgaggctggaaccgaggccgaacccacagtgccagttgagacgaagctngccacagccgagcaaggngccgaagaagtaccntcaaatactgatatangctttgagagaaatatggccaaagaagtcgaatcccttgctcccgaagcaccttccgaatatccctgatatatcattcgacatgcttcgggaaaaagaatatctgangaagaaattttaaagctaacactatgctc

SEQ ID NO: 78411 - DNA, 502 bp, Zea mays
  unsure (1)..(502): unsure at all n locations
ggctcggactacagtgaccgttgagagagggaaagagtcgaaagagacccggtctttgtgtctacctcaacggngagtagggttgcaagaaccgaacctcagtaaaataaatcaccgtgtcattcgcttcatttgccttgatttgtttttcaccctctctttcggnactcggtttatttctaatgctaaccctggcttgtagttgtgctttaagttcgtaaatttcagtttccgcctattcaccccccctctaggcgactttcaattggtatcagagcccggtacttcattaagagtctaaccactcgaagtgatgtcnggaggatccgccaagacggagatggaaatggccacaagccacgggaaggctccatcaaaggagtccggtgccaaaggaagggaggaatcacctcctcacgtcaagtcacaccggagtggcgacatgaagaagaagatgaagaaagtggctactacgagatcgactcttatcgccatccacctc

SEQ ID NO: 78412 - DNA, 495 bp, Zea mays
  unsure (1)..(495): unsure at all n locations
tcccgcgtccagtacagtgccgtacaatgctngcactatcttctccaaactaccgctatctgtacgtgacagtggcacactgcgacgctgactgtatagtgtatactactgttctttcttctgacgtcttcccatccaaactagcactaactgcaaaggaagaagacagctaaactgtccattgatcaacagtaaaatcacggtcgctaacagctgctggcagctttcatgtagggcgttcaggctagctacagtgcagtctcgagcatccactccaaatagaacagctcctttgcagactgggaacttanagggcgatgcacagactcacagtattcttcatgatgacttagaattccaatctaacgtactacctccaacaacctcgaacagggacgtgtaggctagctccattaagaaatcctaaagggttctgtatcctanatatagaggaatcaaattgcctctacgccctccagcagcgtcctctaaacg

SEQ ID NO: 78413 - DNA, 490 bp, Zea mays
  unsure (1)..(490): unsure at all n locations
ctaagctcctacgggagaacacgtgataggtctaaccaatgttcatgttcganaagattgtctttgtttagctngtcaagcangtaaacaagtgggaggagcacatcacagcaagaatgtgatgaccacgtcaagacctctggagctgctacatatggacctcttcggacccgtcgcctatctgagcataggaggaagtaagtatgggctagttattgttgatgactnttcccgcttcacttgggtgttctttttgcacgataagtctgatacccaagggaccctcaagcgcttcctcaggagagctcaaaatgagcttgagctcacagtgaagaagataaggagcgacaacgggtccgaattcagaatcttcaattggaggagttccttgatgaggatgggatcaagcacgagttctccgctcctacacaccttagcaaaatggtgttgtagagaggaagaacaggacactcatatatatggcgaggac

SEQ ID NO: 78414 - DNA, 503 bp, Zea mays
  unsure (1)..(503): unsure at all n locations
tctanagggagagncacatttaggactaaccaatgttgcatttgagaaagacatgattttgttgcgcatgtcaagcaggaaagcaagttggagtccatcatccacacaagaacataatgatgattgataggccactcgagctactccacatggacgctattgtcccgattgcttacataagcatcggcgggagtaagtactatctagttattgtggatgattattctcgcttcacttgggtattatttttgcaggaaaaatcccagacccaagatagcttanaaggattcttgagacaagctcaaaatgagttcggattaaggattaaaatataagaagcgacaatgggatggangtcaagaattctcaaattgaatgatttcttgaggaggagggcatcaagcatgagttctcttctccctacatacctcaacanaatggtgtagtggagaggaagaatataactctactggacatggcaaggaccatgctngatgagtaca

SEQ ID NO: 78415 - DNA, 481 bp, Zea mays
  unsure (1)..(481): unsure at all n locations
tcttcttcctgagccactggcgtgcaatcagcaattatgtctgcttacgcctangactgaattgaggaactatggacataatcaatgctgaacttgntaagctccgcaacccaattttcaatccttccagtagcttctctgttcctcattatgtccttcagaggctgtgacgaangaacaattatgtgatatgcttgaaaataatgctgaagcttcctggaggccattaacacagcatacaacaccttctncaattctgtataatctttctttgatcaacttaacacttctgagacagagtacactggangcctgctttttgatctcgccatctaacttctcctgtacaagagccacactaactacagagtgcgaagcttgcacatatacgagtaatggagcacctgcggaaggtggagtagtgttgtagatcgatcaaaattgcttaactcttcaaagcttttgctgacaggactccctg

SEQ ID NO: 78416 - DNA, 404 bp, Zea mays
tctgacttgtgggctcgcctgagtgtccggtgcacaccggacagctactgtttcttgtctgttgtgccggaatgggcgcgcctgccatctgcgcgcgcagagcgcgcattatatgcgtggcatagagccgttggcgcggagactacctgtgcttctgagtcgcaccggacagtccggtgcacaccggacagtccggtgaattatagcggactagccgttggcttttcccgaagctggcgagttcctgatgccgaccttccttggcgcaccggacactgtccggtgtacaccggacagtccggtgaagtatagccgagtctgctctggaaattctcgaaggtgacgagtcgccgtggagtcctcttgtgaccggacactgtccggtggtgcaccggacactgtcc

SEQ ID NO: 78417 - DNA, 447 bp, Zea mays
  unsure (1)..(447): unsure at all n locations
taccctgtcccataccagggtatgtggctagttgcagagtctcaactacaacagtgcctttctatggtacggtccttaatcaacacagacggacgaccatgtcagctcagcgtctggtctcganttattcaaaccatcactaccggaatccgaggctttgccgagtgccttttgtcgggcactcggcaaagacggctttgccgagcgccaccctcggtaaagttaggctctcggcaaagagcctctttaccgagtgctggacactcggcaccgggccccactcggcaaagactccttcgccgagtgtaaacacttcgcaagggcgctctcggaaagggccgctgtaaacccggttaagaaggaaaccgatgtgaccatgtcgtgccagatcagttttacgtcacagcagtacatatatggactcatccacaggctcaaatatataat

SEQ ID NO: 78418 - DNA, 436 bp, Zea mays
  unsure (1)..(436): unsure at all n locations
ctaagctaaagcctggtagtagcatatgcagtatatgcgaatgattaagtcttttcttttgctatgtncaccgaaatcaaacctcacttggaatatccttggcaaagtcggctctgtccttgtcaccacaccatgctcatcttgcttgttgcggaaacccacttggttcctacaacattttggtaggacgtggaactaaatgccataactcattcctagtgaagttgttggctcctcttgcttgcaccacccaatctgaatcttgaaggcttctctaccctgtgtggtcaatagaggaacanagagtacgttcacaaaatgaccacacagaccgatagttccccctttgaatatcgcgagatgggtcatgggtgactcgtggatgctggggacttggtgggggctgaactgtcatttctatctgacacgcatctcc

SEQ ID NO: 78419 - DNA, 488 bp, Zea mays
  unsure (1)..(488): unsure at all n locations
ctatcacggtgaaacgggtagacaacgtggctttagcataatgaaagggaagctcatctattcatgcttcattaagcaggcttcgtcacaacgaagcaatgagacacataggtttaattctgatgggacctaataggtcactctagactggttatcttttaccttgtttacctctgaatcatttgggtagttntgctattgctttatatggttttgggttaatatttctttatacccatgttccaattattcgtttattctatttatgttcacgtcaagatcattatctntaattggaaaatggagcttaacttgagaaacacgtgccaccacaagggtggaatgggacgccctcggctgactaattangacagctagtggaagactaccttacccgaaaggcgcaagggaagtaggggagtaggcatgtagggaggttctcgggttgattttgctgcgatggcggtcaggtgggggattcctacaat

SEQ ID NO: 78420 - DNA, 314 bp, Zea mays
  unsure (1)..(314): unsure at all n locations
tagtgtggtangcccggtcacttcattgcanaatgtcctatgtctagtgacagtgacaggggcgacgacnagaatggaataagaaaggagaagaagaaatactactagaagaagggcggcgatgcccatgtntgtctggagtgggactccgacgaaagctcaagcgactcctccgacgacgaggacgcctgcaacatcgtcgtcaccaagggccttctcttcccaacatcggcacaagtgtctatggcaaggacggcaaaggaaggtaaatcaaggtcctcaatgaatatgaaacatctagtgatgacgatgat

SEQ ID NO: 78421 - DNA, 276 bp, Zea mays
  unsure (1)..(276): unsure at all n locations
catgtgtcgagttcagctctatcaaaatatactaagtataagtgaccctctaacacacncttanatgctatngaatcatcacttcttctaaagacagcgacacctatatcagtgaaaagacagttgtagcccatntgacataattgtgaaacggaaagcatattgtaatctaatgaatcaacaagaaaaacattggaaatagaatggtcaggagatatagctattttaccaagacctttgaccaaaccttgatttccattcccgaatgtatagctc

SEQ ID NO: 78422 - DNA, 308 bp, Zea mays
  unsure (1)..(308): unsure at all n locations
atatgtaattttcggtgttagaataagaaaggctagtttcgaatcagttcacattcaatactcgcaacatgttgctaatgagtacgagtgcagaattgaacttagcaacaacattgaatgtagagacgagtatgaacttaaggagaaaaggggcaaaaataaatcgcatactgaaagcacaanggcataacaattgcttaccggagttcgggttctcaacgaaacctacgctccattgaggagtcccanaggcctangtctctttcatccttttcttcacccaagtgatcacaaatatcgaacatgag

SEQ ID NO: 78423 - DNA, 282 bp, Zea mays
  unsure (1)..(282): unsure at all n locations
tggcacacgataacgatggttacattntatatcctgctgggtatcctgagcataanattaggataattcattctatgaagtctcactctggacctcatcatgctcttatgtataagaatgagacatctagttctaggcactctacccatgttaaaatgcctaaaaagaaatctcctgttgcatcaaataagcctaatgtttcatttaagactcttgatgcttcttatgttntaactaacaaatcacgcanagtagttgccaaatatgttgggggcaaacaca

SEQ ID NO: 78424 - DNA, 283 bp, Zea mays
  unsure (1)..(283): unsure at all n locations
gataactntagccctataactttggtgcagagagatgaccaagtcgttatgctataatttgagaacaatggccctataccgtggctgtcaaggttgttgatggcccttgccatggtacagtagttccaaactgaagaagatcgcaagttcaccctcccttgctcgccgcggtgtccatcaccgttgatccctgctcgtcgtgattcgtgcgtcgtggtcatcggttatgcacagctcagtaaagatccttaccgccggtgagctgtgcaccacttcgacgacc

SEQ ID NO: 78425 - DNA, 458 bp, Zea mays
  unsure (1)..(458): unsure at all n locations
gcacatgagctccaaggttcttatgtggtgccctaagtctttactcttgtgaacacagcttctagtgccaaaatggctctagccaagggaacacctgtggtggtacatggattangatgtgtcttgatgcaagacaacagagttattgcctatgcatccagagcactcacgcctcatgagcaaaactaccccactcatgatctggagttagcagccgtagttcatgctctaaagatatggagacattacttaatgggagctcattgtaatatctatactgatcacaagagtctcaaatatattntcactcaggctgatcttaatatgagacagagaagatggttggaattaattaaggactatgatntggaagtcattaccatcctggcaggccaatgttgtggcagatccttaagtcggaaggccagtgaactgtgtagtatgattcaagatgcacc

SEQ ID NO: 78426 - DNA, 338 bp, Zea mays
  unsure (1)..(338): unsure at all n locations
tagctgaagcttaaagtngcttataatgagctttcctgcaataattcttggagaaactcttgtaatatggaataacatgtaaatttgtacataccttgtnatatatcatgtntcccttgtccgtattcaatctgctctgctgaggacgaaacttctcttttgagtcgaaggcgaanaacaccttcccttcttttcgtacacaacgaagcatagaaaatctttccttcgaatctgttccttatcttctgaagcaccacgcttttttgtgtagcataatgatgattctatatatgtctaaatggatgtctatgaatgcaaatgacatgatggcatgtaat

SEQ ID NO: 78427 - DNA, 313 bp, Zea mays
  unsure (1)..(313): unsure at all n locations
ctaagncttgacatcttattgcttcttcttcctgagctcctagcgtccaatcagcaatgaagactgctaacgcctgtgactgaattgaggatcttgcacataatcaatactgaatntgttaagctccgcagcccactttcaatccttccaagagcttctctggtcctcataatatccttcagaggctgtgatgaaagaacaattatgtggtatgcttgaaaataatgccaaagcttcctggaggtcattaacacagcatacaacaccttctncaactctgtatagtgtttatttgactaacttagaacttcat

SEQ ID NO: 78428 - DNA, 267 bp, Zea mays
  unsure (1)..(267): unsure at all n locations
tgagacatcgatgggaagcctacttggtgtatactctatcttcttctcctccgncgctttgaaggcgacgggttgcacctcgggtgtggaggtggcgcctcgctcaatgatatgcttggagccattgatcatgagtgcaaagctcacaaacttttctatcacttcctcgggagacattagtttatatcttggatcaccacgaattaattgtacttgagtaggggtaagaacaacaagtgatctaagaataaccttgaccatttcatg

SEQ ID NO: 78429 - DNA, 341 bp, Zea mays
actcaacccgtccagaagttgtacaggtggtgagcccgtacttatgctaagtcatatcaggatagtgcagggcgacacagagggaagagaggaaaaaagatctcagaaaaggcggatgccacttgctgagggactcatgaagctctcactctcgacagagacccgcaactctcctacaaggttctttccactcacacatgctatgctagacaaaagaagtaactaagctcctaatatcacattatgtgatagaattgtgcctttgcactactgacaaggaaataatgatgttggtatctagagatactctgtgcagagctctttagaaaaactgtagtaaa

SEQ ID NO: 78430 - DNA, 368 bp, Zea mays
  unsure (1)..(368): unsure at all n locations
ctcagcgtgttatcttataatatattctcgtatcgtggcttctagtggggtaatactaatattatcttaatactaacgtatcgctctattnagatattactatgattggatatgtgctctttttatagatgagcaattcatccctcactgtgctngttcacgggggctattcttgcagaagactgtcaagtttcggattgtangcgtcctttcaagtgacatccagtctctatccgaattgcagaccttgtatgaaatatttcgcctgttacactatgattcantgtgatntgagtccccacacaagcacatggattgtaagtttaacatttgtttcaagcatgtgaggtgattgccacctatatttt

SEQ ID NO: 78431 - DNA, 362 bp, Zea mays
  unsure (1)..(362): unsure at all n locations
ctgactgaccatcatgcgcaattggggatcactgcacgacacccaactcaagatagatcgaacgtatgtgttctcttcctccattcttgtcttgtcgngtctgcaggactcaagggcagatngcaaactcctacaaagtgcacactgtgtatgtgcaagggcactcactgagctagccttctcaagcaaagctatcctagcgtctgtctgtgctagctcagtctgcaagccaggacacatgttacacgctcccaacaggatagagctagatctcaactcatcatgctcatctangcacgtggagtacttggtctgcacagtggtgatgattgacatgtgtagagacactcatcacatttaat

SEQ ID NO: 78432 - DNA, 224 bp, Zea mays
  unsure (1)..(224): unsure at all n locations
cactaagctntctgcttacagcttcngcactgtgtcaaccttcgtatctnttgagcttctccctntctgattcaagttcgaagatacctgttcacctatttatactccagaaacattgtaaatcatgtntttgaggaccttcggaagccgaaggcccccaacactgggctaaccagtttatgcccaagatgacatctatgtcttggcctttcagaacaatcata

SEQ ID NO: 78433 - DNA, 228 bp, Zea mays
gcaatctcaataaacatcttatcgcacttcttgacaagattcttgccgatgaccttgaagatcttgttctgctggagagtctcaccagagatgttgaggggaagatcctcagagtcaacaatacccttgacatagctcagccactctgggatcagctcctcacagatgttcatgatgaagacacgtcgcacatagagcttgatgttgtctcgttcttcctggtgtcaa

SEQ ID NO: 78434 - DNA, 221 bp, Zea mays
ggacctacgagtcatttttcatgtgaaccatacgcagaggatcccataatttattctgaaatccatccttaacatattttgtaaacaacattgtttctgacagatcacattaactttgcaaacagtatcagatggatcacttcagaagaagacaatggtgcctcactcatactaccacatcaggacaaagtaaaccaggaggaatgaccggctgctgttta

SEQ ID NO: 78435 - DNA, 283 bp, Zea mays
  unsure (1)..(283): unsure at all n locations
ttcgtgaaatgttcttcgaagctacttagcatgagtttccctttcaaacattcttccgaagatcgatgtcatgtccncttcttgtgccatatgcaacatgatgtatgatgcttatgctatgtgaaatgatgcgatgatgttatgctgtgtaagatggtgtgtattccgaagatgcacacanttctgcgacanaacacataattttttgaatcagcattggctttttactataagacctccttaggagcttcttcgccttttacttcagcggaatcnagcgtta

SEQ ID NO: 78436 - DNA, 334 bp, Zea mays
  unsure (1)..(334): unsure at all n locations
accgcgcctctaacctcatcggaacagtagctgcggtagagattacgactattgngcttaccggcggnggtctagcttcggcgaagggggtttggagattgtggaggtcctancgaacccgttgatggtcggatggcggtctgtggtggtcggaggcgttctggtcacgcgcangggctgatgagctcgtgggcggcgaggagcttggcctgtacaaggcgatctagttcaattggatggctcggggaggttcaccagatgatgtagaagctgtgcgcacaaggaatntggcaatggcgtagcggcttacctcggtcacgtgctccggcgggtg

SEQ ID NO: 78437 - DNA, 199 bp, Zea mays
atgatgctctcacaagcccttagcaccagctatgattttgggaacattgagtgcgatgatcgctatgattgtgtcttggagtgctgtgactttgctcttgcaatgaatgataacatgagaatgcttggattgctttgaatgaggtggttggtggggacttatagcttccaaccacttcctagcctttggcaagactact

SEQ ID NO: 78438 - DNA, 113 bp, Zea mays
gaacctttaccaaagatgaagtatattagtaaatctacaaaatgtattaagagaggtattacaaaaagggccaacaaaaaccccataacaattcatcaagtggtgagcacact

SEQ ID NO: 78439 - DNA, 180 bp, Zea mays
cattcacacaagaacatgatgacgaccgacacgccgcttgagctactccacatggatctattcggcccgaacgcttacataagcatcagcgggagtaagtatggtcttgacatagcggatgaatactctcgctacacttgggtattctttctacaggagaaatctcagacacaagagacc

SEQ ID NO: 78440 - DNA, 206 bp, Zea mays
  unsure (1)..(206): unsure at all n locations
ctcccgttaacttggttgatgctcgtgatttcctggctcatttggaccatctctttagtttcttgggtaatattgctagccggcctgtttgcttattctatgtaagaatgtgcgagcaacgtgttaaatatataataaggaaaacctanganaagaacatcacatcttatagcaactccaacagcatacgtaaaatacattgactc

SEQ ID NO: 78441 - DNA, 224 bp, Zea mays
ccttgctactacaatgtatttgaaaatgtaaacgcacattcatattgtctgaagtctaaagcaaacttatctatccaagcgggggtgttcacctgagtattttgtaggtctctagtacatgtttataaaagaagctctctattttcttaacagatatagtttcgtgacactgatacttctacacaagggactctgtatattaaacatttttttttactaccttt

SEQ ID NO: 78442 - DNA, 303 bp, Zea mays
  unsure (1)..(303): unsure at all n locations
ggtacttgntctcaaatgctatgaattaagaacaaggcaacatanaatgttaaatgttaatgcccttcgtccttcgaagcattatttccccaacggtataatgatcttctgacgaaggtcatgaaggtcataccttcgtcatctttgacatacatatatgtgtgattattaataacgaatgaagcatgtnaagcataagaaacaatatgaacaataacattatcatatatatatatatatatatatatttcttaggatataactcgagatcaatatataaataatattgaattacatttggta

SEQ ID NO: 78443 - DNA, 463 bp, Zea mays
  unsure (1)..(463): unsure at all n locations
ctcagcttaaatcatgtacatcttggtgcgttccggatgcatagagaaattggagagatgagcctcatttctaatgttcttcttgagatcctggtccttaggagataccaatctgctgttgaaccataacacacccttctcatcctggcggagacaattatacttctcaaccttctgatggagattcttcttgataatctgcactcccttgtcactgagctgtgccatgataatctggtcttgcaaagctggctcaacaganatgtgagacaaagaaccagaaggaatcacttcaatttgcatcttgctcagctcatcacacaaggtgttaacatgagaatccatcagaatacagttgcatggcaacttccgactcaaggcatcagctaccacattagctttccctatgtgataatggacctncaggtcataatccttgatcaactctagccatcttctctgc

SEQ ID NO: 78444 - DNA, 254 bp, Zea mays
  unsure (1)..(254): unsure at all n locations
atggagctcatgcaatattagctacatctcattagcagctgtcaatgtataaactcgactaanaatatccatgctaagagattcatataaacaagtttctggtcctaacagttaaatgaatatctctttcgtcactcatggcgggtttctcgggattattgggtgagttcatcccttcacgagtgactctccaaacacctagaacaacaacctctagataacaagccattctagcactataatatgggatgtta

SEQ ID NO: 78445 - DNA, 388 bp, Zea mays
  unsure (1)..(388): unsure at all n locations
ctcagctctaagggagacacgtgatagtctaactaatgtactttcgaaaagatagaccttgtgttgcttgtcaagcacgtaaataggtgggaagctctcatcatgccaaanatgtgatgaccacatcaagacctctggagctgcttcatatggacctcttcggacccgtcacctatctaagcatatgaggaagtaagtatggtcttggtatagttgataaattttcccgcttcacttgggtattctttttgcaggataaaactaaaacccaaggaaccctcaagcgcttcctaaggagagctcanaatgagtntgagctcaaagtgaagaagataaggagcgacaacgggtccgagttcaagaaccttcaagtggaggagtaccttga

SEQ ID NO: 78446 - DNA, 309 bp, Zea mays
  unsure (1)..(309): unsure at all n locations
gaggtgatcttcttatgtgatttgccatctatctgtgagacatgtgactaatcatatttataagtgaataattctataataaaacataaataacctgtgcatcatgctggagtttattntgttcgcgcatttaatagaatagtcagagggataaaaatattataataagtggagaattcggatttaacccagaagagcaaattataaaaattggaggaaatatatgaagagagaaatactgtacaaaacagaatatgttattaataaatacattattcccatactatgttcaaaccaaacatgtaatat

SEQ ID NO: 78447 - DNA, 216 bp, Zea mays
  unsure (1)..(216): unsure at all n locations
gcgtgcaacggtcgactctgacggatgaacagtgtagcatagtaccgcngcagaagtcagagcagcaggtcagaagggcaccacactgtccggtgtgacaccggactgtccggtgccacatcangacaaagcctccaacggtcgaccagctccaaaaccctaacaacatggtgacatggcggcgcaccagacactgtccggtggcgcactggactg

SEQ ID NO: 78448 - DNA, 267 bp, Zea mays
  unsure (1)..(267): unsure at all n locations
atatcacatcccagtgatatgtattctctgtttctcttctagtatctatgggtatatgacaggtccggaaccttatccatctcctcaagaacccattgtggcaaaggaatctctggaaaggtagtaaattccaaccatgaacaaaaaagagatatgcttttaaactatattacagtgaagtaaaagtcaggcactactcgtgttcagttaaagggtgaggccatataacagcacacaacaatcaacgtgcccaaatntcatacaata

SEQ ID NO: 78449 - DNA, 382 bp, Zea mays
taagctataagatcttatcccacatgtgctggtcgcgatgccgagcagtcatgtaccttacatttgcagtgcgagtcagctttcaaattatacgttactgacctctacctccttaagcattgatcatagtcttaagacggccctcatagtaaagaagtgtgcattgaaaatgaaagaagaatgtatctaaattcaaacattgaatgaggcagaatagattaccatcttgacaactgtacatccaaggaagtgtggactggtttctagagaacttcttccacttgtggccgtcggacatgaccgtgtactcaaagtatctgcttgccatgttggcttgcataacaacttggaccaacagttgccctggtgccattttgatttt

SEQ ID NO: 78450 - DNA, 299 bp, Zea mays
aatatgttcagacaggattctaaactcatcactacatctcggcatgaacccgccatcgtaatggtgcactgaggcctagtcaaccccaaagacagctctaacgagctctgaactatcttatccttcttatcatcaaatttaacatataaccattcacatttccaaccggagcgccatttagtgcgatagtagaccatccgctgcttcatatcctctcgatgagcataattatagcagccatagtactcatgccatccatcttctgtagccgtcgtatgatagtgaagtccatgaactcg

SEQ ID NO: 78451 - DNA, 220 bp, Zea mays
taaaagccgatactctggggcatgtacatttagaacccactatgactagggatggaaagaaattaaacataccactctgcgccatctgtctagtggcctgtaccaaataccgggcagggggtctccttggagcgacaccagccctcacttcgtggagtggactgtttcgccgttatcatcaacctgggctacctgattgaatcctttatagagagatggg

SEQ ID NO: 78452 - DNA, 247 bp, Zea mays
gagaccttatcgaagaacgcgtggctgtccacatatggtctcttcgacgagggtgggctcccattcgattccacttgacggcttagttcatttgctctcaatccattagaatcaagtgtgtttgagtgagtttaatttccaaacaagtcataaagattatatctgtttcagatcatattcgatctatataggatagaaataaccaaacaatgcccgaagaagggtggtttgatcaaaataatataaa

SEQ ID NO: 78453 - DNA, 262 bp, Zea mays
  unsure (1)..(262): unsure at all n locations
cgatccatcatcaccgcctaccgcgaccactgtacctacctcgcccgcggatgggacctcgtctccgccttcttcgagctgatgggccgcgaggctgggtgctcccgcaggaagggcggatccatgcatttctacaagaaggacgccaatttctacggtgggcacggcatcgtatgcgctcaagtgcctctcggatgcggcctggccttcgctcataagtacaagaaagaggacacggncacgttcgcgctctatggtgacg

SEQ ID NO: 78454 - DNA, 418 bp, Zea mays
  unsure (1)..(418): unsure at all n locations
tcttatcaactcaagctatcaatcttcaaatgatctacatattcaagaatgacccaagggtacttcaatttattgtattcaaaacccatatcatctcggggaagacattgatggtgtaggaatngaagaatcatcatgtgctggaaatcaaggcctaccacatggaggaatgtcaaaggatggtaacacttatacttttaagtgcaaagatcttaaaatatcatttcttatatgtcttgtgtaagcacattagaaagaaagcacttaagaatgtttaannatatgtcaccattctttgaagaaaatcctctcatatgggagagtgcatattcttcatttctatattatggcnatctacatgccttaaaattgtcccttttcatggcatggttacactaatattctgtattgcatgtct

SEQ ID NO: 78455 - DNA, 386 bp, Zea mays
  unsure (1)..(386): unsure at all n locations
accacattngaagcatgagcgcttcccccttgtcttggtctagcttggctgcccgttgcgaccctttatctgcgtcttgaatctcttgatgatgaaggccatctcttcatcattaagtccggccgcctcaatatgtgctacnncttgctaggtagcgccctccttgcttcttgtngcatagagagcaaggggttgaggctctgtgattggaccattcaatgcgtcgtccacgtacctcgtctccttgatcatcattcgcccgcttacaaatttaccaaggacttcttctggcgacattttggtgtacctgngattctcacgaatattattcaccaaatgaggatcaagaacggtaaaggaccttatcatcagtcggatgacgtcat

SEQ ID NO: 78456 - DNA, 141 bp, Zea mays
  unsure (1)..(141): unsure at all n locations
cccttggtaaagcttggtatgttttggacattngttangagtaccgtgaaggagagttatattcaagatataacttaatgtgtctatcataactgcatgttcatagcatcacatgggcatttatgtatgtatattgttatg

SEQ ID NO: 78457 - DNA, 123 bp, Zea mays
gccataaactcactacgctctgggggctccaaactgctcactgaggggtggatggttttcatgttgccaactctacgcatgcggcgattgactcctgagctagagagggctggctggaggtga

SEQ ID NO: 78458 - DNA, 399 bp, Zea mays
  unsure (1)..(399): unsure at all n locations
gtcctcgacanagtaaattatctgcgaaggttattttaacttagctgggaagattgatgctttcactcctatcctnncggcttaaaatgatgctgatgtcactttgggggtagaacaacangaagcattngatcttattaaaaactatttgtcttcggctctagtattgaaagcaccacaagtcagagtaccattcaggttgtacattacagccaaagataatgctattgaagccgttctgaaggaaaggagcatgtggtgatctacttaagcagaagggtggtgaatgctgaaatatggtacaccttcgttgagaaattatgcttatgtctattttatgcatgcaccaagtgtaagtgtatctattgtctagccttgcaccgttacggtcaaccgatg

SEQ ID NO: 78459 - DNA, 258 bp, Zea mays
atgtaatttcacacagggctgcgctctgtgcctattaatagatgaacagtacccctgtactggtcacgctatcttgtaatcgctcgcgcgcaacacttggattcttgccttctgtcagccgaatgatagatgaattaaataccgtgtttaatattcagtttgacaatgatatatattaatgctgcatcatatgcgtagtatagttatctttcatgttgtatatgtatcatcttacatctttcattatgcattaaccgt

SEQ ID NO: 78460 - DNA, 314 bp, Zea mays
tcggccttgaacaagctggagtttatcccatggctagcggagcccaacagccagcagcttattttagctgcgtcaaccggctttttttgaaacaactaataaggtgcgctaacacctaaagcaggaactactttttaagacaaccgttcattttaatgacagtatatcctatgactatgctacaatacaattttcagattccttaaccttgagaaaagtctagaatgcattcctacctttactgcatgatccataccatatatgatttggatctttttgacgagaggactctcttccccgaatgttggctcctg

SEQ ID NO: 78461 - DNA, 255 bp, Zea mays
cacatcacataatacacatgacgaaaaatacacacgagtaactgatacacataaatattactctctatagactaacatactgcacgtgcagtatttacttctatacatagaatctcgaactgcgtgtacaacttgtatgaactccttccgctaagagacttatggctaagacaacaagggtgagacatattgtctatcatctgcgctaatggccttagcgctgtgtccgacttatctatcggtagacacaaccaa

SEQ ID NO: 78462 - DNA, 386 bp, Zea mays
  unsure (1)..(386): unsure at all n locations
ctcagcttggctaggctcatcttctntcttcatccatatctagcgatatcctgaataacaatctagcaggctcatgagatccgaagtggccgacgcatctatgatggagtccatccttggcaggggaaattcaaccttctggcatgttgagatctatgaaatcagtacacatttccactttccatttgcctgttttaccatcatagtgttagcaagccattttgggtaagtaacttctctgattaccccgacactgagaagtcttttgacttcatttcttgctccatcagctntatcctctgaacatttgtgaagcttctggtttctttgtctgatagtgggatctacattgagagagtgtcaatgatgcttctattgacccacat

SEQ ID NO: 78463 - DNA, 320 bp, Zea mays
  unsure (1)..(320): unsure at all n locations
agcgagagagcaaagcgaagctcgtcataggctagaagatattctctccatgagaatgctacactttgacgagttgactaaagaacatgaggagctaaagtgctctcatgttgatttggtccaaaggtatgaaactatttcaattgagcaagataacgctntacattgtatcgctcaattagtaaataggaataccttgcttaaggaccaagtagaaaagctaanaattggaaatctagctnttcaacacacatatgatatgcttctatgctctcatgataatcttagagatgatcatatcatattaaacattgctcatg

SEQ ID NO: 78464 - DNA, 391 bp, Zea mays
  unsure (1)..(391): unsure at all n locations
atcttatctctctcagaagtctgatgtcgtagatctatagctctcgagcgtacattaccaaaggctatccgagtactttcgtcctcgacatcctgttgcacttttaaagcattanctcaaatgagtccctggtagcagcgaagcagaacgataaaataacacggtgagcaaaaatattcgactgatcggaanaataaaggagaaaagcataaacaaaccttcaagttattatatgctagacaatctgcaagatgatccttnggcatagcagatagcccaagctcaagcttccgataacccatgttatcccatgattctcgacgaacattatatgtcttttgtatcccgagagacaatatagataaatcgcttcatcattggcccatatact

SEQ ID NO: 78465 - DNA, 144 bp, Zea mays
  unsure (1)..(144): unsure at all n locations
actatgcacaacatacacactccaagtttatgcccatattataaggtctaactgccgatggtctggcacactggctcanatggtctaccacctgtgctttgatcccatttttgaatattgatcattctatcttcttcccagagc

SEQ ID NO: 78466 - DNA, 146 bp, Zea mays
ccgattccgaagatacctgttcacatatttcacttggaaaacattgtcaaatcactgttttgaggaccttcggaagccgaaggcccccaacagtagcccctccaatattaatttgctggaataataaattcatattgcgacatgga

SEQ ID NO: 78467 - DNA, 335 bp, Zea mays
  unsure (1)..(335): unsure at all n locations
ctcagcttgacctctgcactactcggtgatcgntttcgcggtggcaataaatcctgcctgttaccttcccactagcgtctggatgtgcgtgtttcccattgccagcgtggcctcatttaactcgcttccagtagataaagaacgcacttatgaggacgcctgacgcgccccgtctgtataatgtctccacaatgagtgtgtagtgggctgactgtctggcgatgcgctcaactacattattggcatctgtttcctcttcattctttatatatctgatgatcagccttctccaatcatcagagtctgactctggttgatccacgatattacattct

SEQ ID NO: 78468 - DNA, 345 bp, Zea mays
gctatcaatcttcaatgatctatatccgtgattgacccaaggttatttctcacattactatgtcttagactcatatcatctcgaggaagatattatatgttgtaggaagtgaagagatatcctgtgcaaaaatcaaggcctacaacatggaggaaagccaaaagatggtaacacttatcttttaagtgcaagtattgtagaatatcatttcttatgtgtcttgtgtactcacatagaaagattgaacactttcacatgccttaaacttatattaccattctctgaagaacttcctatcatatggtagatcgcatactcctcagtttatcctatggcaatctacat

SEQ ID NO: 78469 - DNA, 352 bp, Zea mays
  unsure (1)..(352): unsure at all n locations
ctcagcttaatgcgtgcgtcctctcccncctcttactctctctctgcatgaacaccattgattgtgtcttgaagccatggacgaccgccctctcctctctctcctctcttctataagagacngtgagccctttgctccttcctgtcgagctcactctctccctcacctntctccctcacccatatcatgtgctcgctcatcgaaccacgccgtcaccggagctcgtgcccaccgcgtncgcgcagcaccccggctaccgcagcaacgtcacgcgcgcacacgctgtcaaacccctgcccacgccatgcccagttcgtcgccggaccgtccgcgtagcaccccaactggacct

SEQ ID NO: 78470 - DNA, 405 bp, Zea mays
tcttctcgtcgtcgatgagtgacaccaacgcgagcttctttcagccagtagtgtttgttcggggtttccaagtaagaaacatggattcatttttggggttggtttatgaaaatgactcacaagtcggatccatggaaaaatattacggagaataaatgtcacacatataaaaaaagaatttaagttgaaaacattattcaaacaaaagaaattgcatgcaaggctcttctttaaatactactctctccatccaaaaatataattcaagaatatcgttgataattatctactactacacattgtgtaagggtagcaggtgtgctttgagagagatgtagtagatatttttactgtaacaaatattaacataaacacacatgtggtgtagtggtagctacgagcaca

SEQ ID NO: 78471 - DNA, 401 bp, Zea mays
tagccaaataactcaattaaagccccaaatcaatcttctcatgtggggacttaatgggaattctgaatttcagaattctgaaattcataccttgagccaaagatcagggatgttcaccttgatccctaactcgaatcctaatggccccattgacaaaattgtgtctaactaacccctctgtcgtgtgccagaagatggcattgggacgcgagccctagacacgacaaaaccttggatttgcctcgggtttgggcagggagacagaccagatttcctggctccatatctctgcaaccagtaggcaaaatcctatgacctccacacaagaatggtagcttgtagggaggagaagaggttttgtgcactgaccaaagcgagagcagactcggatgagcgaccac

SEQ ID NO: 78472 - DNA, 425 bp, Zea mays
  unsure (1)..(425): unsure at all n locations
tacactatccaatactcnaactcttcccttttcttctcgtctgccttaacatagaaccattctcttattctaccagtgggccacttggtcggatagcctatcaccggtgtaacacccctggtgttactataactaaaacttgagcatggcatcatagcattggcattgcatatgtttgatacacctagaatgcattcactaggcaaaaatttcaagcaagttgtattgttttaatgttttgcaaataggaccctggataggaagcttaaccctaaatagggatcaaaggggtaaaacctaacccaagttgaggaaacctaaaagctttaggggaaaagtcataaaatgaccccaagaataaacttgaatcacctttatacccctgaagataatagaaaccctaattggaaccctggaaaacccta

SEQ ID NO: 78473 - DNA, 402 bp, Zea mays
tggtgccaatggagaagcagaaatccctgaagtcttggctgtcaaattgcttgccattgtcaaatgtgagctcagacatgactccgaaccggcaaacaatgttttgccagaagaatttctgggtagtcttcgatgttattgtggatactgccctcgcctcgatccatttggtaaaatactcgacggtgacgaaggtgaacttgaggttcccttgggccgtgggtagtggcccgacaatgtccaggccccagcgctgaaagggccacgtgtgggcgattagctttgtgaattgtgaagggctgcccgagcgtggagaaaacttctggcaggcttcgcatgaccttgtgacccgatttgcggcgcagatcatggtgggccaatagaagccttgatggatcacct

SEQ ID NO: 78474 - DNA, 390 bp, Zea mays
  unsure (1)..(390): unsure at all n locations
tccatagcccaccaaggtgctgaaacgagagcaattatggtatgaactgacctggaaatggcggtccacgacgcgacggctcacggcggcgcggagaaccgaattgggggaagaaagaaattatggcgctatggtggctaatcggagacaggggcgggtgctctagcttcgtgacaacataacggagctagcggcaccttcaatttatagtgtctgagagcggtggcggctaattttgagaagttgtggtggcggccagagagaggagaagtgcactggcttgggtgatcgtggctttcaccgtggcaaggccttcggtgatggacggacctgcatcaatggtttactgcgacgtgttacagctactangcacgtggcgcatggttggta

SEQ ID NO: 78475 - DNA, 399 bp, Zea mays
tgtgtggctatgaccacgttcttgaagcattttatggtgttcagttcaactcctcgttctaccccttttggatttcttttttttttggctgagctagatccgcgcattcttatttttcttggcgcccgatctgcatggctgcatgccattttttcgctcgcgcaaaatagaattatatactagttggagtagtactgatcttagtatatgcatgtagtaatatgaattagaactagaatctgcgtgtactgaagtttagaaaaactctaaaaaaacgatcttcaacatctcttaataaaccacattttttgggaccttaataggctgttcgatatcccttagactcgtcaacctcttccacatgttgccagcattttaaaatgtgcatgcatgctgaga

SEQ ID NO: 78476 - DNA, 117 bp, Zea mays
tcaacggtcgaatccaacggcagtgatgacgtggcaaggggcaccggactgtccggtgtgcaccggactgtccggtgcgccattgaacaaacagcctcccaacggccacttttggtg

SEQ ID NO: 78477 - DNA, 398 bp, Zea mays
tgcaaattgaagggcagatccccttattagttagtcatcagtttttgagatcatttaagcgagaaccgttgttgctatcagggatcaggtccttatgaagtgatgataaaaaatgttctcttgctatgaatgagtctaacatgctaattgtgactgcaagaaactgcactgaagtgcctttgtgtttgcattcaatgaccattcaacctgatggtgattcagagcagctgtgttcagtgcaacagatcagtggaatttccaatcgtcatgcaattgttgctcctagggaggaatataaaggaatattttcggtcaatccacgggctatcagtacaaacttcagactatgtgaaatttgcctgaattggtcaagagattcaagcctcggtgaggatcaa

SEQ ID NO: 78478 - DNA, 395 bp, Zea mays
ttaaaagaaagcattgattacatcatccaccatgcttcgggaaagggactttctcaggaagtagaacgagaagctcaacattatgcccaaaaattgaaatacccgaaggggcattagtgttcaatggcagtggggaagaagattttttgtactgcctcccgaataataaagagatatccgtctgccgggagatagatagaagcttcggatttccgaatctggaagatggcctttcaatattatcaaaggatgaactggctgacagtttagcgtataatagcataaaggtataaaagtcaattttgtatttgaaaacgaaatatttcatttgtttatacttaatcttgtcctcctcttgcagggcttaatccttagcaatgcccttagagcacaga

SEQ ID NO: 78479 - DNA, 395 bp, Zea mays
tcgtatcgaaatccttcttttctcgctcaaagctttctgatttcaggaggagttcactgtttaatttggcgatctcggcttgggcttctgtcagtgaaccctccatcgtctgaagaacaaaatctttcttctcaagagcagcttcatgatctttaattttcctttccaagccttcaattataacctcatttttcttatcttcgaggtcttgttgcatcctcaaggctttacttaatagcatactctgtgcaaaataaccttcatcagcaattaccttcattgtaaaacaatgaaaagccgaaggaaaaaattttaccttgaaattagaatagaataaactaacgactatatgttgtcatcggtagcgactgatgtcagcttcaagcttcgggaaa

SEQ ID NO: 78480 - DNA, 393 bp, Zea mays
tctgctgcgcgtctcccgaccgcgaccacctcgacttcggctacctcggcatctaagggctatcatcttcttggagcacacatcggtctctactccagccgcaacattcgcaccatcacgacgctgcgattgcggggggatttcaacccgtcggctcctaccttcagcctctactctagtctcatcgtgtgtggtgcctccgttgcgactgcgggggtatgttagactctgtgtgtgagtgtgtgtgggccggcaccactgttgggctgccgacccattaaggttagggttgagtctatatattgtaaccccttctctatgcaatacaattgtcactttcatattcctacacacctaaccaactcagctagaggccctttcgctatataacat

SEQ ID NO: 78481 - DNA, 393 bp, Zea mays
tctaaagggagaacacattttgggactaacaaatgttcattttgagaaagacagggtttgtagcgcatgtcaagcagggaagcaagttggtgttcatcatacacacaagaacatcatgacgactgataggtcgcttgagctactccacatggatctattcagcctgatagcttacataagtatcggcgggagtaagtactgtctagttgttgtgggtgattattctcgcttcacttgggtgttctttttgcaggataaatctcaaacccaagagaccttaaagggattcttgagatgggctcaaaatgagttcggcttaaggataaaaaagattagaagcgacaatgggacggagttcaagaactcacaaatagaaggcttccttgaggatga

SEQ ID NO: 78482 - DNA, 401 bp, Zea mays
ttattttagtgtacccaggaccacgaagaataccttcaggcgtacgttcgaaggtttctgcgtctgaaggcacaaacgccaacagtgcccaatgaaattatcattgaggccatgattaaagggcttcggtcgggaccttcagcgcagtactttgccaggaagccaccacaaacattggagaaactgctccagaagatggatgaatacattcgagctgacaatgacttccgccaaagaaaggaggaagcattcgggttctctgaaatgaccaggggcttcggaggaagatttcatccgaggcacgttaggtcaattcataactctgctcaaactgatgatcgagggagtcagcagcaaaggccacaatactcttcacaagcttcgggccagcagcaaagttc

SEQ ID NO: 78483 - DNA, 404 bp, Zea mays
  unsure (1)..(404): unsure at all n locations
ccttgacgtttagaatgacactagcttctcccaaatcttttattttcgaagccgctcgatcgaagatgttgaacttcctcaatcacatcgagatttgatccaaagatcaagatgtcatcaacataaagacacagcataacagactcacccccaccatacgataatatacacacgtgttagcttcatttacagcaaaaccagcagctgtaagagtattatcaaatttttcatgccattgcttagttgcttgttttaggccatacaatgantttatcaacctgcacaccttgttctcttgaccatccgcaatgaacccttctggaggatccatgtagatcttctcatccaactctccatttaggaaagttgtcttaacatccatctgatgaatgataagaccataa

SEQ ID NO: 78484 - DNA, 397 bp, Zea mays
ctttattggctcgcattgcctctattgtcacaacttgcttcttgtgggtgacaaactgtcgaacacaggaaatagggggaattgttgaaatctccgaacaatctcttttggaaagactctctatatacctcaacacgagtgtgtgacttatagacagacgatttgacgttagactttgcaaaaacaaaccaagtggtggcaacggatgatccatatatgccaaaattgaataaaacttaaacttattttatttgaagtgagtttgcactagatctagtcgctccatgtagagttggcataaatcaccaaaaagggggagattgaaagggaaatgtgcccttgggccatttctatgtatactggtgactaagtgccaacacatgcgcttaattgggaa

SEQ ID NO: 78485 - DNA, 406 bp, Zea mays
tgaaagcttcaacaggctttggaagatcataagaacgagtttattatttctgacttataactaagattgaaactcttcaagaattgatcaaggaaaagatgctacagtgcaatcactaagtgctgatttaaccgaagctcaaaaattcaatgaagatatagaagcagagaaataactcaaggaacaaaagattgcaagtcaagataaatatatccaagaatcaagagattagatggataagattatgacaaatcatgtcgatggcgtctcacgacttcaacatgaactcaacaaagaattaaggtatgctcatttataaagaggagcataggggtcgtaccatcatgatcctccccaacaattattacttggcgacaaaacaacacctcttgagatcacggtgcgg

SEQ ID NO: 78486 - DNA, 400 bp, Zea mays
tcggaacactacgacttcattctcttcaaggagtgggcacgttttttccccttcgtcggccctcacaatggataaatcccggaaataccttcctctcatgttgacaagataattctctttgatagttgatttaccataaactgaatggcttggtcgccagggacgatcttcggagtcttcaccaccactgtccacatcatagctgtcactgtcaccagtatcttcagacaaaccttccagaatctccttgttgattttttctgtattggtctttgacatcgctataagaaaccccaagtttttctcttcgtccaggctcagcttcatctcagcagcagtcttcttatcctcagacatcttcggagacactaaaaactattttcaaagccgaagcttcaaa

SEQ ID NO: 78487 - DNA, 399 bp, Zea mays
ctgataccacatgatatgtaccgagttatattctgtactagggtggcccgatcttcacgacaataggttgataaataggatgttagatataaaagtaacggaataacaaggtaaatttgctgaagaacagcggataactgactttatacctgatcaaggtcggaggagaccaagcgacggggagagagacaccgaaaccatgtagacttcgactcgatctccaaacgaccgcagaaccacaaccgaagctaatccacacaatgcaaggcagccgtactggaaatgcaaggcacggactagtggatcccagaggaatctcttcacaagtctaggagaacaaggaagaacaggggtacagtaaacactcagcagctcagctgcggtaatcacttggattat

SEQ ID NO: 78488 - DNA, 399 bp, Zea mays
ttagggggcgacagacttttccccaggcaacaagacagtggccacctctagcttctttgcgacctctccatagaaaacctcttctgattttatcaatagcttccaaaccatggttttaaagtcgtccgactaatcgcgactagtcgcgattagtcggccttatcgcctggtagagcacgattagcatggacgactcgattagggcgactaggttacgactaatcgtcctagtcggcgactaatcgcgattagtcggccgactaggtgccatgtccgactagcttgtgccaagtttgggcctgtaaaaaaaagtgtcctctgttatatcattatatgggctggcggcccactgtctccactctcccgtccacagtagaaacaagctctactgtctgccac

SEQ ID NO: 78489 - DNA, 400 bp, Zea mays
tgtccgaagggcgaattacgcttaccccaaattttcttgtggatgctatatctagatcagaaatgatgagtgaaaggatcacgatgcccaagaggggggtgaattgggcttttctaaaattccaacaaaagataaaacctatacatgagcccaacttcacccaaactactagtaataagtaaatactactagatagacaacaaccataagtcattattacaaatactaactaagcaattgcacaaagtaaaatgctcaaagcaaatgtggaatgtaaagtaagggcaagaagactcctccaatttttttcctgaggtatcaaagagtcgtcactcttccctagtccttattggagcacccacgcaagggtatcgctcccccttggttctcacaagaacca

SEQ ID NO: 78490 - DNA, 397 bp, Zea mays
tgaggttgactcgccgaagcaacagaaactgcatggtggttgcctacatattctgggatgtaaggcgaatgatacgaagcagtgtgcatgacctgcttcggctgagcctgttgtgctgcagcttccgctatttccttttgcttctggatggtaacatggcacatcctggtggtatggcctttgttctcaccacagaacaagcaaaaaattcttcttggttgatcgccaaatcttccgccgaagcccctggcgcctctgcctctcagagctggtggtcggaaggagccttgctgttgcccctaagcctgtgaggagcactgtggcctttgctgctggctccccctatcatcattttgagtagagttgtgaattgatctaacgtgcctcggatagaacc

SEQ ID NO: 78491 - DNA, 387 bp, Zea mays
tcagcttctgcgacagtttcggcgacatatcttatgcatcatcttcaccttcgtcatcctacataaatcaaggaatcgtgagtaaaaatcaagtgcaaagaaaaaggtaagtacaaagtattatctcttactggttcaagatgacttcgtgcttcatctccagccttctcccgcccgccttttgtccatatcatttttataaatctattggagatacttcgggcgaggtcaggcatatcatccaggattgatggagataaggtgaagttgggcctgttgacaacttttccatgttcgcagccggccttcagaaatgcagcagccgtaccccgagaagctacccaggcacagaagtcgccatgcccggctataacttcgtcaagctct

SEQ ID NO: 78492 - DNA, 380 bp, Zea mays
ctgaaaatgcagcaagatttggaagataatccacacgaagatataattgagagattcaagagtaaaatgaaagaccaatcagctgctcattgaaagaaagattttgagcttcacacaaccgaagagctattggcagaagcttgatcttacaatggagaactgaatccaaactttttttttcagtcgaaaactttcgaccagaaaaaaaaggactttatggcaaaattgaaagcctaactccaaaaaagtcagaattggaaaaatttgtgaccaggcttcgaaaccaaaggtctgaagttcattattcgatgcttacaccgactgaagcttgttttttattcggttgaggccaactccgagaaatttaatccttggactga

SEQ ID NO: 78493 - DNA, 393 bp, Zea mays
tgttcaacctcaagatcttcaagttgatgttgctttctatcatctgctcttttccaatctaaggcaggtgatggcctccactatctcaggtgaaagagaggacctcctttcttcaataattctacccactgtgctaaatgttgcttcagaggaaaccgtcgaaacaggaacaagaagaatatctctagcaaaatgagataatactggaaaactatacttgtgttccctccaccattcaagtaattttaccttatcacccttcaaggtgcgatcagtcgctgcaaagttagtagacagataatgattcaattcaacattaggattccacctttgatttgttgtagagttagcagattctttccccttagatcttttccataagtgagctgtcaa

SEQ ID NO: 78494 - DNA, 405 bp, Zea mays
tatgtagacgatgtggtaatcaaaacagaaaattcataaaatttcattgaagatttacagctagttttcaacagtctatggcgatatcgatggaagcttaatcccgaaaaatgtgttttcggagtactagtaagaaagttactcgggtttattgtcagccaccgggggattgaagctaatccagaaaagatcgaggctatcatgagaatggaagcaccatgatcacagaagaaagttcaaagacttaccggatgtatggcagctctgatcagatttatatccaggctgggagaaaaaggcttaccactttataatttactcaagaaggtggacaaatttcagtggacttcagaagcacaggaagccctagatgcattgaaaaaattcttgacgacaccaccagtg

SEQ ID NO: 78495 - DNA, 402 bp, Zea mays
  unsure (1)..(402): unsure at all n locations
ngtcacgtgggtcgctaccacaaggaaatgaccatgttcttcgctgggactgggctgccaaactaggcctaagggtttcaaacaaggcctaactctcgaagatgaagagagaaggacctatcttttaattgtgttgtcctattatagttatttgtattatttgtaggagctttagtatgtgactaacaacactatacccattgtttttttgattgcctcatccttccaatacaagttgtagtatcttaactcacacactacacacgccaaatgcacaccactacatgtatacctaccatgtgagctagatctacaacctacctaaaagaacacacaagtgcagctaaaggtaccgaaagcgacctccagcgatgacggacatgtttctctgaccattatgtc

SEQ ID NO: 78496 - DNA, 401 bp, Zea mays
tccagaattaagattgtatcatctgcgtattgaataaccgggaagtcggatccacaggaggttggaatcgggagcttgaggatgccacaatcctttgccttgttgataattgactgaagaagatcagcaactaagacaaagagaaggggggacaaagggtccccttgcctaactccacgcctgcagtgaaagcgtctgcccggaaccccattcaaaagaacatgtgatgtgcccgatccaagaatcaatgaaatccagtgaagccatctgtctccaaagcccttatgtttcagaatatcaaggatggcaacatgttctagtttatcaaaggccttctcaaagtccaattttaggatgaccatttcctttcctgatttatgacaaatagagatgtattcaaa

SEQ ID NO: 78497 - DNA, 403 bp, Zea mays
tgagagctgagagtctaagtctaagtttggtctgagtggtaacgtcgtgtgccctcccttttatagctcaaggaggcacgtacaaagacaccgaaccccaacatgtgggcccagggacataacggatggaatacccggagcaactaatgtcagtcaccttttgcaatctccttgtgcctcgatacccactgtttgtgtagcattggcgtgcagcagaagcttccctggcatcgtacaagtcatgatgaccatggcgcgcgcgtggcggtacgggcgtactgtatgctgtctgattggacaggcacgccgcctgtagggtggtctggtcgtctcctgccagcggagtggacggggcacattaaatgctgagacggcacatcacctgtcagcagggcggacaagt

SEQ ID NO: 78498 - DNA, 396 bp, Zea mays
ttaagcattttcttgtgggcatgtgggggtccacaatcatttaggcatataaagaataagtttgggcactccttggaaactattagtcggaagtatagtgaagtccttaatgcactgtataagatgtcatttgacataatcaagcccaaagacccaaatttcatcgagattcatcctcgtttgcgagaggcgagattttggccccacttcaaggactgcataggagcaattgatggtagtcactttccagcgtcagtcccggcctcggagcaagccaaatatattggtcggcacggttacgcatcacagaatgtaatggccgtttgtgacttcgatatgaggttcacatttgttgtcacaggatggccaggttccgtacatgacactagagtatta

SEQ ID NO: 78499 - DNA, 397 bp, Zea mays
tctgcaatatacatgaattatcatatgaaacaatttcttggggtaaggaacagtatcacaacaattttggctgctacagttttgtttctcggtccgggtcaagctgccccgtgccaacctttcggaaaagatggcccggagactggatgacggaatggttctatgtgaagagtgatctgacaatacgagaagatatcaaaggtataattatgcgccctatttggcaaagcttcggccttcgaaggccgaaggttgaaatgaatgaagttgccgaggaatgccagagggccttcggcgcagtctgttctttcattgggacaagagacttagtacaagagcatattgccttcagggtatggccgctcgcggagaattgggaaatgccacaagaaaccgt

SEQ ID NO: 78500 - DNA, 401 bp, Zea mays
tgtaaacaatatcataccgttgagtcatttgtgttttcacaaacatcatagacaactctgctagacttctcaaatttttgaaattgtcatctctcttcatattttcaatgtatcgattcaattgaaaaggaagttggttcatttcttcaaactcaaagtcatgaggataaaacccagcaagtcttaccaacttctcttgattaaatgcagcaaaagaattgataggattgaaacatgccatacatctaagcaactctgtgtttacctcatcaaatctgctattaagttccataagtttcctatcaatgacacccaaaaacatatcagcatgaaaccggtggtaattaatggcatttttatagaacttcttatctctttgtataggcttgtacttcccatcc

SEQ ID NO: 78501 - DNA, 398 bp, Zea mays
  unsure (1)..(398): unsure at all n locations
ntatcaaatggacgtaaaaagtgccttcctcaatggaccaatcaaggaagaggtctatgttgagcaacctcccggctttgaagatagtgagtaccctaaccatgtttataaactctctaaggcgctttatgggctcaagcaagccccaagagcatggtatgaatgcctaagagatttccttatcaccaatggcttcaaagttggaaaggccgatcctactttatttactaaaactcttgacaatgatttgttcgtatgccaaatttatgttgacgatattatatttgggtctactaacgaatctacatataaggaatttagtaggatcatgacatagaaattcgagatgtctatgatgggggagttgaagtatttcttgggatttcaagtaaagtaac

SEQ ID NO: 78502 - DNA, 399 bp, Zea mays
tcttgttcttgttcattttcttgaaggcctcaacatccatgtagtcaagtcccatcttctcagcctgagaatgcagtaaaatggtttgtgtgggggaaagttgatccagataagaagggcacttgcatcatcttagcaaaactttcaatcttccatgcagttgagcaggatttgtataagcagatttaattacaaatggaatcaagcgcgggcttggactgactaatacatgccagccacagttgagtaactcgaagcattggtgttttgcagatttactactgcaagcatgttcaacatataaataagtacattttcaagtgcatcatcaactgcctgtttacctcctcaacgtgctgggcatcaccaagcatgcacaccttcatctttggatgaggg

SEQ ID NO: 78503 - DNA, 395 bp, Zea mays
taacatgcttgattcaagagcattcttttcatttgcaaggttatcaatagaggttttcaagttaattacttctatatctttattgtgaatcaactcttgaagctctaagtttctttccttttcaaggataagcaagtcttcttgagcatcaagagttgcctttcttttatctagcttttccattaattttgtgataacattgtatccatttaagccaaattctttaatcattttatttttcatggcaatttgatcatcatcatcatcatttgaaaaatcattactaaataaagttaccttatctccctttaccatgaggcaagttggaatgtatgagtcgtcttgaaggttggtgaagagttgcgcgcttgaggtagattggatggccacatttg

SEQ ID NO: 78504 - DNA, 390 bp, Zea mays
tcggctatggttaaatttttcaacagcacaacagtgcaatggcgatgaatgatgtgctaacttcacacctacccgtctatttatatagtgctgcaggtaagaaggtgaatcgccaagttgcccacacccgccgaacagttacccgcacccgctgaactgtggaccactcggtgcttgggacgtgaatcgccagaccgtgcgtacccgctgcatggtgggccacctcgcgctcggaatattttaatcatttctcggcaatgagctcaaggaaggtgtttttcggaccttcggcattccgaagccttggagatttttcatggatcaagctcgttacaaaaaaatgatctagcaccgcgaaggggctactgttgggggtctgcttcgtcgccg

SEQ ID NO: 78505 - DNA, 392 bp, Zea mays
tctaaagggagaacacattttgtgactaacaaatgttcattttgagaaagacaggatttgtagcgcatgccaagcagggaagcaagttggcgttcatcatccacataagaatatcatgacgactgacaggccactcgagctcctccacatggacctattcggcccgatagcttacataagcatcggcgggagtaagtactatctagttattgtggatgattattcttgcttcacttgggtattctttttacaggataaatatcaaacccaagagactttgaaaggattcttgagacgggctcaaaatgagttcagcttgaggattaagaagataagaagcgacaacgggacggagttcaagaactcacaaatagaaggctttcttgaggagg

SEQ ID NO: 78506 - DNA, 396 bp, Zea mays
tcggctatggtcaaatttttggcagcaaaacagggcaattgcaatgaatgttgtgttaacttcacacctacccatctgtttatataatgccgcaagtggggaggtgaatcgtcaagtcttccgcaccaaacgaacagtcgcccgcactcactgagtggtgggccacaaaacccgagaaggtgaatcgccaagacgcgttaacccgctgcatggtgggaccatcctgcgcttgaaattttgtgatcgtttctcggcaacgagctcaaggaaggtgttttcggatattcggctctctgaagccttggagattttttcacggatcaagctcgttacgaaaaacgatctagcaccgcgaaggggctactgttgggggtatgcttcatcgctgaagatcct

SEQ ID NO: 78507 - DNA, 403 bp, Zea mays
ggttcggtttgaagtgatccatctctaactgaacaagcttttaaatagttaaaacatatttatggtataagattgttcgcatcagttctttctaaattttctcctctatatccctacttttatgccagccacgtcgtcaaaattccacgtctattttttatgtcacacaacgggtccctctaaatattccctttatatctcactaaaaccataaaataccatcttatatccatacttttgaatcattatcattttttctctatctaataaatattgacgtgcaggtaaaaccatgcaaggggacctttaccgtctagcgctgcggctgtagcgccgccctgtacgcgctaaacaaagggaagggagagctcgtgggcctagggctcgatatcgaactagctcg

SEQ ID NO: 78508 - DNA, 402 bp, Zea mays
taaagccatggtaagtagcataggctaataatatgttatttgactcaagcctagctacgggtgcataggtttcaccgaaatccaaaccttcgacttgggagtaccctttggccacaagtcgagctttgttccttgtcaccacaccatgctcatcttgcttgttgcggaagacccatttggttcctacaacattttgattaggacgtggaactaaatgccatacctcatttctagtgaagttgttgagctcctcttgcatcgccaccacccaatccgaatcttgaagtgcttcctctaccctgtgtggctcgatagaggaaacaaaagagtaatgttcacaaaaatgtgcaacacgagatctagtagttacccccttatgaatgtcgcctaagatggtgtcga

SEQ ID NO: 78509 - DNA, 397 bp, Zea mays
tttctgcacatagcttcgtgatcgtcttatccttcgttttgatcgcctttcatcccagtcaagcttcgtatttaaccgtgcttttgtatacccgcaatctaacttcgaaggtacctgtttacatatttcttttggaaaacattgtcaaatcatgtttttgaggaccttcggaagcccccaacacttgaaagaggaggtggcccgccggcccatgcgggaggtagaactccggctcggctcaccccccccgccacagcaaggatgatgaagatccttgaaactgaaggcggggcaaaggccgcaacccggcttgcttctccccaccatcgaattggtggtcaccatcctgggtgaccatcggtgagggaatgcagccgggctgcctgatgaaaatcct

SEQ ID NO: 78510 - DNA, 389 bp, Zea mays
tggacggtattctgcgatggatcttagggaaccttctgtgcaggagcagctgctgttctagtagcaccctctaaagtcagaacatgttatgcagtaaagttagactttagttgcacaaataacattgccgagtacgaagctcttcttttagggcttcagaaactaaaggcaatgggaataagaagggcaatcctcaaaactgattcacaagttatttctggccacgtggataaaagcagcaaggcaagagatccgaagcttgaaaaatatttggatgcagtctgaagattggaacttattttgagggattttctgtaaaaaaatatcccaaggggggaatatgagcatgcatttttgctagctaagtcagcggcacaagggctcccttt

SEQ ID NO: 78511 - DNA, 402 bp, Zea mays
ctggaaagtgagcttgcaaggtatgattggacatttggtgagtcgctccaatcactctttgatcgattgatggtattggtcaacaaaataagagtacttgggagtgaagattggagtgactccaaggtcacaagattgttcatgagagcttataaagagaaagataaaagtcttgcaaggatgataagggatcgtgatgattatgaggatatgacgcctcatcaactatttgcaaaaattcaacaacacgagtccgaggaagcccccatcaagacaagagactctcatgccttgatcacaaatgaacaagacaatctcaagaagagcaaagaccacaaagcaaagaaagtggttgagacctcaagtgatgaagatagctcaagtgatgaagacacagctatg

SEQ ID NO: 78512 - DNA, 398 bp, Zea mays
tagctacaggtgcataggtttcatcaaaatccaaacctttgacatgtgaataacctttggcaaaaagtcgggctttgtttctagtaaccacaccatggtcatcttgtttgttgcggaatacccacttggtacctacaacattttggttaggacatggaattaaatgccatacctcattcctcgtgaagttgttgagctcctcttgcattgccatcacccaatccgggtctcttagtgcatcctctattctatatggctcaatagaagacacaaaagagtaatgttcacaaaaatgagcaactcgagatctagtggttacccccttgtggatgtcaccaagtatggagttgacggagtgatctctttgaattgcttggtggactattgggtgcggtggt

SEQ ID NO: 78513 - DNA, 398 bp, Zea mays
tctaaagggagaacacattttgggactaactaatgttcattttgagaaagacagggtttgtagcgcatgtcacgcaagaaagcaagttggcttccaccatccacacaaaaacataatgacaacagacagaccactggagttactccacatggatctattcggcccgatagcttatataagcatcggcgggagtaagtactatctagtaattgtggatgattattctcgcttcacttggatactctttttgcaggaaaaatcacaaacccaagagactttaaagggattcttgagatgggctcaaaatgagttcggattgagaatcaaaaagattagaagtgataatggaacggagttcaagaactctcaaatcgaaagctttcttgaagacgagggca

SEQ ID NO: 78514 - DNA, 399 bp, Zea mays
  unsure (1)..(399): unsure at all n locations
tgcacctcagtacattggtacttttcctatccttttaagatatggaccagnggcataccgactccaattacccgaaacattgtctgcagtgcacaatgtgttccacgtatcccaattgaagaagtgtcttcgggttccagatcgaaccgttgaagtgactatattcgagtcttggatcaaagggacaggattacccgaaggagaactctcaagttttataagatacaatggaaccaacatacagaagaatttcccaggctttctagcttcatgtaatttgtgagatatgtacactcattgtaatagaggaataaaccccataccacccctgccttgtaccaaaaataaggaaaaaaaatatgacacgtttccttttccattacttgccctaagactttt

SEQ ID NO: 78515 - DNA, 393 bp, Zea mays
tcgtcggcgacaatggtagctagaggggtaagaatatgaagctagggttttggacaagagacgattgtctaaataggcaggacacggttgacaggggctgtccgcaagctagtgctgcctaatcacgacggagttgatgggaaccgtgggcgttggccaatgaacgggcgtagttagagtagagaagggggaggggctgacacaagggacctgaaagagaaatggacttaattatttcctataatcgattttggtggttgacgcccaacacaaaccacacggactaactagtgtgtctagatatcatttatctcaggtgcataaggttcaactcaaaccaagaaagaaattcagttggggacacaatcaaatttagagcaagacaagagagtg

SEQ ID NO: 78516 - DNA, 393 bp, Zea mays
tccacatcgaggaaggtcgaaagaggaggtcatattttatggagccgcgaaggtagcgaaagatctacttgagagtgatgagataggtgtcggagtttagtgtccgaccgcacacccgggggtaccctcatggtgcttttgggtaggacggtgtcgtggattgtaactcgatggttcgtgccgagggcacgagagagagagtcaagcgagtttcagcaggttcgggccactttgaggagtgtaataccctacttcctagggtggctttgtatgtgtgaagtgtttacaagcgatgtctaccaagttgtgaggtgctaatgagatgaaagtgatggggatcccccttggctttatatacacgaccgtaaggtgctttccgcgtacacgctgatc

SEQ ID NO: 78517 - DNA, 392 bp, Zea mays
  unsure (1)..(392): unsure at all n locations
tgatggccaagtcaagaagcaagtcccagagtattttgtatctgaagttcttagtatatcaaagaaaaactacacagaattagagaaggtattatatgctgttttgatggcatccaggaagcttcggcactactttcaagcatacaatattgttgttccttcttcgcagccgttgaaggatattatgagaaatagagaagctactgggcggattggaaaatgggctgtagagctcaatgaattttgcattgattatgtgcatagatctttgatccagtcccaggcgttagcagacttcattgctgactggacgccnngggctcaggatgaagaaacaaataaagatgccgaagtatggacagtgttttgcgatgggtcttggggaatcttcg

SEQ ID NO: 78518 - DNA, 321 bp, Zea mays
tcacatcataaaccgagagggataggtcgtggatccaaagaaagtagcaatcattctggactggaaagccctaaaacacgcccaaggaatcaagagatgcattggaattaccgcgaatatcggcatatcattgaagaggtctccaccaacgctcggccaatgacacactagccggcaaaacgcgcgagttcaagacggaccccgagcatcgccaaaaactcctttgagacattgaaggagaagttgacaacatcaccagtattgattatgccagaagcccacaagtcattctcagtatattatgatgcttcgtacaccgga

SEQ ID NO: 78519 - DNA, 359 bp, Zea mays
ctaaagctattatatatatacggaagttgaattaattttttatcgccctgtgaaaagggtaatctaactgggaatgagttctccctgaaatattgctgatggaaattctaatggtggataaaaactggtgagcaccattttgagcggacgaaccgtctggccctgaagctggacggtcccccgtccagacaatcccggcctgtgggcctgtctttagtgtcttgaaaacagagcccaaccttgctgtacatacttgaacccgtttttctgtacttgggggttccacttggaacctacctatgattgtcccggatacagcctcctttgcttatttgggccccacgtgactatttattata

SEQ ID NO: 78520 - DNA, 400 bp, Zea mays
ttatcctcatataaccccagaaacaaatttactctttactgggccgtgtctgctagatagtctactttctgcacgcgctcactagctatgcacctcaagtcttctgtgtcgtgtcgtgtgggtcggagtggccagccgacaatcgttaccgacctggcacaagtttttttcacgatgaaacgacggctgaacgagccgaaacaaatgaaactttaggcagttcccttccaggcacccgccacacaactcgcgcccacggcatctgaccggcgtcaaaacccaccggcccagcccaattcaacccgtctgcagaaaccgtcggctcagacgcgcctttcaggtacgtccaatcgcaaccctataaaaaaaggccgagcagagatcccagagcaaactcaca

SEQ ID NO: 78521 - DNA, 383 bp, Zea mays
tgtcgttggagaacgggagtaattctgccttggtgttattgttttgtttgtcttttgcaactggtttcagtgtgaagaagaagaagaaaaaaaaaattaaaaaaaaagaatcttggaagtcgttggtgtcgaagagaaacaagacaagacgactgctctggactctggaggccatttctgtataatacacaaatatatactaaaaggaagatgctttcaagtgctaacagattttatttatcatcgaaaggaaggaagaaagaaagaaagaaagatactccagtccagtggattacagtgacgaatggcaggcaccctgcagtgctggctgcaaacagtaattgttactgctgcgccagcggcctgtggcagactggcagtgg

SEQ ID NO: 78522 - DNA, 397 bp, Zea mays
tatcgggaggagtttgtgcctcccttggtttgtataatattactactctgcactcgctcttagttctggtctgtaattaaacaacttgagcttgttttttaataaacgtaagttatgtattcgcttccgcaattctttatctccgatgttctgtaatgtctgcaagacgggtgaaacgttcctggtaaggtaaggaaagataccgaacttgtcaagtgacttaagaacatctacagggtgcctgatgtctgttagacaaggacaactgtaggtgggcctaattacttgggaggttccgtcacaatcaaatttggacacttcataagtgtcttaagatgtgaaaattaaccgtctcatataacatgttttgtagtagtgagggtggaatccgatgccc

SEQ ID NO: 78523 - DNA, 401 bp, Zea mays
tatcaagtgtgagttctagatcagtgaagttctattcttgggtcacattataaaccgagagggattggttgtggatccaaagaaggtagcaattattctggactggaaagcactaaaagatgcccaaggaatcaagagttgcattggaattaccggttattatcggcatttcattgaaagtttctccaagattgctaggccaatgacagacttgttggcaaaaaggttgagttcaagtggacccgagcatgccaaaagtcctttgagacattgaaggagaagttgacaacatcaccagtattgattttgccagatgtccacaagtcattctcagtatattatgatgcttcgtacaccggactgggatgtgtgttaatgcaggaagggagagtagtggcata

SEQ ID NO: 78524 - DNA, 399 bp, Zea mays
tctcctggacaagtgctgcacttaccgctgagtgcttaactgccacatataataacaaaggagcccctggcgttggtggacttaatgttgttagatctatcaaatattgcttcagctcttcgaaggctttctgctggattggtccccattgaaagacttcggctgacttcagcacttcgaagaatggtaagtttctctctgctgatctggatatgaatctgttgagagatgccagccttcctgtcaatctttgagcccccttttttgtacttggtggttccattcgaagtatagcttcgattttgcttggattagcctcaattccctttgttgaaactaggcaaccaagaaatttccccttctttacaccgaagatacatttttctggattcagcttta

SEQ ID NO: 78525 - DNA, 398 bp, Zea mays
tgagccgaggaccagccccaccggaacagtgctttcgtgctcgccgaatttcgtaaccccgccggagcacgtggatcgggtaacccactgaaccatttctcgattccttgcgcccatagcctctacatcacccagaggagctcctcgtgcacctggattgaaccctaccgccgtggtttggccggagcaagtgccgccgacgacctccgccgcctgtgctcgtggccagagcagctccagccacctccgacgctgacccacacaccgacatgaccgccgtgacctccccgacgtcaccgaccaccccaccggagctctactgctaccggtgagcctcgccgccgtgatctttgccccggttactgttccagccagcaaaggatcgcgggttaaatata

SEQ ID NO: 78526 - DNA, 398 bp, Zea mays
tctaaagggagaacacgtgataggtgtaaccaatgttcatttctaaaaagatagaccttgtgcagcttgtcaagcagggaaacaggtgggagactctaatcacaccaaaaatgtgatgacaacatcaagacccctggagctgctacatatggacctcttcggacccgtcgcctatctgagcataagaggaagtaagtatggtctagttatcgttgatgacttttcccgcttcacttgggtgttctttttgcaggataagtctgaaacccaaaggaccctcaagcgcttcctcacgagagctcaaaatgagtttgagctcaaggtgaagaagataaggagcgacaacgggtccgaattcaagaaccttcaagtggaggagtttcttgaggaagagggga

SEQ ID NO: 78527 - DNA, 395 bp, Zea mays
taatgccaagcagttcagcctcggttaaaccaattgtattttttattttagagcttagttcactgataattgttttgttttttctctgaaaaattagagaaattaataacttattttcctgttcctacaacttaataaagtctcattacaagtcatgtttttaagcaggctatgcgttctttctccgagaaaggtaatccttcttttatcaatttgaagaaaaccatttgtattatgatttttctatcctaattcctggaaactgaattctgaattttctatttgtaatgttcatttcagatattctttctctaattgctaaacttgtactaaagggtgttgaacaagtaagtctgcaatcatattcgcttcctactacaaagtaatttttattt

SEQ ID NO: 78528 - DNA, 394 bp, Zea mays
tcagcattcgggtccatcccctagcttcgaagggcccagataaaaatactgagcctaacaatggcgttaggggtcagctgatgaagaaatatttcataattagctaaaatttctccaataatctcgttcagtggaaaccgtaatcctgctctgaaaaaacttttgaaacccaccacttcatcaactttcggtgtcggagtggtctcttccccatcaaaacgaatcagctttttctcggcttctccgaagtagcctagcttcatcatcatgggcatatcagcttcagaaacagtagatttttcaaaatccaagtgactaggttttgacgggatcaagatactataatcctcctcttcttcttcatcagcaatttcttcctcgacgccttgttcag

SEQ ID NO: 78529 - DNA, 390 bp, Zea mays
ttaacccccccgcgagaccttttcccgtttctttctaaccataatgaatgcgatatcgaatgtcatacttgatgcatattcactttatttgttcccttgtatgatgtactgtttgtttcccaatttgaatggatgaacgtacgtatgcttgcaatcgcatagagaacgatccggtcgaagagcccgaggaactcgcaggagaagcccctgagcagcagtcggttggtggaggcaagtgtcccttgacctatctctgtcctattcattatttaattcacctcccgctctacacatttatgcctaaggattgactagcttttgttatccatgtccttgtttacctatctgggttggattattattgtttagctttatgctattgctcaaact

SEQ ID NO: 78530 - DNA, 400 bp, Zea mays
ttatgggctcataggatatctaaacataaggctactttgtatctccttttgagcttgtctatgggcaggaagcagtgttacctgtggaaataagtttgaatgctgtcaggttcgctagacaaaatgatctaactgctactgattattatgattcaatgattgataatattgatgaggtgaccgacaagaggatgatagctttgggagcaatagaaaaggacaagatcatggtagccagggcctacaacaagaaggtcaaagcaaaatcatttcaagtaggggacctggtgtggaagaccattctgcctctaaggaataaagaccggaagttcgggaaatggtcaccaagctgggaaggtccttataaagtaaaacaggtgatgtctggcaacgcctattt

SEQ ID NO: 78531 - DNA, 417 bp, Zea mays
  unsure (1)..(417): unsure at all n locations
gacctatnaatactcagcttctaagggagagccattttaaactaacaatgtttttttgagaaagacatggtttgtagcgcatgtcaagcagggaagcaagttggtgcccaccatccacacaagaacattatgacgaccgacaggccgcttgagctactccacatggatttattcggcccgatcgcttacatatgcatcggcgggagtaagtattgtcttataattgtggatgattattctcgctttacttgggtgttctttttgcaggaaaaaccacaaacccaagagaccttaaagggattgttgagacgggctcaaaatgagtttgtcttaaggatcaaaaagattagaagcgataatgggatggagttcaagaactctcaaattgaaggctttcttgaggacgagggcatcaag

SEQ ID NO: 78532 - DNA, 399 bp, Zea mays
ttatcaaatggacgttaagagtgccttcctcaatttattaatcaatgtttgaggtctatgttgagcaaccttccggctttgaagataatgagtacactaaccatgtttataaactctctaaggcgctttatgggctcaagcaagccccaagagcatggtatgaatgccttaaagattttcttatcactaatggattcaaagtcggaaaagccgatcctactttattcactaaaactcttgaaaatgacttgtttgtatgccaaatttatgttgatgatattatatttggttctactaacgagtctacatgtgaagaatttagtatgatcatgacacaaaaattcgagatgtctatgatgggggagttgaagtatttcttaagatttcaagtaaagcaac

SEQ ID NO: 78533 - DNA, 387 bp, Zea mays
tgtggaggttcttcatccctacatgtgctaagcggtgatgccataaccagcccatgcaagtcttagctattaagcatgcatctagaccagcctcttcttttgcaaaatcaacttgtcggggaccataattaggggtaccctcaagacgcctaattctcaactcgatcacgcttcacccgagcctagcctcggccaagggcagccgacctcgagagacttccgtctcgcccgaggccccctttttatggcggacacatcaccggctcgcccgaggccttggtttcgctcaaaagcaaccttgactaaatcgccacaccgactgaccaaattgcaggggcatttaacgcaaaggtggcctgacaccttcattctgacacgcgcccggca

SEQ ID NO: 78534 - DNA, 324 bp, Zea mays
ttgatatttaatttacttttgattgtagaagctatttttgtctacatttaatatgctataggtagcaataacttcatcatcagaacctatcgtgtgtgtatttcttttctttttgggtgggtggatgtgttgattttctttgtgtgtgtgtgttggggggggggggtggcatggctccaactgttcacactgttgaggacatcctgttttgaaaaatccgttacaatcacttaggttattactctttatggctaatcctggaaacagcattctgaattttctatttgttatgtttattgaagacattctttttttaatcgctta

SEQ ID NO: 78535 - DNA, 400 bp, Zea mays
tgaatgtgcaaagtgcaagtcattcaaattctttatgcacaacttgagggggagcacacataacttgagtccttcgagactaactgtttcttgagcaatcttgtatagtctctaggtggaaaagagaagataagcaagaaatggagcaatcaggacttgggtacctctgtaagtcaagaaattggtatctcaagttgtgagtaagtgcatatttttagattgctcataatatctggtgataatagatgcttattcttaaatatcatggagccatgataataaatgaactttgcaattggtatctttaagttggtatctttcaattggtagccgtaatagttcgcttcaattgacatcttttgataaacatgagaatagaagtttcttcttgtgcccaata

SEQ ID NO: 78536 - DNA, 400 bp, Zea mays
  unsure (1)..(400): unsure at all n locations
tattcgcccttctcttgcaaattcttacaatttgttacctgtgaaaaagatttactttcctcgtggcaaacgacaaaaccattacatgaagtttaaaaagtgttctttattacatgaaaaatgaaacttgaatagagaagacttctatcaaagtaggatacttgtcaatagatgtgctttgactctggcacagtgctattaactgtgcgagcttcggactgttctctgaaatcccgttgattttgagtatattggcccccttctggctgctggccttgttgtancggtggtggaggcggaggttgttgccaggaagcctgaggctgactcgccgaagcaacagaagctgcagggtgattgcctacatattctgggatgtaaggcgaatgatacgaagcag

SEQ ID NO: 78537 - DNA, 398 bp, Zea mays
  unsure (1)..(398): unsure at all n locations
ttaagctctttgacaataagaccacttcatctagttttaataatgatgcatgagtgaaaattctttaagaggttaaactaggtatgaagcagggataaatgcaagggacatgctttctcttccttttatacaagatatgcaaagggtgtatataataggaagatctaggtacatatgtaaatgataggaattagttttaccctttttgtacctttacttgtagacgttctctccattgtgcttatgtccttggtcttgtttgattaaaacctatgcttaattacaatgtatgaaaatattntgcacaagagagagtttttacaactagtgatccttttctaagacatggttaacatatatcaagtggatcacaaattgcataaatgaatcatgaattt

SEQ ID NO: 78538 - DNA, 382 bp, Zea mays
tcgcaaaggtgaacgaaaatagagatttggagaatggaattatggttcagatgagtcaggttgatgtgataaaaatcaaggaggccacgaaaaaaaggagagatgggaagaccgaggccgcggagaaggaaaggagcgtaaactactgactcgtgggtatcttcggttgggacagtagtcccatggcaaacccgccaagaacagagttcccgcgggggaagaaccccgatggagacaagacggaggagctcagcttcggaaattacagacatgtggttacctgcgaagggtaactgactgttggggtcgattgcggggatcattgcagcagacgagttcgcagttttcctcttgggcgccatcttgcttctcaccggcggac

SEQ ID NO: 78539 - DNA, 377 bp, Zea mays
  unsure (1)..(377): unsure at all n locations
ntgcgccatcatgactgatgagtggctgcatcttgtttcaactttgaagcatgcgagcatgaatgaatgtttctcaacatgaactagatcttacgcagggatatgcgtggacatgctttctcttgctttcctccaccatgtgtgtcagaaggtctaaagttacggatacttacgcacgcatttgaatgcatcgaacagactttaccctctttgtccttcacatagagacactctcttcattgtgctccgcccttaccctagattgcttaaaagctatactaaaagactgcttgaggcaatacatggcatacaacaaagttctatcactcttgagacctctaagatgctggatacatgtatcacactgatgaccagga

SEQ ID NO: 78540 - DNA, 394 bp, Zea mays
tctaaagggagaacacgtgatatgtttgtctaacgtgcatttcgaaaaagatagaccttgtgcagcttgtcaagcacgtaaacaagtgggaggagcacatcacagcaagaacgtgatgaccacttcaagacccctggagctgctgcatatggacctcttcggacctgtcgcctatctgagcataggagggagtaagtatggtttagttattgttgatgatttttcccgcttcacttgggtgttctttttgcaggataagtctgaaacccaaaggaccctcaagcgcttcctcaggagagctcaaaatgagtttgagctcaaggtgaagaagataaggagcgacaacgggtccgaattcaagaaccttcaagtggaggaatttcttgaggaggaa

SEQ ID NO: 78541 - DNA, 389 bp, Zea mays
tgccaatacctgtcaaaacaacagcttatgccatctcagcagctacaaaccataccagtaacttggcctttcgcatgctggggattggatatgattggacctttcaagaaagctcaaggaggatacacccatgtattggtggcaattgacaagttcactaaatggatagagtttcagcccattgcctccttaacctctgctaaagctgtggaattcatacaaagcataatattcagatttgggataccaaacagtatcatcactgacttgggatccaacttcaccagttcagaattctttgacttctgcgagcaaaaaagcattcagatcaagtatgcatctgtagcccatccaagagccaacgggcaggttgagcgagccaacggaat

SEQ ID NO: 78542 - DNA, 401 bp, Zea mays
tgtgaaagttcttcatccccacatgtgctaagcggtgatgccacagccagcccatgctagtcttaacgattaagcatgcatctaaaccggccttctcttttgcaaaatcaactaaataaagtttgtcgtctagtacacccttaaaagctagtgaaccatcacatcttctaaagacaaacacatctacatttgtaaatagacaattatatcccatattacataattgactgacagatagtaaattatatccaagagactcaactaaaaacacattagagatagagtgctcattggatattgcaatcttgcctaaacctttcaccttgccttggttcccatcaccgaatatgattgaatcttgggaatccttattcttgacgtaggaggtgaacatcttcttc

SEQ ID NO: 78543 - DNA, 404 bp, Zea mays
tcaacacttttcaagatacttcggatattggtgtgataaatggtaattcttcttcacgaagcatgaaaagaagggaaggtgttttttcgccagactcaaaaacggtacgtatgtaaagtttcatgcatcgtaaagaattgaaccataaagaaaaataaaacaaacatattacatacaggattacaagatattacacatgttacatttaaaatgtttttacaatagcatttagtcttccctaagtaccacttctgcagcttcgttcaacagtcgatcgacaacttcatccataatagcttcagccatctttttaatctcatcgtcacccctaggccatgcacccggagatacttcagtaggatctgaggaaggacaggacacggctgcattgctattacaaatcg

SEQ ID NO: 78544 - DNA, 401 bp, Zea mays
  unsure (1)..(401): unsure at all n locations
tgtcgaggatctntgtgaccttagcgagccggtcttttctggactcttgtcctcaacatcatccgcggcctcaacgaacgctttcaagagctcggtcttcaccttcgtcgcacctctcctctccccacttttttgcaggtacgtgatgatcttaccctcgaggaactttttttttatcgaacgcgcaggagaactgcgcatcttatatattagagaggaataaaaaccttacaaaaaggagatgttgctgagcaaaatctcccaaggaccctacataaacccgaaggtaattacaaactggtaccgtaacttgacccgacctcgcccagggctgcaactaagccaaggctctcaatctccttagctcctgcaattgcccagctaacacactcatctgagaa

SEQ ID NO: 78545 - DNA, 401 bp, Zea mays
tggaggcgtcaattggttgtctactcggagtagacttcttcctcttctcctccgtcgccttaaatgccaccggttgcgcctcggacgtggagggttcgtcaagctcgttgatcttctttgagcccttaatcatgcattcaaagctcacaaaattcccgataacttcctcgggggtcatttgagtatatctaggattaccatgaattaattgaacttgagtggggttaaggaaaatgagtgatctaagaataaccttaaccacctcttggtcatcccacttcttgctcccgaggttgcgcacttggttcaccaaagtcttgagccggttgtacatgtcttgtggctcttccccttggcgaagtcgaaagccaccgagctccccctcgatcgtttcccgcttg

SEQ ID NO: 78546 - DNA, 398 bp, Zea mays
tcggcgatggttaaaaattttggcagcagatcttttttaaatagcaatgaatgctggggtaacttcacacctactcgtctgtttatatagtactgcaggtaagaaggcgaagcgccaggatttttacaccaggcggacacccgcttgcactcgctgtgcggtggaccgcagagaccaaacagtaactctgcaaggtgggaccgctacgcgctgggaaattgaaccgtttctcgataacgagctcagggaaggtgttttttggaccttcggctccccgaagcttaagagacttttttcacggatcaagctcgttacgaaaaacgatctagcaccgcgaaaggggctactgttgggcctatgcttcgtcgccgaaggtcttataggaagaagcggtcttc

SEQ ID NO: 78547 - DNA, 401 bp, Zea mays
  unsure (1)..(401): unsure at all n locations
taatgcccctaagaaattgtctaactttgttaatggcaaagctcccatggctcangataacgagggttacattttataccctgccggttatcccgagcacaaaattaggagaattcactctatgaagtctcactctggatctcatcatgcttttatgtataagagtgaggcatctagttctagacaatccactcatgctaaattgcctaagaagaaaactcctattgcatcaaatgaacctaacatttcatttaagacttttaatgcatcatatgttttaactaacaaatcaggcaaagtagttgccaaatatgttggggccaaacacaagggctcaaagacttgtgtttgggtacccaaggtgcttgtttctaatgtgaaaggacccaagaccgtttggg

SEQ ID NO: 78548 - DNA, 390 bp, Zea mays
tgtgaatgacttgccgaagcaaccgaagcttctgtttgattacccacgtattctggtatatagagagagtagcacgaagcagtatgtaaaacctgcttcggctgattctgtcgcgcttctgcttcggcaatctcttttttcttctgaatggtgacctgacatgttcttgtagtgtggcccttgtcttcaccatagaataggcaatagagtttcctgggttgatccccatatcttcctccgaagcctctgccgcctctgccccttggagttggaggcctaaaagaactctgttgttgccctgaagactgtgagctatgatgtggcctctgaaactggcctcctttatcatcattctcgctggagttcgggattgacctgacatgcctatgg

SEQ ID NO: 78549 - DNA, 360 bp, Zea mays
tgtggcgtcctcgggcgtcttgtcgtagccgaagtactatgtctcccacctggaagcctcggggccgaacccttcgggcgtggtagcgtcgtagagactgctgataccgtgccgagtgtagtaaggccacgccccgagcctcttcgagctggtccagtgagtcttctcggctggtctggttgcttcggtcatcgtatgcctttgtcctcggggaaccgtattctaagtccgtgggtaggacggcctcggccccatagactagaaagaacggcgagaaacccgtggctcggctcggcgtcgtcctcagactccagaccaccgagggtagctctttcatccaccgcttgccaaacttgttga

SEQ ID NO: 78550 - DNA, 389 bp, Zea mays
ttaagtgggtctcaagcccatctcacttgatgcactatctatcacactatgtgatagccccttagtaaattgatctgccagattcttagacgtatggacacaatccaatgttactactctagagtttctcaatttcctaacagatttcaaatgcctctttatatgctttgtcgactttatattatccttagaactttttatcttaattatcacaatctgattatcacagttcatggaaatagcgggcacagtttttcaaccacttgtaaatccataaggagtccacgaagccactcatcctcaactgaaacggtatctaatggtgtgagttcttcttccatagtcaacctcgttaagatggtctgcctgcgagactttcatgaaacaac

SEQ ID NO: 78551 - DNA, 394 bp, Zea mays
tctaaagggagaacacgtgatatgtttaactaacgtgcaattcgaaaaagatagaccttgtgcagcttgtcaagcaggtaaacaagtgagaggagcgcatcacagcaagaatgtgatgaccacttcaagacccctggagctgctgcatatggacctcttcggacctgtcgcctatctgagcataggagggagtaagtatggtctagttatcgttgatgacttttcccgcttcacttgggtgttctttttgcaggataagtctgaaacccaagggaccctcaagcgcttcctcaggagagctcaaaatgagtttgagctcaaggtgaagaagataaggagcgacaacgggtccgagttcaagaaccttcaagtggaggagttccttgaggaggaa

SEQ ID NO: 78552 - DNA, 391 bp, Zea mays
taccaaggtcctcatggacggatgcattagcctctacatcatctacgccgagaccctcgggctcctgcagatcaatctgtccacgatctgggtcggcgcgacgccttttcacgggatcatccccgggaagcgcgtccaaccccttggacaacttgatctgcccgtctgcttcgggactccctccaacttccgaaaggaaaccctcacgttcgaggtggtcgggttccgaggaacctaccacgcagtgctggggagaccatgctacgccaagttcatggccgtccccaactacacctacctcaagctcaagatgccgggccccaacggggtcgtcaccgtcggctccatgtaccgacacgcgtacgaatacgacatggagtgtgtggagtac

SEQ ID NO: 78553 - DNA, 406 bp, Zea mays
tgtgaaagttcttcatccccacatgtgctaagctgttatgccacagccagcccatgctagtcttagcaattaagcatgcatctagaccggcctcctcttttgcaaaatcaactaaataaagtttgccgtctagtacacccttaaaagctagtgaaccatcacttcttctaaagacagacacatctacatttgtgaataaacaattatatcccatattacataattgactaacggataacaaattatatccaagtgactccactaaaaacacattagaaatggagtgctcatttgagattgcaatcttgcctaagcctttaatcttgccttgattcccgtcaccgaatatgaatgaatcttattcttgacgtaagaggtgaacatcttcttctcccccgtcatgtgg

SEQ ID NO: 78554 - DNA, 405 bp, Zea mays
tcggtaaataacaactttgttttcctccggagcatgtgctttattgtctcctccaactctgataatagacatatcgggaaaatatctccccctcatggcgtcaatatgactttgcttgatagtcgatttttcgaaggtagtatggcttgtccgccacggtcaatcctcagaatcttcatccccactttccatgtcataaatatcactatcatcagaatctttggacaaaccttccatggtctccttagtaattttctttgtatttgttttttccatagactcataaaacccagcaatgaaaggatccgcaactttcttttcttcatacaacttcttctccttggtcattttcttctcttcagtcatcttcttctcctcactcatcttcttctcctaaaatttgga

SEQ ID NO: 78555 - DNA, 436 bp, Zea mays
  unsure (1)..(436): unsure at all n locations
cttaatcccatctccccgtctctttctaggcgtgtgtattattataggatgcttgctcaaaagggacaacaactgcaaaattgggcgcacggaagttgcatcccgcgctgaaaagggaagccggtacagtatactcggcactaggttgagccgtgttacgaagaggggccgttgcacacctcgtagcttntgagcgccgaagacggcagaaatgggacgccctgcctgagagctgagagagctgcccggatcacaatgtggaacgcaacaacaacaatattaaaaaaaatcggcaatacataatcatctacaagtaaatgccttcttgggaagctggttctggctcgcaactagggggtcgtatgggtttcaaagcaaacacttcgtaccacgcaaacttgttgggattactgctctcatcgtgcttgtgagatga

SEQ ID NO: 78556 - DNA, 401 bp, Zea mays
tgacattgctttggcttccttgttggaacccaatgtcattcttaatgccagggcgtctctcattatagagcatgcttctagcaaatttaaattttcattgtctagttcatgatcggtaattttagcatttaatgtacctatgtgatcattttgttgtttaatcatagcaaggtgatcatcaatagcttcaacatttatatctctgcatctagtgcaaatggagacatgctcaacggtagatgtaggggatttgcaaacattcaattcttctatcttagctattaaactagcatcctatttctaagacaggaaattgaaccattgcaaatgctaagctctctagataagttttcacatttttctacttcaagagcataagcatttttcaatttaacaatttt

SEQ ID NO: 78557 - DNA, 384 bp, Zea mays
ttaccaaatggacgtgaaaagtgcctttctcaatttttcaatcaaggaagaggtctatgttgagcaacctcccggctttgaagataatgagtaccctaactatgtctataaactctctaaagcgctttatgggctcaagcaagccccaagagcatggtatgaatgcctaagatatttccttatcactaatggcttcaaagtcggaaaggtcgatcctactctattcactaaaactcttgacaatgatttgtttgtatgccaaatttatgttgatgatattatatttgggtctactaacgaatctacatgtgaggaatttagtaagatcatgacaaagaaattcgagatgtcgatgatgggggagttgaagtacttcttgggttt

SEQ ID NO: 78558 - DNA, 398 bp, Zea mays
taagatgcagcagtgagagcacctagagggtttgtttgtgaataggtgatcctgtaaatcttaaaaacttaagccacaaaactttgattaagtgttagcacagttaatgccaagtggctagagcgaagatcttgcacaatatgataaccacaagaagatcaacacagagaggacacggtgatttatcccgtggttcggccaagtacaaaacttgcctactccacgttgtggcgttccaacggacgagagttgcactcaactcctctcaagtgatccaatgatcaacttgaataccacagagttatgcttttcttctcaatatcccgtttgcgaggaatctccacaacttggagcctctcgcccttacacttgagattcacaaagaaataaggagtaag

SEQ ID NO: 78559 - DNA, 397 bp, Zea mays
tttgaagaaattataaatagtcgaggagacatatgctccttttcgggtgccagggggattgctaccattttggagaggaaagactatgaccatgtaaaattcttagcacaattcgaagcccccttatcctctgaagatataacagacccttcgaccgaagcgagcttggtcggtggaaaatttttcaccgacatctgggacaatggtggtcgggaaatggcccaggaaattatacgaaaaagcgagaaaggcatccatgacgctaggaaagtagcagaggccgctgaaaaaagtgcggatctcgaagggcaaataggtattgactagtggttttcggctctttgttgtaatttttgatttcggacttgtttacgttttgtaataaagccgtactttc

SEQ ID NO: 78560 - DNA, 396 bp, Zea mays
tagcgcactagtggtgtttggggaaacagttttatttatttagcgtcaaggggagatttgttggataagactatttgactctatctttatctcctttgcctatataaatagactcctttgtaccctgtttttccgaggtttttttttcttctccacatcgggggaggtttttccacgttaaactctgtgtcttctcccccccccccccaccccaacccccaacacttggtttgtgctgaaggctatatggtttgcagagttatttggtttggcttagatttggtcatcttgattccctatcacggagatctgactcgttcagccactataacagaccatcataatcgagcgaaagaataacaaacattggtacccaagattgtttgctttcacaac

SEQ ID NO: 78561 - DNA, 390 bp, Zea mays
  unsure (1)..(390): unsure at all n locations
tcatcagttgtggccctagtggacttacttgatatgtaatattcgatcattacctttaaaatttcctgcacatcaacggcaggaggcgttgaaggaatttcttcctctatatcagttggttttggcttcgcagccaaagcttttcttttctttggaacaaccatcttcggctcaaggctagatttcttctttntcaaagctttatcatcttcttctatcattctagcagcttgcctcttcattatgctgacaactctttttcgctttggcccttcggcacccttgtttaaccgttcatagtcaggatattcaaatttcagggcattcattacccggttcagccttcgtttcggtcgggtgccaaaggtcgcggtcatcaattgatcttct

SEQ ID NO: 78562 - DNA, 389 bp, Zea mays
tgacattgcttccatgttggaaaccaatgccattcttaatgctagggcgtctcccactatagagcatgcttctagcaaatttaaatctttcgttttcaattttatgctcattgattttagtagttaattgagctatatgatcattttgttgtttaattaaagcaaggtgatcatgaatagcatcaatattaatgtctctacatctagtacaaatggtgacatgatcaatagtagatgtagagggtttgcaagcatttaattcatctatcttagcatgtaatatttcattctcatctctaagacagaaaatggaatcattgcaaacatttaattctctagcctttgaaattaaactagcattttcagttttaaggctagaaattgattca

SEQ ID NO: 78563 - DNA, 396 bp, Zea mays
tgacaatgaggaaatggcgctcgtcatcaagagcttccgccagatcctcaagcaaaggagagggaaagactacaagtcccgctccaagaaagtttgctacaagtgtggtaagcccggtcactttattgctaaatgtccattatcaagtgacagtgacagggataacgacaagaagggcaagaggagagaaaagaagaggtactacaaaaagaagggcggcgatgcgcatgtttgtcgggaatgggattccgacgaaagttcaagcgactcctccgacgacgaggacgccgccaacatcgccgtcaccaaggactcctcttccccaacgtcagccacaagtgcctcatggcaaaggacggcaaaaagaaggtaaaatcaagatcctccactaaatat

SEQ ID NO: 78564 - DNA, 391 bp, Zea mays
tgacaacaccatttgacatttcacataaaatttctgagatcaagaatatttagttcatttctcaacatgcaaaagcgggtcttatcaagaggcttagtgaaaatatctgctaattgatctttcgacctcactccttctaaaatgatatctcctttagcaacatgatctctaaggaagtgatgacggatatcaatgtgcttggtgcgagagtgttgtacaggattattagcaattttaacagcactctcattatcacacaacaaaggtaccttttctagaactacgccatagtctagaagggtttgtttcatatataaaatctgtgtgcaacaagcaccagcggcaatgtattccgcttcggcagttgacaaggcaacactattttgctttt

SEQ ID NO: 78565 - DNA, 242 bp, Zea mays
  unsure (1)..(242): unsure at all n locations
acacatcatatagcaccttctccaattctgtatnaattttctttgacagacttaagacttcggacaaagtacactggagcttggcttttgatttgaccatctagattctnctatacaagtgccacactcactacagaatgtgaagctgcaacatataaaagcaatggagcccctggcaaaggtggagntaatggttgtaaatcaatcagatattgcttcaactcttcgaaggctttttgatg

SEQ ID NO: 78566 - DNA, 396 bp, Zea mays
  unsure (1)..(396): unsure at all n locations
tctcagctatataaaatatggaacccgatatgcctacatgatatagaagagaatatttttttttgtgttgtctccatgctgagcgttgtctagaccgaagtcangactaatgaagaatcatgccggctatcanagctatatgggtctagctttcttggaaagttcttacaagatttatggccgaggcagttcgagcacgattagtcaaaatggaaactgcaaaggtgcctaataaaacaaattcgcttactcactaatcaccctgccctgcgaagtgggcacattattagacacttcacacgcggaatttaaatgtgggacgggggattttaaaggatgactaacttactcatactcgcacgtcaaattttggaaaatgttacgtcatgtgcagac

SEQ ID NO: 78567 - DNA, 520 bp, Zea mays
  unsure (1)..(520): unsure at all n locations
tatcaagtgcgagttctggatcagtgaagtcctattcttgggtcacattataaaccgttaattatttgctgtagatccgaagaaagtaacagctatcttggactggaaaacaccaaaagatgtccgaggaatcaagagtttcatcggaatggccaatgatagctttgctggcaaagaacggtgagttcaagtggaccccagcatgctcagaagtctttgagacattgaaagagtaagtgcaacggcaccggtactgaatttgctagatgttacaagccattctccagtatattngatgcttcatacacacggactgggatgtgtgtatatgcacgaagggagagtagttgcatactcgttcctgcacgtgaagattcatgagaagaactattctattcatgatctggaattagcagcccgtggttcatgcattgaaacactggaggcattatctgtatggacagaagtgtgatatctacactgatcacaagagcctcaagtacatattcactcagtcaga

SEQ ID NO: 78568 - DNA, 194 bp, Zea mays
  unsure (1)..(194): unsure at all n locations
gctgaagcccgcgaagtagcataggacagttatatacgaatagattcaggcctanctatcggtgtatatgtttcaccgaaatccaaaccttcgacttgtgaatatcccttggccacaagtctagcattgttccttgtcaccacaccatgctcatcttgcttgttgcggaagacccacattggtcctacaacatt

SEQ ID NO: 78569 - DNA, 524 bp, Zea mays
ccttgaactcagctggaaccatccaagttatttgaaaatatactatacttaagtggtcctcaatatgtattgaagcttttgagcagctgaaagtattattgaccactgctcgggtattagctcattcggacattgataagccctttgatgtgtattgtgacacatcatgcagtggtctcggctgtgttctaatgcaagagggctgagtgatagcctacacttcaagggcagtgcgccggcatgaggaacattatccaactcatgacctggagttagctgttgtggttcatgccctaaaaatatggcgtcattatctgctgcaaatatctggcatagttatacagatcataaaagtctgaagtacatctttacccagtcagaactaaatatgagacaggagatggtttgagcttattaacggatatgaactggagattcactatcacccacgcaaggctaatgtagtggcagatgcgttaagtcgcaaggcttcctaccattgtctgacgatgaagacttctgac

SEQ ID NO: 78570 - DNA, 446 bp, Zea mays
  unsure (1)..(446): unsure at all n locations
atttgcgngctgggactggacatgattggaccgttcaagaaagctcacggaagctacactcacgtgttggtcgccattgacaaattcaccaaatggatataatacaaacccattggcttcttaacttcagccaaggtagtggaattcataccagatataatattcacgtttgggataccgaatagcatcataaccgacctgtgatccaatttcactagctctgaatcttngatttctgcgaacaacggcagcatcagattatatatacgtcagtagcacatccaagagccaacgaccangtggagagggctaatggactgatactggcagcactcatgaagaaagtcttcgacaagaatgaaaagtcgcatgatagtggatcagagaaataccttatgtggttnggagcctaagaactcaacccagtcgagctctgcatggaaaca

SEQ ID NO: 78571 - DNA, 499 bp, Zea mays
  unsure (1)..(499): unsure at all n locations
acatgtgctaagcgacgatgccacagccagcctatgctattcttatcaattaagcatgcatctagaccggcctcctcttttgcanaatcaactaagtaaagttaccatctaatacacccttaaaagctagttgtagcatcccaaaaattcaaatcctgaaaatttctcaaactcgctctatattcacaatgaatttcaaatttcatttcaaaatggttggttgcgagttgatatcaacacaataaatatagtggtctatattctctccaaaatcctnctcanatatcctacanatgttntctcagtgagtcccctcaaattctttccagaaatactgcccagatatttctcgagtaatccccttcaagctctntgcagaaatattgcccaaatattccaccaatatatctccaagtatttcttcctgagaaataccttagaatcattntcaagtcctacaaatattttcttataactcttctcatgctcatacgtatac

SEQ ID NO: 78572 - DNA, 391 bp, Zea mays
  unsure (1)..(391): unsure at all n locations
acaatcaaggcgaggtctacaacaacgctgggaacatacgacagctacgtcgcttttacccttaagatgttttcaagtcgctcatatacctcgttttctatacatacacaaataaagtctaaccatcaaggaagggtcagccttgcctctgcaaagcccgaccctccctcgggggctagaagggaggaacccnctctacgtcaaaaatttcctcggaaaaagtctttctaccagaacatctttcgcgcttttcgactgcttcatagcgggatcctgaagacgatggagtacacgtaagcggcaaggccgaccgagccgagggactcctacgcctccgggatacggatacctcactcatcaccttctgcgataagtaactcacgctcggata

SEQ ID NO: 78573 - DNA, 533 bp, Zea mays
  unsure (1)..(533): unsure at all n locations
tctanagggagagcacatgttaggactaacanatggttcatttgagaaagacatganttgtagtgcatgtcaagcaggaaagcaagttggcgcccatcatccacacaagaacataatgacaacagacagggccactgtgagttactccacatggggatctattcgnnggtcgatagcttacatatagcatcgcgcggtaagtattcgtcttggtaattggtgggatgattaaattctcgctttctctttgcggctattctttttgcangggaaaaatcacnnaaacccaagagaactttaaagngcgattcttgagaatgggcttcaaaatgaagtcggggattaagaaataacanagaatacgaaagcgacaancgggatagaaagtcaagaactctcaaatcgaaggctttcttgatgacgaaggcatcaagcatgagttctcttctcctacacacctcaacaaaatggtgtagtggagaggaagaatagaactctactggacatggcanggaccatgcttgatgagtaca

SEQ ID NO: 78574 - DNA, 467 bp, Zea mays
  unsure (1)..(467): unsure at all n locations
actcaagcttgcattgcatgtttaaattccctgtattgcatctacgacttgtctaacctanntgagatatcttttcacanagcgagtgaaaaagcttaactcgggtcaaacctgacaagtcntacgtttaagctcttagcacttaaattcttactttttatgccattattggttcttaaaatatgcatgacgtactgcacttagggggagtattcaaaactcaaatcactcatgangacccctagtgcaaaccaaaatgcaaaattcaccatctgcctattttctctaaaaattatctagcctatggcgaaatatcttgaaaagtatatgaaggtgccaatacctgctccaacaagtgtattctgtgtgatactaactgcgatttggttggttggagtagataaataattaaattttccaactctctctgtctggctcaccgacagccggtgtgaccggacatgact

SEQ ID NO: 78575 - DNA, 97 bp, Zea mays
tagtggtcaatggggagtagctctctccgggtagaaagggaatcaccgcttgtgggtaaagtgcacaacctctgcagagtggttgaaactgatatat

SEQ ID NO: 78576 - DNA, 296 bp, Zea mays
  unsure (1)..(296): unsure at all n locations
tctaaagggagaancacatttgngactaacanatgttcatgttgagaaagacagggtttgtatctcatgtcangcacggaagcaagttggtgttcatcatncacataagaacatcattacgactgacagaccactcgagctcctacacatggacctattctgcccgattgcttacataagcatcggcgggagtaagtactgtctaattattgtggatgattattctcgcttcactcgggtgttctttntgcagganaaatctcacacccaagagaccttatagggattcttgagat

SEQ ID NO: 78577 - DNA, 490 bp, Zea mays
  unsure (1)..(490): unsure at all n locations
tgatagacacacccacgcagttggattgcagaatganggagagatatgggctccaaagcctaagacctttctagagaaggcaaagganagggcaaacacacacactgttgattggtttgacttacagtcagggacatatgaggtattccttcaagctggtactacttctgacggcgagtcacaagagtcgagggaagcatgtggtgtccttaatgacttgtcatgtacttgtggcgcacccaggcaataccattttccatgttctcatctaatcgcagctgctcgagctcgtaactttgacttatagaggacgatacctcaagagtttactattgataaactagtgttgacttggagtccaagatttattccttatcgtgacgcgggtgagtggcctccgtacgatggcccanagtatgtcgctgatccaagtagtcgttggaccaagcgtggatccaggaagaggacgaggcacaagatggttatggat

SEQ ID NO: 78578 - DNA, 508 bp, Zea mays
  unsure (1)..(508): unsure at all n locations
gcttctccgagcacacaacggaagaaacagtttacggtagtttatggttattctattctcaactcgcaagcacgaaatcatcaagagcatctttaacggacaagatggcataacctgaggctttccgaaaaacaagtgtatcgtccgcgtgttgcaaaactgggcaaggatcgttttcaagaacaggatggcaaaggtgatgggccacccctctaaatataatgaggcgatgtaagacatcaccgacaacaatgaagagatatggagagatcggatcgcctttatggtttacgaccgannattccaccatttccttgattttggtgggtccgaaaatatatgtttctgaaattgatatttcttaatatatattataacgctcttaacaataattaaatatatctgatctttgaactataatttccgaaatttcggagatttcctttctttgctggggaccggattntcttcctganactgtatactctggaatataagaatggatggg

SEQ ID NO: 78579 - DNA, 217 bp, Zea mays
ccgaccgaaggattcccacgcctctgggataccgatacctcactcctcacttccgcgacaagcaactctcgctcacacaaacatccctattaccgacatagtctagatgctcacaacatgagggacaaaggacgccacctctcaagcgtggcgagggcgtgttcctctggcctccgccgccgcagatagcgcacgctacaagatgatctgatcctgc

SEQ ID NO: 78580 - DNA, 523 bp, Zea mays
  unsure (1)..(523): unsure at all n locations
tctntcttcctcctcatcctcattngtgcttccgctatcattntcattagccacacttcatatgtgggaatcgaactgggaagacgaaacctttggagaggtggattcatcgtttggtctccatcggtctttttcttcttcttccttgcaagggttagtatcacaaatactaaaggaagtagaagcacaaaaggaactatcatgtttggactcattagatttgattntaattctagtccaaatatcatgcacatcatgaatagattcattataattggatatgaaggcacgataatcttcattgctaagagaattacttaagatgtcaaaagctacgtagtttaagcgaaaacatctttgatcctcctcnngaaataattttccattatagctagatggaaagatactcttgtctatagtttgttctaattgtggatctacggttctaannagctttatcactctagtagaccatgagtcgtaattagaacaatangaaagtaatatctcaagaagtacctca

SEQ ID NO: 78581 - DNA, 469 bp, Zea mays
  unsure (1)..(469): unsure at all n locations
gatctgtatgttatgccacaaggaangcctttatgtttttctctatgcaagcgatgaccacggataaacaaaagcaaaagccatcaagcaaaatctccaacacctacatcaacaaggtggacaaaaaggctgctacaccatatntgatcaagacaaaaaaagaatggcaaggtgatagcaatcaaggccaatgttggggactcgntctcaaatgctatgagttaagaacaacgcaacacacatgttaatggttaaaaaccttcgtcctccgaagcattatcttcctcgggacataatgatcctcagacgaacgtcatgaaggacataccttcatcatcttagtaggtaataatgaaagtagaaacatatgacacatgagaagaacatagaataatcacattaaatcatcatattagtacttatgttcttattatataatcatgaacaaacattaatgatattgattaca

SEQ ID NO: 78582 - DNA, 422 bp, Zea mays
  unsure (1)..(422): unsure at all n locations
ctatcatgggctggctgtggcatcgacgcttaacacatgttgtgtttaagaaccttcacaaacttctaaagggagaacatgtgttacgtctaacaaatgtgcatttcgaanaagatagaccttgtgcagntcgtcaagcatgtaaacaagtgggaagtgctcatcatatcaagaacgtgatgactacatcaagacccctgtagttacttcatatggacctcttcggacccatcgcctatctaagcataggaggaagtaagtatggtcttgttatagttgatgatttttcctcgcttcactttggtattctttttgcacgataaatctgaaacccaaaggaccctcaagcgcttcctaaggagagcttaaaacgatgttgagctcatcgcgagaaaataaggagcgacaatgggtctgagttc

SEQ ID NO: 78583 - DNA, 295 bp, Zea mays
  unsure (1)..(295): unsure at all n locations
tatcacatgtgaagntaagcacttaggaagatagaaatcacaataaagtttatgatactagataccacaacgattttatcccgtggttcggtcaaacgtaatatgcttgcctactccacattgtgggcgtcctataaggatgagagttgcactcaaactctctcaagtgatccaaagatcaaatggagtaccagtgttcttacttatatcaagtattcctggtttcgaggaatctccacaacttagagcctctcacagccttacaaagtgatcaaaatcaaaacattagagtagg

SEQ ID NO: 78584 - DNA, 257 bp, Zea mays
cttatcaaaacagcagcatttaccaacgcagcatctgcaatccatacctataacatggccattcgcgtgctgcggactggatatgattggatccttcaacaaagctcataggggatacactcatatactgagtgctattgacaaattcactaaatggatagaatacaagcccatcgcttctctaacttcaaataaggcggtggaattcatacaagacataatattcaagttcggaataccaaatagcatcataactg

SEQ ID NO: 78585 - DNA, 259 bp, Zea mays
  unsure (1)..(259): unsure at all n locations
gctggggactgaatcgaagatctatgcacataatcaatgcagaactcattgagttccgcttctattttttaatccttccagnagcttctctggttctcataatatccttcaaaggctatgatgaaggaacaattatatggtacgcttgaaaataatgtcgaagccttctggaggccattaaaacagcatacagcaccttcttcaattctggataaattttctttaacaaactgagaacttcggaaacaaagtatactgg

SEQ ID NO: 78586 - DNA, 284 bp, Zea mays
  unsure (1)..(284): unsure at all n locations
agcttcttagggagaacacgtgataggttngactaacgtgcaattctgaaaagatagaccttgtgtatgcttgtcaagcaggtaaacaagtgggaggagcacatcacagcaagaatgtgatgaccacctcaagacctctggagctgctgcatatggacctcttcggacccgtcacctatctgagcataggaggaagtaagtatgggttagttattggtgatgactnttcccgcttcacttgggtgttctttntgcaggataagtctgaaacccaagggaccctg

SEQ ID NO: 78587 - DNA, 463 bp, Zea mays
  unsure (1)..(463): unsure at all n locations
cggggaggctcttcatccncacatgtgctaagcggcgatgccacagccagcccatgcttgtttagtcattaagcatgcatctagaccggcctcttctttngcaaaatcaactaaataaagtatgccgtctaatacacccttaatagctagtgaaccatcacttcttctaaagacagacacatctatatttgtgaacagacagctatatcccatattgcacaattgactaacagatagtaaattatatcctagtgactctactaaaaacacattagagatagagtgctcattagaaattgcaatcttaccttaacccttntaccttggcctgtatcccatcaccgaatatgattgaatcttgggaatccttattcttgacgtacgaggtgaacatcttcttctcccccgcatatgcgttgtgcatcgctatcaataatccagcttgaacccccggatgcataaa

SEQ ID NO: 78588 - DNA, 418 bp, Zea mays
catggcctcgatgacaatttcattgggcactgttggtgcctgtgccctcaaacgcaagaaccttcggacatatgcctgaaggtattcttcgtggtcctgaatgcactggaacagagcctgagcagtgaccggcttcgtctgaaatccttgaaagctcggtaacaacaaatcctttagcttctgccatgaagtgatcgttcctggtcgaagggaagaataccaagtttgagcaacacttctgacagccataacgaaagatttggcatgactgaacattgtcccatacgagacactgttgttcgagctcatcaaaactgttctggttgagtggcatatatactcgagctaggcggttgatgacggggccaaggtacctgaactagcggaaggggaaagcatataaaacataattcctgat

SEQ ID NO: 78589 - DNA, 279 bp, Zea mays
  unsure (1)..(279): unsure at all n locations
ctcaagcttaattgtatttaaaagccttgggtaaagtttgttatgatttggacaatgtcttatgcttttacctcanaaccctagtcttctagtgatgcctgccctatgaactacactactgactccaaaaccctaatttcctggagattcgtgaagaaaaatcgtattcaagacactagataatatactcttattatctctgcattttcataagcattacatgagcattcgtgattatatatggttatatatagaacaccaagaacagatagaagttga

SEQ ID NO: 78590 - DNA, 493 bp, Zea mays
  unsure (1)..(493): unsure at all n locations
ccatagatactcagctcatcgccttctccggggactccattntncttcaatgagactactacatatattattacttgtaacaagtattcattctcaaagaacttagattattagaagtaacctccccctcgatagtatgcatacaagtattgaacacttgaaggagacatgcactcgattttgatatcaagagggccaaattatctataatccgagctttggcacatataggttaaatgatactaattgaaacacaattgaagtattataccaattgtagtatatgtcctatgaaaatatcaattgatgtatcattttcttaggaatattaaataagctatgtgacgtgcttaattaaacattatagaccatgtaggtttgctaagaatatgaactgaaagagacaatnctaccatatgatggacctagtatgtatgcatttttaattaacagtaaataccaactttagcactaggcatgacaggtaaaaact

SEQ ID NO: 78591 - DNA, 414 bp, Zea mays
  unsure (1)..(414): unsure at all n locations
accttccgactaatgttctggatgctgcatgtactccgcactgcccggcatggacttcctccacaagttgcttaccggtggacgggagaacgcacttcatgaggacgcctgacgcgcccctcttgtataatatctccccaatgagtgtatagtgagctgattgtctggcaatgcgctctgccgagttcttgtcatctggntcttcttcattctttatatatttaataatcgggtggcctcagtcatcagaggctgactcggttggtctatgatgtgcactctttatttatccgcgagatctcgctgaggattcttgcacaaaccccggcggacttgagtcaccggatcgacttgacagacatcaccgccggtccgatctttttattgatggactcagacttcaattatttctac

SEQ ID NO: 78592 - DNA, 332 bp, Zea mays
  unsure (1)..(332): unsure at all n locations
tcagctccatctatgctatggattggtcttgagtcagtgcagtatccttcggctcttcttgcagcttcctggcttccatgaatagcgatgggtccttgatccgaacgtatcttcatgcaaagataagcaggatgaagaattgcttcgaaagcattgacggtgccacgactaataattgcattgcaagggtattccatgtcaacaatgtcaaacacaacttgctcagttctagtgttgttgatgaacccgaaagtcactgacatggtgatcttgcccagngctacaatctgtcttcctccgagccacagagaggatgtgtagcatcatgaatc

SEQ ID NO: 78593 - DNA, 528 bp, Zea mays
  unsure (1)..(528): unsure at all n locations
ccttagatactcagcttagtcatatactcatcttcacttctttaaaatgtgaatggatattgcaatatgtattgcgtacttctaaataattatatatggggtgcttctaaataattagatgtattntccttgctatttgtgctggttttatttaattggttccaattggttatcacccaacgggtgcccaaagcccagtgggcgtctagcggatgcgggtgtaaaaatccacccattaagcattatgggtgcangtgtgacttgatgtgtcgggtgtcagcatgtgtgggtggttgtagggatgtaatcngatcggatacagacggatatcacttgaaaccatatttgtttttatattnttattcngattcgaattcgaatatggataactttggatatgaatacgaaatgtctcgaatacanatacgaatagctgtgtgtcgaatacggaactagtcggatacggatattgtcgngtaacgaatttttgtcggataccgtgtangacatcattccacacatatcatg

SEQ ID NO: 78594 - DNA, 302 bp, Zea mays
cagcttattagaggctatagacattggtgtctacaaagccaccacacaacgcttctgaaatggtattgttcccttgggccatttctaagtgttgtggtgatttagtgtccaacacaagtgcctaagtgtcaaatgggggacaaagtacaaatcaagtataaaggtatgtttctcagacttagtcacatggtttagagactaatggattgtgtctaagtgctggaaacacgagaaatcacattggagaagagatggctttgttcaaccaaagtctgctcagtctgggtgcaccggacagtgtt

SEQ ID NO: 78595 - DNA, 298 bp, Zea mays
  unsure (1)..(298): unsure at all n locations
atacctgtcaaagcaacagcacatgccagcacagcagctacaaaccataccagttatcttggtctntcgcatgctggggattggatatgattggacctttcaagaaagctcaacgaggatacacccatgtattggtggcgattgacacattcactaaatggatagagttccagcccattgcctctttaacctcttgctaagccgcggaattcataccaagcataatattcagatttgggataccaaacagtatcatcactgactttggatccaacttcaccagttcagaattctttga

SEQ ID NO: 78596 - DNA, 296 bp, Zea mays
  unsure (1)..(296): unsure at all n locations
cagctgatcagaataaagactcntgttgcagaaatgcttactaacagtggacccttaaaatcttttttattattagggtaaatcattacatgtatctaagggtatttctatcctagttcaggcacttagcctatactagccatcttttattacccctttgagttcactggaatgctacgtgtaagtcagtgacaaagtttcatgtccgagaagaacggtgatccgaatcgataatacccagctggggatctccaaccacacgacatatgtagcacttaacccttgcatatgtcaac

SEQ ID NO: 78597 - DNA, 513 bp, Zea mays
  unsure (1)..(513): unsure at all n locations
tacccatgacgacgcatgtggtcaattaaaaggtcctcgatcatcaagcctacttgttttggtccttaatcgactcaaacgaagacactacaccgagaacttcttctcgtgcaagtcacccgtccagtctcatctttatcatttaccacccatagtttggtacctggcagaggtacatctcttcagatgttgaacccatcacgaccatgatggattcaccatcacaagtctgttctttctaaaattcccatcccatatgaagcatcaccttttggttaaaacaaaacattgtgttttctaaagcacagttaagcatcagaaaaccttatgtatatanggtatcaacgaatggtaatcagtttccaacgaagggaatgcagcacattgttagcacacaacttgtatcacctaatgcatcatttcaagtgataaagagnttanaacaacaccggacaggtgtacatgcactggggcttgccttgtgtgcgggaggttctgatatgttcacagatg

SEQ ID NO: 78598 - DNA, 516 bp, Zea mays
  unsure (1)..(516): unsure at all n locations
tatcaagattcanagactctttntgtagaanagcttactatgagtggattcttaagaattcattctacttatcacggtaagtaatgacctgcatctagattctcttctattcttagatcaagcacttggcctatcctagccatcttttcatcaccccttcagttcacttgtggctacgtgtaggctagtgaccaattcttcatgtccgagaagtaacggcgatccgaatcgattattacccagctggggatctccaaccacacgacatatgtagcactcaacccttgcatatatcaacttggcacccaggttctcaagaccagaaatgagtcacaccaaccgagagcacagatactccaccatccagcctcttggcacagagggtacacactactctcgccatctctccactcccattgtgtggtagccattctggtattggtccgacggaggcaaagcttacccatgacgaggcatatggccagttaaaaggtcctcgatcagcaggcctacatc

SEQ ID NO: 78599 - DNA, 509 bp, Zea mays
  unsure (1)..(509): unsure at all n locations
tctccttgaccncaanacgtgatacacncttcattggtgtagactttagggagacattatctncaactagaaagacaagggttgtcgtcgctagtctgcataactcttctaacgagcttgagctttcttcaaattataaattatntcgtgaactttctcttctggtttctttaccatatcacgcctgaagaaatttctttcacctggttcagactagtttaacggagtacaacaccgttgtccatataaggcttcaaagagtgtcatcttaatgctttattgatagctattattatatgagaactccgctaatggtaaacaatcattccatttctgtgggaattccagacacatgctcgcaacatatcttcaagtatctgaattactctctcagtctgtccactagtttggggatgataggccgaactgtggagcaacttagtacccaaggatttgtgaagttcttcccagaanttggatacaaatgacgtccgcgatccgacactata

SEQ ID NO: 78600 - DNA, 452 bp, Zea mays
  unsure (1)..(452): unsure at all n locations
gcttcgcatagccatatgtctcaagaccaacgagtgtaccgacttatagatgaaatgtttctttatcacctgatagctggtattatgattataagcattcgtaaagggcatgaatgtaatttctcacacgctgtgtcctgtgcctataaatagatgaacaagtaccctcgtactgttcacgcaatcttgtaatcgcttgcacacgacactcggattattgctttctgtcagacgaacgattaatgtgttaaatgtatgnctaatattcagttatatgatgaaatattgaatagttatgtgttaaaatattatcttcatgttcatatctatatatttatcttcattattcataactctaatcacaaggcatgacttctgacctttctataccttcgccgaaaacatatcccttgtgaatatgttcatggacaggcataacataacattctatg

SEQ ID NO: 78601 - DNA, 388 bp, Zea mays
gcttgactgacgccgatcaaacaagttccttgcccggatgaagatctgtttacagtgagagagccgtgtgtctccagatgatctgggtcagttatatcactcaaatcaccttcggacattcgaaacgacttatttcaagatggttgatgagttactggatgtctttggttgaccatgcccacattcttataacttgagaacaggattatggtaccttgtagttgtggggattattgagacattggttatctcaagcgaaaaacatgcaacattgagatggatgcaagatgcagagcccagtgatgcaagtgacaaggtagtctgatcatgggcctattctggacatatcacaagaagatggtgggatcaaaagtgcaacattgactga

SEQ ID NO: 78602 - DNA, 349 bp, Zea mays
  unsure (1)..(349): unsure at all n locations
gtctttgatgttattgtagaaatagccctcgcttcaatccatttggtgaagtattcgacggctacgaaggcgaacttgaggttcccctgagcggtgggcaggggcccgacaatgtccaggccccagcgctggagaggccaagtatgggcaaccagctntgtatactgcgaggggctgcctgaccgangagaaaacttctggcaggcttcgcaggaccttgtgacccattcgcggccagatcattgcgggccagaaaacccttggcggacaccttggagccagggcccttggcctgcgtgcgagccgacgtgctagtgtggacttacgtacgatctgatgccttcggttc

SEQ ID NO: 78603 - DNA, 211 bp, Zea mays
actcagcttaccgctatggtgaactaccagcggtggctggctggaatactgtttgtctggcactcgggcgagtctggtgcaatggggcagaaagactcacggactaagagtgcgttggcggcaagtgacacgggtgaatgaggcacgcccggaggctttattgcgcggcgagcacgcgaagcgaggcgccggcgacttactgaacctgggc

SEQ ID NO: 78604 - DNA, 476 bp, Zea mays
  unsure (1)..(476): unsure at all n locations
ctaagcttanactcttcgaaccatatccagatattttcaagcttcggatccttagccttgcaactcttgtcaatatgacccgaaacaacctgggagatcagtttgagtatagcccttctgattcccattgcctttagcttccgaagacctagaagcaaggcttcgtactcggcaatgttatttgtgcaactaaaatcaagctttgccgcataacaaagtttgaccttggaaggtgaaaccaacacagcagccgctcctgctccgaaggttccccaagatccatcacaaaacactatccatgcttcggcgtcttatttgcttcttnnctctgagcccctggcgtcagtcagcaatgaagtctgctaacgcctgggactgaatcgaagatctatgaacatattcaatacannaatcattgagctctgcagcccattttccaatccttccagtagcttctcggttcctcataatatcct

SEQ ID NO: 78605 - DNA, 472 bp, Zea mays
  unsure (1)..(472): unsure at all n locations
tcatcttccanagtatcttcagccatntctttatccttctcggctctagggcgtattctctttggtggctgcggcagcctcttctgcgacagcctcttccgcggccatgtttagtagtattttatctatatcaacaaccatactttccaaatgaatatcttcngctctggtagtttcggcatttgtgggcttcgaaagtgcagcttctgtagccgtcgtgctttcaacagncggcgccttcgaagctgaagctcctggtggtgttccttcgatgacttctgtcacttgaatgatcctttgctnnttcngcttaactgccttcttcgtttcacgggctccttttccttctgaaaaagcttcgtcagatgtggccccagtggacttagcttgatcggcacagattcagtcattacctttaagattcctctacttcggcagcagaacgtgttgcagaagttcttctctttatcaa

SEQ ID NO: 78606 - DNA, 243 bp, Zea mays
actaagctgccagacctgcaaacaaagacatgccaccagtagtactaccatccattatttggtttttgcatctgggattggattgatggacctttcagaaagctaagaggaacaccatgtatggtggcaatgacaagtactaatggattaagtttagccattggctcttaactttgctaagccgggaaatatacaaacataaattagattgggatacgaaagatcatactgactgggatccac

SEQ ID NO: 78607 - DNA, 281 bp, Zea mays
  unsure (1)..(281): unsure at all n locations
tctanagggagaacacgtgataggtctaactaatgttactttcaaaaaagatagaccttgtgcatcttgtcaagcanggaaacaggtgggaagctgaaagggaattaggcttacacctatttcctaattaattnttggtggctgaattgcccaacacaaataattggactaactagtttttctctagtgtataaggtatacaggtgccaaaggttctcacttatccaataaaaagaccaagaattgggttcaagaaagagnagcagggataaccaaagtgt

SEQ ID NO: 78608 - DNA, 197 bp, Zea mays
  unsure (1)..(197): unsure at all n locations
ccctgttgaccttgatacaacagtgttgtggctccaaaccaccttttatttctcgtctggccactttgccttatcctgattganaattgacttcattattctagttattatgattccatttgccctttctaccaatccatttgactcgggatgccttactgatgcaaaatgtatttttgtaccaacttgactacaaa

SEQ ID NO: 78609 - DNA, 455 bp, Zea mays
taccatcaagaaagctaataattctatttcctgatgcattattgattaatgtgtcggctatgggcatgtgatactcatctctaggagttgctctatttaaattgcgaaaatcaatgcatactctaagcttacctaactccttctccaccggcacaatattggagacccactctgcgtatctgcaaggtctaataaaatcagcttctagcagccggtggatttcgtccttgatccgtgggagaacgtatgtacgatatgttctagctttctggctcaaaggtctaaaaccggacttaataggcagccgatgctctacaatctcttggcttaatccagacatctcagtataatttcaagcacagcaatctgaatattccttcaatagaccaatcatctcatttctaggatctggctcccgggtcttcgttacaaaagtcgcgcttggagtttaccat

SEQ ID NO: 78610 - DNA, 401 bp, Zea mays
  unsure (1)..(401): unsure at all n locations
cttcatccncacatgtgctaaacggtgatgccatagccagcccatgtctattttagcaattaagcatgcatctagaccggccttctctcttgcaaaatcaactaaataaagatcgtcgtctagtacacccttaaacgctaatgaaccatcacttcttctagagacagacacatctacattcgtgaataaacagttatatcccatattacaaagttgactcacagacaacaagttatatccaagcgactcaactaagaacacattagaaatagagcgctcggatganatagcaatnttnctaaccctttcaacctggccttgtgtctcatcaccgaatatgactgaatcttggggatcctcgttcttgacgtangaagagaacatcctctttttccctatca

SEQ ID NO: 78611 - DNA, 411 bp, Zea mays
  unsure (1)..(411): unsure at all n locations
tagcaatgtatgcaaagctaggtcgctcaagtggcattagttaaccggcatgcaaacaagtttgttcgttttaatagtacgggtatctatcctaaacccggtcttgaacttttctacacaacctttgatcggtgaaatgaaatgtcctacaagtcatatcgttgtcttgtgcattccatctgatgaataatgactcattatgggtgtagccaaccacactacctttgtcattgcacatatcatgaagtccctcaactatctttcataaaaaatgaacaatgatcattcatagtgtagccaaccacactaactttgatcattgcacatagcatgaaggttcctttgtactcttcatcatataatgaacattgatcatncatagtggagccaaccatgggacccttgatcatt

SEQ ID NO: 78612 - DNA, 196 bp, Zea mays
ctcagcttagcaaagacaccaaggccttcttctatatggcaggaatgacttgccttgttttgatatcatagaaaaagcacgaacaagaaattacttgctgattgcaagagaatttgccaatttaggcaagctggcctgaagttaaatccagaaaagtgtgtttttggggtgaagaacggccagttccttggctgtt

SEQ ID NO: 78613 - DNA, 433 bp, Zea mays
  unsure (1)..(433): unsure at all n locations
ttcattaatgatctaacaacaaggccatctgttgacattgcttatactttggaagcctttcctcgctacagcctcgcgttgacggtcattcatgatacatatagacattatgacatcatacaggatgcaccagatgttcagtttctgtgtgaaaaaaatataaaaacatgtaaacaaatataataaaaaatgatcggtcacaaaagtgcatgctgctaaactgaaaaaaggcataaaaccacatgaaagtttttgattcataaatattatatgaagaccgcatataatacaacataacanacatgtaattaactgacccaacatgaataaatatccataaaaataatcgttgcaatagtaataaacttagatgtcgttgccaccaacctattntcttctatccctggtntcgtttcgttctattcttaccaca

SEQ ID NO: 78614 - DNA, 500 bp, Zea mays
  unsure (1)..(500): unsure at all n locations
tacctgtcanagcaacaacacatgccagcacagcagttacagaccttctcttaatcttggctttcgcgtgctggggactggatatgattggacctttcaagaaagctcaaggaggatatacacatgtattggtggcgattgacaaattcaccaaatggatagagttccagcccattgcttctttaacctctgctaaagccgcggaattcatacaaagcataatattcagattcgggataccaaacagtattatcactgacttgggatccaacttcaccagttcataattctttgacttctgcgagccaaagagcattcagatcaagtacgcatctgtagcacatccaagagccaacgggcaggtcgagcgagccaacgggatgatattggaggcactcatgacaagggtcttcgataaaaatgaataattcgcacgaaagtgggtagagaactgcctatgtcgntggagcttgaaacccacctaccgagcctgatggaac

SEQ ID NO: 78615 - DNA, 378 bp, Zea mays
  unsure (1)..(378): unsure at all n locations
gaacacagaccgctactntaaccctcacactatgcanaggacgttctcctgctaaagccaatagtgcacacaagatcacggcttagcatatccatattttagattacggtgatcttaagaaatatatgaagattatggctgttatgaaaaaacacacacacgaatataaatacactgcagaagtacctagatcattgtcatcggccaaaaattgacccaatataacctcacatcgcttcattagaatggcaatgaaactttgctggttctgatgctgcacacacatgttgcgtcctatgcactgaaccacaaaaaagctacatgagtatcaattacacagttaccatcctaacatgccatattaacaaacagtgccaa

SEQ ID NO: 78616 - DNA, 251 bp, Zea mays
  unsure (1)..(251): unsure at all n locations
tactcagcttacagcatcctatggaagctacctangggcttggatcgagcggacgatggcggcatacagttctgtcacggtggatgtcttccggcggctctggcgggtcgcggagaggtcgtctgagctatgggcgagctccggggagatgggcgcgagacaggggatgcaacggggaagatggtgagagcacctagagggggggggtgaatatgtgatcttgttaaacttgaaacttaatggcacataac

SEQ ID NO: 78617 - DNA, 305 bp, Zea mays
  unsure (1)..(305): unsure at all n locations
ctaagctatctcgaacgcccggtatntttccctactatataatggagccgggcattctcttttttcttggtcaacaaggtggggtggtgtatgtagatgttgctttcccccatggttgagctacggggattccatttgcctattggctataagttgatcgttcttttcgcctttatgtggggcggaagcttcctgggctcggatctgaataatgggtggtcattcatactgtgatgaagtgtgctggaaggcacaattctgaataaatctcttaaagactatgcccgacttgctgataatacccg

SEQ ID NO: 78618 - DNA, 513 bp, Zea mays
  unsure (1)..(513): unsure at all n locations
aagcttgtatcttcctagaatttataaaaatagtttcatgagttttaagtaaaatattgttatttgaggcatntaaactagtttaaaccattagttctggagttttagaanatagataataatcccaaaattgcccaaactttttatgtgagctctacacattatttagaagccatgggtagagtttggtttgatttgaacattgtttgataactagaacccaaaacccctacccctgtcctttgaactcctttactgactccggaaaccctaagttctcggagttccgtgaaggaaagttgtattcaagacttatttaatanatatttattatcttcgcactctcatgagcattacatggcattcattcttatatatatacctatatnggtatatttagaaaacgaagaagagagtatagtgactcaagagaagacaccaccaccttggaatctcaggcagggactcggctctacttcgacatctgcggatccgagcctgactcacctatta

SEQ ID NO: 78619 - DNA, 516 bp, Zea mays
  unsure (1)..(516): unsure at all n locations
tgggatatttggagaaaatgatgatgaattggttcgcttcgctggagaggatattttctcttagccaaagaagatgaaggtgtagtcttcaagagcttcttcagggtggcacttcggttccccctttatgaaatgataggtgaagttttgaaaaangttgaaatctacctacatcagctaacctcgaacgccattgttaggctcaacgtgtatatctgggctcttcgaagccaaggaaagagtgccaatgccgaagggttctgtcgggtacatgagcttcattattagacaaanggcagagctgacggtctgcacaagaactntagatgctacaacttcgcatactagaaggacacanaggcccccatgatatgctaccacaccanatggtcgatggggtggacaaacgagtggtttacatganagctgactgtaatacccaatttgtaagcatagagaanagagtcgatctccttatatttgtctctattcattgaacatganagtaaccatagc

SEQ ID NO: 78620 - DNA, 148 bp, Zea mays
atgattatggttgttgaatatgtgtttcgatattcatttgcatgatacattacatcatgtcattttcattcataaacattcatttagacatatatagaatcatcatcatatcacaccacacgacagatgcttccgcaatgaggaaaaa

SEQ ID NO: 78621 - DNA, 514 bp, Zea mays
  unsure (1)..(514): unsure at all n locations
tatgtccgatggtcgccttgcagccgtagacataatggagccgnctacttgtattgtttactgtagngcgtgtagntctctggttttgtcaatcctatctgtatattggtngtgtcgaaataagaagtaccgagcatatactaattcacatgaaataacgaacaagaattttctggaaattgcaataattcaacttccaatagtgaaaaaggacaaactgttaattagtatagattcctaacaatcgctcctatcnaccttttctccttttccacctgatagtgacgtacatacactagtacaaataagctcaaagcctgcggcacgttcaacttttcacttggcggttccgttatcacacgtcagtgaaagaaacaggtgggcccggctttaaaaccgccagcggaaacctatctccactggcgggtatcttaacacaaccgccagtggaaataggatgtttccactgggcggtgtgaacacaaaccgccagtgaaaattatctccactggcg

SEQ ID NO: 78622 - DNA, 442 bp, Zea mays
  unsure (1)..(442): unsure at all n locations
ntcgccagcaacttccagggcacatacatgcgccctgtgaactnctgngatcttcttatctgncgctagcagcccggagaatacctccgggactacatccggcgattntcgaagcagcgcaccgagctggccaacatcaccgactcagatgtcattggcgctttcctcgccggcaccacttgccgcgacctggtgagcaagctgggtcgcaagactaccaccacggcgagcgagctgatggacatcgccaccaagttcgcctctggtcaggaggcggtcgaggcgatctttcggaaggacacgcagcctcaggagtgccagccggaagacttcccgaagcgttcgcccacgcgggcgaggaaaangggcagaaaagtccaagcaaatgcgaactgcgacgcgaccttgtgcaccgcaagacaggaacctcggaagcctctga

SEQ ID NO: 78623 - DNA, 370 bp, Zea mays
  unsure (1)..(370): unsure at all n locations
attcatccncacatgtgctaagcggcgatgccacagccagcccatgctagtcttagctattaagcatgcatctagaccagcctcttcttttgcaaaattaactaaataacagttgccgtctaatatacccttaaaagctagtgaaccatcacttcttctaaagacagacacatctacatttggtaatagacagttataccccatgttgcataatggactaacagatagcaaattataaccaagagactctactaanaacacattagaaattgagtgctcatttgaaattgcattttaccctacccttttaccttgcctttgattccatcaccgaatacaattgagtcttgggaatccttattcttgacgt

SEQ ID NO: 78624 - DNA, 431 bp, Zea mays
  unsure (1)..(431): unsure at all n locations
ttaagctctttgacaatggaatcacttcatctaagtttagcagagatgcaataatgcatgagtgaaattttaagaggttaaactaggtatgaagcacggataaatgcaaaggacatgctcttttttcttctatacaagatatggttagaatgtataagaggaagattttacgtacatatgtaaataatatgaagtggatttaccctttttgtacctttgcatagagatgctctcttcattgtgctttgtctttagtcttagatgcttaagacctataatgacaatatgtggaaatactctgcacaagagagagatctacaactagtgatctttttcaagtagggttagcatatatcaaatggatcacaagttgtattaatgaatcatgaaattctcttntncttagtgcatataagatagatgtagtaaaa

SEQ ID NO: 78625 - DNA, 209 bp, Zea mays
  unsure (1)..(209): unsure at all n locations
tgaaccgaggacccgcgtcaccggaatagcgcaatcgtgctcgccggagttcaagaactcgttggcgcacgtggaccgcgtaagcctctgcaccatttcccaattcgttgcgcgcatggnctctacatcaccccgtggagctcctcgtgtaccttaattgaactataccgtcgtggtttggccggaacaagagccgccgatgacccccg

SEQ ID NO: 78626 - DNA, 283 bp, Zea mays
  unsure (1)..(283): unsure at all n locations
ctcagcttggacctggacacgcaaagaaataaggggagttgattgataaactctattatcatggtggngaatgtgagaaggcaaggggatatgattatcttacgcaagcttgttntgagtaatttggtcttgaacgtaattagcgtgtatgtccgacaagtagtccatgatgagagtgctaagagacttttttggagaagacttagatgacacgattagagctatacatattagtgagaagctctttataggagatctcaatgggcacgtaggtacaataagt

SEQ ID NO: 78627 - DNA, 497 bp, Zea mays
  unsure (1)..(497): unsure at all n locations
catataggcataagtgagaacacctagatgggtgatatgtgtttttatataatcaactctaaacaacacagacttggtttatacaagttgttagtgataactaanaccaagttaggatgcaaagagagagagagaactcttctattgattgctcctttaagatgagaattaaagttaggagcaatattgctcgcggaccataattaggggtaccctcaagactcctaattctcagctggtaacccccatcagcacatagctgcaaaggcctgatgggtgcgactaagtcagagatcggtccatttgagggactcgatcacgcctcgcccgagcccagcctcgggcaagggcagccgaccccagaggatctacgtctcgcccgaggcgccctctccagcgacgaacatacttccggctcgcccgaggcccagtcttcgccaagaagcaaccctggtcaaatcgtcacgccaaccgaccaaatcgcaggggcattaatg

SEQ ID NO: 78628 - DNA, 476 bp, Zea mays
  unsure (1)..(476): unsure at all n locations
tctacacggagaacacgtgataggtctaaccaatgctcatttcgaaaaagatatttcttgtgcagcttgtcaagcanggaaacaggtgggaggctctcatcacaccaaaaatgtgatgacaacatcaagacccctggagctgctacatatggacctcttcggacccgtcgcctatctgagcataggaggaagtaagtatggtctagttatcgttgatgactcttcccgcttcacttgggtgttctttttgcaggataagtctgaaacccaagggaccctcaagcgcttcatcaggagagctcaaaatgagtttgagctcaaggtgaagaagataatgagcgacaacgggtccgagttcaagaaccttcatatggaggagttccttgaggaggaacggatcaagcacgagttcttcgctnctacacaccacagcaaaatggtgtggtagagaggaagaataggacgctaatcgatat

SEQ ID NO: 78629 - DNA, 510 bp, Zea mays
cgagggatgccaaattatatggcaacatgatttccaagttgtgctttctctatgacacggaagataatgtaagttgcctctgaccctcgccccaccttgccttgtgtgataccttgatggccattggtctaactgtaaatttggtgttgttgctggtttaagggccaaatgagtcagacagtaaacaagaagcgtgggctcttatggccactgtcggaaatggttaggagattcttcactgccgatggtagcaagggtttcacgctgtggcctgcgctgaggctattgatcccagtaatagcattggttgcagtttgtgtggttactacatgcacagcagtgttgaagagatagactgcaccaactgttacttgagcagggtatctgtgcttaccttctgtcccttttcaggtgagtgttcatcgttgtatagatctgatgagtactacacgtcattcgtggctgtgtgggttgaggacttgagggcgaagattcacgtgtactgtactg

SEQ ID NO: 78630 - DNA, 482 bp, Zea mays
  unsure (1)..(482): unsure at all n locations
gataagcatcatggtaaagtacaatggatgacaanggtttatgtgataacagacaaacacaaccaaggaggtattttagacaaaacgtgcgaagtatcatagaatgggaagcaatcaatggtgaagtatgtgaggcattatcctcaaacagcaatgaanaagacgtggctttgaacggtaggttcaaagtaagcatgacggcaanggcatagatatcacgagggtttaaaggtgataacagacaacgatgtangagaggaggtaaatgcgcataataaccaatgatataagtaccacaaaggatggagttaatacaagacctgcagatgaaaaagaaagagngtacgtcaatggccagataggtaaacaaccactctccaattgangtggaagagaggagattntaacgagccagaataaagatgagtatcaaggcaagatcgatggatgacaacgaggtggtgatagcanatataacacat

SEQ ID NO: 78631 - DNA, 452 bp, Zea mays
  unsure (1)..(452): unsure at all n locations
tctcaagcaaatggatgagtacattagagccaacaatgattntcgacaaataatggtttataccttcagatactctgagttggctagggctacgttggaagattccaccctatgcatgtcangtcgattcatagttctagtacaaatgacaacagggggaatcatacccaaacacaacaacacaactntcaatcattatgggcgcaacaaagttctttcaggccaccagctccaagaggcagagggggcagaagcttcataggaagatatggagatcagcctacgaaactggttttgtttgtttacggcgaagacaaatggcttaccacaatgacgtgccaagtcacgatttataagcacaaagaaattgccgaagatgatacacgacagaatcagccaaagcaggttctgcataccgcttcgtgctactcttcctacgcnccggagtatgt

SEQ ID NO: 78632 - DNA, 491 bp, Zea mays
  unsure (1)..(491): unsure at all n locations
tataagtttctggatgagaagtggtcacccaagttatgttgatgaancaccttattatctatctggaacgaatccatgtgggagttcgcaagagaaaggattgcgtgttggcatcgatgcttcttcaataagctagctgccaagcgaaacctagaagcctgaagatgatnctgagtagccagaaccagcgtttgcaatcagcaactatggatggcaatgggtcgggttcggatcgggtatggtaaatatccgcccgcgacaatacccgcgggtattactcatacccgcccgcgactatccccgcgggtaggattttgtacccgtgcccgtacacatcgtgtatcgggcgggtatcggatacccgcgggtataatcacaaaacaatatatgagtactgttacagaaggttgacacaacaatatataagtacatagcgtttacacttgaaccanacaatatatgagtactgtacaaaacaataaatgagtact

SEQ ID NO: 78633 - DNA, 487 bp, Zea mays
  unsure (1)..(487): unsure at all n locations
cgattggacaacatcagccattaatggtctgtattcagcctctggttgaacacacatggcagcaatagcagccacttggacagcatctttcaaggagtattgaccttccaatgctggatccaagatccgcacaactttttctcggtcagtgagcatangcaatgcctgcagtaattcaacaagtgacaggttagatatataagccatgttgaattaccaccacacaggctgatgttttcaaccaagtacaagagaagcaggtggcattctattaatacatgtcatgacnttgtcatgaaanatcgaagtatagaagcaggaagaaaatgaagttctatgacagcacggaactgaagtaaatgttctcattgaagaactgaagaacatgcaaatatccaattcactcgtcataaccannccttttttttgcagttcaaggagacactttgtgacagtcaatactgatttcatgtaacagctaaacact

SEQ ID NO: 78634 - DNA, 395 bp, Zea mays
  unsure (1)..(395): unsure at all n locations
agtggagtgcttttgtgaagaactttgcgaatctcttttagcgttagtatntntgcgaatgattntgtaaagtgtttgcaaatatgtgcaaaacataataacatgtgtagggtntgtgaatgattatgttgtgtcttgctgatgggttatgtgatgtggatctatcattgtgcaatactacattaaattgtatatctatgtgaatatgtgtataaaaattggtgattcgcgatgcttttgtatatataacagttgttgaatgctaattaatggtatattatcattattaacgactattatatgggcaactttctgtggttggtaaatgtatagatacgactcactgattggtgtaaatcttagtacacaacccacgatggtcgctaatatacata

SEQ ID NO: 78635 - DNA, 394 bp, Zea mays
cactcaagcttaagatgccgggccccaacggggtcatcaccgtcggcctcacgtacaaacacgcgttctatattcttcttttagtgcgtggagtacgccgaggccctcgccgagtccgaggccctcatcgctgacctggagagcctctctaaagaggtgccagacgtgaagcgtcatgccggcaacttcgagccaccggagacaggtaagttcgtccccctcgaccccagcagcgatgccttcaagcaagtccggatccgcttcgtgctcgatcccaaataggaagcagtgctcgtcgactttcttcgcgtgaacgccgacgtctttgcgtggagtccctcggacatgcccggcataccgagggatgtcactgagcactcgcttgacattcgag

SEQ ID NO: 78636 - DNA, 277 bp, Zea mays
ctcagctatgaaattcttcatccaacatgggctagtcggcggtgccagagccaacccatgttattcttatcaattaagcatgtgtcgagttcagctctatcaaaatctactaagtatagctgaccctctacacacccttaaatgctattgagtcatcacttcttctaaagacagtgacacctacatcagtaaaaagacagttggagcccatttgacataattgggaaacagaaagcaagttgtaatctaaggaatcaacaagaaaaacattcgaaat

SEQ ID NO: 78637 - DNA, 460 bp, Zea mays
  unsure (1)..(460): unsure at all n locations
gcttgcattgtctcctgtgaagccatgcctccttatgcccngcgtcttcattatttacatactacgagcaaattcaagtgnttccttctctaattcatgctccgcaactttagcatctaatttcgctctatgaacattatgttgtttaatcatagcacggggatcatgaatagcatctatattaacatctctacatctagtacaaatagaaacatgctcaatggtagatgtatagggtttgcaatcatttaattcaacaatcttagcatgtaaaatggcattctcatttctaagattggaaatagaaacatngcaaacatctaattccttagccttagcattaatgtatcattctcaaacttaacgctatatagagaggcattcacttttcaatcttagcaattagactaagattatcacttctagaaatggtaattgaatatcactaatgtttgacttc

SEQ ID NO: 78638 - DNA, 480 bp, Zea mays
  unsure (1)..(480): unsure at all n locations
agcttgtgcgacttccattccacatggcaagtctggatgccagagccagcttatttttttttatcaattaagcaacgatctagttcagccttggtatataacacatttacccaaacctctggccaaaccttgattttcatccccgaatgtgatatgctcttgcggatcttcattnttctcatatgaggagaacattctttctttgccctatcatgtggtttgtgcgccatctatcgattatccaacttgatccaccagatgcataaacctacaaaacaaagttatgccttgctcttaagtacccacacggtcttgcgtccttctacattagaaacaagcaccttgggtaccgcaacacaagtctttggactcttgtgtttgcccccaacatatttggcaactactatgcctgatttgctagttaacacataagatgcatcaaaagtnttataagatatgatattatcattcgatgcatta

SEQ ID NO: 78639 - DNA, 456 bp, Zea mays
  unsure (1)..(456): unsure at all n locations
cttcatccctacatgtgctaagcggtgatgccacagccagcccatgctattcttatctattaagcatgcatctagaccggcctcttcttttgcanaatcaactaaataatagttgccgtctaatacacccttaaaagctagtgaaccatcacttcttctaaagacagacacatctatatgtgtaaaaagacaattatatcccatattgcataattgacttacagataataaactatatcccaaagactcaactaaaaacacattggaaattgagtgctcattagagagtgcaattntacctaacactcttaccttgccttgattccatcaccgaatatgattgaatcttgggaatacttattcttgacgtacgaggtgaacatcttcttctcccccgtcatatggtntggtgcatcgctgtcgataatccagcttgaaccctcggatgcataaacc

SEQ ID NO: 78640 - DNA, 490 bp, Zea mays
  unsure (1)..(490): unsure at all n locations
aacaattaattcatatatgatgacgaagccgaagccgttgatttgttataatgacgccgaagctaagatcccccgaagattaagtatgagtagactgtanacaaacttatgaaacttttgagataacttttgtaaatgtaactaaacttgtgcttaatgaattctgttcataccttgtatcacgctcttacccttcctttaatgtatgtgaagtgctttgttgtggacgaaattatctctttttgagccgaaggcgaaaaaacaccttcccttcttttcgtacacagcgaagcatagaanacaacatttccctttctttcgaagctctcccttctgtacgcgaagaagctcttctcttgtgccgaagcaattacttatgccatgatgatgaatatcctacatatgcctggatgaatggttatgaatgcaaatgctatgatgtaatgtgatgtgcgaatgaatgtccanacacatatccgaagctatactc

SEQ ID NO: 78641 - DNA, 315 bp, Zea mays
  unsure (1)..(315): unsure at all n locations
tactcagctttcctcaatactcctnnttgatgcgtgccattatacctaacccttgtatttctctactttacctcgaggttatcatgtacccatattttaaagctccctctctcatttcagctcaagagtgttgtcttacccacccgctcttggtcgttccgctttcctctatcgcattgcaagccttagcgtttgctcgatatcacccttaccttcctaatatctagatctttccatgatgcttatctcatgtctacctcttgaattaccatcctttccatctcgattcaggaatggtgtttacttaccctaccc

SEQ ID NO: 78642 - DNA, 350 bp, Zea mays
  unsure (1)..(350): unsure at all n locations
cgcggacccgcgttaccggaatagcacaatcgtgctcttctttgttcataaactcgncggcgcacgtggaccgggtaagcctctggacctttttcaaattcgttgcgcgcatggcctctacatcaccccgtggagctcctcgtgcaccttaaatgaactataccaccgcggcttggccggaacaggagccgccgccgacccccgctgtctgtgctcgtggccagggtagctccgaccacctccgacgccgacccgcacaccgacgtgaccgtcgtgacctcccatacgtcactgaccaacccgctggagctctactggcgccggtaagcctctgcgccgtaatctatact

SEQ ID NO: 78643 - DNA, 511 bp, Zea mays
  unsure (1)..(511): unsure at all n locations
cagcttcgctcatcttattgggattgctttgagtctgtccaatttcttagtctttcgtgagctcctgacttcatgaatagcatatgcccttgatccgaacgtatcttctgcatagatatgctggatgaagaaatgcttctaatgcattgagtgttccacgaccaatgattgcattgtatggggtattccatgtcaataatatcaaactcaacctgttcagttcttgtattgtggacaaatccgaaggtcactggcatcgtgatcttgccaagtgctacaatctgcctttcttcaaaaccacaaagagggtgtgtagcatcatgggatttatcctctgggtcttgcatctggctaaaggccttagcanatttgatattcgctgcactgcctgtatcaaccagaacattgtggaccagaaatcccttgatgacacaagatatgaccatagcatcattgttagggtaatcttgagctgaaggtcctcttgggagaaggtaatcgngatgtggga

SEQ ID NO: 78644 - DNA, 284 bp, Zea mays
  unsure (1)..(284): unsure at all n locations
ctggatgagaagtggtcacccaagttttgtttatgaagcactagaagactaatcgaggaaggaatccatacggaagttcgcaagagaaaggtttgtgtgttggcatcgatgctctctcaataagtagctgctaagcaaaagctataagcctgaagatgatctntgaatagccagaatcagtgtttgcaatcagcaaccagatgcctctcaaaggccagaatnntgtgaagctctatctcctcgaagagtctgcacagtgaagatatgtagctgaagtaaagcta

SEQ ID NO: 78645 - DNA, 273 bp, Zea mays
  unsure (1)..(273): unsure at all n locations
gcatgcatctagaccgggctcttcttttgcaaaatcaactaagtaaagtttgccgctaatacacccttaaaagctagtgaaccatcacttcttctaaagacagacacatctacattngtaaatagacagttataacccatattgcataattgactaaccgatagcanatatatccaagagaactcactanaacacattagagatagagtgctcattagaaattgcaattntacctaacccttntatcttgccttgattnccatcaccgaatat

SEQ ID NO: 78646 - DNA, 284 bp, Zea mays
tttttaacagtgtcagtactcttaaactaccaaaactgccttacctccttaagcatgatcatcctttttaagacaagccctactcgaatgacgtgagccattgctatgagatacgagcaacgattatgatacagaaactggaatgaggcaggaaacaattccaacttgacaactgatcctcccatggaactgtgggactgtttttagagaacattctttctgctggttgccccgtatagacactgacccgtgtacctcaacaatagttgctagaccacgttggc

SEQ ID NO: 78647 - DNA, 245 bp, Zea mays
  unsure (1)..(245): unsure at all n locations
aaacacagttacgttaacgcctttgcaggttgatacctacaatcctttctcaggtacctggcaaggacaaaaacccttttatttgtttattatactncaacaacaaagatactatgttgacatactatatacataatctttcatgtaagacggctatgttctacacatatgcggacactttacgaaaatttcaaacttatctagcttactatgaatatgaatctcacagtttatgattcgacttg

SEQ ID NO: 78648 - DNA, 88 bp, Zea mays
  unsure (1)..(88): unsure at all n locations
gcgagaaaagagacgacaccggcgggggcacacttacaatgatgcgatcgacgccttgcagccacgcgcgcgcgagtacngncgggat

SEQ ID NO: 78649 - DNA, 88 bp, Zea mays
  unsure (1)..(88): unsure at all n locations
gagcttcngatgtggagggatcatncaagctcgtgatcttcctcgagccttcgatcatgcactcaaaacttacaaaagtnccgattac

SEQ ID NO: 78650 - DNA, 270 bp, Zea mays
gaccctagcgatacacactctcgtcgacgactcccttttatgtggggtgttctttcatttgatggctatcactttgtcattgttattctttttgagatgattatgtatggtagccttcctatgcactctggtgatgtacgtgttcgagagaatgcttgcttgccttttgtttcttcctgtttgtcaccttgcactaataagacttgtgctctttcttgtgacatatgaagcaagccataatttcaaccttattaagcttctctacttctt

SEQ ID NO: 78651 - DNA, 226 bp, Zea mays
  unsure (1)..(226): unsure at all n locations
ggtacatgttatatcctggctggtatcctgagcataagaatatgagaattcattctacgaagtctcanttctggtctcatcatgctcttatgtataagaatgagacatctagttctaggcattctactcatattataatgcctaanaagaanactcctactgcatcaaatgaacctaatgttntaattaagactcttgatgcttcttatgtgcttactaacaaatc

SEQ ID NO: 78652 - DNA, 299 bp, Zea mays
  unsure (1)..(299): unsure at all n locations
tcagcttcgatctctcgcttacaactcttgtcaacatgaccacatataacttgggaatccgtnaatagatacctccttcttatccncattgccttcaactttcgaagccccanaagcaaagcttcgtattcagcaatattatttgtgcaactgaaatcaagtttcactgcatagcatgttctaactttggaaggtgccactaaaacagcagccgcacctgccccgaagttccccaggaaccgtcgcataacactgtccaagcttcggcatctttacttgcttcttcctccttagctcct

SEQ ID NO: 78653 - DNA, 199 bp, Zea mays
tatgtgcaaaacataataacatgtgtaggttctgttaatgattctgttgtggtgctcgtgactgatctagttgtggtgctagctcttgtgaatgatataattgtgatgttttgcgaatgatctaataatattctggtgcttgtgtttatgtgatgtggatctatcattgcgcaatactaattaaatatgtatatctatg

SEQ ID NO: 78654 - DNA, 143 bp, Zea mays
atcattcacacaagaacatcatgacgaccgacaggccgcttgagctactccacatggatcttttcgacccgatagcttacataagcatcgacggaagtaagtactggctagttattatggatgattattctcgcttcacttgg

SEQ ID NO: 78655 - DNA, 169 bp, Zea mays
  unsure (1)..(169): unsure at all n locations
tgcaataacaatgaatgctgtggaacttcacacctacccgtctatttatatagtgctgcaggtaacaaggtgaatcatcangatttttacaccaggcaaacaactgcttacacccactgcgtggtggaccgcagagaccaaatagtaaccctgcatggcgggaccgcta

SEQ ID NO: 78656 - DNA, 332 bp, Zea mays
  unsure (1)..(332): unsure at all n locations
actcagcttatgaccaactaatancacgcttttgacactngatactctactgagtatgttctcttaaagcangtatggcagcacaatgttcatcgcttcgntggcctcacaagtagaagttagtgatatatcacagagcctaattgtcaatgagcttacggctcggcacaaactgtcaccggcagttcgcacagtttcctttatgtcatccatcgcacggaaggtnggtgtccatatattcctcaaatggttacatacctaaagaataaataaaaatganagtcatatagtaaattcacgtcagaatcaaacaaacatttaatatagctcat

SEQ ID NO: 78657 - DNA, 263 bp, Zea mays
  unsure (1)..(263): unsure at all n locations
cgtaaacaggtgggaggagcgcatcacagcacgaatgtgatgaccacatcaagactcctggagctgctacaatggacctctacggacccgtgcgctatctaagcatatgaggaagtaacgatgcgttagctattgtcgatgacatttcccgcctcacttgggcgttctcatctgaggataacgtctgacacccaagggaccctcaagcgctccctcacgagagctcancacgagtctgagctcaaggcgaacaagataaggag

SEQ ID NO: 78658 - DNA, 242 bp, Zea mays
  unsure (1)..(242): unsure at all n locations
ccacatgtcattgactcatgtggacccacatgtaagtgagatagtaatggtatgaatccaaagtggtgatcttttaatggtatggatccaaatttccctttggtattntatgttatgcaaaggaaagatatcttatttngtggcaattaataacagaaactagtcattggcctatgatgtcctggcttctaagatggtgatgtcctggcccaagacttaatagaattaatagagtattcata

SEQ ID NO: 78659 - DNA, 221 bp, Zea mays
  unsure (1)..(221): unsure at all n locations
caaaataagagttcttgggagtgaagattggagtgactccaacgtcacaagattgntcatgagagcatataaagaacaggataagagtcttgcaaggatgattanggatcgtgatgactatgangatatgacgcctcatctattatttgcaaagattcaacaacacgagtccgaagaagccctatcaagtcaggggactctatgccttgatcactaatgaa

SEQ ID NO: 78660 - DNA, 350 bp, Zea mays
  unsure (1)..(350): unsure at all n locations
ctaagctacccatgangagacatgtgaccagntaaaatggtctcattcatcaagcctacatcgatatggttcttaatcgactcagacngagacactacactgagactctcttctcgngcaagtcacccacccggtctcagctttatcgtttcacacccaaagtttggtacctgttagaggtatatctttcttgatgttgaacccatcacggccatgatggatccaccatcaagttntatctttgaaaacatcccatcccatttgaagcatcatatnttgcaaaacaacacatnttgttctctagagcaagactaagcatcataaaaacctttttatataacacgtgatct

SEQ ID NO: 78661 - DNA, 318 bp, Zea mays
  unsure (1)..(318): unsure at all n locations
tatgctcactgccttgctcatagtacagaatctgggatctgttatggctggatgtgntatagatgcaatgggtgcggaagcagntcgatcagccgggtaggcttcttgatgtntcctgtgtccctatttggcatgctgctatggagtattgtgaaaacctactaatttatttccaggccggagtttgctggcgatctacagtcattatcttggtcatcgatggctgtaggtgggacttttgggagtttactgggaggatatgcattatccaatctcccaatacatgcaatatatatggttntctcagtccttccattc

SEQ ID NO: 78662 - DNA, 228 bp, Zea mays
tgtgttatggtatcgcgagaagataattgaagtggtttcaatgtgtgtcgcataataaaagtcatgttactgaatagtagttttatttaggatgagggatgcgcgcggatttgtatattagagaaagaaaaccaagaaagggggcatttacttattattgaatgagcagtcatgaggagagcagatatataactcatttatgtgaccagaagaggaggcaaaataaga

SEQ ID NO: 78663 - DNA, 264 bp, Zea mays
cagtgagccttcccaaactacacgcgcgtgatttaatgtatcagcagtctacatgcgagagatgctgataggatatatctcttactgggttttgagaaatcaccaaactaagatttgaactaacagtgatagaaaaaaatacaacgacgatagactcaatgaagtctggagagctacatgattttctccctaaatggtagagaatacttgaagtacagtgaacaataacgtgcggccaacgtgtctacggttacactaaaacta

SEQ ID NO: 78664 - DNA, 319 bp, Zea mays
  unsure (1)..(319): unsure at all n locations
ctcagctggattgcctctacttcagcattcatccagtntccatgtgtcgcaattaaagaaagctgtccatctctagtcttcactggtcagctgcctacctctttggatgggttccaagtacctgaacaattctgaagcatcgtgttggttntgatgggaagtcgcttgtgcttgtcaaatggtctgagatgcatccttcgctggccacttgggaggatctcacagaatttaataatatacatttgatctcgtaaatggtattactttattntataaattttggntnnaattgattntttttgactctgcaagaatcttg

SEQ ID NO: 78665 - DNA, 300 bp, Zea mays
  unsure (1)..(300): unsure at all n locations
ctcagcttcgcgatttggctccgatcttctctgtaangggacttataanacaaccgttttcgtctcctctcttgtggccgcgtggcctgaaggcgcaaccattgcgtcagtggttagttgcttggaggaaaatggccgagcaccacacctcaccttcccttcagggccggccttatcatcctttnttttaagaagaagccggcaggcggcagggatccccgttcgctggataaaaagagtgaatttgcagtgaccctaacaacccgggaaactacaccacgtaggtatcgggacgcactt

SEQ ID NO: 78666 - DNA, 232 bp, Zea mays
  unsure (1)..(232): unsure at all n locations
aactcagctatctataaagttggggaattttgggattattaattactctctataantccacaatatttggattttggctatattaaatacccaataattccctattggaactaanaatcatgaatctatctttattanatactatagaagattataagcctagcaaacatggtctggggattttagcatttctctataattntctangaattctctaagtccataagaaaaa

SEQ ID NO: 78667 - DNA, 195 bp, Zea mays
ttgcttgacaaatacaagacttattttgaccggttaatctttactaggaagcatagactaagagttttaaagatgtgtcttgacacttctatttgtgacagactaataaaagtgaaaatattacacaatggtgacaactcagttaatttttgatctaaatgaaagctaacaaccatagcaggggtctgagttcaa

SEQ ID NO: 78668 - DNA, 141 bp, Zea mays
acataagaacatcatgacaactgacaggccactggagctcctacacatggacctattccgcccgattgcttacataagcatcggcgggaagaaagattggctaattattgaggatgattattctcgcttcacttgggtatt

SEQ ID NO: 78669 - DNA, 227 bp, Zea mays
acttaatctctattgagccaagctcaagattaccgtccaccctcttactaatggaatcacacaaacaagatcactctctctatcagagagagcgttcacacaagagcttatgacactcagaaccgatcagaccatttggtgctcataacacctcattctaccattagttgtcctccgtgaacttccgtgggctgagccataatacccctcacaataacaattatttg

SEQ ID NO: 78670 - DNA, 255 bp, Zea mays
  unsure (1)..(255): unsure at all n locations
cgagtcgagctntgttccttgtcaccacaccatgctcgtctntgttggtgcggaagacacacttggtttctacaacattntggttangacgtggaactaaatgccatacctcgntcctcgtgaaattgttgagctcctcttgcatcgccatcacccaacccgaatcttgtagtgcttcctctaccctgtgtggctcaatagaggaaataaaagagtaatgctcacaaaaatgggcaacacgagatcgagtggtta

SEQ ID NO: 78671 - DNA, 267 bp, Zea mays
  unsure (1)..(267): unsure at all n locations
tctaaagggagagcacattntatgattaacacatgttncatttgagaaagacaggatttgtatctcatgccaagcacggaagcaagttggtgcccatcatccacacaagaacatcatgaccaatgatggccactggagcttctacacatggacctattcggtccgattgcttacataagcatcggcgggagtaagtactggctagttattggggatgattattcttgtttcacttgggtgttctttttgcaggaaaaatctcatacc

SEQ ID NO: 78672 - DNA, 224 bp, Zea mays
gagaaagacaggatttgtatctcatgccaagccgggaagcaagttggcactcatcatccacaccaaaacatcatgactagtgacaggccactggagctcctacacatggacctattcggcccgatcgcttacataagcatcggcgggagtaaagattgtctagttattgtggatgattattctcgcttcacttgggtgttctttttgcaggacaaatctcatac

SEQ ID NO: 78673 - DNA, 309 bp, Zea mays
  unsure (1)..(309): unsure at all n locations
ctcagcttgttgcctccgacaccgttttggatgggtgcgtgcggcactatattcgtttattcacccaacatgagttnggacctaagttgggattggcatgttcttgcgagaacgaaggatggttccgtggcaaaactcgtgcttgtatgcacgccatacccgttttggaatgggtgacgacgaccacgaattgcgcgaaacaccccaacatgagttttggactaaagaatggttgggcatgtggtgcgaaaacaacaatggtctggggcaaactcatgcttgatgacccgcacccgtttcgaatgggac

SEQ ID NO: 78674 - DNA, 334 bp, Zea mays
  unsure (1)..(334): unsure at all n locations
attatatctacaactcatatcatctcgagcaggatattgatagtgtaggaattaaaggataatcctgtgtggaaaatcaaagcctacaacatggaggaaagccaaaggatggtaacacttatgtctttaagtgcaagtatcttcaatcatcatttctttagtgtcttgtgtagtcacattataaaatggagcacttaaaatatttttaaattatgtcatcattctttgaagaaactcctctcatatggtagaatgcatattcatcatttctatgttatgtcaatctacactgcttaaatattgtangtacctcatggcatgtttacactaacca

SEQ ID NO: 78675 - DNA, 322 bp, Zea mays
  unsure (1)..(322): unsure at all n locations
gcttgagagggttgaacgtctgattccaactaaatagcaatactctattaagtagattctcttttctctaaccaaacaactcctgactgtattagcaatggataatacatgttcctaagcgagattggatccanagatatagaaactatatttttaaaaggattctagaagaataaaattacgtgtgataagaggatttgatgatttgacacattacatattaacaggtaataagaagtctattatgaacaagttatcgtcacagaaaaatataacgtgacagtcttgatattgataactaaactcttcaatgaaagtagac

SEQ ID NO: 78676 - DNA, 272 bp, Zea mays
  unsure (1)..(272): unsure at all n locations
ctcagcttgccatacttgtaaagcaacaacatctgccagcacaacaattgcagaccagaccagtntcttggtctttcgcatgctggggactggatatgaatggacctttcaagaaagctcaaggaggatacactcatgtattggtagcaatcgaccaaatcactaaatggatagagntcaagcccaatgcttctttaacctctgcttaggcccgggaattcatacaagacataatattcagattcgggataccaaacagcatcataaccgac

SEQ ID NO: 78677 - DNA, 264 bp, Zea mays
  unsure (1)..(264): unsure at all n locations
ctcatacatactgatgtgtgcggaccaatgagtactacaactacgggaggatccaatacttcataaccttcactgatgaatttagtagatatgggtatgcctacttaatgagaacacaagctgaatccttataaaagttcatagatgttcacaatgaagtacatatcagcgtcgcaagaacactaaagcactgcgaacagatcgtggaggtaatatttgagtcatgagtntagcaatcatctaaagagttgtggaattgtccac

SEQ ID NO: 78678 - DNA, 261 bp, Zea mays
ctttggatgcctacctctaatctatgaggttgggctataaattataatacttggagacttggactatgaaaactctgtaagggatgcccgtctaatcaaaatggaaaaggctgctgaaagggggacaatatttgtaaatctaaactgaaatctaccttgatattacctctgcggacactggaataataaatggaaatgctgaggatccatgggctatgaatactgcaaatctgcaggactatctaacctttttttgcatgt

SEQ ID NO: 78679 - DNA, 379 bp, Zea mays
  unsure (1)..(379): unsure at all n locations
tctcctatacaagcgccgcacttactgtatagtgtgaagctgccacatactatatcagttgatcccctggcgtgggtggagntagcgttgtcagatctatcaagtattgcttcagctcttcgaaggctatctgctgagctaatccccattaaaagacttcggctgattntagcacttcgaagaatggtanatttctctctgctgatctagatatgaatcgattcanagatgccaatcttcctgtcagccgttgagccccttctttgtgcttggtggctccatccgaagaatagccctcgatttgttcggattagcttcgatccccttcgttgaaactaaacaaccaaggaattttcctttctttactccgaagacacat

SEQ ID NO: 78680 - DNA, 186 bp, Zea mays
catgtaggcatccaaggaccctacattatgaccaagtggtcccatatccctgttaccattttgttaagatgatctttcgtcttaaggattatccacatacagatgcacatggtatcgcttgtgtcatcaaaggctatgtggtgcacaatgtgccgggtcaacacatgcagcgccgcatacattata

SEQ ID NO: 78681 - DNA, 212 bp, Zea mays
  unsure (1)..(212): unsure at all n locations
ctcagctgagacagacagtatgtgtctatagctcatgcaagctntaanactccagatattatattcgagatcaatgactcaccgactaaatccttccggtcgcagagcagcaaggcacgtcctcgaatcaccgatttgcggcaccctatagaacacactggtaacttgttggccaaaggaggggcgatggtcaactgacgatagcttgtctg

SEQ ID NO: 78682 - DNA, 208 bp, Zea mays
gtgtctgcacggtctttcaattctgcaaacgaactacaacgattttcctcacaaacaacatggaaaagtggttgctctcttatgcagcaccaatacggtataccgaaacgcctattatttttaacacgagatcggacaaatgaggacggcaaaatttaaatatgaacagaatttcattaatttgaacacaactgttttctatgatcat

SEQ ID NO: 78683 - DNA, 338 bp, Zea mays
ctaagcttcccaactggggctgcagctctgcaaccgctggacctcaatcaggagactctctctctttcttaggcccgaagccagaagaggaaggctgtcagcccgacaccgtcagaggatgagctagaccaagatatcagagacatggagatgcttcatcaacaggtgcagaggaagaatgaacagatggccaggctagctgaactgcaaaggcagatagacgaagcctctgaagaagttcgtcatcttacccaggatgagccaaaccgaaggcctcacacccagaccttcataggagggtttctcaacgaaaagactggttgacaacttcatatgga

SEQ ID NO: 78684 - DNA, 424 bp, Zea mays
  unsure (1)..(424): unsure at all n locations
cctagctggtaactgtgaccatttagccagntggtgtcactttgactgatgggattattaatttttnttgccatttagctagtttcgaaggtcaaagcagcagtgaaggggtaagtaaatagaatagatatgagagtcatgttacatgatgttacgtgataatcatgtcccactgttatgtaggagtgtatangtggtccgtcacatagaaaaaaaaggaattgtacgtcgtgaacattggaaacgaagagtaccatatgtagaatagaatagaaaagatagatttcgtatctacaagtggngatattctaaaaatacgcgcgtaacgtatgacttcacanaatagccagcacacaacttgctanatacacacttcatcggagaccattgtatagtgatatggatatttattttgacacctatt

SEQ ID NO: 78685 - DNA, 240 bp, Zea mays
  unsure (1)..(240): unsure at all n locations
catatactcgatggggtgtttgaaaaagtgtcttanataaacantaattaagacaggntattggacaaaatgacttaaacaaatatcctttttggacgggtataaactaacaacgtcttatgtaatatctttttaagacgngtngcaaccatcttaaaagtgggacatcttttgtgactccatcannattggacactngagaaatgtcttaataagtgaaaattaatcgtctcatataat

SEQ ID NO: 78686 - DNA, 141 bp, Zea mays
  unsure (1)..(141): unsure at all n locations
atgatagcctgaataacaatccagcagactcataagctctgatgaagctgctgcatcgactagagaatctatccttggcaatggaaactcgttcttcngacaagccttgttgagatcagtataatcaatacacattctcca

SEQ ID NO: 78687 - DNA, 152 bp, Zea mays
  unsure (1)..(152): unsure at all n locations
attctatccttagtgggatgtaccatagtatangntaaattccttgcaatataaaatgttcaatagtgcatataactttgacatcaactatatgtgtgcactatattaaaagaatttagtctatccctttgggtttcaataatgatgattca

SEQ ID NO: 78688 - DNA, 208 bp, Zea mays
  unsure (1)..(208): unsure at all n locations
gcatgcatctagactggcctcctcttttgcanaatcaactaaataaagattgtcgtctagtacacccttaaaagctaatgaaccatcacttcttctaaagacagacacatctatatttgtgaataaacagntatatcccatattacaaagctgactcacagacaacaggttatatccaagcgactcaactaagaacacattagaaata

SEQ ID NO: 78689 - DNA, 370 bp, Zea mays
  unsure (1)..(370): unsure at all n locations
tctcagctgcgagccatccaagttattgagatgacattagttcaatggcttctagtgtatgaaccttgagcaatgaagaaatataaccactgctcggtattggtcaccggacatcactaagccttttatgtatatgtgatgcatctggcagtgggctcggctatgtactgatgcaagaaggccgagtaattgcgtatgcttcaaggcaagtgcgccaacatgaggagcattacccaactcatgatctggagctagctgctggtggtcatgcnctgaagaattggcgtcactatctgctggganatatctgtcatatatatacagatcataaaagtttaaagtacatcttcacccagtcagaattaaatat

SEQ ID NO: 78690 - DNA, 423 bp, Zea mays
  unsure (1)..(423): unsure at all n locations
cttgatctagctgaccggaccgagctaatgatcgaactaangatgcaactggaacctgctgaaaaatttagagaaatcttgtatatatgtaaaaattatattaaaataatctaattataattgtgctacttgaataattttacctttcgccatgataactgcttgagggacaaatagatttttgagcgaagcgaaaacacctccttttttctcacaacaacatgaaactacttttttttgcgaccttatttatagcgaacattgctggttgatgtatgagagagaccatgttgctaatgaagtataatgcaagatgagaaatgcgtcaataatgccaaccaccatcgaagttatcaaacttattctaagatgatgaattcttgcgtattttcgtgaccgtatttcgtgagtctgatctagacg

SEQ ID NO: 78691 - DNA, 388 bp, Zea mays
taaaactaagctgctacagcctcttacttttcccaagcaagaacactattgtatactaccacactcaacaagaaagaggcgggaactcttgaacctgagattgaactccttgagtcctcaaacagggcgtacaaggccttcttctgctagtgttgcttgagcacgctgtcgagaaatgacagacacacagttgattctgggacaaccttcttcatcatcttctcgttactatcttctttcactttttagttcacttctcacttttcactgactcgatctttctcacgctcattccactggaggagtctatcacagagtattactatcatacactggaggaaaccacagactatgaaccatgtgcaacaagtctcaacccaagaatcac

SEQ ID NO: 78692 - DNA, 391 bp, Zea mays
tagcgactggggctgcagcactgcaaccgctggaccccattctgtttatcgtctctctccgggaggcccgaaaccagaagaggaaggctgtcattctcgctattcaagaggatgaactagaccactagatcatggccatggtgatactacatctacacgtgcccaggaagaatgagaatatggccaggctatctgagctgcagaggcagatagactaagcttctgaagaagtacgttcccttacccacgatgagcagaaccgaatgcctcttcaaaaagaccttcatcacgacaggcttttctatgaagatgactggtatgataattttcatcatggaaattttgtgtcgacgatgcttattctctgttcgctgagctgtaggctacacct

SEQ ID NO: 78693 - DNA, 495 bp, Zea mays
ctaagcttcttagggagagcacattctaggactaacaaacgtgcattgtgatatatacaggatttgtagcgcatgccaagcatgatagcaagttgggtcccaacatccacacaagaacatcatgacgaccgacaggccacttgagctactccacatggatctattcggcccgattgcttacataagcatcggcgggagtaagtactgtctacatattgcggatgataattctcgcttcacttgggtattctttgtgcaggaaaaatctcttacccaagacaccttaaagggattcttgagacgggctcaaaatgagttcggcttaaggatcaagaatattataagcgacaatgggacggagttcaagaactctcatattgaaggctttcttgacgaagaaggcatcaaacatgagttctcttctgcctacaccccacaacaaaatggtgtactggagaggaagaatcgaactctattgacatggtaagaccatgc

SEQ ID NO: 78694 - DNA, 461 bp, Zea mays
  unsure (1)..(461): unsure at all n locations
ctaagcttacatcanaactcttcctttcttgttctaagctctctgatttgctgaggagttcatcgttgaatctaccaatttcgatttgggcttctgccaatgaaccctccattatctgaagaaggaactcctttttctccagagaagcttcgtgatctttgattttcttttcaaagccctcgattataatctcaatctttttatcctcaagatctttgtgcatcctcagtgctttgcttagtagcatactctgcacaaagtagtcttcatcagaaatttttttgcttcatcacaaaaattataaagatgaggaaaatagttttaccttaaagatggaataaaatatgccaacaatatgctatcgctggtaactgctaatgacaacttcaagcttcggaaaaccaacactcttcgatagagtgctgataatcttcgccccagtgcggtctcgaatggatcct

SEQ ID NO: 78695 - DNA, 426 bp, Zea mays
agatgctaccatctatacctaatattattaaagcgcgaagacatcttcatctctcggtctgtcatccctcgctcccacccctcttgttccatcactcactctgactgttctcgctttcacggacgtgcctcactcatgcctttcttcttttgttccttggttcggcatctcttacttaacttgcagatgcaaaaccttcattggcattgcaccgctcatgtggtggcctggacaaccgaacccaagcccatgtgcatcatgactagacacatttataacctcgcaacagatgtatacctagccctatttatctcacagagtcacaattataacctcacaatagatgtagacatggccacctatttatgccgagtcgatctgtaaactattacctatatatgactaactctttatctgtgctaacat

SEQ ID NO: 78696 - DNA, 307 bp, Zea mays
atcaaaaatggatacaaccaattcctgacctcgcgcgagtgctataaaaatcactcgacttctaccgagatcctgatttagcatagcaactacttgacctagcatactagtattcatctcaaaaggaatcctaagttcatgcaactaaaggtttcaagcaactcctacacttaagtgcacattacagtcctacaagcattaagtgtagtaaagtagcatatattaacatggttatgcataaaaccggcgcttgcctttaatttaacacttacgtagtgtttgctggaggctactcgcttggcgagca

SEQ ID NO: 78697 - DNA, 334 bp, Zea mays
cttcatcatcgccaagatttttatcccgggacatacaagctggccaacgatcaatgcgaggtctacagcaacgcttggaacatccaacagctacgtcgcttttacccttaaaaatgtttcaagttgttcatgtatctcacttttatttacatgcataataaaagtctaaccgctaaggaaggatcagccttgcctcggtaaagcctaaccctccctcagcggctataaggagggaaccccctctgtgtcaaaaattttctcggagaagtcttttactagaacgacctttcgtgctattcgactgcggcgataacaaaattctaacgacaagcga

SEQ ID NO: 78698 - DNA, 485 bp, Zea mays
  unsure (1)..(485): unsure at all n locations
ggcatagaacaattgngatgttatatttcattctatgcatttcacttaactttaatgtcctagcacataattgctgaaagaagttacctagttcagcaattgctatgtacatgtcattatccatgattcctcgtagagcggcaggtaaaatccgttgcaatattatatggcaatcatgagttcataacccttggaggttgcatccatcagtagtaatgcatgttgctaggtttgaagcatatccatctggaaactttacacttcttataaagtcatagaaagcaagcttctgttttttatccattgtgtatggagcaggaggagcgttatatgaatctccatcacgcttcaagtgcaaagattgtcttatacccatgtcttccatatcaagcctagcattaacactatcctgtgatgtctcgggaatacctaataatgtaccaagaattgactcacatatattttgttcgatgtgcatcacatca

SEQ ID NO: 78699 - DNA, 455 bp, Zea mays
  unsure (1)..(455): unsure at all n locations
ttacagcatgtccgaagatgacggatcgaaccgtcttattgatagaatgaccttctagttcataagggtctgagtcaatgctgtaaacttttatgagggacatgaatgtaatttctcacaggctgtgtcctgtgcctataaatagtgaacagtattcctttactgttcacgcattcctgtaattgcaaacgcttcactcgggaattatctgtttgtcaagacaaatgtataaatgtatctaaacattatgtttaagcatcttagattcatataataagatatgtgaataatgtcacttatttccgatatatttatctttaatgtttcacattgtacattaccttgtattatctttgtaagtttaattactgctcatggtcttcgtgcgaagcttattaaatccttgngaagataatgcttcagcggacgaaggacattgatatttaacaatttat

SEQ ID NO: 78700 - DNA, 373 bp, Zea mays
  unsure (1)..(373): unsure at all n locations
tggacttaacacagcaacctgtaataatcatgcgttttgagcatcagaatcggacccctcttagaataagacgaattggagtgctatagtccttctattctatagnttcggcttctggaacaagatgctaattagtgtgtccaaacatggggcattactgtaccagtactacttatgcgaagtatggctatgacgagcagaaaaggcaattactagatgctcctataatcttctatttgtcaggtagctatttagaaagaccatcctgtttttgcctttttgttttagactataccagtctcctacacacaattgagttatataaagtattaagtggaaaatatatagntgcttcctgtacacctcattgtat

SEQ ID NO: 78701 - DNA, 270 bp, Zea mays
agcgtacttgaagcgctcgcctccacgagccgaggatataatgccagctcctgctacctgcagcttcagcgagccatcacaatacatacgccatacttctgcagtgtctggatcgtctggtaccagctgaactggccactcttatactaaatcaaccactgcttggaatttgatggccgtgccaggtcctaactcatatcaggagataccagctttcaagcccacttggctattgagcaatggtttcttgttgtgataatgcccctattg

SEQ ID NO: 78702 - DNA, 481 bp, Zea mays
tgtagagggagaacacatctcgggactaactaatggtcattttgagaaagacagggtttgtagcgcatgtcaagcaggaaagcaagttggctcccatcatccacacaagaacatcataacgaccgacaggccacttgagctactccacatggatttattcggcccgatcgcttacataagcatcgacaggagtaagtattgtcttgtaattgtggatgattattctcgcttcacttgggtattctttttacaggaaaaatctcagacccaagataccttaaaggggttcttgagacgagctcaaaatgagttcagattaacgatcaagaaaataagaagcgacaatgggacggagttcaagaactcacaaatcgaaggcttccttgaggatgagggcatcaagcatgagttctcttctccctacacaccttagcaaaatggtgtagtggagaggaagaatagaactctactagacatgtcg

SEQ ID NO: 78703 - DNA, 479 bp, Zea mays
  unsure (1)..(479): unsure at all n locations
tagttagtccaagtgtttgtgttgngcaattcaaccaccattattatatatgaactangtgtaagcctaattccctttcaatctccccctttttggtgattgatgccaacacaaaccanagcaaatatggaagtgcataattgaactagtttgcataatgtaagtgtaaaggttgcttataatttgagccaatatgaatacttacaagatatgcgtggattgtttctttcttatataacattttggaccacgcttgcaccacatgttttgtttttgcaaactcttttgtaaaacattntcaaagttcttttgcaaatagtcaaaggttaatgaataagaaatttgcaaagcattttcaagaatttgaaattatcnccctgtttcaaatgctttttctttgactaaacanaactctccctaaaagagatccttctcttagtggtcaagaggagtttgatatattaatttttgaaatacta

SEQ ID NO: 78704 - DNA, 330 bp, Zea mays
  unsure (1)..(330): unsure at all n locations
gatgtccctatagctagcctggtgggtggtgggttcttctgaagttaaacatcatcttacttgaaggtggaaaaagccaactggtgatggttgcgactgcacttgatggacacagtcacgaatcgcgggcgtattatcgtattttgcgcatcgtgacgatgaacatacaaagaataatgttcacaccatgtaaattctatgactatcggngtaaaagtacaaaataggagtagtcatgttacatacttacatggtgaaaataatataatacttgattcgaggactatgactagcaccgcgctcgcgtagctcccacgcggtgcgacaccg

SEQ ID NO: 78705 - DNA, 492 bp, Zea mays
  unsure (1)..(492): unsure at all n locations
tctacagggagaacacatgttaggattaacagatgttcattttgttaaatacaggatttgtagcgcatgccacgcaggatagcaagttggtgcccatcatccacacaagaacatcatgacgaccgacaggccgcttgagctactccacatggatctattcagcccgattgcctacataagcatcggcgggagtaagtattgacttgtaattgtggatgattattcttgcttcacttgggtattctttttgcaggaaaaatctcaaacccaagagaccttaaagggattcttgagacgggctcaaaatgagttcggcttatggatcaagaaaataagaagcgacaacgggacggagttcaagaactcacaaatngaaggcttccttgatgatgagggcatcaagcatgaattctcttctccctacacgccacaacaaaatggtgtagtggagaggaaaaatgaactctattgacatggcaagaacatgcttgt

SEQ ID NO: 78706 - DNA, 414 bp, Zea mays
  unsure (1)..(414): unsure at all n locations
tgtcactatagcagtgaccggcataccatgtatttcttctacaataattggnagaatgactcggccatgttactacactggaactcatatctccatccacctaagtcgtgagctctcgtccacttctccaaatccggcatcaatccattcaaccaatctctaccttcggcatttgttgcgactttgagctattctaacttttctctaaagaacttgtcttccagctgtcgacatgtctcctggaaaagctcaaagttatccttgacaccatccttacgcagaagattctcagcaaggtgtctaagtcaccacctgtgatgcaaacgatggtacccatcgatctgctcacggaccgcgttgagtattccctgtgccgatctgaattacaccaattcccgactgagccaccacatg

SEQ ID NO: 78707 - DNA, 383 bp, Zea mays
accacatagactaattagctcgcccagaattctattatctcacgtgcataaggttcaatacaaaccaagaaagaagctaagttggggactcaaataaaataggatcaaaggacttaagagtgtgctacaatggcgcaccagacagtgtccgatgtgcaccggacagtgaccgatgcaccacgccaagcaccaaacgaacttgccactctcagggctcttcacggcatgctcccctataattcaccagactgtccggtgtgcaccgaacatgttcggtgagccaacggagcaacggtaacctagcgtcaacgggccgaatgcgaaagtgaacagcacgtggcatgagttacagcacaccggactgtcctgagcaactagaagac

SEQ ID NO: 78708 - DNA, 472 bp, Zea mays
gatatgtccgcgcgctgtagcagtaagacttatctaatgttcacagctaaaaagcgcggaatgagaaccgacattataatacgagaatatatatactgtgggtttcatacatatgttctatgtttcacatctaccaccgaaggccaagtacatcttgatatactagcctaaaatgttctgctgatctgatatactaccctaaaatgttccgttgatctgattatttgctacaccctgctgccctctacatttggattgtctgtatttcgattttttagttttatttttgttgcatgtataatccaatatgtgattgtatcttttgattcctggaaggatagagtttgcactataagaagatgctcatgttgttggtgactgcgtacaagtacctttctgcaatgatcattgtctattgcttataaggatgaatgttaaagagtttaatgagttgttcttcctacttcactgc

SEQ ID NO: 78709 - DNA, 434 bp, Zea mays
  unsure (1)..(434): unsure at all n locations
tagcacatntggccatatgcacgtatcagctgccagcgtgtctttctttacatcaaccaaggtggagcggtacatgtgaatctccataccttgagactctcgactacgccaggaactacctcatgctcgagccctgagtactcgccctcagtgttctcccgaatgacgacgatgtccacgttgtcgtgcctggtacgcacaccatggaggttgaagcagttgcgatcgcggcgtataggtcgagctccttccggagctgcatgttgagggaggagacaccgcctgcgacagtggtggcgaggccgcccttgatgcagaccttgttgcggcggatggactctatgacctctgcggggaccgtgggcatgtcgccgcggaccttcgttgtctataattataccgtggcgtgcatcgcctccatcacctgccgcacg

SEQ ID NO: 78710 - DNA, 319 bp, Zea mays
gagaggcagaaccccgtgggccgcggacgaagagaggatagaggcatacggcggcgcagccttccttgccttttgtttatggatcgaaggggcgggccgtactaggaagggaatgttgcgggcgcgagagcatccaagaacattctgttctatggcgtggcgtgcgggcgtgcggcgcggatggcatctgggaaggagccaaagaaacatgtgaagcatgcagggaaagagcagctggtgggactggctggagcggtgggagggctggagctggaaactggaccgagagatgacacaacgcgaatggaatggaatgtga

SEQ ID NO: 78711 - DNA, 449 bp, Zea mays
  unsure (1)..(449): unsure at all n locations
cttgatgagatagcgtcccgcgatgatgaaggatctaactgtcttatacatacaatgaccatctagtccatgagggtctgagtcatttgtgtacactattataacgggtatgattgtaattccttataagctgtgtcctatgcctataaatagtgaacactattcctttactgatcacacaatcttgtgattgcatacgcattactccataattattgtttgctgccaaggcaaaggtataaacatgcctaaacattatgtgttaggattcaaattcatacaataaaatatgcgaataatgcaatctatctatgggacatctctctttaatatttcgcgtagtatatataatttcatacngtcatataaatccgaacactaatgtatgaccgttgcgatattttgcttatggtcttcattcgatattcattaaaccttggggagataat

SEQ ID NO: 78712 - DNA, 467 bp, Zea mays
ctgctgagatcgcacacgcgcgaatcgtggcatatatctatcttttgcctcctcctggctcctagggttgcctcttgtatgtgagtcccaatggcacatatgccctatgtagggagatatgcggacgccaaatctggcttgtcccactgtccactatgtgacaaaagtgatgccaaatcaagtcaaacgaatttggctcgggttcaaattcttccactgggtgccttacatggtttggcacctttttggtattcacaccaagtggttgtggcgccattctactaagtgaacacatctgatctttagactaaggctaaatcttgacttagagaatattatagagctctagtgtgctctccacttaaagaatggatctggcgtctttaaaggacttatatgaatgtttcccctctgcatattgtagactatactgttacttaaactttggttcaaggttaactcatgat

SEQ ID NO: 78713 - DNA, 451 bp, Zea mays
  unsure (1)..(451): unsure at all n locations
aactaagcttagggtaagaacataaatgacccaagagtgacgcgtgttatttntatacctctgggataccagacacctcaattggaaccctgtaaaaccctaaaaccaaaacccaggggcttatgtgcaaaagtggtgaacctttggactaaagtgtaaaaaactactatgtgagaacatatatagtcatttggttcacaaatatgtgaattcgcaagttaaaccctaagttttgggcttatttgcaagaatcacctcttatgcactatagagtattaagtctgaaatcagtgtgtgttcttcaacattgagcccttgtatcttacaaactaataagaatttgtcctaggttaccacaccaaacttgcagaccatacaaaggataacaaactagcttaatgttgcgagcataattcgttaggaatattcggagattatcccactctataat

SEQ ID NO: 78714 - DNA, 448 bp, Zea mays
  unsure (1)..(448): unsure at all n locations
catgtgctaagcggcgatgctacattcttcccatgctagtcttagcaattaagcatgcatctagatcggcctcctcttatgcaaaatcaactaaatagagtttgccgtctaatacacccttaaaagctaatgaaccatcacttcttctaaagacagacacatctacattggtgaatagacaattatatcccatattacataattgacttacggataacaaattatatccaagcgactcaactaagaatacattagaaatagagtgctcattcgagattgcaatcttgcctaagcctttaaccttgccttgattcccgtcaccgaatatgattgaatcttgngaatctttattcttgacgtaggaggtgaacatcttcttctccccgtcatgtggtttggcatccgctataataatcagcttgatccccgatgcataacctgcaggaaa

SEQ ID NO: 78715 - DNA, 402 bp, Zea mays
  unsure (1)..(402): unsure at all n locations
cgactgagaaggatgtcgctgaggactctgttgctntattctgtgtagaactctttggagatgcctatgttgagttgctcctacatctaagaaatgctggactctggaccggatatgtcgagtcacctccactgaacatatactatctatacaaactatatgaaagccctttgaaaaaataattaccgcgagaatatattcggtgctttgcggaaatcaaaacataagtacaaaaaaaactggtcataggatactaaaactaaacaatcgttaacccttgttaggtttaaccaacaaacaacatggccatgtgtaacacacactcctatacaagtgggatataacattccattgtgacatgaacttaaataccacacctaaataactccatcataagcttac

SEQ ID NO: 78716 - DNA, 357 bp, Zea mays
tatgaagattcttatcccaacatgggctagtcggtgtttttatatccaacccacgttagtcttagcaattaagcaagtgtcgagttcacctctatcaaaatctaccaagtatagctgaccctctaacactcccttaaatgctattgaatcatgacttcttctaaagacagtgacacctacatcagtgaatagacagttgtagcccatttgacataattgggaaacagaaagcaagttgtgatctaaagaatctaccacaataacattgggaatagaatggtcagaagatatagcgactttacccaatcctttgaccaaaccttgattgccatccccgaatgtgatagctcgttgggg

SEQ ID NO: 78717 - DNA, 387 bp, Zea mays
  unsure (1)..(387): unsure at all n locations
tttcggctatgtcgaaagatgatcttgctgttatccttgcgtacaacagtataaaggtatagaagttaactttaaagttggaaatgaagtatttcattgtcatgcttaattctttctttctctttgcagggcttgattcttagcaatgccttgagggcacaaaagagcatcgaagacgaaagttgtacaatagctctcaacaaccttcgctcagaggtaattgagctgagaaacgaaggtctagagaaagacacaattttaatttcattggtgagtaaaatgaaagaagatgaagctaagtacaatgctcaggccgaagcccaaaaagccgaggttgaagaccttcgganacaactggccaaagccaaagaaaattgtgaagtcgcg

SEQ ID NO: 78718 - DNA, 483 bp, Zea mays
  unsure (1)..(483): unsure at all n locations
gagaagcactttcngttcttagtccagccgacatgatcttttcctcacgcggttaagcgttagaacgaggattangctccgataccaatcgaaagtcgcctagagggggggtgaataggcaagttaaaactttttcaacaaaaactagaaacaaactatgtaaaacagtccggtgtcaaaaccggtgcaactggtttgaacgagctcatctaaagaatgagatataaaactgatatgatctcgaaattcacccagttaactgtgaaaatgagaatgttctaaatgatccacaaggttcaaagtagtagatctgagaacggcacttctcaaaatccacacaccaataagatatgaacaaatctttcacggaagggtgagagaacgaagaacacaaacaaacacactgaacatgaacataagagacacaagatttatcccaaggttcggtcacaccaccatagagccctacttcctcgttgaggc

SEQ ID NO: 78719 - DNA, 465 bp, Zea mays
ggacacagggatccgcccgataatccttatgacagattcgtcttatagaccacgcatccccatggatccgtgtccatagaccatcatcattctgttatcaaatatggatacaaccaattcctgacctcgcgcgagtgctagaataatcactcgacttctaccgagatcctgatttagcatagcaactactcgacctagcatactagtattcatctcaaaaggaatcctaagttcatgcaactagaggtttcaagcaactcctacacttaagtgcacattacagtcctacaagcattaagtgtagtaaaagaccatatattaacatggttatgcataaaaccggggctggcctttaatataacacttaggtagtgcttgctaggggctactcgcttgtcgagcatccactggttaattcatcctcctttgggacgccaccaactgcatgttgtggttggaccacat

SEQ ID NO: 78720 - DNA, 425 bp, Zea mays
  unsure (1)..(425): unsure at all n locations
cttgaggatgcagcaagatctagaagatagaagcctgtttctttttgtaaattcaaagagcaagagaaaagaacaattatctattattgaaaagaaagactnctaacttcaatcaaccgaaggcttgctggcagagactgatgccaaagtagcagaattgaattcgaagcttctctgccaatcaaaacaatttgaacaagagaagctagaacttgattcgaaacttgaagccgaagtccaagccaactcaaatttgaagaaatcattaacaagccttcaggataaatgttggaatgttaacaacaattgtattcaacaactaaagaagatcttttacctcagtggagtcagcagcgggaaatttaccccttcggatgaagatttaccaaaagccttcgatcatatccaagctgaaattgaagaac

SEQ ID NO: 78721 - DNA, 196 bp, Zea mays
acacccgtggtgtgtgataccttaagaaaaacatgatctcccacctcgctctgtagaggcgatcggctcttgtgatgagaacactatagactggccggaggagccattaagtactttgaaataaccgtgaccttgttctctgccgcaagcaccaaatcaggcacaaatatttgcctatcttatgcttgagaccaac

SEQ ID NO: 78722 - DNA, 477 bp, Zea mays
  unsure (1)..(477): unsure at all n locations
tggacgagctacatccgaccaccatcgttgttgtagtctgctataataacctcggagaagagcacaagcagcagaaatgtaaggtaccgagctaaaagaatcctatgatttgaaaacaaccaatagtgtctgaaactgagcatatgttaaccagagcatatactatggagacaacacatgttaaagctgaaattgaggaactaaggttaaagcgctgccttattccaattaaccaaaatccttgccctaacctaatgtctgcatcaacagttcttaagcacaacttaacacacgaaaagagatctagggattggggttcttactgtggcctgagagcacaacaagaagcccctaaattggatgggtgtgggctggacgatgacccngggccttccaattgcgtgcgggcaacaccactgccaacttctcggcggagtcttcatcgcccgccgccttcttcctgcaatcgcctgagat

SEQ ID NO: 78723 - DNA, 430 bp, Zea mays
tccatcgataccgcctcagactgttgaaaaccagctgtaagtcttctatgatagtttccgagttctctgttttgattaccacatcatctacataggcctccacacgcttgccccactgatcggctaagcatgtttgaatggctctctgataagttgctccagcgtttttgaggccgaacggcatggaggtataacagaaagcaccaaacggagtaatgaacgctgttttttccacgtcttcctttgccaaactaatctaatggtacccggaatagcaaactagaaaagatagtacagaacatccagcggtggagtccaccacctgatctatcctcgggagcccgaagggatccttcggacagtgtttgttgagatcagtatagtcgacgcacatgcgccaatccactttattctttttgagtacaagaac

SEQ ID NO: 78724 - DNA, 468 bp, Zea mays
  unsure (1)..(468): unsure at all n locations
ggcgccttggcggngcctcgttggtctacctcctctcccctttctgttggcgccgaaagtcagccttctcccgctccagcgtggacaccttgtccgtcagcttgcggcacttgctgtcggcggccgatttctctcggacggcgtcagcatgttgtgtccgaagtctctcgacttcggcagacacaaccgccgtgagggcccccgacgccgtgcggttggcaaagtcagccacctgcacaacacgcataagaccacgaccccatttaaaaaaaacccttcgctcagcggacctgacttaacgactccaccacctccttcagccggcgggacgcagcgcccgcctcatccttcacagccgcgagggccgccacctcacctccggcgctaagagccccgccctttcccttccgcgatgcggcagcaaccgctgtctccgcggcaggcgcaaccataacatgttggccttcg

SEQ ID NO: 78725 - DNA, 476 bp, Zea mays
ggtagtagcataggccaataatatacgaattgtctctatcctagctacgggtgcataggtttcaccaaaatccaaaccttcaacttgtgaataccccttggccacgagtcgagctttgttccttgtcaccacaccatgttcgtcttgcttgttgcggaagacccacttggttcctacaacattttggttaggacgtggaaccaaatgccatacctcgttcctcgtgaagttgttgagctcttcttgcatcgccatcacccaatctgaatcttgtagtgcttcctctaccctgtgtggctcaatagaggaaacaaaagaataatgctcacaaaaatgtgcaacccgagatcgagtagttacccccttatgaatgtcgccgaggatggtgtcgacggcgtgatctctgtggattgcttggtggactcttgtgtgtggcggacttggttcttcatcctccttgtcttgacatttgcatc

SEQ ID NO: 78726 - DNA, 439 bp, Zea mays
tcttaagggagagcacatggtgagactaacacacgcgcattttgtgaaatacatgagttgtagcgcatgtcgcgcccgaaagcaaggtggtgttcatcatccacacaagaacatcatgacgaccgacaggccgcttgagttactccacatggatctattcggcccgatcgcttacataaacatgggggggagtagatattggctatgaataggggaagagtattctcgcttcacttcggtattctttggtccggaaaaatcacaaacccaagagactttaaagggattcttgagacgggctctaaatgacgttcgctttaggatcaaaaagatgagaatcgaccacgggacggagttcacgaactcaccaatcggaagctctcttgaggaggagggcagtaagcatgagttctcttctcctacacgccacaacacaatg

SEQ ID NO: 78727 - DNA, 379 bp, Zea mays
  unsure (1)..(379): unsure at all n locations
accctgaaaactctgataccaaaccctatgggcttatgtgcgaaattagcccacttttgggttaaaatgcataaaccaagccaaataagtattttaagtcaattggtgtcacaaatatgtggacttgaaagccaaaccctaagttntggacttaaatgcacaatggacctcatttgagttctataccaagtctgaaatttagtgttataggctccacttttgggctgtgtaactctgcaaagtatatggttgttgccctaagtcaccacatcaaacattgagcccgactataagagcacaccatcgcttaagagtgtgagcgagtgctaaggaataatggaaatattaattctaagactggtgtatgcttgttattctg

SEQ ID NO: 78728 - DNA, 341 bp, Zea mays
tataaatactcagcttggacaggttagcgagggacatggagaaccttctactctatatcaactgccattctaatttcagcatataacaccaaaacctgctacgcacccaggctagaattcaactgcacaaataacattacagagtacgaagcccttctcttgcggctttgaaagcttaatacaatgcgaataagaagggtaatcctcaaatctgacccataagttattacaggccatattgacgaaagcagtaaaccaacagattccaagctccagaggtatctggacacagtccgaagaatggaagcctctttccaaggcttctctgtaaagagcatccc

SEQ ID NO: 78729 - DNA, 477 bp, Zea mays
cttaatctagcttacctcccctccgcagacctttcccgttctctcttccataatgagtgcgataccgaatgtcatacttgatacatattcactttatctgttcccttgtatgatgtactgtttgtttcccaatttgaatggatgaatgtatgtatgcttgcaatcacatagagaacgatccggtcgaagagcccgaggagctcgtaagagaagcccctgagcagcagtcggttggtggaggcaagtgtcctttgacctatctctgtcctattcattctttaattcacctcccgctttacacatttatacctaaggattgactagctttggttatccatgttcttgtttacctatctgggttggattattattattattatttagctttatgctattgctcaactcttatcaatgagcatgatgagatgatctatgatacgctggcttcctatctcttattatgatgtagtaacttgt

SEQ ID NO: 78730 - DNA, 399 bp, Zea mays
  unsure (1)..(399): unsure at all n locations
cgacacgnngaacaacgnggcatgcactatacacttgtatatcttgtcccacttgaggattgtctagaggaacgaacactagatgattctcaatgcctactccataagccttaactgtgcctccataacaggcaccatacagcgtaataatcaagccacacttcacactaagagaaccacgaattgctttgaatgctctgaaaacccacatctccattatggcatgagcctatattaaaaatgacttgattattgaggatgaacaacattggtatatatgctcacagaagggacactctatttacccttgtccacttccataacataaatgcacaacgctaaaaaagaaactattcactaaccatcgcccttcacatatacagagaacgaagaaatcct

SEQ ID NO: 78731 - DNA, 347 bp, Zea mays
  unsure (1)..(347): unsure at all n locations
tcaactncatctatattatggatagccttggaatcattttttctttcttctgnccttctggcagcttcctgactcccatgaatagcaataggcccttgctccgaaagtatcttcatgccgagataatctgggtgaacaattgcttcaaaagcatttatggtaccacgaccaatgatggcgttgtaggggtattccatgtcgacaatatcaaacacaatttgctcagtccttgtgttattaacaaatccgaaggttaccggcatggaaatcttcctgagtgacacaatatgccgtcctcctaagccacaaatagggtgcgtaacatcatgaatcttgtcttcaggctc

SEQ ID NO: 78732 - DNA, 371 bp, Zea mays
ctcagcttgtgacacctccgtgaggctgcccgagcaaggaatctgattcttcttctccggagaagccagtccacgctcgccggagctctcacccccgccggagcacgtggaccgggtaagccactccaccatccttcgataccttgtgcacacagtcgttgcgtgaccccgtgatgctcaccgtgccctcggattgcgccagttcgccgtagtttggccggtatactctccgccgacgatgacacccgcctgcacgcgtggaccgggcgattacggtcacctccgacgccgagccgtacctctacgtgaccggcatagtgttctcgagccgaccccacccttcgctgaacctgcctcgccgccggtaagcc

SEQ ID NO: 78733 - DNA, 490 bp, Zea mays
  unsure (1)..(490): unsure at all n locations
ctgggaagattcttcattccaacatgtgctagtcggcgatgccagagccagcccatgttagtcttagcaattaagcaagtgtcgagttcagctctatcaaaatctactaagtatagctgaccctctaacactcccttaaatgctactgaatcatcacttcttctaaagacagtaacacctatatccgtaaaaagacagttgtaacccattttacataattgagaaagggaaagcaaattgtaatctaaagaatttacaagaaaaacatttgaaatagagtagtcaggtgatatagcaattntacccaatcctttgaccaaaccttgatntccatccccgaatgtgatcgctctctgnggatcttagtttttctcataggaggagaacatcttattctcccctgtcatatggtttgtgcacccgctatcgatgatccaactngagcccncggatgcataaacctacaaaacatatttagttcttgatttag

SEQ ID NO: 78734 - DNA, 491 bp, Zea mays
  unsure (1)..(491): unsure at all n locations
tctanagggagagcacattntaggattaacgaatgttcattttgagatatacaggatttgtagcgcatgccaggcagggaagcaagttggagttcatcatccacacaagaacatcatgacgaccgacaggccgcttgagctactccacatggatctattcggcccgattgcttacataagcatcggcgggagtaagtattgtcttgtaatagtggatgattattctcgcttcacttgggtattctttttacaggaaaaatctcaaacccaagagaccttaaagggattcttgagacgagctcaaaatgagttcggcttaaggatcaagaaaataagaagcgacaacgggacggagttcaagaactctcaaattgaaggcttccttgaggaggagggcatcaagcatgagttctcctcttcctacacgccacaacaaaatggtgtagtggagaggaagaatcgaactctattggacatggcaagaaccatgc

SEQ ID NO: 78735 - DNA, 419 bp, Zea mays
  unsure (1)..(419): unsure at all n locations
gacacagagggaaccaattgcagaccaaactcacgtatattgttgntccacacgaccacgtgtgtgccacccgtgcccgacggtccggcgtcagtgccgccgcgccgcaccatcttcgaccggtactgcacactgaacgacggacgcagtcggaactttatcggccagaacgtcgcaaaccgcaaatttgggctgcgtaagcaaattgcaaggacgaggcgcgggatgccacgcacgcacctgggacgcgtcataggtgttgaatccgaccagcatgaagcggacgccgtcgaacaggtgctcgtcgccgatgtcgtcgtccgtggcaggtgaggccatagcgggcagtgaaacagcgggatgcacaggggagaccggtgaggaatcttatgattgggattgagatggggattgtcttg

SEQ ID NO: 78736 - DNA, 485 bp, Zea mays
  unsure (1)..(485): unsure at all n locations
tgcttcagctgaaggatactttgtgtcatccacagacaatgtagtcttggcctgngccacagttatgacgtggtcgcaacccgccttctccaggatagctgaaattcctcttttactggagaacgcgcagacatccccgtgatcactcaggatttcttcaaaagcttctgcctctccgcttatccactcaataacaccctcaggatcgcctcgtgtgaagatatcttcgattgaataggcgaccacgttggcgaagctagcctttatcttctccatgcaccttaaagattnttcagaacatctttctttggatgcgtgaagctcttcaactggtttttcaaaatagattgtccaatattcgctggcctctcggtcagcttctacgatagcgcatttatctttggcttcggccagctgttgtcgaacgtcttcgatctcattcttttgatctcagcttgagcctaaaatttgcttcatattctttt

SEQ ID NO: 78737 - DNA, 504 bp, Zea mays
  unsure (1)..(504): unsure at all n locations
acctatgaatctcagcttgacttgcttccctgtnggaaaccagtgccatccttaatgttattgcgtctcccactntagagcatgcttctagncaaattatttntttcattttctatctcatactcattgattttagtagttaattgagctatatgatcattttgttgtttaattaaagcaatgtgatcatgaatagcatcaacattaatatctctacatctagtacaaatggcaacatgctcaacagtagatgtagatggtttgcaagcatttaattcatcaatcttagcatgtaaaatagcattctcatttctaagactggaaatagcatcattacaaacatttaaatctttagccttagaaattaaattatcattctcaattctaaggctagaaattgattcattcaatttatcaatcttagcaattaaactagcattntcatttttaagactgacaattgaaccatcatcaaacattaacttntcaaccttagcaattaaa

SEQ ID NO: 78738 - DNA, 395 bp, Zea mays
cgcccttcacgggtttttctttatgacgttagatctattggaactcatacatactgatgtgtgcggaccaatgagtactacagctatgggaggattccaatacttcataaccttcactgatgattttagtagatatgggtatgtctacttaatgaaacacaagtctgaatccttagaaaagatcaaagagtttcagaatgaagttgaaaatcagtgtggcaagaaaattatagcactgcgatcagatcgtggtggtgaatatttgagtcatgagtttagcactcatttaaagagttgtggaattagtccacagcttacgccgccttgaacgcctcagacgaatggcgtgtctgagcgaccgataccgactttattggatatggttcgatcaatga

SEQ ID NO: 78739 - DNA, 411 bp, Zea mays
actcttgaacacgccacttcacgctacggttagcggttagaacatgaataacttgcgaattcagagtggcggaagatagttcttcttgctatgagttgctcaatcaatgtggataactctgggagctaactcaacaatgtgagcaagagaacttttataaagagaggggagagggggagaaacaaatcgaatggcgaagaacaacacaaatggacatgatgatttgctctccgaggttcagttccaaagaacctactactccgtgaagaggacagaaaggccgggtctatttcaaccatttccctctatcaatctgtcacctagaccggtcgagtgcttcttcttaatctcacagtgtacaaagacctcataacgatcaccacacacttaggtgtctcttgcttgctttac

SEQ ID NO: 78740 - DNA, 417 bp, Zea mays
  unsure (1)..(417): unsure at all n locations
cggtcataatccaacggtaatgatgacgtggctgtttctatttactgttcggtgtgcaccggactgtccggtgctacatctagcaaacagcctcccaacggtcacatttggtgtgtttatttntattacatgaatttaacaatattccaaaanttatatattttttaaatcacatattttattttctctcttatattatcttaaaggattaacttagaatcgtatttatttattgcgcacatatatatatataccatttataatcacatatatataatcattatcatatataacatataatctttctaaatatgattctccaataaatatattcatgtctgaccattataatactatataatcacctaaatattcaattatattcaatattattaatttaaaatacaattattataa

SEQ ID NO: 78741 - DNA, 479 bp, Zea mays
tcagcagaatgactgccaaagttcttcactcccaaattggtttatatgtgctaacatatgtcgatgacatcatagtaaaaagcacaatacaagagaaccatgttgctgatttgcaagagacatttgccaatttcagacaagctggtcttaagttaaatccagagaattgtgtcttcggagtgaagaagggcaagtttctcggctgtttggtatcgacaaagggtattgaagctaacccaagcataatcgaagctatccttcggatggagccgccaaattcaaaatagggggctcaaaggttagcaggaaggctggcatcactgaacagtttcatttcaagattgacagagaggaacctgcctttctttgaaatattgaaagcagccgaagtcttccaatggtgtctagcccagcagaaagccttctatgagctaaagcagtacttgatagatctaacaactcctacctcaccttcatat

SEQ ID NO: 78742 - DNA, 365 bp, Zea mays
  unsure (1)..(365): unsure at all n locations
tactcagcttagcaacagatgcttcagcagacgcttcagaagtttatttgtcttctttggaggtatgcttgaagatttaattgtctccaatacatctaagacattaaccattcttttccttatcagcgtcattgttggcccctttttaatttttgctacttcaatttctcctgaaggacttaaaatttctgatatttttactccctcagctgatgtttttgcttcttcagtctttggttcttccgtcttttctgttactggcacttctgccaactctttgatttctggcaacaggagtggntctttagcttctgtggccgaagaggtctcaccggcgaactcangcacccgggctggttcaatat

SEQ ID NO: 78743 - DNA, 462 bp, Zea mays
  unsure (1)..(462): unsure at all n locations
cctctgtccgcaggttgttgatatcaatattatagctctcgccttcggcattcttttgcgctctcaaagcgttgctcagtattaaaccctatatgaaaaagaattagtataagaataaaagaatgattcaaaaattataaatttctaaatatacaattctcataccttcagactattatatgcaaggctatccgcaagatcgtccttcgtcatagcgcagagtccagcttcaagcttcggaaaccccatacttctagccatctcccggcagacagataattctttgttgtctatgaggcagtataagaagtcatcttcgtctgtgccattgaatactaaggcccctttcggatacttcagttctcgggcatagtgattagcttcaaaaatctcttcttcagataatttcttccccgaagcatgtcgtacaatataancaagtactttggaagatgcttcggg

SEQ ID NO: 78744 - DNA, 487 bp, Zea mays
  unsure (1)..(487): unsure at all n locations
taggggtatgtattaattttgtnattggaatagtgcaactcctaaagatgaatatcctatgcatatagccgacattntgattaataatgcatcaagaaatagagtcattagctttcttgatggtaatgacagatataatcaaatctttatggccaaagaaaatgcgtctaaaatgacctttatatgtccagggtttattgatctatttgagtgggttgttatgacatttgggttaaagaatgtccacgccacctatcatagggctatgaatttaatgttccataagctattaggaaacatcatagaagtttatattgatgatatattagtcaaactggctgagtttgattcccatctagccaatntgtgcaaagcctttgataagatgcgtttgtatggtctaaaaatgaacccgcacaaacgcgcctttggagtgtctgctggtagattcttgggatttatcatttatgagcatgacatataagta

SEQ ID NO: 78745 - DNA, 251 bp, Zea mays
atcctgcttcaacaccttacaaaccttgcatgctattgcgaaagacacggagaatagcacaggatcaatggacatagtcccagatcattaactctctcatgtacctctgaagggcaacaaaaccggacatctcatatgcctgagagaagctcatttggtttgtgtctcacctgtagatgatcactgtcctgctctctagagagagtggcggtatttgaaaggtgctatgacataccgtattcattatactg

SEQ ID NO: 78746 - DNA, 444 bp, Zea mays
  unsure (1)..(444): unsure at all n locations
tactaagctggaatccctcacatggatagggtgacagaaatcttcgttatcttctgaaaaaatncggtgtctctcttgttctctacttgttctattacaatgactcgtgattagttggatcatccttcattactagtcatgtagattacttgttcaccctagattgccaaacctacatagctcaacataagataaataatttatatctcttggcgtactaattaaatttctctagtgtggtgagatataacactataagccgtctaattcacccacccgtctagaccgtgtgtacctagaatcttcgtaatgtgtttctgagtccaggactccattgtctgcggatctaaccatcccagagttgaatacaacggctagtggaagcaatatgcctatggagatggcaccacattgttatggtaacaactatgactattggaaaat

SEQ ID NO: 78747 - DNA, 470 bp, Zea mays
taaaactaagctgagctggtgtgaatggcgcatgcctccgctcttatagctaattgttgacatggacaagagtgttgagccccaacatgtgggcccaagaacacggcggatgtagcttctaatacttgctgctggagcgatcttcttgcgccctgacacccaagatctgtatagccttcgcgtgcatggggaagcttcttgataagggatgagtacagtgcaccgcgcagcacgggcgcactgtttcggcaacagactggataggtgcgccgtctgcaaggtggccctggcgccgcctgccatcggaatggacaacacacaataaatgtcgtaggggcacatcgcctgtcatataggtgacaggcggcgtgttctctccgcaatatatgcgaggaccgcgtggccaatagccttactttatgctccgtccgttgcctacgtcactgacataagccatgtgcagatatacc

SEQ ID NO: 78748 - DNA, 414 bp, Zea mays
agctctcctgacaagcgctgcctcaccgctgagtgcgaagctgtctttatatcaataaaggagcccctggcataggtggagtcaatgttgctagatctatcaaatactgtctcagttcttcgaaagccttctgctggattggtcctcattgaaagacttctgccgacttcagcacttcgaagaatggtgaatttctctctgccgctctggatatgaatctattgagagatgccaaccttcctgtcaatctttgagcccgcttctttgtcatcggtggctccatccgaagcatagcttcaattttacttggattggccttaaagcgctctgttgaaaccaagcatcccagagatttttccttcttacttcgaagacacatatttctggatttaacttaaacagctttgcctgaac

SEQ ID NO: 78749 - DNA, 411 bp, Zea mays
ctcagcgtatggatatcaaattggagaatgaagtttgtggatctatttatgataagcacactaataactctatgtttgctgcaccaaaccgatgattcatttccacacaatatttgtctaccacgtcatagaaaatctcagccccgatttgatgaaggttaataacagtgaacccttcacgcctcgatctacctctgactggtattttatcaaacatatgtggcactggaatagattattcattacagaattgcttcacctcatcaaataagatctcccatccactctctctcatggtaattaactgatctttgacatcacagactaactccatagcatgaacaatattaatatcttttcttttgaagataagagaaagttcatttgtaataccgagcaatcgcaacatga

SEQ ID NO: 78750 - DNA, 368 bp, Zea mays
ttaaagccacggcggaccgacaagcgaacagcggccgcggataaccttgctatcacatgtataccacgtagaggagaagtacagtgaggtagaaccacggtgcagaggacaccgcgacggaaaacgattgactccgtggccgccggagaggtctgcggctggactcggggtaaggtgccacatatgcgccatctaactccggcggtatctgttccctaccgcccacgaacccggacggcggcgacacgaagtttggcgcacagaggtcagcggccgtgagcacacaacgctggcaggctgatccacatccgagcactggaccacgggcgttgctcagtcagtcgacctgacagagcatcttggagctt

SEQ ID NO: 78751 - DNA, 452 bp, Zea mays
cctataaaaactcaagcttgtacttgactccagtacatatcatgatagtacccacgtgctttgtaatcctcggcaacaatatcattgaacacttcattgtaatctttagatgaaagacgattaccatcattgctccctctcctttatttaaagccctcataagacgcagcctattgaaacaaagtatatatgaaggctaaggaactataagctgatatttagatcaagcataaatcatttataccagagcatgtacgtaccatcagtgcctctgccttttctgttgtgtatctaccattcttctttttatgagcggccttccatagtactatcctatgaaccttacgtttagatctggtttcctgcataatttagttatttggctatcattctcatcctcagatagatgatagtgacaattaacacatatggacgaatatctatcaccatct

SEQ ID NO: 78752 - DNA, 458 bp, Zea mays
cggatattcttcatcagagaagtatggaaattcttgtgatacataaaggattttcttcacgaagcatgaaaagaagggaaggtgttttttcgccgaaggctcaaaaaacggtatgtatgtaaaatttcatgcatcgtaaagaattgaaccatgaatagattatatattacattcaaagctacaaagttttacacatgtcatgttccaagtatttttacattagcacttaatcttccctaagaactacttctgcagcttcgtttagtagctgattgacaactttgtccatgatgacttcggccatttgtctaatttcgtcgtcccccttcgggggcgtccggagctgcctcagcaggttctgaggaaggagaggatacgactatattactattacagaatcgcgaacaaaagtttaaatcaaaaatcacaacagaataaaagccactaactaataccta

SEQ ID NO: 78753 - DNA, 433 bp, Zea mays
ctcagctttataggctcttattgcctctatggtcaaaagttggcttcttgtggggagaagaggtgattatgggatatacggggagttcttgaaatccttgatcaatctcttttggaatgactctctctatgcctcaacatgtgtgtttgacatagaaatagagatctgagttagatttgcaaaaacaaaccatgtggtggcaaaggatgatccatatatgccaaaattgaatcacaaccaatttgagtttttatttgaagtgattctgcacttgttctatctactttatgtcgcgatggcatacatcaccaattagggggagattgaaagggaaatgtgcccttgtgccatttctaaggatcttggcgatgagagcgcaacacaagtgcttagatgtgaaccaatgctcatgaatgaactaagtgcaaatcta

SEQ ID NO: 78754 - DNA, 467 bp, Zea mays
  unsure (1)..(467): unsure at all n locations
gntaccctntgagccttatttaggggtaggttctctattatggtcctatctgcaaaacaccagatacaatacacttgattgaaatttttacctagtgaatgcattctaggtgtatcaaacatatgaaatgcccatgcttatgatgccatgctcaagttntagttacagtaacaccaggggtgttacagccttccacctgtttccctgcttgacaagctgcacaaggtctatctttttcgaaatgtacattagttagacctatcacgtgttctccctttagaagcttgtggaggttcttcatccccacatgtgctaagcggcgatgccacagccagcccatgcaagtcttagcaattaagcatgcatctagactggcctcttctttttgcaaatcaaccaattaaagtttgtctgctagtacacccttaaaagctagtgaaccattacatcttctaaagacagacaca

SEQ ID NO: 78755 - DNA, 483 bp, Zea mays
  unsure (1)..(483): unsure at all n locations
tactcagctggtgccgtggagaagcnanatccttgaagtcttggctgtcaaactgcttgccgntgtcgactgttagttcggatggtactccgaagcggcaaacaatgttntgccaaaagaatatttgggcagtctttgatgttattgtggagacagcccttgcctcgatccatttggtgaagtattcgatagcgacgaaggcgaacttaaggttcccctgagccgtgggtaggggcccgacgatgtctaggtcccagcgctggagaggccatgtgtgggcgatcagctttgtgaattgcgaagggctgcctaatcgaggggaaaacttctggcaggcttcgcaggaccttgtgacccgatttgcggcacagatcattgcgggccagtagaaaccttggcggatcaccttatcagctagggcccttggccctgcgtgagagccgcangtaccactgtggacttcgcgtatgatctggacacctt

SEQ ID NO: 78756 - DNA, 496 bp, Zea mays
  unsure (1)..(496): unsure at all n locations
ctaagctnttacgcacagctgcgagatcaccttatgcttcgtcataatcactctttcgttncgctcaggcttcgtcctaaccatgctcttgtatactcatgacccgattccgaagatgactgatcacatatttcacttggaaaacattgtttaatcatgtttttgaggaccttcggaagccgaaggcccccaacacctatcccccttaaaaagaatctcgtcctcgatattatgaaggactanggaagaggtggggaaattcgattcaaagctcgtcttctctctcccaactaacttcatcttcactgtggtgactctattgcactttgcacatctttatcaccttattcctcgtgacccaagtcaaagtgtcaacgatattgacaatataatctgtgtaagttagatcaccttgaacactgagttcttccattggtagttggtcctcgagaatgcggagacacttcttgagttagacatgtgaatacatcatgcc

SEQ ID NO: 78757 - DNA, 385 bp, Zea mays
actaaaaaccaacagtgcagcgtctgcagtacgagacccccaatcacactcattaagcgagtggcctgcttctatcgccaaaaacacaaaaggcgccagctctcgttaatatccaaggccaacaccgatggtttatggccgatacatgctatccaccagagatacaataaagggctctatgtcatggaaacaggcgtgatgtaagtaataagagactcactcacaatcaatgggcttatgatcagcatttttcgcagtaaacgaccaaagcgtgattatttgtaatatcaaggctaacacccatggattgtgaacataagcctcccacctaaaccaataatgtggctacgcagggaacatgtggtggaagtaaacaccttcatga

SEQ ID NO: 78758 - DNA, 420 bp, Zea mays
  unsure (1)..(420): unsure at all n locations
cggtacgatggcgcaccggaccggtctggtgtcttatttntatagaaagttcacaacttttaccaacgactagaattggatggngtctctatataaacccctctatccgacaatttggtggtgtgggagcccaatcaacataccaaggaaggttatacacatctccaagagctcaaacactcaaatgattaatataatcactcgatgattagcataagtgttttgcaaagtgattatattagttagaccgctattgtgcttgcttgaggtgattcctacttagttgagtgagtttagaaaaatccacaaaacccctcggctcttgcgtgagaccgtgtaattataccgagtggggtgagagtcttgcgagaccgcatcaaccgagtttgtggtgccgccgccaccgtatatctgatggaa

SEQ ID NO: 78759 - DNA, 497 bp, Zea mays
  unsure (1)..(497): unsure at all n locations
actcagcttcaaagggagagcacactntatgactaacaaatgttcactttgagaaagacaggatntgtagcacatgccaagccgggaagcaagttggcactcatcatccacacaagaacatcatgataagtgacaggccactggagctcctacacatggatttattcggcccgattgcttacataagcatcggcgggagtaagtactgtctagttattgtggatgattattctcgcttcacttgggtattcttcttgcaggaaaaatctcatacccaagaaaccttaaagggattcttaagacgggctcaaaatgagttcggtttaaggatcaagaaaattagaagcgacaatgggacggagttcaagaactctcanattgaaggctttcttgaggaagagggcatcaagcatgagttctcttctccctacactccacaacanaatggtgtagtggagaggaagaatcgaactctattggacatggcaagaaccatg

SEQ ID NO: 78760 - DNA, 432 bp, Zea mays
aaacacgcaagcgaggaccgagcgggcgttagttgtttaccgtacgccgcaccaaggtgagccttatacagcaacactacagaaacacaagtctacactacggaccgttcgacggagatgcgagcaccgactgagaccaagcgcggaccatccggcctcatgcgcggaccgtccggtcggtgaaaaccacaaaagcccgaaggtaacgggctcggtaaaaagtaaatttagcatcctcgcggaccggccggagtgcacgaccggaccgtccgcgactaccttgatctgacatctgacgacgcataaaatgccatatagccgtcgatatatccgttactgctgaccgctgcgattacaatcgttgatgtgcatgtgcgaaatagtcggaccagcggcgcagaccgatctcggtcggaagaaagggagcaatgg

SEQ ID NO: 78761 - DNA, 374 bp, Zea mays
gaatataaaggtagaaattatgattaagcaagatgtgaacacactatcatgaaaaggatccttatatgacaaaaaaataatgtagaagtgacatgaagtgatgtacctttgcgttttaccttttcaagggggtgttccaaacttgtgttggatttataattcatttgcacgctcttgttggtatagtcgcgtcataagtccaagatatcaaatgaagattgtcatactaaatgaaagataaatctggatacctggagcatacatgtcacctagcattgtcttatcacaacaagaggcaacatatatattgcacaagtatggattatgcaactagtgatcatgtattaaaaatatctattgaaaaacacccatcg

SEQ ID NO: 78762 - DNA, 333 bp, Zea mays
  unsure (1)..(333): unsure at all n locations
ctaagcttcgcttgatggnaatttcgcagccaacagtgttatttctatgaatgcgtgtggaacttcacaactacttgtcagtttatatagtgctgcaggtaagaaggcgaagcggcggaattgttacaccaggcgcgcagtaacttgtacccgctgcgcagtggaccgcaaggatcaaacagtaactctgcaaggtgggaccgacacgcgctcggaagtcggatcgtttctccgcaacgagctcatggaaggtgttttttggaccttcggcttcccgaagctgaagaggctcttttcacgggtcaagctcgttacgaagaacgatctatcacc

SEQ ID NO: 78763 - DNA, 431 bp, Zea mays
atcgtggccattgtccactgtgagctcggacgggactctgaatccgctaacaatgttttgccataagaatatctgggcagtctttgatgttatagcggatactgcccttgcctctatccacttggtaaaatactctacgacgacgaaggtgaacatgaagttcccatgagccctgtgtagtggcccgacaatgtttatgccccaaagcttaaaggcccacgtgagggccatcagtattgtgaataacgaatggttgcccgaacgatggaaaacttctggcaggcttctcacgaccttgtgactctgattttgacgccgatcatagtgggcccctataagccttgacagatcaccttgacagcgagggccctagccccgcatgagaaccgtaagttcgctgcggactaccatacgattggactcctctgact

SEQ ID NO: 78764 - DNA, 429 bp, Zea mays
tattatgggtcacgtctgtaatatgccttctctgttatgactgtctgtaacctgctcttgtgagaatattctatggatagtccgggatacttgagggcataaacgtccttgccaaaggacggtggtcactcgggtgactataaatacccccgtacaggtacagtgcccttgagaggccagattaaaagagctattgccattccccgttgaactttgcaatcactctctccactttcccgttggatctacatgcccaggaaagcaagtgccaacatttggcgcccaccgttcgtgctacgaacaaacaacccacgatggcacccaagcgagctatttcgaaggcagacccatccatcgacgaaccaacgaatgcagtgctgctggctgagaaaaaagcaaggctttctctgacaacacctcccaagagga

SEQ ID NO: 78765 - DNA, 486 bp, Zea mays
  unsure (1)..(486): unsure at all n locations
actaagcttaagtttggttacatngaatatcaatgacactgttattctgtggtgcaatttntttgggtcctatgttcatgtttctgtgagtaagtgttgcctccacttgcatggcttttattcttgcacttgcttggctctatcgataaatactatagatgcatttatgcactgtctgttttaaatggaaactaccgcttcttagtattttggctctttgttcatggatcaccatgtgacctttgaatttttagggtataattatacatgataagagctttactcacccttatctggctcttagggactaaatcatcacgacatgcaaaggaaatgagagcaccaccatcactatgagcatttatttcttaggtacacatgtgtaatcttttacataactgctgaactatattagtggaatagaggtttctcaatggtttgatattggttgagatgaaatttgctattataaccgattctttttat

SEQ ID NO: 78766 - DNA, 424 bp, Zea mays
  unsure (1)..(424): unsure at all n locations
gtgcataggtttcaccgaaatccaaaccttcgactngtgaataccccttggccacaagtcgggctttgttccttgtcaccacaccatgctcgtcttgcttgttgcggacagacccacttggttcctacaacattttgattaggacgtggaactaaatgtcatacctcattcctagtgaagttgatgagctcctcttgcatcgccaccacccaatcagaatcttgaagtgcttcctctaccttatgtggctcaatagaggaaacaaaagagtaatgttcacaaaaatgagcaacacgggatcgagtagttacccccttttgaatgtcgccgaggatggtgttcaccgngtgatctcgttggattgctcggtggactcttgngtgtggcggacttgtaacttgttcatcttcctcatcttgatcat

SEQ ID NO: 78767 - DNA, 395 bp, Zea mays
  unsure (1)..(395): unsure at all n locations
actatcaatactaagctcntaagggagaacacgtgataggactgaccaatgatcaatttgtttaatattgaccatgcgcaactagtcaagcatggaaacaggtgggacgagctcgtcacagccatatagtgatgaccacttcgagacccctggagctgctgcatatggacctcttaggactcgtcgcctatctaatcatagggggaagtaagtatggttgacctatcgctgatgaattttcccgctctacttgggcgttccttatgcacgataagtctgaaacccaagggaccctcatacgctccctctcgagagctcaaaatgagattgagctcaaagtgaaaaagataataatcgaccactggtccgcgttcatcaaccttcaagtggatgag

SEQ ID NO: 78768 - DNA, 435 bp, Zea mays
  unsure (1)..(435): unsure at all n locations
ccacgcaatgggtgtgtttaggtggcgagagtagcgtgtaccctccgtggcaagaggccggacggtggtgtatttgtgctctcggttggcatgaactcgttctggtcttgagaaacccggtggcgaattgacatatgcaagggtttagtgctacatatatcttgtggttggagatccctagctgggtattagtcgatttggatcactgttacttcttggatatgaagacttggtcactgccctacacgtagcaatccagtaaagtgaagggttgataaaagacggctagcatangccaagtgcttgaactangatagaaagaactttatatgctggcaactttacttaacctgataataaaactagatatttaatgatccacagttagtaagcatttctgctaacagagtctttgaatcttgatcagctttacct

SEQ ID NO: 78769 - DNA, 249 bp, Zea mays
gcaaataagcacttgtcgaaaggtctctttgactactttctagtggagcaagaatcaacgagagatcagacactaagtgtccataaactgccgagtgaactcctgctctacgccagtcaatttcggaactgcagcatgcaccaaattaaatggagcatatacttccactcccaaagttgtttaatgctataaatacatgttggaaagctctcttcgtctactttcatgtgcatcaagaatcaatgacag

SEQ ID NO: 78770 - DNA, 480 bp, Zea mays
tctgagaatactacttcgtcagctacgggaagagctcttttctctcccctccggccctcacgatagaaatatcatgaaagttctgcctctcatcgcttcgatctgcccttgcttaacagtcgaatttccaagtcgaatatccaaaaacaacatggctcggcctccatggctggtcatcggcatcttcatttccactttctacatcaaaactctcactatcgctggagttgtcagataacccagccaacatctcattggtgattttctgcatgttagttatctccatagcttcgtagaacccggccagtgtgaagtcaatgatcttcttctccttagccattcagacgatggttacacatatgccgaagctcagaagttaatcgaagacaacaaagcaaagaaggttaaaatggcatgcacagtacaagcagctagatagcacaaataagaaactcacgacacaggcctctatatacactc

SEQ ID NO: 78771 - DNA, 490 bp, Zea mays
  unsure (1)..(490): unsure at all n locations
tctgacttgtgggcctgccgaggtgtccggtgcacaccggtcatgcactgtttgatgtccggggcaccggtatgggcagccctgacgtctgcgcgcgctgcgcgcgcatttaatgctccgcagggagccgttggcgccgcagagagccgttgctccgctggcacaccggacagtccggtgcacaccggacagtccggtgaattatagcggagcggctgtcgtgaaaacccgaggatgacgagttccggaggccgcggttcgttggcgcaccggacatgtccggtgcacaccggacagtccggtgaattatagcgcgccggtctccgcgaattcccgagggcgaagggttgaagtcgaagtcctctggcgaatggtagaatacgaagtctatgggcgcaccggacactgtcaggtgcacaccggacagtccggtgcctncagccagaggtgccctcggatgccttattgctccttttgtgaatccaacact

SEQ ID NO: 78772 - DNA, 403 bp, Zea mays
  unsure (1)..(403): unsure at all n locations
tatgctntgtgaccacatcatgagatcattaataatgtgctggtcaatgatgaaactggaaaaggaaatttgaaagtggaattggaagttattgtgagagatatcaagataagagaaggtacagtgagaccattctaaatccatcttctttaaagaacacttattcatagcttcttcaatctaaatgcacaaaattatagttcattccgtgtttcactaatatcttctggtgctacattcagtatcttactatcttattcaatttatgcatgtcatttatggccagcatcaacatgctggtactaagaacaattccagtggtattaactatcttttctaccatcttacaacatcaagcactttcaaagcactcaatgatgatatcgtgtcacattgctccata

SEQ ID NO: 78773 - DNA, 269 bp, Zea mays
ttatatatagaattgagctcggctccaagatctatggcgtttatctctgtgccacgtgagcgccacgacgtctgtttgtgccaacgcatcacgtacctcggcgccatagtctatggcgccagactgtgttacgctctgagccataggctacggcgccgaacaaatggtccaaaaatgacactaatatttattaggggtcacacaagatttataattctagaaaaggccttaatgcaaaaaaaatcaggagtggctgaccccggaactat

SEQ ID NO: 78774 - DNA, 384 bp, Zea mays
ctagtgattagagagagtgatctgttgtgttcatttgtgctcttgcgctcggattgcttcttttcttcctcattcttcttgtgatcaaactcaattgtaaccaaggcaagagacaccaattgtgtggtggtccttgcgggaacttcgtgttccgtttgattgagaagagaagctcactcagtctaagtgaccgtttgagagatggaaagggttgaaagagacccggtcttcgtgaccacctcaacggggagtatgtttgccagaaccgaacctctgtaaaacaaatcatcgtgtctcgctctttatttgctcacgatttgttctgcgccctctctctcggactcgattatatttctaacgctaacccggcttgtagttgtgctt

SEQ ID NO: 78775 - DNA, 486 bp, Zea mays
tcgaggtaccaagtgcacgggagaaggtcaatgatgctgtttaactccaaagccaacgatgaagaagaaggcttgcaaagtcaagggtgatcgagttgagaacagctacggcacatcaaggatcactacataaggacatgacttacaaccaatgaggtaacaactacagctatgtggtgtaagtcataaggctcaagaccaagctctaagaagaagatcaaggtcactagaaggagaacaagtgtcaaaaccagaactggaagcagcctaaaagagctaagttcaccttgatctttagtttgggttgttcctacgtttggagatgttctatgtgatctttgcaagatgttggagccaagacatgtcaatctagatcaagtcaagcagacttgatgatttatgagtccaacatcgaaactcatgcttgtgagatgctatagatgtaataattaagagaaggtatgtttctagacttagtacattggt

SEQ ID NO: 78776 - DNA, 448 bp, Zea mays
tgtggcatggtttaatgatagacacacccacgcagttggattgcataatgagggagagagatgggctccaaagcctaagacctttctagagaaggcaaaggaaagggcaaacacacagactgttgattgttttgacttacagtcagggacatatgaggtattccttcaagctgttactacttctgacggcgagtcacaagagtcgaggaagcatgtggttgtccttaatgacttgtcatgtacttgtggcgcacccaggcaataccattttccatgttctcatctaatcgcagctgctcgagctcgtaactttgacttagagaggaggatacctcaagagtttactattgataaactagtgttgacttgtgaaagggaattaagcttacacctagtccctatctaaatttggtggttgaagtgcccaacacaaatctttggactaact

SEQ ID NO: 78777 - DNA, 273 bp, Zea mays
tctaaagggagaacactttatttgtttgactaacgtgcaattcgaaaaagatagaccttgtgcagcttgtcaagcaggtaaacaagtgggaggagcacatcacagcaagaatgtgatgaccacttcaagacctctggagctgctgcatatggacctcttcggacccgtcgcctatctgagcataggaggaagtaagtatggtctagttattgttgatgacttttcccgcttcacttgggtgttctttttgcaggataagtgagagcacctaga

SEQ ID NO: 78778 - DNA, 273 bp, Zea mays
tagcaactacgagttcaagatcagcgaagtcctattcttgggtcatattataaaccaagatggattagctgtggatccaaagaaggtaacagtgattctggactggaaagcaccaaaggatgtccgaggaatcaagagtttcattggaatggctggttactatcggagtttcattgaggatttctccaagattgccaggccattgacagccttgctagcaaagaaggttgagttcaagtggaccttagcgtgtcaagaatcatttgagacatt

SEQ ID NO: 78779 - DNA, 272 bp, Zea mays
tgcatttctcgatggatacttctttctggactacctgctcttcacctgtgggggtttatatatcgcaagggtgagctcacaaaagattatagctcaacaagctgtgggaataatgtgcatgaactcaccaaaggtgggagctcatgtgaggtgtaaggatgatcaacaataagggttaaagctaagcattgcttttaataagttgattaagttttattaacagttactaaatgtaagtagataccaaatcagagtaataatagatcaaaatt

SEQ ID NO: 78780 - DNA, 271 bp, Zea mays
tagagcataccaaagctgttttatcatagggaaacgacggtgagtaccgggatccagggttcgatcgccgcgcgaagcgaaggcagggagccggggacatccgatgctaatataacaatgcctccttgatcttggagaactccttgagagttcagatgggctcattggcagcacgtacattgttgtaggaaacccagtcttcaccatggatcacctgatatgaatatagattaagaaaaatgcatagcaaaataaaatgcagttgaaggga

SEQ ID NO: 78781 - DNA, 282 bp, Zea mays
ataaaattctcaaactttacggctgctataaatctttttttttccgtcgagggccaagaggaaactgactgcggaaagggcccacctgagaaagaaacttacttatgcccaatcgattttatagacttaagcgctatacacagcgcccaccctactttcccgcgtgcagcgaccttgaatatcagagtgaattatggataagtcggcccgattaaaggaagattagttcagtcggttcactattgtttaggaacatattatcatcacatacacatgtagtgc

SEQ ID NO: 78782 - DNA, 274 bp, Zea mays
tcttattgtccctaattttttgtctaactttgataaaggcaaagctcccatggtttatgataacgagggttacattttatatcctgtcggttatctccaacacaaaattaggagaattcattctaggaagtctcactctagctctcatcatgcttttatgtataagagtgaggcatctagttctaggcaatccacacatgttaaattgcctaagaagaaaaatcccattgcatcaaatgagcctattatttcatttaaaacttttgatgcttca

SEQ ID NO: 78783 - DNA, 271 bp, Zea mays
tttccaaggcgtctcgatcccgcatccgctcgcgggcccgggccttctccgcgtccttctttttcttcttctcctccgcggcaacccgccgcgctgctcggtccaccgcgtcctgcgggacccgtggcagggaaggcttgtgccaccccacctcctaaagatggagggaaatcccaaccgtaagaacccggagcaactcgatgcaagaagaaggaaggagcggacactcaccagagtcacgcaccgttggtctgggcgcatcaaaggctgg

SEQ ID NO: 78784 - DNA, 268 bp, Zea mays
ttatcaaatggacttgaatagtgccttcctcaatggaccaatcaaggaagaggtctatgttgagcaacctcccggctttgaagatagtgagtaccctaatcatgtctataggctctctaaggcgctttatgggctcaagcaagccccaagagcatggtatgaatgccttagagatttccttattgcaaatggcttcaaagtcggcaaggccgatcctacgttgttcactaaaactcttgacaatgatttgtttgtatgccaaatttat

SEQ ID NO: 78785 - DNA, 270 bp, Zea mays
ttaccaaatggacgtttttattgccttcctcaatggaccaatcaaggaagaggtctatgttgagcaacctcccgactttgaagatagttagtaccctaatcatgtttacaaactctctaaggcgctttatgggctcaagcaagccccaagagcatggtatgaatgcctaagagatttccttatcactaatggcttcaaagtcggtaaaaccgatcctactctctttactaaaattattgcaaatgatttgtttgtatgccaaatttatgt

SEQ ID NO: 78786 - DNA, 267 bp, Zea mays
tgtcgaggttgagaacgcccagaccgcctagggctttgagcttgctgactagcggccatgccacaagacagtgaccccattagattcggccttacctttctagagaaaggagcggcggatcttgtcaatgcgtttacaggtccaggtcgcgagggaaaagatcgacaagtgatatatgggcgaggaggacagaacagaagacacgagcacaagtctgcctgcatgattcagcaaatttttttgttagaaatatgccctaaagataat

SEQ ID NO: 78787 - DNA, 263 bp, Zea mays
tagcgccctgttcttttcggatacgaatagccggccaaacactgctcaacatgaataatgcccccggttcgcaccgggggcctttcgctcgtgcaggcctgacccctatcacaactggaaacagaccgtgccaccataagtgcgcggctggctgaggtagactgagaggctgcccgtttgcgcgaccgacgggaagatcgataaaataaacagcttgactaacagattgcgaccccagaacgagaattgcagtccgctcttaa

SEQ ID NO: 78788 - DNA, 267 bp, Zea mays
tcctctgaagctccgttacaacaaactgaagctgaagctgggccttcagagcccttcaaggaagaaactttggaagccgaagcgataaaaataccagaaccaattttagttgaagagactgacactgccatccccgaagcgcctgccagcatgtgtgattacatcatacgacatgcttcgggaaaaaagctatctgatggagaaattcatgaagctaatcattatgcaaaggagctgaaatatccgaagggggcagtaatattcaat

SEQ ID NO: 78789 - DNA, 273 bp, Zea mays
tcagctggatccaacagtggaagatgttaagaatctttgtaatacttgccgcaaatatgctagatcagagagtccttttccattataatggccatggtgtaccaaagcctacatctaatggtgagatttgggtgtttaacaaggtaatattatgaagacactgttatacttgccacatgctttatttatgataggtgtctctgagaaaatggttgtttttgcattttgttgcagagttacacacagtatattccacttccaattactgatctt

SEQ ID NO: 78790 - DNA, 273 bp, Zea mays
tgacaacaccatttggcatcttacataaaatttctgagatcaagaatatttagttcattcttcaacatgcaaaagcgggtcttatcaagaggcttagtgaaaatatccgctaattgatctttcgacctcactccttctaaaatgatatctcctttagcaacatgatctctaaggaagtgatgacggatatcaatgtgcttggtgcaagagtgttgtacaggattattagcaattttaacagcactcccattatcacacaacaaaggtaccttt

SEQ ID NO: 78791 - DNA, 269 bp, Zea mays
ttcttttttatctaacccttccatacagtttcccacccttgctgctatgatgacatccgaattgagtagccaagcctgcagttcaggacccctctactgctgcaggggattcgacaacctggggtccagctctagagaatggatgctcgtctcctagagtggtccggagccatgtagctggttagccttgtcccgtaccctaagtctgcacgctcgaccgctctgcaatgggtgtcctagtatttggaactgtgatcctgagggtctgg

SEQ ID NO: 78792 - DNA, 271 bp, Zea mays
tgagccgtaatcggctttttctgaaacccttggaaactggtgatcagcatgtccttcagcttctgccatgatgtgattgttcctgtcccaagagaggagtaccaggtttgtgcaacattcttgactgccatgacgaaagacttcgccatgactgtagtattgcctccatatgaagatatggtagcttcgtaactcatcagaaactgcttcggatctgagtgtccgtcaaacatggggagctgggtggcttgtaagatgggggccatggtgt

SEQ ID NO: 78793 - DNA, 270 bp, Zea mays
tgtccaacgcagccactttcatatctgagtggatgaagaaggaaaccggttaacatcacgacagccattctgaaaattgtgtaatgttcactgatttttacaaaaatataaaattttaaaaaaacagtcagaagtcaaacaacgagactcactttagttttaaaacaagcatctctttgcttcaattgtggacttgtcatattatgaataggcagacattgtgcgaagttattagtgttttcaaagacagctaagacaatatgctttccg

SEQ ID NO: 78794 - DNA, 271 bp, Zea mays
tgtcatcgttcttgttttatattgagccgatgttgattatggtgagcaaattctgtacgttattactttgttttaataaatggattgatagatatgtaggtttcgatgattctcgtatttttagtgtaacacccctgttgttacgagaactaaaaatttggcatgtcatcatatgcacttacattaacttgcttgatacacttagaatgcattcgctaggatccaaaataatctatgtatgatgttgtgattagtgaagagtgaaggacct

SEQ ID NO: 78795 - DNA, 270 bp, Zea mays
tgaagggcaattgaaaaatccagctccagtgtactttgtctccgaagttctcagtttatcaaagaaaaactatacagaattggagaaagtgttgtatgctgtcttaatagcctccaggaagcttcgacattattttcaagcataccatataattgttccttcatcacagcctttgaaggatattatgagaaacagagaagctactggaaggattggaaagtgggctgcggaactcaacgagttcagcattgattatgtgcatagatcttc

SEQ ID NO: 78796 - DNA, 269 bp, Zea mays
tgcatcaaaaacatattttagtcattccttagggaatgaagattgtgaatgaagctttgtatgtgtgtttgaacattcatttgcacgatacattacatcatacatttgcattcataaacattcatctagacatacataggatcatcatcaccataacatagacagttgcttcggctctaaagagaaggcttcaggaaaaaagaaaaagaagcagtttcatgcttcactgtgtacgaaaagaagggaaggtgtttttcgccttcggctca

SEQ ID NO: 78797 - DNA, 264 bp, Zea mays
gttccgcaatcggccttttcatctcacctaggcgggccaccatctccttgttccttagcacctggccgatgaagcgactgccatctgtctgattacatgatctagctcttcttcctcaagcgtcgagctaacagatattctattctggcttgtggcctcccgaagagagacggactactgggtgtggtccaacggttgtagagctggagccccagtcgctgaagctttcttcggcgccatatcgaaggtctatagcatccgaag

SEQ ID NO: 78798 - DNA, 287 bp, Zea mays
tctataacatactcaatcttgaaacttgaactttttttcattaacatcaggaggctgactcacccttagcattggccatatgggctatgactacagtttggcgttctgcccttgaaaactgtatgatgctgctactaacagttcctttacttagtagaaacagtacggaaggccctattgctatgtattataaaagaatattaaggaacaaaaactggtatggccctactgctggataaacaaattgtgggaacatgcccaaaactggtatgttttttggagcattg

SEQ ID NO: 78799 - DNA, 273 bp, Zea mays
atgaggcgacactatataatctccgctttgccgagtgccctatattgcactcgtgcaaggagctgactaaaggggccgtatgtgatccctttgaccagcgctagctaatcaggcgctggacgatgaagcagctttcgccgagtgcctcttaatacgctctgaaacctacatggttatgaggcccttgtggagctcttttgccgattgtcagtgcaacggacactctacagagagagagcattggcgagcgtgactaactgggcaacttaacat

SEQ ID NO: 78800 - DNA, 243 bp, Zea mays
gctctgctttgtttgcgatcggtgtttggctgttaatccaagctagctagctggatgtgtgtgagaggtttttgcaaataatggtgggagatggatggatggatggatgggcagacaaagcatcagaggttcaatatattatctgaaagatactactactccctccgtttctttttattagtcgctggatagtgcaattttgtactatctagcgactaataaaaagaaacggagggagtacta

SEQ ID NO: 78801 - DNA, 272 bp, Zea mays
tccgcagcgtgtagcttcctatgtcaccaccctccgttatctctactagtccgatcctctccgcgcggccggccggtgctagctaaactgttgttgcagcatgcatcataataatttggtttcatatagccagggaataattcttcgacatatatcgcatgctgctgagtttcagtttgtattttcggttgctcaactagtttcttattaccttggactcagcataactaatgttattgcaacttcattcttgaaatggttatttcttttca

SEQ ID NO: 78802 - DNA, 273 bp, Zea mays
tgatgcatattagatattattacaagaatatagtactacagatatgaattgagtttggttttgggtaacattaacataagcaaatgaaaaaggcatcaaagcatttcttctattagaaaatatgttcccactgtaccttctttcctcggatgaccactctaggttcaccttggatcaccatgtattttgtacctccaacaaaaagacaagttggtgcaagagttctaggttcatcaaagtccaacaacttcctcatcctttaacagcaacaag

SEQ ID NO: 78803 - DNA, 271 bp, Zea mays
tctcctcaattggcgccactcctactctctctcgtatatcatcattccggactcgatctctccttgtgtggccacatatccagcgcaacatacgcatctctgccacacttagttgttggacatgtcgtcttttagtgggccaacattctgctccatacaacatagccggccggattgctgtcctgtagaatttgccttttagtttgcgtggcacccggtggtcgcataagacacccgcagcttgtcgccacttcaaccatccggctttaat

SEQ ID NO: 78804 - DNA, 270 bp, Zea mays
tgagcgaatcacagagtcccctccatggctacagcacggaggtggttgtggggcattcacgcggtggcgcccttcctctttctctctagttctctctccctatcctctctatactggtgtccccataaaacctcggcatggcttggtggtccaagggggcggcccgaccttttatagcgcgacgacagatcggattccgaaatcagcgcccattggagggggggggtcggttggaggagcacgaggtgcgcgcaacccgtggaatccgcg

SEQ ID NO: 78805 - DNA, 269 bp, Zea mays
taagaatgacttgccgaatcaactgatgtcgtgggttgctggttgcccacatattcagggatatatggcgaataacatgaggtagtatgcaagacctgcttcgactgattctgccatgcttcggcttcagcgatctccttctgcttttggatcgtgacttggcacgtccttgttgtgtgtcccttatcctccccacagaataaatagaataatctcctggggtgagtgctgaaccttcctccgaagcttcttccccctctacctcttgg

SEQ ID NO: 78806 - DNA, 213 bp, Zea mays
tcttatgggtgtggcttttatgtcttcaccctccgtgatctctactactgcgatcctattcgggcggccgggcggtgctacctagactgtaggtgcaggacgacgcataggaaggcggttacatatagaccgggagtagttgtttgagataaattgaatgccgctgagttgccaccgggcgtatctgctgctgaactagtttgttattacctt

SEQ ID NO: 78807 - DNA, 270 bp, Zea mays
tctaaagggagagcacattttaggactaaccaatgttcattttgagaaagacaggatttgtagcgcatgccaagcaggaaagcaagttggcactcatcatccgaataagaacataatgacgaccgacaggccactggagctcctacacatagatctattcggcccgatcgcttacataagcatcggcgggagtaagtactgtctagttattgtggatgattattctcgcttcacttgggtgttctttttgcaggaaaaatctcaaaccca

SEQ ID NO: 78808 - DNA, 270 bp, Zea mays
tcactcctacattttttttcaatgggggagaaagtttgaaaaagggcttatatttcactcacaagtatccgtttttggcgattcatgccaaagggggataaagtattaacccaaagcaaaaggaccgcaccaccaccaatttcaaaaacgaagtctttcaaatttgtattaaaaagatttgtattaaaagaaggtttttcaattggtatcttatttttgatagaattttcaaattggtataacccctttcaaaattaatatctataaccc

SEQ ID NO: 78809 - DNA, 273 bp, Zea mays
tagttctacatctgaaaaagtgttcctatgcaccaacggactatgccgacgcaccattccatagaaaccttggaaacatgttctctgcataagtggttcaatgcaccaccgaacttgacctatgcaccaacaaccgcagactctaactctctttgtgcaactagttcggtgcgccgcacacctgctagagttgagcacttcagccttttcttccttgtttcctttcggttgtccttgagggcattcctatgacttaaacaaacatttttagtg

SEQ ID NO: 78810 - DNA, 292 bp, Zea mays
acactctctataccacacgctttgtgtggaggtgggattagttttgatctcttgcgtgggtcttgtattgaatgctagctcttgtaacgcgtgcaaaactggaaacctggatcctctgaatgtgcggagaagaacataatgacgaccgacaggccactggagctcctacacatagatctattcggcccgatcgcttacataagcatcggcgggagtaagtactgtctagttattgtggatgattattctcgcttcacttgggtgttctttttgcaagaaaaatctcaaaccc

SEQ ID NO: 78811 - DNA, 266 bp, Zea mays
tcgagaatttgggaaatccgctcctctataattcatcggactgtccggtgtgacaccggactgcccggtgtgccagcggagcaacggctactttgcgccaacggtcgtctgcaaaggaacagtgaaacgctatagtgcgcgcctgcgtgcgcagaagtcagagcaggcgtcagaaggcgcaccggactgtccggtggccccacatgtcagagctccaacggtcgaaccctaacggttgggtgacgtggttggcgcaccggacagtg

SEQ ID NO: 78812 - DNA, 103 bp, Zea mays
ctcttgggtgggtcttggattgaatgctagctcttgtaaaggggttaaagagtggaaacttggatcctttgaatgtggggtggcccccccccccccccccccc

SEQ ID NO: 78813 - DNA, 270 bp, Zea mays
tcggagccaaagcaacttttctttgaacgaagccatcagctcagcaagtggatgtgagttcaccggaggtgggcgccaatgttggggacttgttctcaaatattatgaatcaagaacaaggcaacacaaaagagggttaaatggttaatgcccttcgtccttcgaaacattacttcccttgggatataacgatcttcggacgaaggtcatgaaggacataccttcatcattatgatatatgataatgttaatggcaaacatatgaaatac

SEQ ID NO: 78814 - DNA, 267 bp, Zea mays
ttgtcgcgggcagagttgttgatgagcctacgccggcgtcgaagctcgggtagcgtgtctgggagattggtcgtactgtgtgggagggttcccattgcttttctcatggagatcgttggtgtaacgccgcaatttctcgttgacgactgcatctccgccgtgaagccactcgcgccgtggccaagccatatgaccacaccattacctgttaggacctctacattcggtccgccttgtcttcctgtgcatttaacttatcagaattga

SEQ ID NO: 78815 - DNA, 271 bp, Zea mays
tcttgaccatctcaacatttttcaagttgttgcagctaccaccgtcaatgatggtatgtacacggtagtccttaatgatgaggaacatattgaagaggttgtggcgctgtctgttgtcgtcgtcgccgaacgtggcactcaaagctcgttgcacaatcaaggcctcataagtctctgtcgctactgtaccaagaacctctttattaccatcatcagtcccagcaatgttagctccaacagtatcttcatattcaacattacaagcactaac

SEQ ID NO: 78816 - DNA, 269 bp, Zea mays
tcgcacctctgaactaactcggctacgtcattcttcgctgttggccaatagaatcctgacctgaagaccttcccaactattgtcttggatgcggcgtgtattccacattgcccaacatggatctcatccagaagtcgcttcccagtagatgagagaatgcatttcatgaggacgcctgatgcaccccttctgtataatgtctccccaatgagtgtgtagtgagccgactgtctggcgatacgctcggctgcatttttgtcatttggctc

SEQ ID NO: 78817 - DNA, 265 bp, Zea mays
tcgtgtcgaacccaactctttttttgaactatgccgtgggcttggtacggggaggtaagtttagcaggggtggacgcactggactgttgcatcctctgaatgtggagtaatgaaaaacaatgctacgcaaactaaggttaaatggataatgcccttttgccttcgaaacaatgcttcccttgggatgcaacgatccttggacgaaggtcatgaaagacataccttcatcgttatgatgtatcataaggttaatggcaaacatatg

SEQ ID NO: 78818 - DNA, 270 bp, Zea mays
tgaaaaatatctagattctgtccgaaggatcgaggcttcctttgaaggattctctgttaaaaatattcctcgtggagaaaatgaatatgctgatctattggccaagtcagcagcacaggggctgcctttacctttggaagtatttttcgaaacaataaaagcaccttcggtcgagcttcttgaaagagcggtcctcaatatatcccctgtctatagtgaagattggagaactgaaatcatctctttccttcagggtaatttcctttcaga

SEQ ID NO: 78819 - DNA, 269 bp, Zea mays
tgccagtacttattatttttacaacatctaccagcacagcaactgcagaccataccagtaacttggcccttcgcatgctggggactcgatatgattggacctttcaagaaagctcaaggaggatacactcatgtactggtagcaatcgacaaattcaccaaatggatagagttcaaacccattgcttctttaacctcagctaaggccgtggaattcatacaagacataatattcagattcgggataccaaacagcatcataactgacct

SEQ ID NO: 78820 - DNA, 265 bp, Zea mays
tgtcgatgaccagtttttttactggcaaagcaaccacaaaagaggcccgagtttcaacacagaggtccaaaccgcaaagaacccaagacaggacgtgaaacagacggaacactccacaaggccccaaactcgatctggcaagccttggaacccaacgagacgaacaagaagaaggccagtaacgggaaccagaggctgtcatacgctcaaccagattactccgggcctccacccctaaagttactgtagctacacgtcatcttat

SEQ ID NO: 78821 - DNA, 267 bp, Zea mays
tgtgccttaaaacatgatgtttcaagaagttggagtgcttttgtgaaagcttttgcgaatcacttgaagcgttagtacttttgtgaatgattttgtaaagtgtttgcaaatatgtgcaaaacataataacatgtgtaggttttgtgaatgattttgttgtggtgcttgttgatggtttatgtgatgtggatctatcattgtgcaatactaattaaatttgtatatctatgtgattatctgtataaaaattggtgatttgtgatgctt

SEQ ID NO: 78822 - DNA, 268 bp, Zea mays
tgaaatgggttttactccatcattgatcgatgtgcaagttcacctaatcatacatctcgcggatcacattagaatattagggccactatatttacatcatatgtttcaattggagcgatacctgggaatctttaaaagttatgtgcgaaatcacgctcacccaaagggttcaattatggagggatacactacagataaagtgattgacagctgtataaattacatcaactacggaacaatgataggtgtgcttgaacctaaacatgag

SEQ ID NO: 78823 - DNA, 266 bp, Zea mays
tgccttcgcctcattgttccacccacaatccaatggagtcgtggagcgtgccaatggtaaaattttcatagccgtcaagaaaatgctcctcgacgataagaaaggcaagtgggccgacctgttacctgaagcagtctgggcgctgaacacgactgagtgcagggcgactgggttcacccctttccgccttctatacggatcggaggccgtgaccccgcaagaaataaaatatgggtcaccacggacaatcacttcagccgtccccg

SEQ ID NO: 78824 - DNA, 273 bp, Zea mays
tatagcgctaacgtactatagcgttatgggcctgtttgtttcggcttctggcagcttctggccaccaaaagctgctgcggactgccaaacgctcagcttttcagccagcttctataaaatttgttgggcaaaaaccatccaaaattaacataaacacataatcggttgagtcgttgtaatagtaggaatccgtcactttctagattctgaaccttatgaacaactttatctttcttcacacgtaatcgtaataatactcagattctccccaca

SEQ ID NO: 78825 - DNA, 272 bp, Zea mays
tgtcgcacccgggtttttttttccaagacccaggcgcgaacataaacaccaggtgtgctgggaccaagtctcacacatatgatgaatcatggcacatgatcgaatttcacatctttactatataataggagttctgtacaaaataaataaataattacattataaggagacaacggtccagcatcccaaagttgactgggagacaacaacctagacctctcacgaactcatcacagcatcctccatgtgcctcatcctgtggtacctgttct

SEQ ID NO: 78826 - DNA, 247 bp, Zea mays
ccacccacaacacaatggagccgaggagcgtgccaatggaagaccttccgaaaccaagcataaaaccaacaaaactgatagaagggccagcagcaccaacgagaacccaaacccaaccggacggcagccaataatatacagaaggtcccaacaaacgccaatctgcgtgttgtagaacgacctgaagccggggcacaaaaagaagagaaaagataggcaccaaaggcaagagttactctcttttccc

SEQ ID NO: 78827 - DNA, 271 bp, Zea mays
tacccatgatgaggcattttttcagttaaagggtcctagatcagcaggccaacaatcggaacggtccttaatcgacacagacgggcgacctttcctgctcaacgtctggtctcatcttattatttaacactcaaaccatgtacctgacagaggtacaatactcgaataatgaattcatcattgcgagtgatgccttcattattgcaagttctttttcataaaacccatatccagtgttgcacaacattctttttaaaagaaacacttttag

SEQ ID NO: 78828 - DNA, 269 bp, Zea mays
tcaccttgggtgacgaatatcgctggggtgctactcgggagccttagctatcacactaagagcctttcgctctcttgtatatataggcagccgagctacaattaggatgggcatgtctcctatcaaatgctgagaataactactccctgtgtcccaaaattaaattcgttttggctttttagtgggttcataggtgtatgtattctatatatgtgcctacattcattatcatctagttgaatatagacataaaaattaagagctaaaac

SEQ ID NO: 78829 - DNA, 286 bp, Zea mays
aatactcctccttctagtgctcacggatttgtcttttgggggcctcaaaaccgggaggttgggcaacacacactacatcacataatgttaccatacagacaggcactctttacatccatccggtagaacttgatatgatgagcacaaacctaaccaaaaaggatccggattgcttccaatcttgccacgggagcaaatggaatactgaaatccaatccttctatacgagaatacccacgtgccactaattcagccttgatcgttactactaatacattttcaccgc

SEQ ID NO: 78830 - DNA, 289 bp, Zea mays
  unsure (1)..(289): unsure at all n locations
gacacttttnaatacttcagcttgaattggctgtgtatttttgtgaactacaagaacggtgggagccattgggttattgacagtggatgcacacaacatatgacaggcaacccacggatgttcacctcattagatgagaatgttgatggtcaagataaaatcacatttggagacaactcaaaaggaaaagtacaaggacttggcaaggtggcaatctcaaatgacttatcaatatcaaatgttctcttagttgcacctttgagcttcaatttattatcagtgggacaac

SEQ ID NO: 78831 - DNA, 267 bp, Zea mays
tatggactaaattttttatttaagaaattggtatatttgggggacccgatttaaagaattataggaacatgatttttgttactcacaccctaaaataattttggagaggtttttttagtaactagtggagatggtctaacttattatcgatattactattgacagtcatcggtctttatttactacatgcttccatatataactttatttgtagatttttagttttgataaagtataatgttttactaaaataagaaatcatttaag

SEQ ID NO: 78832 - DNA, 267 bp, Zea mays
tgtaaaaggggattttttttatatcagagaccggcataccacgtatgcccaacaataattagctgaatgactcggccatgttactacactggaactcatatctccatccacctaagtcgtgagctcttgtccacttctccaaatccggcatcaatccattcaaccaatctctaccttcggcatttgttgcgactttgagcttttctaacttttctctaaagaacttgtcttccagctgtcgacatgtctcctggaaaagctcaaagt

SEQ ID NO: 78833 - DNA, 267 bp, Zea mays
ttgcaagaaaaggagattatatgatgcctaagggtgcttgagagagtccattcaattcttataaactcaagctatcaatcttcaatgatctatatccgttattgacccaaggttatttttcaaattactatgtcttaaaatcatatcatctcgaggaagatattatatgttgtaggaagtgaagagatatcatgtgcaaaaatcaaggcctacaacatggaggaaagccaaaggatggtaacatttatattcttaagtgcaattatc

SEQ ID NO: 78834 - DNA, 265 bp, Zea mays
tatgtgggccacttggcctcaacaggatgagccacaacagcccgagcgcccatggcttcggggttcgacagtggcagggaatttcctttctggcagagcgcggcgagcactggtggcggcgagaaactggggataaataaaggagaagggaaaggggcgcgtgcgcgacctacttgtaccagtccgagcgggaggccgggttaatctgcgcccgtgaattcttaactgaagaatcacgccggccgcgttccactgcatggtggac

SEQ ID NO: 78835 - DNA, 264 bp, Zea mays
tctccggtgttcttatttaccgaagctggttcaatataacgcggccgatgcgtaagaacctttatctttttccttttcggttctggctcgctaggagcagctgcagcttcttcttttgcagagattgtgttttttctcttctgccttcgaatgggatagcagtaatcaggatagacaaacccaatggcatcaaatacccgattcagtctcttcttttttcggcctccgaaggctgctgacattgcattatcttcagccttcgag

SEQ ID NO: 78836 - DNA, 273 bp, Zea mays
ttgacctgggaatacccctttgtcccaaatcgggctttgttccttgtcaccacaccatgctcatcttgcttcttgcggaagacccacttggttcctacaacattttggttaggacgtggaactaaatgtcatacctgattcctagagaaattggtgagctcctcttgcatcgacaccacccaatccgaatcttgtagtgcttcctctaccctgtgtggctcaatagaggaaacaaacgagtaatgttcagaaaaatgagcaacacgagatcga

SEQ ID NO: 78837 - DNA, 273 bp, Zea mays
tctaaagggagaacacttgttttgtttgactaacgtgcaattcgaaaaaagatagaccttgtgcagcttgtcaagcaggtaaacaagtgggaggagcgcatcacagcaagaatgtgatgaccacttcaagacccctggagctgctgcatatggacctcttcggacctgtcgcctacctgagcataggagggagtaagtatggtctagttattgttgatgacttttcccgcttcacttgggtgttctttttgcaggataagtctgaaacccaag

SEQ ID NO: 78838 - DNA, 270 bp, Zea mays
ttatcaacctttcttgtttttcaataaatatactttagtttttataattggctcaagtcataattttaaacttttcattccctttttcttattttcttgaattttgctcatggggctcacttagggtttttaattagggttgcacattcttatcttttcaaagactcaattgttttgatcatgatacttttaagtatatatatacttggtgaattctttattacttaagttattttgatgttcatgcttactttggttcacatgaaataa

SEQ ID NO: 78839 - DNA, 270 bp, Zea mays
tttagctttgaagctttatttttgaaaacagttttttagtgtttctgaagatgtctgaagctgctaagaaggctgctgctgaaatgaagctgagtcttgatgaagagaagaacttggggtttcttatagcgatgtcgaagaccaacacagaaaaaatcaccaaggagattctggaaggtctgtctgaagatactggtgacagtgaaagttatgatgtggacagcggtggcgaagactccgaagatcgcccctggcgaccaagccattcag

SEQ ID NO: 78840 - DNA, 270 bp, Zea mays
tcacacacattcttcttattatgcataagatcaagacaatgacgcacacttagatcgcgccaataaggtaacctccaaaatatggattttttcttccaatttctagacaatgctaaattgtgtttcccgaacttattttcaatgtccttcacactctcataaaccacatgtccagaactgcgtgatggagccttttcattttcaatactcccatcaaatgcatcaacattctttcggtatggatgatttctgcgtgtccacctacgatgt

SEQ ID NO: 78841 - DNA, 296 bp, Zea mays
aggcgccactatatactcctgctgctttctgcaaagacgttttttttccaccaaaaaggtatgaatacttgcaagaaaaaaatatcaactccgaagcgagcactatcccaagaagaggggacccccacaccaccttctactagcgacgtggaggaaattctaaaggtaatgactgaacccatgcccacgaagctaagtccattagggcctcgactgacgaagctttttcataaggcggcggagccggaaaaaacgaatatagccaaagctaataggcaaagagttattgccgtaac

SEQ ID NO: 78842 - DNA, 271 bp, Zea mays
ttaccgaaaacattgttttattgggggaaacctaacccaagttgagaaaacctaaaagctttagggtaatagttataaaatatccctaagaataaacttgaatcacatttatacccctaaggtaccaaaaaccctaattggaaccctggaaaaccctaaaaccaaaccctaggggcctatgtgcaaaattagtccacttttgggctaaagtgcaaaaaccaagccaaataagtattttaagtcatttggttcacaaatatgtggacttgaa

SEQ ID NO: 78843 - DNA, 268 bp, Zea mays
ttaccaaatggacttttttagtgccttcctcaatggaccaatcaaggaggaggtctatgttgagcaacctcccggctttgaagatagtgagtaccctaaccatgtctataggctctctaaggcgctttatgggctcaagcaagccccaagagcatggtatgaatgccttagagatttccttattgctaatggcttcaaagtcggcaaggccgatcctactttattcactaaaactcttgacaatgatttgtttgtatgccaaatttat

SEQ ID NO: 78844 - DNA, 269 bp, Zea mays
tttgattctgtttcctttttccttccttattgaggtcacgcagaatctagggtttgggcagatctggagagatatcatttcagggctgcttctcacttcctctactcgagtgttagttaatggtcatccgggaagcataatttctcatagaagagggctgcgacaggggatcctctttctccgacgctgtttgtgcttgtcatggatgtgcttggtcaacttgtctctaaagcagatgaggaaggtttattacaacctctttctactag

SEQ ID NO: 78845 - DNA, 242 bp, Zea mays
tgggtaccggaggggggccttttgccagtttggaccttttcagcatttgcgttatgaggactctagggaaaaccttgtagtgagaccctggccattcacctcggaagtgaatatgggtctagctaacccgggctagaagggaatcacgactcatgggtaaagatccgccacctctgcagagtgtaaaactgatatatcagccgtgctcacggttatgagcagcctggactcctcacatgata

SEQ ID NO: 78846 - DNA, 280 bp, Zea mays
gacctattaatactcacttggaaccttggactttttgtgtggcaggttatctgcgttctgataacctgtgtgccaagggctatgtggcatataattttcctcatgagccacaagccccagactaatccttgagctgggctaaaatcttaaagaattgccgggtatattccgattataaaatacttatgggtacacgggtgagagtttaatgagtttggacccatacttgatatatccgcagggtactctttttcttccgttggcagacccgcgggtgtaa

SEQ ID NO: 78847 - DNA, 293 bp, Zea mays
acacgatacactactcaatccttctccttgcgcgcagtttcttttttcaacacgaaccgtcgaaccgacttaaagatctaacgacttcactacccatcaggtttgctgtaatgattcgccgcgatcggaaacggcttgcatgtaatctaacacaggctgaaccctgcgcctataaatatgtgaacagtacccctatactgttcacgtaatactgtaataactgatacattacgctggaaatataggttgctgcccaggcgaagggctaaatgtgcctgaatctcatggattaa

SEQ ID NO: 78848 - DNA, 274 bp, Zea mays
tcaacaaaccagctggatctttcccgtcacgtttcagtcaacaaggtcaaagctcctttcaggccccctccattgcaagcaaccaacctccagctaatgcctgttggcactgcggagaccccagtcactacaagaataattgcccccagttgaaggcatccgggcctacttactccaactcggtgaatggccccaagaatgccccagcacccgcctccaaggcaccttcctccaacagccagcagagcaagacccagtatcatggcagggcacg

SEQ ID NO: 78849 - DNA, 270 bp, Zea mays
ttctcgttgcttgtagttggcttttcgccggtctccatctccttcttggcgagttctcccgacatcacttcgagcggttaggctctaatgaagcaccgggctctgataccaattgaaagtcgcctagaggggggtgaatagggcgaaactgaaattctcaaaaataatcacaactacaagccgggttagcgttagaaatataatcgagtccgcgagagagagggtgcaaaacaaatcgcaagcgaataaggagtgaaacacgtggatttg

SEQ ID NO: 78850 - DNA, 269 bp, Zea mays
tttccccctctctctctttttttggtgacttgttcggtttcaactctagcctaccccaacttaaaaggctatgttgttgttaatgtctgtctgatgtattgtaatttgctgtctgcattgaacctttttttattatccgtttccagttggaggtggtggtgagtccttagtagttgatgcttggagccttcgtccatcgcgtgtttggaaagatggtcaatgggtagagtggtcccatgcaagagaaaggaaatccaaatctaataagg

SEQ ID NO: 78851 - DNA, 270 bp, Zea mays
tcaccctagtgacaaatatttctaattattaatttcttcaatttctaatggcatacgttcaatcccagtgcaatataaaaatcaattaataaatatgttagtttgtgtattgtttaaacattgtagatatataggaccgagtttagagagcattactaaagatgaagaagatatatatgacgaaatcttttggagggtagtgtaaaggacataaaatatttttctttagagatataaaatttataggacgttgttgaagagagtctaaag

SEQ ID NO: 78852 - DNA, 272 bp, Zea mays
tgtgcttttcattaatttttacatcgactttcgccatgcacccccaagtgcgcaagtatgaaagtgatggttttctcccaacccacttatcataaggggttttttcttctttgcccataggaattctattcagaacatgacatgaagtcaggactgcctccccccaccatgccttagataaaccacaagtgtctaacatggcattcaccaggtcagtcaacgtacggtttttcctttcagcaatcccgtattgactcgggtgaatagggagg

SEQ ID NO: 78853 - DNA, 271 bp, Zea mays
tcgtcatctgaaagaatttttccctgaaggaaggagatgatctcagttctccagtcttcactatagacaggggatatgttgaggactgctctttcaagaacctcaaccgaaggtgcttttattgtttcgaaaaatacttccaaaggtaagggcagcccctgtgctgctgacttggctaataaatcagcatattcattttctccatgaggaatatttttaatagaaaacccctcaaaggaagcctcaatcctttgaaccgtgtctaaatatt

SEQ ID NO: 78854 - DNA, 268 bp, Zea mays
tattcaaaggtttttttttttctaaagtagataaaatcaatgaattgattgatgctttaaatgaaaagaatagacttctagaaaagcaagaggatattttatatgacgagcatgataagtttgtaagtgtgcaaaagtctcttgctttagaggttaaaaggaatgaaatgctttcttcagaattatttgcttgtcatgaaaatgtgtctagcttaaagagtattaatgatgatttaaatgctaagctagaagtagttaataaatctag

SEQ ID NO: 78855 - DNA, 290 bp, Zea mays
acactataaaatactcagcttcccattccgcttttctgtttccttacttattgaggtcacgcctattccctggcccggccaaatctgcaaagatatcattacagggctgctgatcacttgctctactctagcggcattgaacggtcatccaggaaccataatcactcatagaagagggctacgacttgggatcctattcctgcaaccctgtttcatcttgtcatggaagagcttggtcaacttgtctactaaagcccatgaagaaggtttattacaccctctttctacta

SEQ ID NO: 78856 - DNA, 265 bp, Zea mays
tcataaaaaggaaccttttggcatctcatacaaacagcttcagccgaaagccgcttctcccttgaagaccttcggggacgaagcatagacccaacactaagttttatgccaaaaccggcgatggacctccggatcgtacttaataccattctaaattcccggggaaggcaaggaaatggtggggggggttataccgtttgaatgtgtcttgtgccctgtttttgaatttatataagtatcgactgtgtttgttattgaattccat

SEQ ID NO: 78857 - DNA, 245 bp, Zea mays
ctgcaatcgagagggtcgctgttccttcagcccttctgtaatcggcccgactagcaagagatagctatgggtccatgatccgcaggcttgttcatgcgagatcggcataggcgaacaagggtccagaggactctagggtgcccacgagagcaaatgcattgtcagggtactcaccggcaacaagggcatacccaactggctcaagtctagcgttgttgatgaacaccaaggcgactgccttgggg

SEQ ID NO: 78858 - DNA, 262 bp, Zea mays
tctaccacttttttctttttgcctggatggtaatgaatctccaattcgtagtctttgatcaactctaaccatcttcgttgcctcatattcaactctgactgagtgaatatgtacttcagactcttgtggtctgtgtaaacatcacatttctgtccatatagatagtgcctccatgtcttcaatgcgtgaaccactgctgccaactctaggtcatggattgggtaattcttctcatgaaccttcacctgttgggacgagtaag

SEQ ID NO: 78859 - DNA, 273 bp, Zea mays
tacacacgtggtcggggttccgttcatcctcgaagccagggggttgctctacgtacacctcctccttaattggcccgttgaggaaagcgctcttcacatccatttggaacaacctgaaagaatggtgagcggcatatgctagcaagatacgaatggactctagcctagccacaggagcaaaagtctcctcaaagtccaaacctgcgacttgggcataaccttttgccacaagtcgagccttgttccttgtcaccaccccgttctcatcttgtt

SEQ ID NO: 78860 - DNA, 271 bp, Zea mays
tctgattcccaacggttgtttttgcctctcagtactgtcgaaagatgaattggccgacagtttggcatataatagtataaaggtgcgaaaatcattttttgtttttaaaaacaaattatttcacttgtttatacttaatactatactccttttgcagggattgatccttagcaatgccctcagggcacagaaaaatatcgaagactaaggatgcacaatagctctgaacaaccttcgctcggaagtaattgaactaaggaacgaaggcctc

SEQ ID NO: 78861 - DNA, 270 bp, Zea mays
tcgcgagagagggtttttgttttgaagtgagccgtctgagtcagcctcctcccgcgtgccttgggaaggccctgggcatccccttttatagatacaaggggatggtccagctgtacatatgggggtgtagctatgtgctaacatggccggcggagaagtgcttgagccctgtagaagcgtagctggcggtgcggccctgggttctgctgatgtttctttgccttcgtagagagctgagaacaatcgacgtaatagacgcgtgcagggaac

SEQ ID NO: 78862 - DNA, 270 bp, Zea mays
ttctcgactaaatcgttgttttggcctcatggacgggtgaaagtacgcgtaagcggcaaggccgaccgagccgagggattcccacgcctctgggatacggatacctcactcgtcccttccgcgaaaagcaactctcgctcacacaaacatccctattaccgacagagtccagatgctcgaaacaagaggaaaaaaggacgcagcttcgcaagcgcggtgagggcgtgttcttctggcctcggcggccgcagaaagcgcgcgctacaagat

SEQ ID NO: 78863 - DNA, 265 bp, Zea mays
tcttgaccatgtgtatttttgttatcttgagaagggtgagcaatgcatttcccttcaagttgcgtcaagctcatttttagcctctcattttcttctttgagctttggatatgtatcatcgcttgctcctgcagattctagctcaaaggaagatttgcttgtcgacggacaacaagcattagcacatggtaatgtactttcaatttgaatacatgtacaagagtgaggttgttgggattttaagctttctatcacaacctcatgag

SEQ ID NO: 78864 - DNA, 273 bp, Zea mays
cttcttgcccacatcgcttttttttttactcctgatcatatcgggtttgatatgctatcactaatgtgcttacaagattatttcaagccaacgcataggactatcgaaagggaatcggagtcttaagcgaagacaaaggctgccactccgaaactaatactctgtcacctctccaaacgaccctatcttctctgggggagaaatgatcataatggaacatgacctcatgcttgggggagagagttgaagctcaaacccacaacgacttcatct

SEQ ID NO: 78865 - DNA, 271 bp, Zea mays
tttggaggacgccgccttttttcacatatttcaatctaacaaattgtaactattgccagtgtcagcacccacacagcaaccaacaatctaacaaattgtcttgtgtctcgcgcgccgccgtcggaaggagggagatatcaggtttgatatggatgcgtatgcgtctggtctggatcacctttcaactacgtgcatggtgttgggctgtccggctgggccgagctatcaagatgggccgaggccacaatcacgagggagcacacagggaaga

SEQ ID NO: 78866 - DNA, 267 bp, Zea mays
ttgattgtgtctttgtttttattgctagctcttgtattgaatgtgaaagattggagtgcttgggtgaggtcaatggaggtggttggggttgtatttatagcccataaccactttctagccattgctccctttctgtcgaccgcagacggtccgcccctacacatcaacggctgaaatcgcaacggtcaacagtaacggctatatcaacggctactatgcattaaatgcgtcgtcagatgtcaggtaccgcagtcgcggacggtacgg

SEQ ID NO: 78867 - DNA, 265 bp, Zea mays
tgtccaacgcagtttttttttaactgagtggatgaagaaggaaaccggttaacatcacgacagccattctgaaaattgtgtaatgttcactgatttttacaaaaatataaaattttaaaaaaacagtcagaagtcaaacaacgagactcactttagttttaaaacaagcatctctttgcttcaattgtggacttgtcatattatgaataggcagacattgtgcgaagttattagtgttttcaaagacagctaagacaatatgctt

SEQ ID NO: 78868 - DNA, 265 bp, Zea mays
ttgtattgctagataatttcagcgcgtataacaaaactatcatgcattgtagcatatgatataattaaatatactgtaactacctctgcctcacgggccgcctagcattataaactgaaatccattgagctgctaggctccctaatctaaccttctttttaggttgttcatcttcttctagatctacaagcaatcttccacgtttctgtccaacctatagtacataaacaaataaagataagcacatagaaatctaactatatat

SEQ ID NO: 78869 - DNA, 289 bp, Zea mays
ttttagggacacttaaatctcagctgggaaggtctttttttccatgtgccaagcggcgaagccacagccagcccatgcaagtcttagctattaagcatgcatctagaccggcctgttcttttgcaaaatcaactaagtaaagcttgccggctaatacacccttaaaagctagggaaccatcacttcttctaaagacagacacatttatgtttgggaataaacaggtataccccatattgcataattgactaacagatagcaaattataaccaagagactctactaaaaa

SEQ ID NO: 78870 - DNA, 177 bp, Zea mays
tactaaaaatcttttttccaaggaattggtgaatatatcgactaacaaggtatgtgtgctaacatgcttaattgtgatatctcccctttgttggtgatccctcaggaagggataccaaatggttttgtcctttgggcggttgggttaaataggataatccgtattgcggttaaaact

SEQ ID NO: 78871 - DNA, 369 bp, Zea mays
  unsure (1)..(369): unsure at all n locations
ctaagcttgtatttatccaattacaacaagcaccatctcttatcatagattntatatggataaactcatctcatgagatgacattagtagaagcgagttgctaaaatagagaaacctcataatatggactaaaattcccttgagccctcatgcacaatatatnttgaatgacatggataatatgcatggttgttcaacgaagtctaaagggctgacttaatccatattatggtgagtgtctaacatggaagaataaaatccaaattaactagatagaanatacgtcacaataatttggattngtgaccatatgataatattcattcatcttncaatnggacatttatttcataatcaacaactgatgtg

SEQ ID NO: 78872 - DNA, 252 bp, Zea mays
  unsure (1)..(252): unsure at all n locations
cgccattacggacgctnctgaatctatgaacttccgacgtaatggcacacgtcggttagctggtcagatcggacggggcctttggacagtcagaaataattattaacacattctatgacgtaaaaacgcccttacccacttactataccctgcatgaaaagaccgcgccccataagggctgagttagaatctgctaaaccctgactattgttttgggagccgggcagaataatatattagaagatttgttat

SEQ ID NO: 78873 - DNA, 267 bp, Zea mays
  unsure (1)..(267): unsure at all n locations
atgtatacacacaatccgagccatatataactctgctagctgagaacctttatagtagtcttgcaggaataagtgaccactttagtcaatctatccacaatcacccatatagcatcatattctttcttggtgcgaggcaatccaataataaaatccataccaatctctttccattnntcactcggtattttcagtggatgcaatagtcccgcttggctctgtgtgtcagccttaactctttgacatacatcgcacatagccacatgt

SEQ ID NO: 78874 - DNA, 123 bp, Zea mays
  unsure (1)..(123): unsure at all n locations
gacataccagcttgtccacgatcaaggcgatgtctacagcaacgcttggaacattcaacagctacgtcgcttacccttaagatngttcaaatcgntcatatacctcgtttctctctacacaca

SEQ ID NO: 78875 - DNA, 278 bp, Zea mays
ggacgacgtgtatccacggacgggacacatcaatacagtcggcctagcgactggattacacacctctagtattatgctgccactcggttacacgtgtagtgatgctgtaactagatgcctaccgacgggaacataccctctggtgcaataacgggggtatattagtaaacgtagtgccacgaaccacatatgcaagccccctgccatctgatgtgctactgatccgtaaatgaaatgttgacagctcgtcctgaatgttccgcaggacaacagtgctc

SEQ ID NO: 78876 - DNA, 319 bp, Zea mays
  unsure (1)..(319): unsure at all n locations
atacttccgncctaactataatanagctaacaatatgtctcatgtcatatattntaattaatatataactaatacgatattttatactaaataacatcaaaacctaaagaaatattattaagagaccccatttctgacgatntaacaattatcgtcaaaaattagaactttaaataatctaaatatctatggtaggactaaaaaatatgattatattatataatcataaactagccgtcagaaataaataacactcaatcaaatatacaatatacacatcanattntctgcatattcaaattaaactaaactatggata

SEQ ID NO: 78877 - DNA, 325 bp, Zea mays
  unsure (1)..(325): unsure at all n locations
acgggatcaatcttnggcctcttaaccccattgcctcaccaaagtcttcaattaagagcaaatggcaataagatttcatgagatgaactggattagtaccctctatcggagtgcagggagttttcatggtcagtcaccttttcctttaatctcttcagataatatcaactcagccataatagctcanaggcatgtgaacacattccctaacatgtcatacttgcacgactgtgagcaggaggttgtcactgagccctatagcacaaagcaaaggactgacaagctagtctgtgccatcatcagtcggatttacatactctccact

SEQ ID NO: 78878 - DNA, 176 bp, Zea mays
  unsure (1)..(176): unsure at all n locations
gaactctttcatacgagnctctatttatatgcctagcgccccacgatntggtgggtcagcatgtcagtgtncgttgctattctagcgaanggaaggtgttnttcggacattcggctaaaggccttcattcacgtcacagtctanaattngtataaagaaacaaattaatattgtga

SEQ ID NO: 78879 - DNA, 202 bp, Zea mays
gctccatgaccaaattcgagacctcgggtagagggctggctctaccaccgatattccgacacctggggtgggaggcacacatcttagacaatttatcgaccgcttagcgagtctatactcatgacaaacacaagatcctacctaacgctcagcatagccgagtgcaataccaccggtagaataccaactcatgacatatcgt

SEQ ID NO: 78880 - DNA, 335 bp, Zea mays
  unsure (1)..(335): unsure at all n locations
gctgagcctggcttgcccgactctgggagtctcgcgtctgtcggcctcttggaacgaggatgcagcggccattaggacgggcgctgtacctgcggggtcggaacccggacacatgacctgccttagtatgagcatgactgtcgctgggattttgaccatgtgcggtgggtttatttgaagaaagatgatggaatgttaatgagaaggaaaggaggagagtatacattgtcaagcatggggatatgcgaagtganagcagatgtcatgcatgggtgtgttgtggggatgatgtctgtgctgagtaacaacttccattgtgtctgcgtgactatatg

SEQ ID NO: 78881 - DNA, 332 bp, Zea mays
agctacttgactggacaatttagctactaaaccatgtttacatactcttagatgtaggagggtcacagggccctgcccgtcgagtcgcctacgtggccgcccgtcacccgcttgcggcaccctgaacacgccgtgatctgcccgtgccctggcgagctgccggatccgtggcccgtacgtctgggcggtcccttcctaatcggcatattcccaaagagcgcactgtttattatctcctcctggcttaatctttttctccaaccgcccaccctgatgcgcgcgtgaacatccggcgcgctgttacacacaagttgctttacatttctcaacac

SEQ ID NO: 78882 - DNA, 265 bp, Zea mays
  unsure (1)..(265): unsure at all n locations
atcattatattcatgagtgaatgcacaaacaataaccacagcatgatgcacaaattattntagatgtcatcagntaattaatgatttgtcacatgttataataaatggaggcaaacatatacatgtaaacaactatattctcttttacactctntgggtattacgataaagtcgatggtagatacaaacctgcattggaacaagtctcggtcggcgacgtcaattggacattcatacctacctacacgtattgatcacattcatg

SEQ ID NO: 78883 - DNA, 214 bp, Zea mays
cgaacatgactttcccaacttatggcgcctatccctgacttgccagtctacatggagaacgtatatggagatattctatgggttttggaaattccaaactagattgacctaaatgtagacaaaacaccgcgataacttatagtcttggagtactattttctcccaaaggtgagaatacttgctgaactcttacacgagtgcaggaactgtctac

SEQ ID NO: 78884 - DNA, 202 bp, Zea mays
attagtcctacacccccttagacttatggtaactagcttatttattacactcatgtgtcggaaccaaacaaaacctcacatgataagagacctgaataggaatgttatatatagcacagaaagctaactctctataacaaatgcaagatttcttattacgaaatatcagagacaaagtacgtacactacttacttacattta

SEQ ID NO: 78885 - DNA, 261 bp, Zea mays
tctaggcatagaagcagtactctcgttaaatgggccctacttttacttaagctttgctacacctaactgatatgcgaatttatcatgttaacgaagcactactttataatatgaagatgtgatgcatatgtatattatatggtactcactatgaaagtatgattataaatcaagcatagggataaatttagatagtacatcaaggactttacatagtataacttcctgtgagagagcgctaaactgacaggttaccccgag

SEQ ID NO: 78886 - DNA, 341 bp, Zea mays
ctaagtagaactatttttaaacaacctttgttgaaaacgttatccttgctatgatacaaagaatattccaaactataaacacataaataagggcattgagatgaatttactaacctttacttgcttggtccatcacaatatattgatctggaatcttgtttgacgtgagtaacatttttctcccgtatatggtggctcgtgcatatcactgacccgatctaaccgcagaattagtggatagaccattgtggctacagtaccatgctagaccatcagttaacctgattgcctatctacacattcatctttcatacagagattagctgattgaaagcatctac

SEQ ID NO: 78887 - DNA, 99 bp, Zea mays
ggcctactgtgggccctgacttattgtaaggcccgttgttggcccaatacagagtctggggtcgaaagtgggtgctagtcctactcgcacaaacgaccg

SEQ ID NO: 78888 - DNA, 274 bp, Zea mays
  unsure (1)..(274): unsure at all n locations
tattggtcttctctctccttataactattgcagaacaatagagttattgacanactctctaaccacaactgatattaccctcttgcttgtgtataggcagttgcttctgcgtacctatgaagggcattgtcacttttggagcaagaatgctttcgtgtacatataaccatgaaaggaaaatagggttaaccttcttctacgattaattnntggtggtgaatgtccaacacaaacatatggactaactagtttgctctagaactcatgtattaca

SEQ ID NO: 78889 - DNA, 276 bp, Zea mays
  unsure (1)..(276): unsure at all n locations
catcaacggaataaagtgactctattttgtgagctngacttcngtaatggtggtggttatacatccactacacctagtgtaaagggtgatgaagaggtaatgatcctttgactatccatgctaactattctaagatngtacaaggtcatacaattgttattaataacaataatacaactctttaatgtggctatgacatanaataaccaaattatattgtctattcagtgaagaatctgctcttaagaaacttcaatatggcatgtcttataacta

SEQ ID NO: 78890 - DNA, 130 bp, Zea mays
ttcaaacagtattttataataatatgtcacgccattcactgttgaattcaccgaccaacaacacttttaatggcccataagaacatctaaagcgacaggacaaactttggaacccagctcactatacaat

SEQ ID NO: 78891 - DNA, 303 bp, Zea mays
tctggactctaatctagctctcttctgctagagggactctggaaaacatgtgagcggcggagctgttcgataagaaaatcagccacttcagggctgctactctgaactctgttctttccatttctgttgccttatatcgacgtgcatagtgcattaccctgacagacgcttccttgctgtttgtggagtctgcacttgacgcttgacgtgtatgagcattatctataccgcgctactgccactgtgagcctctgtgtgtgttaacacgttagtggatggtggcatacctatactttgctctgt

SEQ ID NO: 78892 - DNA, 133 bp, Zea mays
  unsure (1)..(133): unsure at all n locations
cagtacgtacatatctacgctagctactactactactagtatggaaaccttgtggttcacatgaaacgaaagaatacgtacgctgcanatatgtacgtacttacgaagagaaagaggaaaggggacaagtaca

SEQ ID NO: 78893 - DNA, 354 bp, Zea mays
  unsure (1)..(354): unsure at all n locations
agctacacccggtagagcaaggctgatatatgcgaatgactctgcctactaccgtgctttgtgtactgaatcctacctttactnggagtatccttggcacaagagagctctgttcttgtaccacaccatgctcatcttgcttgttgcggaagacacatatggttcctacaacattntggttatgacgtggaactaaatgccatacctcattcctagtgaagatgttgagctcctcttgcatcgccaccacccaatccgaatattgtagtgctgtctctaccctgtgtggctcaatagaggagacacaagagtaatggtcacaaaaatgggggacacgagatctagtagttaccc

SEQ ID NO: 78894 - DNA, 254 bp, Zea mays
atccataattttgatgctgaatatgtcaagtatcttcctcttcttttggcacgggcctttgtttgtgtccagatgtgagactaaatttatgttgagcctatgttttactctattttgacgctcgttccttgttacacaagtgtgctattatcttgggactgcgttgattcgaacagtggtatatttactcgtgtgagaagttccgaactcacccgagctgttatatacgcgcgtgcgaaacttactttcttcgt

SEQ ID NO: 78895 - DNA, 238 bp, Zea mays
actcagctgtgagtcttatccactgtgctacgcgatgcaattctccctgcagcttatcttaagcatgcttaaccggctctctttgcaaatcactaagaaagctcgtcgtctagtacaccccttaaagctagtgaaccatcacatcttctaaagacagacacatctacatttgtaaccaaccagtatagtccatattgcataattgactaacagatagcataatatatccaagagactc

SEQ ID NO: 78896 - DNA, 177 bp, Zea mays
  unsure (1)..(177): unsure at all n locations
gctagaagatggcctctcagtattgtcaaaggatgaatnggctgacagtttatcatataatagtataaaggtatgaanatcaaatttgtattttgaaacgaattacttcatttngttatacttaatggtgtacttcctcttgcagggcttgatcctcagcaatgccctcagagcaca

SEQ ID NO: 78897 - DNA, 207 bp, Zea mays
  unsure (1)..(207): unsure at all n locations
tctggagttctaatcgtattaaagctcccgattatgatctagagtctatcagatgacacttcaagggtaaaaaaccaatgaagaaacatttctctaccggcaggcgtggaggaagcatataaatctgtgagccactagtcttggtgtgtcattntggaacgaaagtgaattgtgtggcccaaactcatttggtgtactagcttaata

SEQ ID NO: 78898 - DNA, 100 bp, Zea mays
ctcgcatctacaagaaggagctcaaccgtcaaggtgtcaggtgaagtcgcttttactatgtctatcagtacaggcatgacacacagaaaggagagaaaat

SEQ ID NO: 78899 - DNA, 239 bp, Zea mays
  unsure (1)..(239): unsure at all n locations
tccgcttttctactcgactttgttgctgacataatgtgttcacgtgtccaatgaaanatgcttcaggttccgacaaaccattgaagtgatagatggtgtccttgaaccagacttgacatattctgagcatccctttcgagccttggaccagaaggacagggatacccgaagaanaactctcaagttntacaagatacagtggaaccaacattccgaagatgaggctacatgggaaactc

SEQ ID NO: 78900 - DNA, 349 bp, Zea mays
atcatgtgggattgcttcgatctgtcattccctcagcttctggagttctgactccagaacttatagtctgaccgaagatcttctgcaaattgcggataaaatgttcaagcatgaggttccgaccagatgcttgaaggactcatgcacaatgcaaccactgtcatcttgatgtacaatcgaagcatggatgaatctgccaggctcattgcttctcgagcacaaggaggacacatgactacttggcttgctcattgacgctacaaataatcatgatgctggcacaacatggaccaaacttttacaagaatcctacatctgagtatcgactgagctttgaaagatggttaac

SEQ ID NO: 78901 - DNA, 102 bp, Zea mays
ccactgatggcttcgactctctcggggggggaccaaacccccctcttcctatcctcccgactaccccatctgctgcatgcggagaaacaagtcgcgcgtcat

SEQ ID NO: 78902 - DNA, 249 bp, Zea mays
  unsure (1)..(249): unsure at all n locations
acagccaacactgagaccatcccgtacatagtctttggtgctgggactaacatgattgacctttataaagctcaggaggaacactcacatgctggcgcattgacacatcaccaaatggatagaatacaaacccattgcttctctaacctcagtcaacgcagnggaattcatacaagatataatattcatggttgggataccaaatagcatcataaccgacttgggatccaattctactagctcttgatt

SEQ ID NO: 78903 - DNA, 306 bp, Zea mays
atcattcgtattacgattcgcctaaacagctattatgtatatctggatccatattcgagttaatactaatgtcaatagatgtattgaattcgatttatagactcttttatccgaattatattgaattcgagaacccatgaacatctgatactaggtgatccgcaaaaaatatgtccatgaaccattaagacttaacttatcactaattactacctagaatgattatagttcatacatactagaaaatcatatatatcttacaatatttaaatatttatatgacaattacatattatatcaacctta

SEQ ID NO: 78904 - DNA, 125 bp, Zea mays
attgtacgctaaatacttcacttctacactagcttctcaccctcatcatactacttataatctgtttctatcttcggcggactggaaatcaataactgtaggataactaaagtggctatgacatc

SEQ ID NO: 78905 - DNA, 151 bp, Zea mays
ctcagcttagctcttgcaataaacacttactcagtttaacaaagatgccagaattaagcttaatgtatgtttgtgaagataaactaggtatgaagcacggcttatgcatgaacatgctctgtcttccttttatacaagatatgcaaagaat

SEQ ID NO: 78906 - DNA, 213 bp, Zea mays
  unsure (1)..(213): unsure at all n locations
cttggaaagctggtatcaacatgtccttcagcttttgccatgaggtggatgtccctggccgaagagaggagtaccaggtttgtgcaacactcttgacagccatgacgaaagactntgccatgaccgccgtattaccaccatacgaagatatgggtgcttcatagctcatcaagaattgcttcacgtctgaatgaccgtcgtacatggggagct

SEQ ID NO: 78907 - DNA, 174 bp, Zea mays
  unsure (1)..(174): unsure at all n locations
gccccgccgctgatcacgtgcacctttgcccacaaagcccggcctagggcgtccgcggacgcngccttgcgctgctcgagtggagcaactctctgagacgccgcagaatctcgatggccaaagcgacacttttctcagcagcttgacgccgcgacggagatgcagtatgaacaa

SEQ ID NO: 78908 - DNA, 233 bp, Zea mays
  unsure (1)..(233): unsure at all n locations
ctcagcttaaagggtgcttgcttgcagcgcctaacttttatcacgaagttttttaacgaaattgggattgaactaactaaactactctaaatgtcaaaaataatgcagataatgattaaggtccttgatattacaaatggcgatttctctgatttatagaaaaggngtggacccggtacaaacaactctccgactaatttgtgattagcacactacacaaactcgatctatcg

SEQ ID NO: 78909 - DNA, 99 bp, Zea mays
acatatgtcgcgtgattggagatcctcaactgggtattaatctatttggatcgccgctacttctctgatattgaagacttggtcactggcctacacgta

SEQ ID NO: 78910 - DNA, 147 bp, Zea mays
tgagcttcggatgtagatggatcatcaagctcgctgatctttctcgagccttcgatcatgcactcaaaacttacaaaatgcccgatatacttcgtcgggggtcatttaatatatctaggagtaccacgaattaattgaacttgagta

SEQ ID NO: 78911 - DNA, 68 bp, Zea mays
caagtgggaggagcgcatcacagccagaatgtgatgaccacttcaagacccctggagctgttgcatat

SEQ ID NO: 78912 - DNA, 285 bp, Zea mays
  unsure (1)..(285): unsure at all n locations
gttaaatctctaaggttctncttntactntatttattaaataaataaaacatgcatctacaatagttcgtattcaatcctaaaaattagagtgtgcagacagtaaatgaaaccactttattcagatagagaataattctatgaacattntgcaatttgaatcactaaatttggagttcatatgcaaaagttatgaaataaacaagtttgggaattcaaaatatgaaattagggctaattctatgaatatttaanagtccacggctaaatctgcaagaatacaggg

SEQ ID NO: 78913 - DNA, 320 bp, Zea mays
  unsure (1)..(320): unsure at all n locations
agaccgagcgcaacctcaccggatacaccggatcaccctcgctggatctttttctctcaccagagagcgtggactaggtaagccactgcaccatttncaaattcctcgcgcatactggctctncgtcacttggtaaagctccccgagcccaacaaatgaactattncgctatgggtaggtcgggacactcaccgccgacgagctcccccgcctgcgcacgaggaccaaccgactncgaccatctncgacgccaacccgcacatcgacgtgaccaccgtgacgctcccgacctccctggacacctaccggagctagatcgc

SEQ ID NO: 78914 - DNA, 386 bp, Zea mays
  unsure (1)..(386): unsure at all n locations
ctcagcttgcagntaaccgcttaagataaagactttagccagaagtctgatcatgttgtagctntatacgggcaacttgtattctcacagctggtctggccatatataggacagnattcgggctgtcacgatttagatttttgcatccatttgcggaatcaaccttttgcacgcaaggattttgtatcaaaatcaaatataagaatatatggattgtcatgttattgtcttctatacctttttatgtacttaaattccgtgaaattattacaaggtagcttgactatctttgtagcttgtcgaaacatatctcaaaaaatgtctggacaagagtaacataattttgtgctgtctatcaatattagacagctcacatggcccctcgg

SEQ ID NO: 78915 - DNA, 208 bp, Zea mays
tttttttactgctaacgctttttcaacataaaatgcgtatccctaagtggactatttttaaaaaccttcttgaatacgtttccttgctatgctcgatgaatttcaacttcctaaaacataagaagatgtatagaatgcattactaccttacttgctgatcatacgattatgaactggatctatttgcgagaggacatttttcccgcta

SEQ ID NO: 78916 - DNA, 237 bp, Zea mays
  unsure (1)..(237): unsure at all n locations
gtcgagagccacctaatacacttggcaacggaactggcacatgggaccacagcgagcttctttgccgtgtctcaatacagtagacactcggcaaagagagagtctttgccaagnttccccgtggcactcggcacaggctccgtcgccgcacctgcgcatcgcgacgatgactttttcttttgcgagtgcccgacanacagtactcagcatagaagtcgttgctgatgtacaggtcac

SEQ ID NO: 78917 - DNA, 289 bp, Zea mays
gcaaagcctaacatacacttgttgaaatttgctatgaagcttctaggttaactataatgtatgcgagatcatctcagtttataagaacacggggtcatctccccttaaattctccaataagctaggtagatggaagaaccatatctttattctatctggcaagagggggtgggatactcttttacgacttcccttcaatactagtaaactggagtctttaaagtctagttctgtgctcttttgatgtggtcctgcctggaattaagtttttggaacctgcttatcaaat

SEQ ID NO: 78918 - DNA, 197 bp, Zea mays
  unsure (1)..(197): unsure at all n locations
atttgagaaagacagggtttgtatttcatgtcaagcanggaagcaagtcggtgttcatcatccacacaagaacatcatgacgactgacatgccgcttgaactactccacatggacctattcggcccgatagcttatataagcatcggcgggagtaagtatagtcttgtaattatggatgattattctcacttcactt

SEQ ID NO: 78919 - DNA, 199 bp, Zea mays
acctttgatcacagcgactatctctccccatagccgcgaccatggcgcccaagcaagagtgataatataaaggcgaactttatgtaagtgtgtcactataacgacctgcgaagagttaaaaagatactgtattgaaacattggatgatattgtgacatatggatattatacttgatgataatagtgtatatcactttca

SEQ ID NO: 78920 - DNA, 129 bp, Zea mays
gccaacaactactatcttcgaacaatcggctgtttattgcttagtttctgtttcccgcttatgaaggcgactgccatcaacaagacccgcggggggacatgtagacatagatgttacttcaagtttgta

SEQ ID NO: 78921 - DNA, 317 bp, Zea mays
  unsure (1)..(317): unsure at all n locations
attctatggcttatataaatatattatttacaatacatatgaatagttggattataaatatactccctctgttgtttatttgtcgcgagttatgttaagggattgccccagatgagaagatctatattccagaacgaatgtaggaattntctttcacctatantcctctccagctatctatgagtagtttaaggactcttttctactagtggaccgataatatctgagagcgaagatagtaatntctttcacttatactctctatgntcataaatatgacacccgtgattntttaaaaaactttgccacttgcttat

SEQ ID NO: 78922 - DNA, 320 bp, Zea mays
  unsure (1)..(320): unsure at all n locations
ctcagcttctaagagagagcacatttttggactataccaatggtcattnntgagaaagacagaggtttgtatctcatgtctatcatggaaacacagttgtgttcatcatccacacaagaacatcatgacgaccgacaggccgctctagctactccacatggacctattcggctcgattgcttacatagcatcggccggagtaagtattgtcttgtaatgtggatgaatattctcgcttcacttgggtggtcttttttgcggaaaaatcaccaaccccagaaacattaaagggattcttgagacgggctcaaaatgagttc

SEQ ID NO: 78923 - DNA, 122 bp, Zea mays
taatacttttggccagaaccggcaggtcagttacggttttttttctgggctcacagccacctggccgggcattcctatacccggggaacaagaaaaaagggaacaacgaccgttttgtgact

SEQ ID NO: 78924 - DNA, 256 bp, Zea mays
  unsure (1)..(256): unsure at all n locations
ataccccttatttcatctccaccaacaataccaacattgtcatcaccagacccatcgtcaccaggaacaaactctgtgtctttttcatcatcactttcngcgtcttgtataggaaggactttcaaccttaatctcttcttccttttcttcaattcaattttatctaaatgctttctcttgtntcaacaccgngagagcgacngacagcatgagcgccttgctggcctgtgacattctgatcttgatccatttataa

SEQ ID NO: 78925 - DNA, 264 bp, Zea mays
ctcagctgcggtatggaagtatggagaactctcctcttttttctcctcttgcacatgtctgcttgcttcctggctcttgccaggctcagctttatgaactccattagtgggtctttaacccccacaaaggcttgaatcttctcttagcgaggtcaattaacttggactcgaaagaataaacttccttaatgatgtgaaatacgaggaagatttccttttcaacaacaaaaatgtgtgtggtgcacgtgctgatgctagagcatg

SEQ ID NO: 78926 - DNA, 102 bp, Zea mays
ctcagcttgtcaaagccccgctggattaatcttctgagaaacccgacctcgctgcaacatgacacccgtttgtcaacacaacaagcgatgagtgaattcaga

SEQ ID NO: 78927 - DNA, 256 bp, Zea mays
  unsure (1)..(256): unsure at all n locations
cttcttcttcttgcgctgcacctgttgctgaangatctccaggntttggatctctcgatccaagtcatcctacggaggtgttagactaacagccttcctcttctggcttcgggcctctctgagggaaaggacgtgctgattatggtccatcggctgtagagtggcggcccctgttgctgaaactctnttcggcggcatgacgaaggtaatgcttgccaaagatattcacagctcaagaaatggaagtgagttcacc

SEQ ID NO: 78928 - DNA, 338 bp, Zea mays
  unsure (1)..(338): unsure at all n locations
cacatcttctaaagacagacacactatatttgtaacaaacagttatatcccatattgcataattgactaacagatagcanattatattcaagagactctactaaaacacatagaatagaagctattgagatgcaatttactaacctttacttgcttgatccataccgatatatgatctggatctatttgcgagaggacattttttcccgctatggtggatcgtgcatatcactgaacccgtgctaactgaggcaatagctggatagaccaattgtggcacagtagacattctaggacaagagttaacctgattgctaatcacatacctttctttcatg

SEQ ID NO: 78929 - DNA, 359 bp, Zea mays
  unsure (1)..(359): unsure at all n locations
tgagattggtgctagctgaattngatctattaaagctttatgttcatagcctcagactctcatncagtggccagggaaagggacgtgcgctagttatttatttatgggtgaactacttaccttttgtgcgccgcagtacaattatcttcaagatagctcgaaggttcttatagccacgatctgaatctctaagaatttggtgcttgatcatatatttgaaatactaaactttgagtaagggtcatacttcaagaaacagaaatagctatacagatcatcacatntggtttggataggtggtcctaataagcaccatctcctttgtgccctcagtccacaacaagctctagacactttag

SEQ ID NO: 78930 - DNA, 290 bp, Zea mays
  unsure (1)..(290): unsure at all n locations
tattctcagagatagatctaagatcatgctatcatcagntgaagattcggactgcagatatacctaaaacagctctcactacaagatatggactatatgagnttttagtcatgtcttttggactgactaatgcaccaacgtactctatgaactngatgaataaagtattcatggaataccttgaccagtttgtggtagtattcattgacgacatactagtatactctcagaatgaagaagcacatgaagatcatctgagagtacttctacagaaacctcacgacaatcag

SEQ ID NO: 78931 - DNA, 266 bp, Zea mays
accagctgccgacctgcccgaaaccaccgctacgggtcaaacctttcctttgacggagcctgccgttcattgtggcgatgcttggtacccggactctggccttatgacttccgcgggttggccgacagagcgcgacaccccgcgctggctgggcaggtactcgacacctcacacaccgtgcaaggcgtcggttaggtagagacgcgttcaagcgaccgcgtcggtgcgacggtatgcccagaacgcgctcgcatggttgccctgtg

SEQ ID NO: 78932 - DNA, 215 bp, Zea mays
  unsure (1)..(215): unsure at all n locations
aactgacttagaattggctcgactctatattggcatgacatgactaagggtgatcactattgtaacaccccaggtatttatcgtctgctcgaccacgagtgcggactntaacacgtgatagcggtagataacacggatgctataatttaatcatccttatttatcacaattatgatatcgngtctgtcttcatctgtctaaattgtcctaattta

SEQ ID NO: 78933 - DNA, 327 bp, Zea mays
tatggatcctaccttacctcgaagtgtttaggtctgcaaccctactagatggatcacacttggggtaaggaccaattctgccagtgtaaactggatatcagcatgctcacggcaagagcgactctgactctccacgataattatggattaaattaattatctttgcattgcttgggaattattattaatggactctttaatgggatggatctagtatcttataactgctaataaatttgaccaactgtaaagcaccttaccctaacatctcttgtagcctaccttacatagcccacatagtgactatgacatatcccacacttgtga

SEQ ID NO: 78934 - DNA, 457 bp, Zea mays
  unsure (1)..(457): unsure at all n locations
ntgtccgagttatataggaccgtctactatcttagcccgagttggcagcttggcttagcacctacaattgtcatagtctatgatcaaagtacaccatgtattccatgtctttatgttgaggaagtagttgcggaatccagaccatcaaatcgagctagagccgattcctgtgtagcaagaccagactctagagtgtcgtctgctgcgtatcttaaaatcctangagcttgaggagctgatgcggcagaagtacccgaacctttctttatgtgtgagttttgttgattcattgatctttccttgtcgttccgatagaagcgtcagaattcgaggtcgaattctttttaaggggggtagagtgcgatacccaattttcttgaaagaagttaaatttatttttcccttttctttcgtgatctgtgtagttggggttggagttttttacgaagcattcacc

SEQ ID NO: 78935 - DNA, 448 bp, Zea mays
  unsure (1)..(448): unsure at all n locations
ngagacgggaacaaccgtggcacgcactacatcccttgaagaaaatgtcaaggatttgaggattgccaagaggaagaaacaaaagaagaaattcaacacctcctccaaaagcctcaaccacgcctccacaaaaggtaacatccaaggtaatgatcaagccacacttcacattaagaggtgtagtgaatgctttgaagaggggcacttgattaggtcatgtccctatattgatggcttgattattaacaaggatgatagactttgttttacatgctccaagaagggacacttacttagatcttgtccccatttaaaacaaagaggcatagggttagaaaagaaaatttttactaaccatgtagcaagcaataaacaaggaaagaagaaatcttcaaaatttggaaaacgcctatgctacacatgccgaaagaagggacatcaatgcaaa

SEQ ID NO: 78936 - DNA, 460 bp, Zea mays
tctaaagggagaacacacttgggactaacaaatgttcattttgagaaagacagggtttgtagcgcatgtcacgcagggaagcaagttggtgttcatcatccacacaagaacatcatgacgactgacaggccactcgagctcctacacatggatctattcggcccgatagcttacataagcatcggcgggagtaagtaatgtctagttattgtggatgattagtctcgcttcacttgggtgtttttttgcaggaaaaatctcatacccaagagaccttaaagggattcttgagatgggctcaaaatgagttcggcttaaggatcaaaaagattataagcgataatgggacggagttcaagaactctcaaatcgaaggctttcttgaggaggagggcatcaagcatgagttctcttcttcctacatgccacaacaaaacggtgtagtggagaggaagaatag

SEQ ID NO: 78937 - DNA, 459 bp, Zea mays
  unsure (1)..(459): unsure at all n locations
gcttgatagtttgngaagagaaggcggttnttttgagaanaaaagaataatatacttcaatcgataaacccatgggcacgaccatacaaaacgtagaaatcacacacgtggaaggagtgggcaattaactagagcaacaagtgttgtagtgaaactgattataaaagagggtaaattggtcaccttaagattaccatctatgaggtccatttgatattttaaatggctagcgattaccccctaataagagtggtagttatgatccctatagaccaccccatggggtggttaaggggatgcccctattggtagaaaatacttacaacttagggctgatttggtgaccaaagatcacgagaaaatctatggagaaggaatcctcaaatcatctcccatagattttctcgtgatccttaaatagcaagaagaattctctctatagatntcctcatgatccct

SEQ ID NO: 78938 - DNA, 458 bp, Zea mays
  unsure (1)..(458): unsure at all n locations
tctcctgaacaagtgctgcacttaccgctgagtgcgaagctgccacatattataacaaaggagcccctggcgtgggtggaattaatgttgttagatctatcaaatactgcttcagctcttcgaaggccttctgctggattggtccccattgaaagacttcagctgtcttcagcacttcgaagaatggtaagtttctctctgctgatctagatatgaatctgttgagagacgccagccttcctgtcaatctttgagcccccttttttgtacttggtggttccattcgaagtattgctacgattttgcttggattagcctcaattcccttagttgagactaggcaaccgagaaatntccccttctttacttcgaagacacatttttctggattcacatttagaccagcctgtctaaaattagcgaaggtcttctgccaatcagcaatgtggttatcttgc

SEQ ID NO: 78939 - DNA, 463 bp, Zea mays
actcagcttctaagggagaacacattttgggactaacgaatattcattttgagaaaggcacggtttgtagcgcatgtcaagcaagaaagtaggttggcgtccatcatccacataagaacatcatgacaacggacaggccactggagctactccacatggatctattcggcccgataacttacattagcatcggcgggagtaagtactgtctagtaattgtggatgactattctcgcttcacttgggtgttctttttgcaggaaaaatctcaaacccaagagatcttatagggattcttgagataggctcacaatgagttcggcttaaaaatcataaagataagaagcgacaatggaacggagttcaagaactctcaaattgaaggctctcttgaggaggagggcatcaagcatgagttctcttgttcctacacgccacaacataatggtgtagtggagaggaa

SEQ ID NO: 78940 - DNA, 455 bp, Zea mays
  unsure (1)..(455): unsure at all n locations
tgtggaggttcttcatccncacatgtgctaagcggtgatgccacaaccaacccatgcaagtcttagctattaagcatgcatctagaccggcctcttcttttgcaaaatcaactaagtaaagtttgccggctagtacacccttaaaagctagtgaaccatcacatcttctaaagacaaacacatctacatttgtaaataaacaattatatcccatattacataattgactaacagatagtaaattatatccaagactctcaactaaaaatacattagagatagagtgctcattagatattgcaatcttgcctaaacctttcaccttgccttggttcccatcaccgaatatgattgaatcttgggaatccttattcttgacgtaggaggtgaacatcttcttctcccccgtcatatggtttgtgcatccgctgtcgataatccagcttgaacccccg

SEQ ID NO: 78941 - DNA, 449 bp, Zea mays
  unsure (1)..(449): unsure at all n locations
tctaaagggagagcacattttaggattaacaaatgttcattttgagaaagacaggatttgtagcgcatgccaggcagggaagcaagttggagtccatcatccacacaagaacatcatgacaaccgacaggccgcttgagctactccacatggatctattcggcccgattgcttacataagcatcggcgggagtaagtattgtcttgtaattgtggatgataattctcgcttcacttgggtattctttttacaggaaaaatctcaaacccaagagaccttaaagggattcttgagacgagctcaaaatgagttcggcttaaggatcaagaaaattagaagcgacaacggaacggagttcaagaactcacatatngaaggcttccttgaggaggagggcatcaagcatgagttctcctctccctacacgccacaacanaatggtgtagtag

SEQ ID NO: 78942 - DNA, 374 bp, Zea mays
  unsure (1)..(374): unsure at all n locations
tctcgggagagggattggccttgaagtgagccgtctgagttattctctttcgcgtgccttgggaaggccctgtgcattccattttatagatacaaggggatggtccaactgtacatatgggggtgtagctatgtgctaacgtggccggcggagaagtgcttgagccctgtagaagcgtatctggcggtgcggccctgngtcctgctgacgtttctttggcttcgtagagagctgagaacaatcgacgtcatggacgcatgcagggaaccatcattacctggtgccggagtaatatagatgtgacaccggtcttgttccttcgtagcctgaggcggctagctaagggtagggtaatgatgtatcccctgtagcgt

SEQ ID NO: 78943 - DNA, 455 bp, Zea mays
  unsure (1)..(455): unsure at all n locations
tcggcccaacagcagagttcctttctgccgccagcgctcttgggcagaggcgccacgggcttctggggaaggtttggagactatccaaaataaatatattgtttattctatggtgaagacaagggtcatactaccaggatgtgccatgttaccatccagaagcagaaggaaatagcggaagcagcagctcaacagagtcagccgaagcaagtcatgcatactgcttcgtatcactcaccttatatttcagaatatgtaggcaaccaccctgcagcttctgtcgcttctgcgagtcaatcccaagcattctggcagcaaccttcaccttcaccgncaccgccgatccagcgaggacaacagccagaagggagtcagcacaatcatcatcagagggatttcagagaggaatctgaagctcgcatagtcaacagcactgtgccagagtcgaagcacat

SEQ ID NO: 78944 - DNA, 448 bp, Zea mays
  unsure (1)..(448): unsure at all n locations
tgacattgtcccccttttggaagccaatgccatccttaatgccagggcgtctcccattataaagcatactacgagcaaatttaaatttttcattttcaagttcatgctcggcaattttagcatctagtttagctatatgatcattttgttgtttaattaaagccatgtgatcatgtatagcattgatatcaacatctctacatctagtacaaatagaagtatgttcaatggtagatgtagggggtttgcaagattttaattctacaaccttagcatgcaatatatcatttttacttctaaggtcggaaatggtagcattgcaaacatcaaaatctttagccttagcaagcaatctttcattntcatctctaaggctagcaagagtaatgtttaattcttcaatcttagcaagcaaattatcattatcatctctaagattgggaattga

SEQ ID NO: 78945 - DNA, 433 bp, Zea mays
taatgccccttctaaaagattgtccaattttgttaagggcatggctctcatgcctcaggataacgagggttacattttataccctgctggttatcccgagcacaaaattaggagaattcattctaggaagtctcactctggctctcatcatgcttttatgtataagagtgaggcatctaattctaggcaatcaacccatgctaaattgcctaggaagaaaactcctgttgcatcaaatgaacctaatatttcatttaagacttttgatgcatcttatgtgctaactaacaaatcaggcaaagtagttgccaaatatgttgggggcaaacacaaggggtcaaagacttgtgtttgggtacccaaggtgcttggttctaatgtcaaaggacccaagaccgtttgggtacctaagaacaaggcctaaacttgtttt

SEQ ID NO: 78946 - DNA, 459 bp, Zea mays
  unsure (1)..(459): unsure at all n locations
nggtcattntattgctaactgtcccgacaatgatagtgatcaggaccaagggaacaagagggagaagaagaagaattataagaaggcaaagggcgaggctcatcttggcaaggagtgggattcggactgctcctcgtctgactccgacaatgagggactcgccgccactgcattcaacaaggcatccctcttccccaacgagcgtcacacttgcctcatggcaagagagaagaaggtaatcactcgtaatgatgtcacttatgattcttctagtgacgatgagtctagtgatgatgaaatagattactctagtttgttcaagggattggatagaaataaaattgataaaatcaatgaattgattgatgccttgaatgaaaaggataagctnttagaaaagcaagaggaattgttgtatgatgaacatgataagtttgtagaggcacaaaaatcctatgc

SEQ ID NO: 78947 - DNA, 446 bp, Zea mays
tatctctaggtgaataagaaagagagtgaacttggccggttatggttctgcgaattagaatctgcacgtgaaattacagcagctgtatgtctgtctttagtgaagcccaaatacaccagcgatccaattctctaaaacgaagacagctaaaaaaaagataaacctaataaacatgaactaaagaaaatgccaattagactggatgccctattgcccatgcaactaatctaggttcttatcagaactgagcacgttggaacgaccacggagccttcaactccaatgtacactgtcagtcactagttgtcctgtcttctgaagaatagggccctgtcgacggccgtgagcagacactgatcaccgagacttggctcgtccgcctgatcactctccatgtccacgttcatatctatgcaagatggagacggcttggaaacaccatcttg

SEQ ID NO: 78948 - DNA, 461 bp, Zea mays
  unsure (1)..(461): unsure at all n locations
tggaaccataaacacaaggaagccttntatctatttaatattatctttataaactacataaaaatgcactccttaaaaaatgaaataacttatgggaaaaatattgtgtgggttgcataattagatcatttttttctcttctttgcatgaataaatgaataaattaattaatataaattatacctacatcatgttggagtttgttgtgcatctaacttaaaaatatgaaattcaaacctggatttgaattgaaatagaaaacacgaaataaaatagaaaagataaaccctacctatacctaggccggttctctcattctcggcccattctcgccccttgccaccttggtctggccccagccgcgcgtaggctaccatttgggcctaggacaaaccaaccacgcgacctcacttcctgaggaaccagcccgacctcttcccttcgccaatgccgcttacatg

SEQ ID NO: 78949 - DNA, 469 bp, Zea mays
  unsure (1)..(469): unsure at all n locations
gacctatgaatactcagcttctaagggagagcacattttaggattaacaaatgttcattntgagatagacagggattgtagcgcatgccaggcggggaagcaagttggagtccatcatccgcacaagaacatcatgacgaccgacaggccgcttgagctactccacatggatctattcggcccgattgcttacataagcatcggcgggagtaagtactgtctagttattgtggatgattattctcgcttcacttgggtattctttntacaggaaaaatctcaaacccaagagaccttaaagggattcttgagacgggctcaaaatgagttcggcttaaggatcaagaaaattagaagcgacaacgggacggagttcaagaactcacaaatcgaaggcttgcttgaggaggagggcatcaagcatgagttctcttctccctacactccacaacaaaatggtgtagtggag

SEQ ID NO: 78950 - DNA, 482 bp, Zea mays
  unsure (1)..(482): unsure at all n locations
ctatacaacactcaagcttgacaacgaggagatggcgctcatcatcaagagcttccgttcaatcctctttctaaggagggggaaagactacaagtcccgctccaagaaagtttgctacaaatgtggtaagcccggtcattttattgctaaatgtccactatctagtgacagtgacaggggcgacgataagaagggcaagagaagagaaaagaagaggtacctcaagaagaagggcgacgatgcccatgtttgccgggagtgggactcggacgagagctccaccgactcctcctccgacgaggacgccgccaacatcgccgtcaccaagggacttctcttccccaacgtcggccacaagtgcctcatggcaaaggatggcaaaagaaagaaggttaaatcaaaatcctccactanatatgaatcttctagtgatgataatgctagtgatgaggaagataattcgcgtaccctttttgccaatc

SEQ ID NO: 78951 - DNA, 450 bp, Zea mays
  unsure (1)..(450): unsure at all n locations
ttaatagtgctgggccaaatctagcccaagcggtctaactccatagagaaaacacgcccacgcctgcgcgcactggcatttttgcagaagggtcctctggtttttagctaactgggaacaagttctttcactcgttcatgtgtcgctgacggtttgcagtatggtccctggatttctatttctttacccgacacaacctcgacggcgtccgcgcttggagccgagctccggcgagcaagaccggccggagggggccaagaacggcgctcccgagcagcggacacaaacttggatctactccgaccgtntcccctaagttaatcgcacggatggcgacctacaccgccctgcccacgggaacagcggaggcatcggatagaatcgcatgttccccgtgatctacggcgggttagttcaatctacaacgtcggcgagtttgagaagagctta

SEQ ID NO: 78952 - DNA, 421 bp, Zea mays
  unsure (1)..(421): unsure at all n locations
tgagtttttgccaccggaacgatatctttgttattcgcatctaatatgcccaatccactactttatgtccaaaactcatgtttggggtggtttcgcgcaatttcgttgccgcacgtcacccattcagaaaacgggtgtcggggtgcatacaaagcacgagttttttttcaccgaaaccattttttcgtttttcgcaacgtacatgcccaatccactattctaggtccaaaactcatgtttggggtggtttcacgcaatatcgttgccgcacgtcacccattccgaaaacgggtgtcggggtgcatacaaagcatgaggtttcgccaccggaaccatttattcgtttttcgcaacgaacatgcccaatccactactttaggtccaaaactcatgtttggggtggnttcgcgcaatttctttg

SEQ ID NO: 78953 - DNA, 452 bp, Zea mays
  unsure (1)..(452): unsure at all n locations
tgtggacccggtgcctatcaactgaagttgccacccagcttgtctgctgttcatgatgtgttccatgtatctcagctgcgaaaatgtgttcgtctacccactgaagtgctaccggaaccggacattgagatagaaccagacttgtcctaccaagagtaccccgtctaggtattggatcagaaggagagatcaactctggcaagatcagncagaatgtataaggtttagtggagtcaccattcagcggaggaagctacatgggagactgaggattttctacgctcccgcttcctcgactttctgcccaaaggagtcggtacgtaaccccaaaaccccacccccacgtgcccttggaatactattataagaataacttagataacacggatagtctaagttgtggatgtaacttaaaaagggcttccttctgaagttgccaagagaatgacatt

SEQ ID NO: 78954 - DNA, 177 bp, Zea mays
ctttagggtttctccacttgggttaagagttaccatcctttttccctacttaggggtaaggtccctatccaagggtctatttacaaaatactataacaatacaacttgtttgaaatttttacctagtgaatgcactctacgtgtcctaacatcatgcaattcaatgtttccgacctc

SEQ ID NO: 78955 - DNA, 448 bp, Zea mays
  unsure (1)..(448): unsure at all n locations
tgtacgatttgctagggaggagataacttctgagccaatttaggacaaagttattgtctttaagagcttcttcagagcaggacttcggtttcccctaaatgaaatgataggggaggttctaaagaactttgaaatatactttcatcagctgaccccaatgctattgttagacttagcgtcttcatatgggctctctgaagccaaggaatgcatgctaatgccaaagctttttgtcgggtgcacgagctacactattagacaaaggctagaacagatagtcttcacaagaactttggctgttataattntgcgtatctgaaggatacaaaggccccagttattggttattgcaccaagtggccaaccgggtggactaatgaatggttttacatgaaagctgatgagaagaagagggaaaaactcgtgggtttggtaatgagtaccttga

SEQ ID NO: 78956 - DNA, 384 bp, Zea mays
cttttggaatggagggaattatcggcgctttatttaagttttctccaccacagcaaagcccatgactgaacttctaataaggacaataagtttgatggactcccaaatgtgaatgaagtttccaaatcatcaaggagaaacttacaactgcaccaatcctgactctgtcagacatacaccaggaatttgcatcttctgtgatgcttccaagcaaggcttagggtgtgtcttaatgcaaaatgagaaagtattgcctatgcatcccgattactcaagccgcaccaacaaaactatcctatccacgatctggaattggcagccatagtgcacgccctaaaaatttggaggcattatctgaatgggaacacatgccacatcttcact

SEQ ID NO: 78957 - DNA, 456 bp, Zea mays
ggatggacatcaccgatactcatgcatccattccacatgcactattttctccgacatatcctaccaagaggcacatgttttcgttagactgaaatattattcagtgttccgcttcagcataagttcccagtcgacaacactgtttcctatgcatgctctagcctgacgcgaagtcgccaaccagcaaaaagtccatcagtacacggaacaattcaaatttccaacttcaatccttgaagcagaactgttttggccccaatacacgcaaaatttgatccatccgtgggtcgttgtctaaataacgtcacgccacggggatacgttaataccaccttcattctcagtttttctacaacaccctacacgaatgctcacacacagccagcaaaaaactaaacggaaaaatgggaaggaaaaaaagttacacgctatgacaaccagcgcaaaagagatact

SEQ ID NO: 78958 - DNA, 325 bp, Zea mays
cgcagttgagacagtcgtcaactcatgccgagatcttgttgtttacggcgccgccttgggcaccttcacgggcaccatccttataatggcctcgcacccagggctgtgcgcctacacgcgccttgagcggattgtcgagtatgcagactcttgtctaggactccccctttttctggacacactggcaagcctatcactgcttcctagtgagatgtagtcttcctccaatagagatatggccataaggagtctgtgtgtctttatcgttgaccaccttgagacaacctattgcctcttcgatcgtcatcgtggagagatctatcaa

SEQ ID NO: 78959 - DNA, 439 bp, Zea mays
  unsure (1)..(439): unsure at all n locations
tatgcaaagttctcgaagcgtgatttttggctgattgaagntgctttcttatgacatattgttactgatggtggaattaaagtagatccaggaaagataagtgaaatactaaattggaagcaaccaaaggatgtgtccaagatcagaagttttcttggattggcaggatactacagaagatttattgaaggtttttccaagttagtgaaacctcttacctcactattggagaaaggtaaggagtttaagtgggatgaagcatgccagaaatgtnttgaagaactcaacaaaaggttaaccactacaccaatattggtaatgccagacattcacaagggatttgatgtgtattgcgatgcatcacaccttggacttggatgtgtgctaatgcaagaaggaaaagtaatagcttatgcctcaaggtagttgaggaagcatg

SEQ ID NO: 78960 - DNA, 472 bp, Zea mays
gaccttaaatactcagctgagtcgtcatttgcaaggataattgatgctcaaaaagataatctgggtatgaagcacattcgagggaagataaaggctggggtagccaagtgtttcaaggaagacgatcaaggtgtgatatggtttaaaaaccgcatagtagtgccaaagaatgaagaactccgccaacaaattcttgatgaagcacatcttagtcgctattctattcatcccggaagcactaagatgtatcaagacttaaaacaacattactggtggactaagatgaagattgaaattgcacgctatgtggctaaatgcgacacttgcaaacgtgtcaaggccatacacatgaaaactgctggtccattacaatccttgccaatcccaacatggaaatgggaagacatcagtatggactttgttgtgggattgcccagaaccgcaaaagggtatgactctatttgggttatta

SEQ ID NO: 78961 - DNA, 472 bp, Zea mays
acccaagcttttaatttactcctacatgccttaaatgtcatccttgtttgtggttgatgtcacaagaggagaagtttaagggccaaagcaatgaatactatatcaaacaccaaacaccaccaatttaaaagtttatatctacaaatgacttttcaagtggttttggttatttggtccaaaaataggaagttagtgaattatggaattagggggaggcttaagtccataattgttacattgaggggacaatcatgcattctagcaagtggattgcactttttaattcaaacacttgcattatttgcttgttttggttgtgctgtcatcaatcaccaaaaaggcggagattgttaggaaaatggaccccgggccttttggctaattgagttttggtgtttgatgagcaacacaatccgtgaactaataaaggttctagtgtttgtgtttgtaattcacacgatgcgaataggat

SEQ ID NO: 78962 - DNA, 464 bp, Zea mays
  unsure (1)..(464): unsure at all n locations
acactatnaatactcagctttatagtgctgggccaaatctagcccaagcggttcatcttcttagagaatacacgcccacgcctgcgcgcactggcatttttgcagaaaggtcctctggtttntatctaactgggaacaagttctttcactgtttcatgtgtcgctgacggtttgcagtatggtccctggaattctatttctttacccgacacaacctcgacagcgtccgcgcttggagccgaactccggcgagcaagaccggtcggagggggccaagaacggcgctcccgagcagcggacaccaacttggatctactccgaccgttttccctaagttaatcgcacggatggcgacctacaccgccctgcccacgggaacagcggaggcatcggatagaatcgcatgttccccgtgatctacggcggtctagttcaatctacaatgtctgggagtttgaaagagc

SEQ ID NO: 78963 - DNA, 426 bp, Zea mays
tcggactcctccctgaagtcacgttgttgttgggagtgcttgcgcccttctggctgctggcttcgggaataagtatgttgcagtggtggtggaggtgggagctgatgccaagaagcttgtgaatggcttgccgaagcaacagaagctgcaggttggttgcccacatattctggtatgtaaggagagtggaacgaagcagtatgtaaaacctgcttcggctgattctgtcgagcttctgcttcggcaatctctttttgcttaagaatagtgatctggcacgttcttgtagtgtgggccttgtcctcaccacataataagcaatagaattttctgggctgatcctcatatctgccttcgaagcccctgttgcctctgccccttggagctggtggcctgaaggagctttgctgctgtcccgaagactga

SEQ ID NO: 78964 - DNA, 453 bp, Zea mays
  unsure (1)..(453): unsure at all n locations
ctatcanatggacgtgaagagtgccttcctcaatggacctatctaggaagaggtctatgttgagcaacctcccggctntgaagatagtgagtaccctaaccatgtgtataaactctctaaggcgctttatgggctcaagcaagccccaagagcatggtatgaatgccttagagattttcttatcactaatggcttcaaagttggaaaggccgatcctacactctttactaaaactcttgaaaatgacttgttcatatgccaaatttatgttgatgatattatatttgggtctactaacgagtctacatgtgaagaatttagtaggatcatgacacataaattcgagatgtctatgatgggggagttgaagtatttcttatgatgtcaagtaaagcaactccaagagggcacctttctaagccaaacgaagtatactcaagatattctaaccaa

SEQ ID NO: 78965 - DNA, 455 bp, Zea mays
  unsure (1)..(455): unsure at all n locations
tatgaagattcttcatcccaacatgtgctagtcggcgatgtctgagccagcccatgttagtcttagcaattaagcatgtgtcgagttcagctctatcaaaatctactaagtatagctgaccctctagcacacccttaaatgctattgaatcatcacttcttctaaagacagtgacacctacatcagtaaagagacagttatagcccattttgcataattgagatacggaaagcaaattgtaatctaatgaatctacgagaaaaacattggaaatagaatggtcaggagatatagcaattttacccaaacctttgaccaaaccttgatttccatccncgaatgtgatagctcgttggggatcttggtttttctcgtaggaggagaacatattcttctccccagtcatgtggtttgtgcacccgctatcgatgatccaacttgagcccccggatgca

SEQ ID NO: 78966 - DNA, 458 bp, Zea mays
tctaaagggagaacacgtgataggtgtgactaacgtactattcttaaaagatagaccttgcgcagcttgtcaggcaggtaaacaggtgggaggagcgcatcacagcaagaatgtgatgaccacatcaagacccctcgagctgctacatatggacctcttcggacccgtcgcctatctaaacataggaggaagtaagtatggtttagttattgttgatgacttttcccgcttcacttgggtgttctttttgcaggataagtctgaaacccaagggaccctcaagcgcttcctcaagagagctcataatgagtttgaactcaaggtgaagaagataaggacgacaacaggtccgagttcaagaaccttcaagtggaggagttccttgaggaggaagggatcaagcacgagttctccgctccctacacaccacaacataatggtgtggtagagaagaagaa

SEQ ID NO: 78967 - DNA, 447 bp, Zea mays
tctagcagggttcctgagtgtctgaaataacctgtttctaagttacctcttacatctgccatgtagcaccatagatcaactcttgtttgctgcggccaccacaattaagattggcaacgggtcgaaaatccttttttggagtgatgcttggatgcaagggctgagaccaaaaaacatggtgccatccatttccaaatctctagaaggaaaaacagaaacttgcgggaggcattaacggataataactgggttagtgacatcgaccttcgacacccctctttctcggctcagtgctttgtcaaatttgcctatctctggagtgcagtacaacaaatccatttaagtccagacatccgtgatgaaattgagtggaaacttagcgaatccaagcagtacattacaagctcagcctatcatgcccaatttcttgggtcagccagcacaaac

SEQ ID NO: 78968 - DNA, 457 bp, Zea mays
  unsure (1)..(457): unsure at all n locations
ntcttgctttgttatcatagaattattagttggattgatttatcacttccgctttatttgaaagctatactctttaccagcaagaacttagtttttatactccgataattgttcatcttgttctaaccactaatcaaaggatctagttgggggataaagttttaattttcaggtttcgcctatccaccccccctctaggcgactttcaattggtatcagagctaggcacttcatcttgagtctaacaactcgaagtgatggctcgtagaagatcccaaaagaacaagaagactcctccaacgaacgcaactcataaggaggtaactcttgagatattatttgatgattgttctaattatgattcatggtctactagtgtgataaatgcctttagaaccatacatcctcaattagaacaaattattgacaagagtattttcccctctatgtttaatgg

SEQ ID NO: 78969 - DNA, 452 bp, Zea mays
  unsure (1)..(452): unsure at all n locations
tattgctaactgtcccgacaatgatagtgactaggatcacgggagcaagagggaaaagaagaagcattacaagaaggccaagggcgaggcacacatcggaaaggagtgggattcggattgctcctcctccgactccgacaatgaaggactcgccgccactgccttcaacaagtcatccctcttccccaacgagcgtcacacatgccttatggcaagggagaagaaggtatgtaatcaaaacaatgtcacttatgattcttccagtgataatgagtctagtgatgatgaaatagattactctagtttgttcaagggattggatagaactaaagtaaataaaattaatgaattgattgatgccttgaatganaaagatagacttttagaaaaacaagaggaccttntgtatgaagagcatgacaaatntgtagaggcacaaaagtcttatgctt

SEQ ID NO: 78970 - DNA, 460 bp, Zea mays
tcggctccatctatattgtggatggcttttgagtccattcaattttcttcagcctttctggcagcttcctgacttccatgaattgcaataggccctcgttccgaaggtatcttcatgcatagatatgctggatgaagaattgcttcgaaagcattaagtgtcccacgaccaatgattgcattgtaggggtattccatgtcaacaatatcaaacacaacctgttcagtccttgtgttgtggataaatccgaaggtcactggcattgtgattttgccaagtgctacgatctaccttcctccgaagccacaaagagggtgtgtagcatcatgaatcttgtcctctagctcttgcatttgtctgaaggccttagcaaatatgatatctgttgcactgcctgtatcaaccagcacattgtggaccagatatcccttgatgacacaagatataaaccatagcatca

SEQ ID NO: 78971 - DNA, 480 bp, Zea mays
  unsure (1)..(480): unsure at all n locations
gacacatagatactaagcttggaaggttcttcatccncacatgtgctaagcggcgatgtcacattctgcccatgctagtcttagctattaagcatgcatctagaccggcctcttcttttgcaaaatcaactaaataaagtttgccgtctaatacacccttaaaagctagtgaaccatcacttcttctaaagacagacacatctacatttgtaaatagacagttataccccatgttgcataattgactaacagatagcaaattatatcccaaggactcaactaaaaacacattagaaattgagtgctcatttgagattgcaattttacctaatccttttaccttgccttgattcccatcaccaaatataattgaatcttgggaatccttattcttgacgtaggaggtgaacatcttcttctcccccgtcatatggtttgtgcatccgctatcaataatccagcttgaacccccggatgcat

SEQ ID NO: 78972 - DNA, 338 bp, Zea mays
tggaagcgtctattggttgtcggcttggagtagactccttcttcttttcttccgtcgccttgaatgcaacgaggttagcttctgatggctcgccaagctcgctgattttcctcgagccttctatcatgcactcataacttacaaatgcccgataacttcctcgggggtcattttagtatatctaggattaccacgaatcaattgaacttgagtgggatttagaaaaatgagagatcttaaaataacatttaccacttcgtggtcgtcccacttcttgctcccgaggttgcgcacatggtttaccaaagtcttgagccggtgggacatgtgttgtggat

SEQ ID NO: 78973 - DNA, 376 bp, Zea mays
atcctgacctgaagaccgttccgactagtgtttcggatgctgcatgtattccacattgcctagcatggacctccttcagaagtcggttcccagtagatgggagaatgcacttcatgaggacgcctgatgcaccccttctgtacaatgtatacccaatgagtgggtagtgagccgactgtctggcaatgcgctcggctgaattattgtcatctggttcctcttcattctttatatacctgatgattggccttctacagtcatcagagtctgactcgggttgatctataatattacactcttctgtttgatccattgatatgctcggctgtagtatttcttgcacaaagacttccagtgagacctgagtgcactggat

SEQ ID NO: 78974 - DNA, 445 bp, Zea mays
  unsure (1)..(445): unsure at all n locations
gagaacacattntaggattaacgaatgttcatttttataaagacaggatttgtagcgcatgccaagcatggaagcaagttggcaatcaacatccacacaagaacatcatgacgaccgacaggtcacttgagctactccatatggatctattcggcccgatcgcttacataagcatcggcgggagtaagtactgtcttgttattgtggatgattattctcgcttcacttgggtattctttttacaggaaaaatctcaaacccaagagaccttaaagggattcttaagacgggctcaaaatgagttcggcttaaggatcaagaagataagaagcgacaacgggacggagttcaagaactctcatattgaaagctgtcttgaggaagagggaatcaagcatgagttctcttctccctacacccctcaacaaaatggtgtagtggaaag

SEQ ID NO: 78975 - DNA, 454 bp, Zea mays
  unsure (1)..(454): unsure at all n locations
tntacgtatatattacggatgagagacaagattctactcttctatctatggctctagagttatcttggtcttgcatgcgggattgccataagactggtgtccacgctgatgtgagcggtaacggtgctgagtcccgacgggagcggtggaaccaccatccacataacgaccttccgcgcgctcagcccgcatctgggcgatcacaacacgagccctactcaactcaactaatgcatggaccagctccgcgtttagcacggcggctaggctgactgtgctgctcaacctaagattgccctcaccgacaggtgagacaatcacgcctcctgtgctgccacatgaaccgcggtggtaatacttcaggtccagaccgtcagctgccccaccgaaaaccgagcagagtgctgaagcgcacgccgtgcagcatcttgcatgggtgcctcagctgagttcc

SEQ ID NO: 78976 - DNA, 423 bp, Zea mays
  unsure (1)..(423): unsure at all n locations
tcagacagaatcttatgccaatgactaggattatcagatactcttttctttatcaaattaatcaacgtcctattactagactcggcctgtccattggcctgagcataatatggagacgaattaagcagcttaattctgtataattcagcaacttcacgtacctcttttgacataaaagaagtaccttgatctgtattcaaggtctggggaatgccgaatctatgaataatatgctcagttatgaactcaattacctccttgtgcgtcatgttctttagagcaacggcttcagtccatttggtgaaatagtcagtggcaactaacacaaaccgatgcccctntgatgacgaaggatgaatttctccaataaagtctaatccccatcctctgaatggccaaggcttgatgataggatataattcg

SEQ ID NO: 78977 - DNA, 440 bp, Zea mays
  unsure (1)..(440): unsure at all n locations
tctnagggagaacacgtgatagggttgactaacgtgcatttctttaatagatagaccttgtgcagcttgtcaagcagggaaacaggtgggaggctctcatcacaccaaaaatgtgatgacgacatcaagacccttggagatgctgcatatggacctttttggacccgtcgcctatctgagcataggaggaagtaagtatggtttagttattgttgatgacttttcccgcttcacttgggtgttctttttgcaggaaaagtccgaaacccaagggactctcaaacgctttctcaggagagctcaaaatgagtttgagctcaaagtgaagaagataaggagcgacaacggatccgagttcaagaaccttcaagtggaggagttccttgaagaggaagggatcaagcacgagttcttcgctccctacacaccacagcaaaatg

SEQ ID NO: 78978 - DNA, 434 bp, Zea mays
  unsure (1)..(434): unsure at all n locations
acccagcttcggaagaattntccgaagctacactttcgaatatctattgtgtatctccttgggacttagcatgattttcccctttttcaaaacattcttctgaagatcgatattgtgtccccttcttgtgccatatgcagcatgatgtatgatgcttatgccatgcgaaatgatgtgatgatgttatgctatgtaagatggtatttattccgaagatacacgcacatccctgtaataaaacacataatctttttaaatcagcgttgacttttcgctgtaagcctcccttaggagcttcttcgccttntacttcagcggaatcagcgtttatttttcgttgtaagcctcccttaggagcttcttcgccttttactttcagcggtattcgcgttgacttttcgcgcttcgccttttacttatgcgggatcaagcgt

SEQ ID NO: 78979 - DNA, 436 bp, Zea mays
  unsure (1)..(436): unsure at all n locations
cgcagtccttggtagcagcatacgggatggagatgtttcttataaacacanccaaaggtcttctcgcctttcctcgtgaaacagcattgttcgcttgcaagaaaaccttctgggtgaggtcaatcatactgtgtgtggttgataataaaagggagtagttgtgtaatgattataggggtctaaatcagtcttggttttaagcctatattgtgaacatcaagttctaaaccaattgaagttatcatacttattggaatattgggccatgtctatatatgaaatggtatcgcggaaactaagttgcccattagatatatatatttgtttttctctttagactggatcgattttttgctttacctacaatccacaaaaaacaatatatacaccaccccagatctcatgtcctataaaaccatcttggtgcacttgaagt

SEQ ID NO: 78980 - DNA, 338 bp, Zea mays
ttttttcgacgccttgaatgcgacgggttgagcttcggatgtggtgggttcgtcaagctcgctgatattcctcgagccctcgatcatgcactcaaaacttacaaaatgcccgattactttctcggagggcattttagtatatctaggattaccacgaattatttgaacttgagtacggcttaggaaaataagagatcttagaataaccttaaccacttcgtgtcattccactttacgctcccgaggttgcgcacttgggtcaccaacgttttgagccggctgacatgtgttgtggctccttcactttgcgaagacggaaccgaacgagctccccctcg

SEQ ID NO: 78981 - DNA, 438 bp, Zea mays
  unsure (1)..(438): unsure at all n locations
tgacgacgaaggttgtcgtcngtctcccgctgacgtcgagctccctcatggacatctgcggcaatatttcggcacatggagaagaaggccgcatacccgtgggccaggcgggcacccatcccacgtccacgacctcgaccacgaccacgaccacgtggtgtgggagatccgcggccaggggaagagcgcgaggcaccaccagcagcagcagcagcagcaccagcaccggcagacggaccagcagatgtaggaccacgggaactggagggagctttcctgagacgcccagctggattgttgggatcaatccagaagggagtgtatgactgatgtctggtgcctttctcaaatctgaattgtgtcacgacctcaatcatcttcataatgaatggggcatgaagacaccccttcaaaggaaagcacgctgcatgaatgatc

SEQ ID NO: 78982 - DNA, 459 bp, Zea mays
  unsure (1)..(459): unsure at all n locations
tgtgaagattcttcatcccaacatgggcaagtcggcgatgctagatccatcccatattagtcttagcaattaagcaagtgtctagtttagccttgttatcattaaaatcaactaaatatatctgaccatctaacactcccttaaatgttattgaatcatcacttcttctaaagacagtaacacctatatcagtaaaaagacagttgtagcccattttacataattgagatacagaaagcaaattgtagtctaatgaatctacaagaaaaacattggaaatggaatggtcaggagatatatgcaatttacccaaacctttgaccaaaccttgatttccatccccaaatgtgatagctctttggggatcttcatttntctcatatgaggagaatattcttttctcccttgtcatgtggtttgtgcacccgctatcgattatccaacttgatccaccagatg

SEQ ID NO: 78983 - DNA, 414 bp, Zea mays
gcttctatgtccgaataattaagtgtttcgacagtcgacttatttttgttgtagatgaacttattcacctgagaaataatcaactacgccaactaaatattccataagatttgtgatggacgccaagcacctaaatccattatataaaatggttaaggccattatcctttcaaggggacctcagcatcgaagtctttacagtgacccatacaacatataggacagtacaatgccctataccgggtgtatgcctacgcgtgctggaaggtgacacaggggtatgacagaatatgaagttgtactgaacatggtcctaaacctcaccgtaagcccactttgtgggacccgcaatgtgccgaaatgttgacaccgaacaagctcaatggattcgtatggagagcagacaggatataa

SEQ ID NO: 78984 - DNA, 445 bp, Zea mays
  unsure (1)..(445): unsure at all n locations
actatanaaactcaagcttcacgggctactggcggagctagcacgaagcactgtcttttcttgatggaggctggactgggctggccacggaggccgaagctctggcggcaatggcaggcggaattaagctcgccggagctaaggaaaggtggctggccggtgaaggtgagtgccgcgcgaatagaggtgcgcccggggaggctttataagcgcgggcgggcactgccgaaggcgagggcgcgcggcggacttgaccggacgccgaggtgagcgcgcgcgcgggttgggcaagctctggcgtgccgaccatggtcaaacacgtgtgcccgagcgatctgccacagttctggcgcgagtggtcgctcatccgagcctgctctcgccttggtcagtgcacaaaacctcttctcctccctacaagctaccatccttgagagggggtcat

SEQ ID NO: 78985 - DNA, 420 bp, Zea mays
tccgtgtcccgggacaccggagcaccggacggatcctgcttcaatcagataaccaccagttttacgctattgtcagtgctttcattgtaacgaccacaacaacaacaacaacaacaacaacaacaacaacaacaacaacagtagtaacaacaacaacaacaataataaacaggctgttatcagataaatgcactgcttttattttaaatttgctggcaagatgtttatttccctattgttacagggtttcattttctcaggttagtataaggtaatatacgagtgacattgtgatgagaaacaggtagcatagaacaaagcataacatggatagagccgaatggcataccccgaggagaaggaaggtgaactgatgcttctgtttgctgcctgcttcttcgaagtgagcctctataaact

SEQ ID NO: 78986 - DNA, 438 bp, Zea mays
  unsure (1)..(438): unsure at all n locations
ctcaacctttcttgttgcttaatgaatatacttcaatgtttataattggctcaagccatgattntaaatttttcgtacccttttccttattttcttgaattttgctcatggggctcacttagggtttttattacggttgcaacattattacctttttgaaagacccatttgttttgatcatgatactttaaggtatatgcttggtggattccttactcttaagttaatgtgatgctcatgcttactttggttcacataaaatgatggttcttggtttggcattttaagagaaaccctatgtgacactggggtgtcacagccttccccccttaaaggaatctcgtcccgagattctggcaagagtcctcccggcgtgaagcaaagggtgagacttataggatatgggggattatgatcatctttagggtaaaactgctc

SEQ ID NO: 78987 - DNA, 454 bp, Zea mays
  unsure (1)..(454): unsure at all n locations
tgtgagcaatacaagtacagaagggagaaagctgctttgtttgatcatccgaagcccatgctnttatgtgacgatatatcagagcagaaggtattattgggatctcaattgtctgaagagcacgagaaaaccctaataaggtttctgttcaacaacaaagatgtcttcgcatggtcagctaatgatctctgtggtgtcaacaaggatgttattgaacattcgctcaatgttgatccatccttcagacccagaaattagaggcttcggaagatgtctgatgacaaagccgaaggtgctcggaatgaagtgaaaagactcctcagcgctggagtcatcagagaagtaaaatacccagaatggctagctaacactgttatggtgaagaaggccaatggtaaatggagaatgtgcattgattttactgatctcaacaaggctcgtccgaaagatgaat

SEQ ID NO: 78988 - DNA, 479 bp, Zea mays
gacactattaatactgcagctgccatgagttggagtgactctgggagcgccaccacccacttctatggaactacggactggatgcaccggcgttggtgatttccattccataatatcctctgactgtactgaggtcaaccacaatccctgtagcagataacacgtgtgccaaaattggatctgttctctccacaatgcgcgtttactgaaggtagcatatagttgatgctcccttaagcgcgttaacacgatcctgtaatgccgagcatgctcctcttcattcttggaatatattaagagatcatcagtgaacaccaccacaaatttgtgcaactctagcatgaatacccagtgcataagatatgtgaagtgggcaggagcatatgttattcctgaagacataaccacgatttctgataatgcataccgcgtagtgaatgcggtcgttggtatatactatggccagatatggatctgat

SEQ ID NO: 78989 - DNA, 404 bp, Zea mays
  unsure (1)..(404): unsure at all n locations
tcgtctggaccatattcctgtatattcgtggcccaattcttaagatacctgttcacatatttcacttggaaaacattgtcaaatcataattttgaggaccttctgaagccgaaggcccccaacaatagttttgactcaaaaaattttgggtcaagcctaagggttatgttctcggccaacctaatagctctggtaccacctaaagcgtcccaatcctctaggactcaaatgtgatacaattactagtcccaggaggctagtaaacacatttaaacatcagatgattctagatctgcttaaacgagacaaacccataaaggtggcgatcaactntaagagttggtccacaactcgggacatatcatcaaagtggggctgaagctacccgatatatgcagcgaagc

SEQ ID NO: 78990 - DNA, 451 bp, Zea mays
  unsure (1)..(451): unsure at all n locations
taataatgagctaaatatactcgattctcggaactttgatttaaacattgcacacatcgctcatgtatatacctctgatcatgtctctttcatttggtacaaatgcatatttcttattcttcttgtgccaaggctaatactaatgtgttttcgagtatacatctatgattagtcttagattgaaagggaaatggtgtatacagcaaagacaaggcttccactccaactctgacggtatcatctaccctttgtcgttactcatgtaactctctattggtatgacccttcactatatttattttaccatntgggagaacgtattaggccccaaagggggagaaaagtgtgaaaagggctcccaagttctccgtttttggcgattaatgccaaagggggagaaagtattaatcccaaagcaaaaggaccgcaccaccatttcaaaaaatttcac

SEQ ID NO: 78991 - DNA, 458 bp, Zea mays
  unsure (1)..(458): unsure at all n locations
tctccaattgaacatagaanatgacttctttggatcaaggcaagcaaaaccaactagcaactcacttaaaacttcactgaaccgatggcacaactctgtattgattttatcaagaataacaaaaaatatctcggtgtggtagtagtgaagatttgtgactgtgaatccatctcgccttgatcgacctctaataggtacttctgcatccatgtctaccacaggaatactcttattagcacaaaattccttcacatcttcaaagaatgactcccaaccattatctgtcctcatcatagccattcgggctttaacaacatcaagtaactccatggcaagaacaatatcaacactcttcctttgcaacatttgagagagctcatttgtgattgcaagcactttcaacatcaattntagaatgaaagcaaatttggaactctccatttnttctatcaaccctg

SEQ ID NO: 78992 - DNA, 474 bp, Zea mays
  unsure (1)..(474): unsure at all n locations
acctatgaatactaagcttctaagggggagcacattntaggactaacaaatgtccattttgagaaagacaggatttgtagcgcatgtcaagcaggggagcaggttggagttcatcatccacacaagaacatcatgacgatcgagaggtcgcttgaactactccacatggatctattcggcccgattgcttacataagcatcggcaggagtaagtattgtcttataaatgtggatgattattctcgcttcacttgggtattctttttgcaggaaacatctcaaacccaagagaccttaaagagattcttgagacgggctcaaaatgagtttggaatgagaatcaagaagattaaaagcaacaatggaacagagttcaagaactctcaaattgaaggatttcttgaggaggagggcatcaagcatgagttctcttctccctacacacctcanaaaacggtgtagtggagagaaaga

SEQ ID NO: 78993 - DNA, 467 bp, Zea mays
  unsure (1)..(467): unsure at all n locations
tactcagcttctgaatcttattggtgcttatagaatatacttcaatgtttattattttctcaagccatgattctgaatttttcatacccttttccccattctcttgaattntgttcatagggctcaattatggttnttgttggggttgcacaattttgcgttgttgaaaaacccatttgttttggtcatgatacttttaagtataggattagtgggtcctttattcttaagtcaatttgatgttcatgctcaattatggttcacataagatgatggttcatgggttagcactttgagagaaaccctatgtgacactggggtgtcacagcttcctcccttctctggtgaaaatcattatcggcttggatgtactcatccatcttctgaagaagcttctccagggtttgtggaggtttcctagcaaaatattgagctgtaagtcctggcctaagtcccttgatcatggg

SEQ ID NO: 78994 - DNA, 461 bp, Zea mays
tcagctccatctatgttatggattgcttatgagtctgtccatttttcttcggcccttctggcagcttcctgacttccatgaatagcaatgggcccttggtccgaaggtatcttcatgcaaagatatgctggatgaagaattgcttcaaaggcattgagagtaccacgaccaatgattgcattgtaagggtattccatgtcaacaatatcaaatacaacttgttcagatcttgtgttgttgataaatccgaaggttactagcattgtgattttgccgagtgctacaatctgccttcctccgaagccacaaaggggatgtgtggcatcatggatcttgtcttcgggctcttgcatctgtctgaagaccttggcaaatatgatatcagttgcactgcctgtatcaaccaaaacattgtggaccagaaatcctttgatcacacaagagataaccatagcatcatt

SEQ ID NO: 78995 - DNA, 361 bp, Zea mays
actggatgcagcggcgttttgatcccattccatctatccttgacatactggggtcaacacaaatccctggtacggagatcacgagggccaaaattggatctgctatatccaccctgcgcatatacatgaagtgagcatatatctgatgctcgcttctacgcgtgacactatccgtacatgccgagcatgctcctattcattcccgtaatatattaagatatcatcagtgatcaccacggcgaatttgtgcacctgtagcgtgaatgcccagggcataagatatgtgatgagggcaagaccgtatgtccttcctgagcacattaccagatgatctgattatggctaccgcgaaaagaatgcg

SEQ ID NO: 78996 - DNA, 452 bp, Zea mays
  unsure (1)..(452): unsure at all n locations
tctaaagggagaacacattntatgattaacaaatgttcattttgagaaagacaggatttgtagcgcatgtcatgccgggaagcaagttggaacccaacatccacacaagaacattatgacgaccgacaggccgcttgagctgctccacatggatctattcgacccgattgcttacataagcatcggcgggagtaagtactgtctagttgttgtggatgattattctcgcttcacttgggtattctntttgcaggacaaatctcatacccaagagaccttaaagggattcttgagacgggctcaaaatgagttcggcttaaggatcaagaaaattagaagcgacaatgggacggagttcaagaactctcaaattgaaggcttccttgaggaagagggcatcaagcatgagttctcttcttcctacactccacaacaaaatggtgtagtggaga

SEQ ID NO: 78997 - DNA, 454 bp, Zea mays
  unsure (1)..(454): unsure at all n locations
tgtgaagattcttcatcccaacatgggctagtcggcggtgccatatccaacccatgttagttttagcaattaagcaagtgtcgagttcagctctatcaaaatttaccaagtatagctgaccctctaacactcccttaaatgctattgaatcatcacttcttctaaagacagtgacacctacatcagtgaatagacaggtgtagcctatttgacataattgagatgcggaaagcaaattgtagtctaatgaatctacaagaaaaacattggaaatagaatggtcaggagatatagcaattttacccaatcctttgaccaaaccttgatttccatccccgaatgtgatagctcgttggggatcttggttattctcgtatgagaacattttctnttctcctgtcatgtggtttgtgcacccgctgtcgatgatccaacttgagcncccggatgcata

SEQ ID NO: 78998 - DNA, 441 bp, Zea mays
  unsure (1)..(441): unsure at all n locations
ntatcaaatggacgtgaaaagtgccttcctaactgacttatcaggaagaggtctatgttgagcaacctcccggctttgaagacagtgagtatcctaatcatgtntatagactctctaaggcgctttatgggctcaagcaagccccaagagcatagtatgaatgcctaagagattttcttattgctaatggcttcaaagtcggaaaagccgatcctacactctttactaaaacacttgaaaatgatttgttcgtatgccaaatttatgttgatgatatcatanttgggtctactaacgaatctacatgtgaagagtttagtacgatcatgacacaaaaattcgagatgtctatgatgggggagttgaagtattctctaggattccaagtcaagcaactccaagagggcaccttcattagccaaaccaagtacattcaagaca

SEQ ID NO: 78999 - DNA, 447 bp, Zea mays
tgtgtgccaaacttgaattatggagtacttaaaacaattttttttctggacccacattactaagtatttgaatgcactaaaagtaatagttagttggctaaaatttgttagtggaattagctagctaacaaataactaactaattattaactaatttaccaaaaatagctaatagatgaactattagctaagatgtttaaactatatttagccactaactattagctctagtgtattcaaacacgccataaggtagcaaaatgtgtgcggagtaacgtagaactacaacattgacgcatgaatgagggctgccgttctccacattgtcatccacagatgttaaggaagttcaaacataaattaaaaaaccatgacaacaagcaaccactttacagttaactgaaacaagttatgaagtatccaggtccatcagtcacatgatgaata

SEQ ID NO: 79000 - DNA, 408 bp, Zea mays
  unsure (1)..(408): unsure at all n locations
ttcaaaaatttggatcaccttttctttatatggggaaagatatgagagggcgtacagctttttttctgaaacttacacaacccctctgtaccatgttcaggatacttcactcgtgagtagatttagatctaattgacgggaataaactgattctttttgactgggaagtaatctcacctgtatcttaatgatctcatgtgatgcgcattgagcttcatgccgctatattttnttaataaggttatccctattctacacaatatgatggatataggtgagatccaatttggctatgagattatctccaagtaagggcttgttggtcccatctttagtcattatcacatctcatcgaatatttgataccaggtggaagtattaatatagtctaattggtaaacttacaca

SEQ ID NO: 79001 - DNA, 425 bp, Zea mays
tctatacggagacaaaacaatgtcttcaatagaagttatgttttatcagcatgaactattgctttggctaatgactaagattgtcataaaatttcaagggatgcaatagaatggatcagacttcaagcaattggtcacatcaataaatatcaaaccgaaacaataaaatggcgaggcgggaaagtaaaatcgaaaaacataaaaccaggccaccttgtactccgaaggatagcttaaaacaagaggaaaacttcaagtcaaatgggaacgacctgtcttggttatatcttcgaacaggtcgggatcctataggttaaaggacatgaatggaaatgaagttccaagatcctagaatgctgatgagcttcatagataatatgtgtaatgtctacgtaatatctattcttgctttataattggcacct

SEQ ID NO: 79002 - DNA, 437 bp, Zea mays
  unsure (1)..(437): unsure at all n locations
ttcttttannctacgtatggtgaatggtgtatgtttttgtgtggtcgccattcttccaggtcgtacgagatgtttagagattgatccggtaattgagaatcaagatatattctgtggaagaacctcaagtgttctataagcaaggcaagtggacttctccctctgcatactctgtttgatccctaacaatacatttaatacagtctactcttttggatatatatgcataacttgacgggttacctatttagataacctttccaactttattccttgattaaacctgagaattatactttaccttcgtagctatgctattgctacaacttaactttatgcagtcactcccgcttatgatattaatgcgccacaatggtaagcttatattattgttgttacccgatggttaacaagattattgctattaattggacatg

SEQ ID NO: 79003 - DNA, 69 bp, Zea mays
atctcaacttaacctgtctggtgccgtgacgagccagcacagatttaatatagtgttacctccccacac

SEQ ID NO: 79004 - DNA, 458 bp, Zea mays
  unsure (1)..(458): unsure at all n locations
ntatatggacgtcgatgtcgtactccgctaaaatggtctgaacctgttgaaaggtgcttctttaggcctgatatggtgaaagaggccgaggataaggttcagaaaattatttataatatgaagaaggcacaagctcgtcagaagagttatgcagacacacggcgaatgcccttatatttcctggaaggagactatgtttacctgaaagtctcaccaatgaaaggtgtatcacgttttggggttaaagggaagcttgcacccaggtacattggtccattcctggtacttgagcaatgtggaccagtggcataccgactccaactacccgaaaccttgtctgctgtgcataatgtgttccatgtgtcacaattgaagaagtgtcttcgggttcccgatcgaaccattgaagtaacggatgttgtccttgaaccagacttgacatattccgagcaccctat

SEQ ID NO: 79005 - DNA, 458 bp, Zea mays
ttgatacacggattaaacatcgccatatcactgggtgtcttgagactgatggtgtatggagattctctggtagtcatcagtcagataaacaaggagtgggattgttcaagtgattcaatgggaaaatactgcgccgtcgtccgaaagctagaagataaattcgagggtctggagtttcatcatatagaaagagatcggaacacggcggccgatgtactgtctaagctcggatccggtcggactcaggtcccgcccgggatctttgtgcaagaaattctccagccgagcatctcgatggatcaaatagaagagtgcaacatcatagatcaacccgagtcagactctgatgactggagacaaccgattatcaagtatataaagaatgaagaagaaccagatgacaagaactcggcagagcgcattgccagacaatcagctcactatacactcattgggga

SEQ ID NO: 79006 - DNA, 450 bp, Zea mays
  unsure (1)..(450): unsure at all n locations
tctaaagggagagcacattntaggattaacaaatgtttattttgttaaagacanggattgtagcgcatgccaggcagggaagcaagttggagcccatcatccacacaagaacatcatgacgaccgacaggccactggagttcctacacatggatctattcggcccgattgcttacataagcatcggcgggagtaagtactgtctagttattgtggatgattattctcgcttcacttgggtattctttttacaggaaaaatctcaaacccaagagaccttaaagggattcttgagacgggctcaaaatgagttcggcttaaggatcaagaaaataagaagcgacaatgggacggagttcaagaactctcaaattgaaggctttcttgaggaggagggcatcaagcatgagttctcttctccctacacccctcaacaaaatggtgtagtgga

SEQ ID NO: 79007 - DNA, 375 bp, Zea mays
  unsure (1)..(375): unsure at all n locations
tgagtaccctaaccatgtttataaactctctaaggcgctttatggactcaagcaagccccaagagcatggtatggatgcctaacagattttcttatcactgatggcttcanagtcggaaaggccgattctacactctttaccaaaacacttgaaaatgaattgtttgtatgccaaatgtatgtcgatgatattatatttgggtctactaacgaatctacatgtgaagagtttagtatgatcatgacacagaaattcgagatgtctatgatgggggagangaagtacttcttgggatttcaagctaagcagctgcaagagggcaccttcctagccaaacaaagtatactcaagatattctaagcaagtttgggatg

SEQ ID NO: 79008 - DNA, 445 bp, Zea mays
ctacaatgttgagactaaactaatgacggggtgtaaatttctgaggatcacaattaagtctttcatacggttagatagattcgcaatcgctatcaaaagtcctatgtaataaccataaggttataagttcgagagatatgacacttaaacaaattttgcgcatcaatagtgagacaggccggtgagctgccgatggccatgccgggccagtctcccaaacaaattggcggctccactttcacggtgaccggtggttaccagatagcagcagctgccacccagatagtatataataaagccggcgcaagctgttcagcatgggcatgctctgttcacgcatcaacattcctgcaatacgtatgtcggcagcttgtcctcactcagtgtcctgttgcagaccgccatataaaaatgagatttttagtgttcctaggttatcaccact

SEQ ID NO: 79009 - DNA, 425 bp, Zea mays
aactaagcttgcttgtggccctacagcctacctgcatgaccttatctatgctttcgaaccatggccacatactattctgctctagttgaaacaatcgtacgtgagagcaactgaactaaagatcccgacacgaagaaccatgcatggtatatattactccggtgaaaccaactcgaaccttgtatgctagtaagaaggtgcctcttagcttctagaagaggatctgatactatttcaacacctctggataatgaattaatcacacgacacgcgacagagctatttgtcacagtagtaggtccatcacatagatcaaccacccaccaatcctgcatgctacccgcgtcccgcacaccaaaaccgggcgcgctacccgctgcattctgcattcggtcagtccgcgctaccctataacctgccaccac

SEQ ID NO: 79010 - DNA, 439 bp, Zea mays
  unsure (1)..(439): unsure at all n locations
tctcactagtaggcatagctctgaccatgacatttatgtttattatgagaaancttnnagcgcgctcatcatgtcctacttggaggcatacacactataccaaatcacccatgacaagaacgactaagatgatcttctcacatccacgacatagttcttgaggctcttgtcaataaaaacttttactccatttctattcgcaggtaatcctatgcactaaagcttgaagctggtattgtccacctccttcgccatatgacacttccatatactctcttggacgcataagatatttgcacgcttcctagtcactgtctcaactaacttcgataacttacttgtaagcgaccctacactctaactatgcaaacgaatcctagttggtcgactagcttccttacccttcgcactctacattccaacaacatattgactaaat

SEQ ID NO: 79011 - DNA, 453 bp, Zea mays
  unsure (1)..(453): unsure at all n locations
accttaaaactcgcttctatcttatgagcttattagatatttaatgtttatattggcctaagccatgattntatatttttcatggtcttttacccctttccttcatttctacttaattagctcaattagggttggtattagggttccaacacttttccctatttgaaaaatcttttttgtctggaacatgattctttagatatacacttagtagatcttttcttctcaagttaatttgatgcttcatgcttaatttggctcacataaaatggtaattcttgggttagcactgagagaaaccctacgtgacactagggtgtcacagccttccccccttaaaagaatctcgtcccgagattcgggtcacagtccttccggggtgaagcgaacggtgagacttacacgaagtgggtgctctattattagggcagactactcttcgaatgcattctc

SEQ ID NO: 79012 - DNA, 452 bp, Zea mays
tatgtagaactaatctcagatgatcttcatgtgcttctttattctgagagtatactagtatgtcgtcaatgaataccactacaaactggtcaaggtattccatgaatactttattcatcaagttcataaagtaagctggtgcattagttagtccaaaagacatgactaaaaactcatatactccatatcttgtagtgaaagctggtttaggtatatcttcaggccgaatcttcaactgatgatagcctgatcttagatctatctttgagaatattgtagctcctctcatctgatcaaacagatcttcaatctgaggtaacgggtacttattcttaatcgttacttcgttcaaacttctatagtccacacacattcttcttaaaccatctttcttgttcacgaatagaactggggctccccatggtgatgaactggggcgaataaaacatttt

SEQ ID NO: 79013 - DNA, 243 bp, Zea mays
acaaaacaggggctacacactttacacataaacttgccagcctgtacaaggttgcaaaagtttattataacgtgagggtcttctatcacctcactacctactggtaatggcagaagaacatcaactctgctcaggagggattggattgttattcgggagcccgaatctggaatacatgtgagtggacattaatacacaaacattctacaagtaatgtttttctaaatacaatacatcctgtgc

SEQ ID NO: 79014 - DNA, 452 bp, Zea mays
  unsure (1)..(452): unsure at all n locations
actcagctgggagggtggcatgtaagaatggcttgttgttatgaataaaataactagtaaaaaaaatggcatgtgcataatagcgactctcttcccatggcagatggcttcggatagaaccacgcctaccgcctccgggattggagcaagacttcctctaagagctgagggaaaggctggcgganaaaggggtgagacccacctccccgcacctccagaactaccactagacctagcccaaattctggccaatcaaaccagactcattgaagtcctcactcgaagtctggagaaccagcgcccaggcggtggaaggccccatgacaggatgggagaattcctgagactgaagccgcccacgttcgcggggtccagcaatcccctcgatgcagatgactggcttcgcacaatcaagaagaagttggaagccatcgcttgtcctgagaataacg

SEQ ID NO: 79015 - DNA, 238 bp, Zea mays
gagcaacacgaactcttaacaccaaataaaaccgcgcacaaggcactgaaacaaagtgatatgcaaaaatggtccagagatacaacgtggcacgggccccatccaaaacaccaacacctacctcaacacgcgagaatggccacgaaggagacaatgaaacaccctgcatcaagggaggggaagccgcgaatcgaaaaacacgcgggaggacccccgaaagacatgggaaaaaaccaag

SEQ ID NO: 79016 - DNA, 413 bp, Zea mays
ctgccacaaagtgcacaggcacaaggtcctgtgtctatgaaaaaggccggagtccagaaaacagtgccagaggacggttggagtccagaagactgacatcatagaaagccaacgcacattctggagtttgcagacagagtcacccggaggaacaccatctgaatgtgctaaagtcagatggggtcaccactctgaggaagatgccacctgtgaacgagaagatgacctggaggccacataccctgaaccctttgctgaccaaccttgaatctcggggcgagattctcttaacgcggataggtcttgtacaccctgcaattggaggtaaaaaaaactttgctcatacgacaagaccaagcggtatttcctcttctcaaccctcctaattctattctctctcatcctataggagc

SEQ ID NO: 79017 - DNA, 452 bp, Zea mays
taaagccatggtaagtagcataggcaagtaatacacgaattgacttttctcttctacgggtgcataggtttcaccgaaatctaaaccttcgacctgtgaatatcccttggccacaagtcgggctttgttccttgtcaccacaccatgctcatcttgcttattgcggaatacccacttggttcctacaacattttggttaggacgtggaaccaaatgccatacctcattcctcgtgaagttgttgagctcctcttgcattgccagtacccaatccgagtctcatagtgcatactctaccctgtatggctcaatagaggagacaaaagagtaatgttctgaagcgccccagatccttcgggactcaaatgtgatacaattactagtcccaggaggctagtaaacaaatttatacatcagatgattccagatctgcttaaatgagacaaacctat

SEQ ID NO: 79018 - DNA, 461 bp, Zea mays
tcaccactgacaccagaactgcaagcaacaccttggccaccattgtttatacctccaacactgctaatgtactcaaagtagttcctcatgagttacgaatctaccatatcctcataaggtggcaactcaggagtaatggcaaaatccttcgtcatggcgatcagaaatgtggcccggacttggtactcattgcttcggccaagaactatcatttggtggcacccaggatcccaatgaataccttctcactagcttccagggtttccagtcaaagctcattactgcacaagccctattccagtgcacccaggatccaaatgaataccttcagtcatctgtctaaaggttccattatctttgggcccaggcaccagcagtccaagatgacatcatcatcgaagccatggtcaaggggcttcccacacctggtttttggaaggcaaaccgaatgcgaaccatgt

SEQ ID NO: 79019 - DNA, 445 bp, Zea mays
tattattactattagatgccaacaaagataacccttatgtcataacctacccctagttaagagttgtagtacaaagtggcccatttacacaacttttgttgtttttgtccaaagcatagcctttttattttgaacctcaaattcctagaacaggctatagtgacaaatggcaacccactgtaatttttacagaatttttggaaaaagttaattcactgttgtagttcatacctacactagaattcataaatagagaataaagaaagggaaaatgaatgatggaaattagtgtcatcctaaaaccctttgtaaattttccactgaaatatataagggaaatgccaatccactatgcttacccttaacaaaacctaaacttggaatgataagcgtaaactgctaaaagccacgtatgaccaagaaaccctaagttgtaactaactta

SEQ ID NO: 79020 - DNA, 451 bp, Zea mays
  unsure (1)..(451): unsure at all n locations
tactcctccctngaagggccgatcatcatcgcctaagtttttaaacctgngacatacaagctggccaatgatcaaagcgaggtctatagcaatgcttggaacatcgaacaactacgtcgcttttacccttaaaatgtttcaagtcgttcatgtatctcgatccctttacatttataaataaaggtctaaccgtcaagggaggatcgaccttgcctcagcaaaaatcgaccctccctcgggggctagaaggggggaaccccctctgcgtcaaaattttcctcggaaaagttttctatcgaaacgactttcgtgcctttcgactatatcgataacgggatcctaaaaacgaacgagagaggcctcgagcggcaaggccgaccgagccgagggactcctacgcctccgggatacggatacctcactcatcaccttccgtgaagggtaactcgcg

SEQ ID NO: 79021 - DNA, 449 bp, Zea mays
  unsure (1)..(449): unsure at all n locations
nggcttgaccacatgagagcacccccacccttatcacattttatggtttaacaatagcggtaagttcaaggtaacaaaaacggcaagggtgcatttttctattggctcttaccatgactttgttgatttcgatgtgatgagtatggatgcttgctctcttttactgggatgtccttgggagtttgatactgatgctattcaccatggtagatctaataaatatactttcatgcataagggaaagaaaattgtgttgcttcctatgactcccactgaaatggtccacttagaacatgagaaagagattaatgctaagcataaaggtgttttgaactctgaaaatcagcaacctattaagttaaaaactcctactttgctagccactaaatctgatcttgaagagttacatgcctctgttggactttgctatgccttagtgtgcaaaaatg

SEQ ID NO: 79022 - DNA, 449 bp, Zea mays
  unsure (1)..(449): unsure at all n locations
nttcttggcgtgctgccacattatggggtgggtagtacttgttcactgtcgccctangatggccggtgggtagcatcagctggttggggggtgctagtttagagatgcgtcgcgggaggaagactgaatatcttgaaatccctctcaaagacagtatcaaaggatggcgcttggagtggtttattgttgagaaccatggaaattctctcccccctaggtcagtaagacagccggatgttcgcactccaagttggaccgaatcccccactgattatgaggtagctgatgcaggtgctttgctagctgtagttgggctgctgaaggagaggggtctgactgctgangctgtggntgctgattttngttttaagaatattcagcccgtgaaagacagggcatacctggcttatctgtaccgaggcctagctgactcaactcgggttaccaac

SEQ ID NO: 79023 - DNA, 445 bp, Zea mays
ctaccctaagtagggattaaaggagtaaaacctaacccaattttgtataaaccaaaggctttatggaaatagttgtaaaatacccccaaaaataaagttgaatcacatttatacccctgggataccagaaaccctaattggaaccctagaaaaccctaaaactaaaccctaggggcctttgtgcaaaattggtccactttgggactaaagtgcaaaaaccaagttaaataaagatcttaaatcatttgggtcacaaatatgtgagtttgcaagttaaaccctgagatttggacttaaatgcaaaatggacctcaattgggttctattctaagtctcagattttaatgatattggctcaactttggagccttgtaacttcaaagtattggaattttgtcatatgtcaccacatcaaaattgtagcctaattattagaaaacaactc

SEQ ID NO: 79024 - DNA, 457 bp, Zea mays
  unsure (1)..(457): unsure at all n locations
tcctgggctcagttgccaccaccaccaccactggcgcctgtcttgagtcacaatcaacagccagaagggcatcgtcaagttcagcaacagcgtgaccttcgggaggagtccgaagctcgcacagtcaatagcactatgcccgagtcgaggcatatctactgaaggcggcacaacgcttccacaaaaatagtgttttaatccaatgtatttttacttatttttgtctttacattttcctctaaaaaagacaatacaagaaggtttaaccttcagtccaatgtaataagactatgattacaccattaagtgtaaaaagagcgggtcacaaacctccaaagtcattcctaaaggaatgaagagtaagtcacanagctccaaagtcgttcctaagggaatgcagagcttaaatgtcacctaagtcaaaggtgaagaagctccacagtagttcctaagggga

SEQ ID NO: 79025 - DNA, 439 bp, Zea mays
  unsure (1)..(439): unsure at all n locations
ntacactaagcatatgtccaacacttaacacacatgtcagttctttaattgggttgtcatccaaaccaccaaaacccacaagagagctttcaacaccttgttactcaacgctcgtagtagaggttacaagcgggatgagagagggatgagctcccatgtctcttatgcatgggtggacctaaagactaagggactggagttctaagctaagccttgtacattgcgatggctcgcgtcttggctctagcctctagttcttctggtctcgtcaagagtgtgtgtccgtcgtctcgtgtatgcctcttctatgcatctgcgcatccccagttctgtccgacctcccctnttataagccaaggtgggggtcggctatcagtagcttcctaaggaaggagctactgcgccatggtcaaatgggacatcttaccctagtaaagtc

SEQ ID NO: 79026 - DNA, 419 bp, Zea mays
tcttctcatcgtcgatgagcgacgccaacgcgagctctctcttgctagtggtgtttgttcgggttttccaagtaagaaacatggattcatctttgacattggtttataaaaatgactcataagtcagatccatggaaaaatattatggagaattgtcggcgtttcgagaccggggggtccctaagccgacgagtgaatgtcgccgcgtgccccagcccagatgggtcgacgcgaggccgagcgcgaaggggggaagtgaggtggccggagatgggcgtgagagaggtggaaatcccgcggccttcgtgttcgtcccacgcccaggtcgggtgcgcttgcagtagggggttacaagcgtccacgcgggagagggagcgagcggcctcacgcgagcgcctgtctcattctcgtacccgcac

SEQ ID NO: 79027 - DNA, 267 bp, Zea mays
tcgcactctattagacttctacaaccacacatcagtacaggtgccaaaatcgttccagggtttacgcgtgcttcacctgaactgttctggcgaggtttctctgccaaaggatattcaccagatgaggtatttgagatatcttggcttgggaggcaactgctcctatgatctcccttccaacattggaggcctcttaagcctcgaaacactgtactgcacagcaagtatagaccacatcccagcatcattgtggcggaacaggacact

SEQ ID NO: 79028 - DNA, 265 bp, Zea mays
tgagcaataaccggctttgtctgaaacccttggaaactggtgatcagcatgtccttcagcttctgccatgatgtgattgttcctggccgaagagaggagtaccaggtttgtgcaacattcttgactgccatgacgaaggatttcaccatgactgcagtattgccaccatatgaagatatggttgcttcgtagctcatcagaaactgcttcggatctgagtgtctgtcatacatggggagctgaggtggcttgtaagacgggggcc

SEQ ID NO: 79029 - DNA, 265 bp, Zea mays
tatctcaaattcataggttaatatatgtaaattgattatatacatttacatgctactttcctaatgtacaacttataacgcactcgactattgcttctctatagtataaatatagcgtataactatctctcttatatgatttaggataatatacaaatatattatatgtacaaatatattaacttaattagttttgtctaaattataattagtagaatgaaatttaattccaaccaaacaaatgggccttagtgatttttttgat

SEQ ID NO: 79030 - DNA, 270 bp, Zea mays
tgtggcgccctcgggcgtcttgccgcagtcgaagcaccaagtctcccacctggaagtcttgggaccgaacccctcgggcgtgatagcgtcgcagagactgctgatactgcgccgagtgtagtaaggccatgtcccgagcctcttccagctggtccagtgagtcttctcagctggtctggttgctttggtcgtcatacgcctttgtcctcggggaaccgtattctaagtctttgggcaagatagcctcggccccatagactagaaagaacg

SEQ ID NO: 79031 - DNA, 267 bp, Zea mays
ttgtaatcgatgcacattctcttcttgccatccttcttctccacaaataacactgggactacccaaggtgaggtacttggtctgatgtagcctttctctaacaactcatcaatctgcttcttgagttctaccaactctggtccggacactcgataagctctcttggaaataggggcggtgcctgggataatctctatggaaaattcaactttcctttcaggtggcatgcctggtaacccttcagggaatacatcagggaattctgac

SEQ ID NO: 79032 - DNA, 295 bp, Zea mays
ccatctatgtagacgacactatatactactccttcttcacgggctactgttttttctagccgaagcactggctgggcttgagggtgactggagtgggctggccacggcggccgtacctctggcggaaatggcggccgaaattaagctcgccggagctaaggaacggaggatggccggacagggagagtgcggggcgaaaagaggtgcgcccagggaggctttatacgcgcggcacggtgcacgggcggtcgaggaccggcaagtgcgcgcggccgtgcactgttaaagcacggtg

SEQ ID NO: 79033 - DNA, 261 bp, Zea mays
tcgaaaaccactattttatttttctctggaagtggaacaaaattttcagcaccgattctcactataaacaatatcatgaaagtattagcctttcatagcctcaacaggcatttcttcacggttgaatgcccaaataccaaatgactcgacctccttggccgatcttcggcatcatcgttatcactttcaatatcaaaatcttcactgacatcagaatcttcagacagcgcagctaaaacctaatcagtaatttttttcaac

SEQ ID NO: 79034 - DNA, 242 bp, Zea mays
gaggccggtctagatgcatgctcagtggctattactagcatgggctggctgcggcatagccgcttagaacatgtggggactaagaacctcgacaagctgctatggggagaacatgtgataggtgtaaccaagggtcatttcaaataagatagacgttgtgcagcttgtccagcatggaaacaggtgggacgagcgcatcacatctagaatgtgatgaccacttcaagacccctggagctgat

SEQ ID NO: 79035 - DNA, 278 bp, Zea mays
  unsure (1)..(278): unsure at all n locations
actcaagcctgaggcgcccancgacgttttgtcgcagnccaagcaccaagtctcccacccggaagccatgggaccgaacccctcgggcgcgacagcggcgcacacactgctgatactgcgccgagcgaagtaaggccatgtcccgagcctcttccaactggtccagcgagactccccagctggcctggttgctttggacgacacacgcccccgccctcggggaaccgaatactaagtctctgggcaagatagcctaggccccagagactacaaagaac

SEQ ID NO: 79036 - DNA, 266 bp, Zea mays
tcggtacaccacaacttcattttcttcagggtgtggacaagttttttccccttcgtccgccctcacaatggacagatcccggaaataccttcctctcatattaacaagatgattctctttgatagttgatttaccataaactgaatggcttggtcgccaggggcgatcttcggagtcttcgccactactgtccatatcataactttcactgtcaccagtatcttcagacagcccctccagaatttccttggtaatcttttctgtgt

SEQ ID NO: 79037 - DNA, 256 bp, Zea mays
  unsure (1)..(256): unsure at all n locations
ttaatcttctttcaacattttatcggnggctttgtttagtagtctgttgacagcttcgtcaacagcttcattgacaatttttaatcgtctcgagcgcttccttcagggcagggtcagcttctaggttgtatggctccgctgggggagaaagttcatctgcatcataaaatatgtttgttagttccgaagcaaaaacggattacgaagctaaatcttaataaaggtacctataaagcctcacaagcttagcagcttc

SEQ ID NO: 79038 - DNA, 267 bp, Zea mays
tattattaaagactttattaaaaccttctccctacaacgaaaaaggcgaaaaacatctaaatccaaacccatatatgtgtctgtgttttacatcaattatttaaaaatatatagaacgaattcgagattcgctttttataaatctcaataaactcaacgctaaaaataaaaataaaatctataattttatatcctatttatttataatcgaagaaagaagaccaaaaatttaacatctaaataaatatttggatctatccctactcc

SEQ ID NO: 79039 - DNA, 266 bp, Zea mays
tagcaaaagaaatttctagaatcatgcaatatcgagctcatgcctaaatctggtaaaaaattgttcatcaagtggcttgttaaaaatatcggctaattgatctttagtattaatgtaagaaatctaccatatcccccttttgttggtgatccctacgaaaatgataccgaatggctatgtgcttagtgcggctatgctcgacggaattgtctgccattttaattgcactctcattatcacatagcaaagggactttggataatttg

SEQ ID NO: 79040 - DNA, 268 bp, Zea mays
tgagtatgggccaaagttttatttacatcagttaattgacggttatatatgttacgtacaagttataagcttttccatttatatgtacttgtaaccaggggggtcagaggtgtatggttgtcgcaatacaacaatgtctctatacatcatctcaacctatggagatttgtctctttctcaagcacttgatgactttgtaagtttgcaatctcaagggagaatagctatcctgtcacgggctgttcattgtgcacaatcaacatctctt

SEQ ID NO: 79041 - DNA, 294 bp, Zea mays
  unsure (1)..(294): unsure at all n locations
actagngacactatataaactcagcttggttccaagaacgttttttttaccgccgccgcatttctgatcttgtatgtggatgacataccattgattgggaatgacattcctatgctggagtccgtcaaggcttcactgaaaaacagtttttcctatgaaggacttacgggaaccagcatatattttgggcataaggatctataaagataggccgaacaggcttataggattaagtcaagatacgtacattgacaaggttttgaaacagttcaacatggaacagcccaagaaagg

SEQ ID NO: 79042 - DNA, 270 bp, Zea mays
ttttcttgaagatccatttgcaacctataggttgacaaccataaggacggtcaacgacctcccaagttccattagacataatagattccatctcactccttactgcttcctttcataagtcagcatcaggagaggaatatgcctcactaatggtagttggtgtgtcttccacaaggtacactataaagtcattaccaaaggattttgcaaccctctatctcttgctctttcgagtgactatagtgtcatcctcctcagggatgtgcacgc

SEQ ID NO: 79043 - DNA, 264 bp, Zea mays
tgaaccgagggcccgcgtcaccggagaagccaaatcgcgctcaccggagttcaagaactcgccggcgcgcgtggaccgggtaaaccccttcaccatttcccgattcgttgcgcgcatggcctctgtgtcatcccgtgaagctccttgtgcccattaattgaactctcccgccgtggtttggccggagcaggcgccgccgtcgatccccgccgcctgtgctcgtggccaggggagctccgaccacctctgacgccgacccgcaca

SEQ ID NO: 79044 - DNA, 265 bp, Zea mays
taatgtccctaaattattttctacatctgttaagggcaaggctcccatggtttacgataatgagggctatatcttatatcctgctaattatcccgaacacaaaattaggagaattcatgctaagaaatctcattctgtttctcaccatgcttttatgtataacaatgaggcatctagctctaggcaatcaacccatgttaaattgcctaaaaagaaaactcctactgcatcaaatgagcctaacatttaatttaacacttttgat

SEQ ID NO: 79045 - DNA, 241 bp, Zea mays
aatattgttgtgacaaatgaaaatcattcttcacgaagcatgaaaagaagggaaggtgttttttcgtcaaagacgcaaaaacggtacgtatgtaaaatttcatgcatcgtaaagaattaaacaataaaagcaggtatattacattcaggactacaagatgtcacacattttacatttcagaagtttttttttacaatagtatttaatcttctcttagaacaacttctgcagcctcattcag

SEQ ID NO: 79046 - DNA, 277 bp, Zea mays
agacaccattaaatactcctgcttcttcttgaggacccattttttacttaccggtggacgcccatctggacagataacgacctcccacgctcgattatacatagaataatgcatctcaatccatactgcttcgtttcatgacctagcatgatgagaggaatatgcctcactaatggaagacggcgtgtgatccacatagtacactaaatggtcaataccaatggattgagcagccctctatctcatgctcatacgagagactatagtgccatccttc

SEQ ID NO: 79047 - DNA, 253 bp, Zea mays
aaactcagcttcgtgccaccttttctttaacaccatccacggcccgacgggaacttccctacgaacggctaggaaacatgaaaatgcatatggaaagcaaagatctggcgagatgcacacacacgagaggaaaaccatcactaaccggtatacctgtggataaccgaagtacctcccgtgttgaggaccagatgaccagcaatcccatagggtcgcgatgggcttggcaaccttcatttcacacccggtgagg

SEQ ID NO: 79048 - DNA, 265 bp, Zea mays
tcttaagggcaacttttttaagaaacgcgcgtcgcgcagccctcctttggggcagcaacaagaggcggaggagctggtgccggtgccgatggtcgtcgagcttgagcacggcgaggagtccgcggccagccaccaccaccacctgcagctgcaggggtcggaggaggacgccggcgccgaggcggcctccctcgtgaagcaagctgaggccgcgccgccagtcagcaaccaggtgctggtagcggatcaggaggcagaagaggac

SEQ ID NO: 79049 - DNA, 267 bp, Zea mays
taggcagcacttaatatggtgggcaaaaaatgtaagtggggcgtacaaaaaagaaaagaaaggaattttgaacagtttggatgtgttggataaaaaagcagaagtatctgttttgtcagcacaagagcttgacttaaaacaatacttgcaaagtagacttgcagaattactaagagaagaggaggtaaaatggtatcaaagagccaagactaagggtttgttacaaggtgatgccaatacaaaatattttcacttagtggcaagtgg

SEQ ID NO: 79050 - DNA, 268 bp, Zea mays
tctaaagggagaacactttttatgactaaccaatgttcattttgagaaagacagggtttgtagcgcatgccaagcaggaaagcaagttggtgcccatcatccacacaagaacatcatgacgaccgacaggccacttgagctcctacacatggacctattcggcccgattgcttacataagcatcggcgggagtaagtactgtcttgttattgtggatgattattctcgcttcacttgggtattctttttgcaggaaaaatctcaaacc

SEQ ID NO: 79051 - DNA, 266 bp, Zea mays
tcggtattacagcatgttcttagatgagggatcgaaccgacttagagatagaatgaccttttagtccataagggtctgagtcaatgttgtaaacttttatgaggggcatgattgtaattcctcacagactgtgtcctgtgcctataaatagtgaacagtattcctttactgttcacgcattcctgtaattgcaaacgcatcgctcgggaattattgtttgtcaaggcaaaggtataaatgtacctaaacgttatattggaacatct

SEQ ID NO: 79052 - DNA, 272 bp, Zea mays
cctcccatccttcctcctcttttatattgctggacatccccacggcgaagcgcttgggcgaattaaccctttatccagcaactcttgcaattgcttctacaactctgccaactcagcgggtggcattcagaaaggcctcttggaaattggggctggtctccgatgcaactcaatggagaattcaatatcccggtccggtggcattcctggcaattcatcagggaagacatctgcatactcacagaccagtgggatcttcttcagaggtaact

SEQ ID NO: 79053 - DNA, 270 bp, Zea mays
tgagcaactccaaaaggctttctatattcttcttaatctatataaatagagattttaaaaaaaatacccttcaacaatttatctaaatggctatcaattatagtcatattctattccgggtttctcgctagccaaatatagaaaatgtaaatgactctctagagggcaaacaacctatagaaaggctattggatattgagaagatataaaaagtggtttttatacaaatgactctaaatgatagtttagagcgaaatttagaagaaaaaa

SEQ ID NO: 79054 - DNA, 265 bp, Zea mays
tcggactcttctctgatttttttttgaaggcgagtgtgctgactcccttctggctgctggcctcgttgcgttggtggtggaggtggaagctgttgccaagatgcttggggttggcttgctgaagcaacagaagctgcagggtggttgcctacatattctggaatgtaaggcgaatggtacgaagcagtatgcatgacttgcttcggctgactctgttgcgctgcagcttctgctatctccttttgcttctggatggcaacatggc

SEQ ID NO: 79055 - DNA, 267 bp, Zea mays
tgtgaaggctctgtttttcccacatgggctaagcggcgatgccaaaaacagcccatgctagacttaactagtaagcgtgcatatggaccggcctattcttttgcgaaagcaactaaatcaaggttgactgctaatacaccctttaaagccagtgaaccattactttttctaaagatagacgcatctacatttgtagatagacagagatttcccatgttgcataattgactaacagatagcacattatatccgagagactctactaaa

SEQ ID NO: 79056 - DNA, 347 bp, Zea mays
aggcgactactatatactactgccttcgttccaactcctcctccgtttcttctcaattctacacaattgtatcatataatagaagatttgacactgaagagtaccgcattacatacgagtttatattaagatggcttcttcaatgcataggtcagtagctctacttccgtctcctttacgcatctctcctatagtgaattgatgtagcttgacctcagtacaaccgtgcaaacagacgctatatcacttgagctgattgctatagttgtcctatatatattaaagaggaatctcatacaccatgactactaagacgcatattgataaaagcaaaaattgatagaaaa

SEQ ID NO: 79057 - DNA, 272 bp, Zea mays
gctgcttcaaatgcctcatgctgtttttttgtacaccatactcaatgtatatagggacttaccgagatttcccctggatcactctattggagacgccatcaaaggttgtcttcctacgatccgggaatctgacggtccagaggcattgaatgtaatggactgtggaaaggccatgcgccctgtagacatgctattggatgcggggagaagatatgggaagatagctatactatggacactcaatgagagcatccatctattctgataaaacg

SEQ ID NO: 79058 - DNA, 265 bp, Zea mays
tgtgaagattctttattccaacatgggctagtcggcggtgccagagctaacccatgttagtcttagcaattaagcatgtgtcgagttcagctctatcaaaatctactaagtatagctgaccctctaacacacccttaaatgctattgaatcatcacttcttctaaatacaatgacacctacatcagtaaagagacagttgtagcccattttgcataattgagatacggaaagcaaattgtaatctaatgaatctacgagaaaaac

SEQ ID NO: 79059 - DNA, 264 bp, Zea mays
tgtgcattggtttatccaaacgacataacagtagactcatataatccatatcgagtcgcgaaagccgtcttgggaatatccgatggtctaatcctcatctgatggtaacccgatcggagatcaatcttcgagaatactctagcacctctcatctgatcaaataaatcctcaatacggggtaacggatacttgatcttcacagaaacctcattgagagacctataatccacacacattctttgcgatccatccttcttctgtaca

SEQ ID NO: 79060 - DNA, 262 bp, Zea mays
ttaaatgtgttttatttatcaccaaaaagggggagattgaaagtgcattcatcccttttgtgagttctggtgatttggataacaacacatttaaaggtctaacaaatttgctaagtgttgaacaggaaatttagtatgatgaacatacttgaatagtgtataatgatcaatgagacaatgcaaatggatataatatggcctctatattggtttgaatatatggacaaaacctaagaaatcactacatagatatgatcagaat

SEQ ID NO: 79061 - DNA, 269 bp, Zea mays
ttccagattgtatttaatctttcaaatcggatatgatatgtatccgtggtggcaaaaacgaaccagagatgtttttggtgatggtggatctcgtggtgaccaaaacgtggtagaactcaaaactctaaaggaataaactaagaccagcaactcgacacaaccgatgcaaccaaaaactcaacaagccctaactaagtagtactagtaaatgctcaatggtttataggattgcggtaaaactaatctactattttttggctttttctgga

SEQ ID NO: 79062 - DNA, 269 bp, Zea mays
tagtggatcctttatttttatttcaatttgatgttcatgctcaattttggttcacataagatgatggttcttgggttagcacttgagagaaaccctaggtgacactggggtgccacatccttccccccttaaaggaatctcgtcccgagattcgggtcagagtcctcccggggtgaagcgaagggtgagacttataggaagtgggtgcttattgttattattagggcaaactgctctttgaatgtcattctctttgcaacttcagaagg

SEQ ID NO: 79063 - DNA, 270 bp, Zea mays
ttcgcggggaaaggattttttttgaagctccggggtgcttgagagagacacttcacttcttattaactcaagctatcaatcttacaatgacctatatatccaagattgacccaaagttattctgagttactatatctaaaaactcatatcatctcgagcaagatattgatgttgtacgattatcctatgtggaaaatcaagaaaacctacaacatggaggaaaatcgaaggatggtaacacttatgtctttaagtgcaagtatcttcaat

SEQ ID NO: 79064 - DNA, 270 bp, Zea mays
ttaaccccccccccgctttataccttttcccgtttctttctaaccataatgaatgcgatatccaatggcatacttgatgcatattcactttatttgttcccttgtatgatgtactgtttgtttccccatttgaatggatgaatgtatgtatgcttgcaatcgtatagagaatgattcggtcgaatagcccgaggaactcgcaggagaagcccctgagcagcagtcggttggtggaggcaagtgtcccttgacctatctatgtcctattca

SEQ ID NO: 79065 - DNA, 265 bp, Zea mays
tgtaccacactcctatatcttgttatagcatttggccctaatagttccacttcatgaatagcaatcttctcacttgttgatagtggggtactaagtggtttgcaatcaaccatcgtagcattttttataagaccaaacacatattttttgtaaagtatgcacaatgcctttgtgaaagggaaatgtgcccttgggctatttctaagtattttggtgattgagtgccaatacaagtgcttaagtgtaaatctatgcaaattgatgg

SEQ ID NO: 79066 - DNA, 265 bp, Zea mays
tcagaccacacacttttttttctaagccttattgactgaaactgaataaactgaataaacagcctgcacagactgaagatgtgacttgactttctcttcctctagagatattgataatatctttatccttggaccctagaacaccatgagacaaatgaatgagtatgcacaataaatccaagcaaactacaatagaaaagaatgtgagtcaatagcacaacaataaatggacatgtaatataacacattgttgctaatttccaag

SEQ ID NO: 79067 - DNA, 300 bp, Zea mays
aggcgacactatatactcctgcttcttgaggacgccagaagttttctctgtcaatgggaaagttacttgactcaatgtttggtttcataacctaatacagggaggttgaggcctccctcctatactcccgctgagacacgatgctgacttcacctacggggtttaacagaatgaagcattggaacttactacaaaatacttgccttctgctcctatagtaaaagctccacaggcaggagtgccattcaggttatacattgcatccgaggataaagaatgtcggatctgttctaacacaag

SEQ ID NO: 79068 - DNA, 276 bp, Zea mays
gctgcttgcgaagattctttttttttaacgtgggctagtcggcggtgctagagccaacccatgttagtctgagcaattaagcgcgtgtcaagttcaactgtattaaaagcaagctggtctggctgaccctctaacactacgtaaaagggtatggaatcatgacttcttctgaagacagatacacctatatacgcaaaagacagttgtaacccattttacataattgtgaaactaagggcgaggcataggctacagaatctacaagagaaacattgg

SEQ ID NO: 79069 - DNA, 266 bp, Zea mays
tgccaatacccgcctattttcggtacatgccaccacagcggctactgaccataccaataacttggcctttaccatgctggggattggatatgattggacctttcaagaaagctcaaggaggatacacccatatattggaggcaattgacaaattcactaaatggatagagttccagcccattgcctctttaacctctgctaaagccgcgtaattcatacaaagcataatattcagattcagaataccaaacactatcatcactgac

SEQ ID NO: 79070 - DNA, 266 bp, Zea mays
tcagccgttgcctggtttttctttcgtttcgacggtcgcacgcgctatggccctggctgtcacgcccttaaccctctcaaaactcacttcgtcggcttccccgaactcgcccctatgctcggaccctttctccctggccatcgtggcatcactatttcctgttgcaccgcgacatcatcgagcttcggtgcttaacatcgaaatcgctgcgccattgtcgctctggcttagtttgtcctcgcgcggggtgtcacggtcgtgtccac

SEQ ID NO: 79071 - DNA, 276 bp, Zea mays
taagcagctgtttttcttttactctaaccttggctaccagaagttgagaaacacctcagattcaccaaaccgattattatgactactccatctattagacttctattacgctataacttgggatctacacaccgtaatttctccttagacgacgctttaagcacgtatgtatttcctcgactactattccaacatatgtttgcatgcaccaaagtggtcagaagattgtagcagcttattaaccacttactattcacataaactggtcggcaccaa

SEQ ID NO: 79072 - DNA, 266 bp, Zea mays
tgttgcgccctcgggcgttctgccgcaaccgaagtaccaagtctcccacctggaagtctcggggccgaacccctcgggcgtggtagcgtcgcagagactgctgataccgcgtcgagtgcagtaaggccatgtcccgagcctcttccagctggtccagtgagtcttctcggctggtctggttgcttcggtcgtcgtacgcccttgccctcagggaaccgtattctaagtctgtgggcaagatagcctcggccccatagactagaaag

SEQ ID NO: 79073 - DNA, 267 bp, Zea mays
tgaaccgagggcccgcgtcacctgagaagccaaatcgcgctcaccggagttcaagaactcgccggcgcacgtggaccgggtaaaccccttcaccatttcccgattcgttgcgcgcatggcctctgtgtcatcccgtgaagctcctcatgcccattaattgaactctcccgccgtggtttggccggagcaggcgccgccgtcgatccccgccgcctgtgttcgtggccaggggagctccgaccacctctgacgccgacccgcacatcg

SEQ ID NO: 79074 - DNA, 269 bp, Zea mays
tctaaagggagaacatgttatttgtctaaccaatgttcatttcgaaaaagatagaccttgtgcagcttgtcaagcagggaaacaggtgggaggagcgcatcacagcaagaatgtgatgaccacttcaagacccctggagctgctgcatatggacctcttcggacccgtcgcctatctcagcatagggggaagtaagtatggtctagttattgttgatgacttttcccgcttcacttgggtgttctttttgcaggataagtctgaaaccc

SEQ ID NO: 79075 - DNA, 268 bp, Zea mays
gctaaagggagagcactttttttgattgacacaagatcattttgagaacgactggaactgtaccgcaggcctagcgggggagcaggttggattccatcatgcgcgcagaaacatcatgacgaccgacaggccgcttgagctactcgacatggagctattccgcccgactgcttacattaccatcggcggcagtaagtatatgtcttgttattgtggaagattattctcgatagacttgcgtattgtatttacaggagaaatcttaaac

SEQ ID NO: 79076 - DNA, 269 bp, Zea mays
  unsure (1)..(269): unsure at all n locations
tatcgacgacttcgtttttttggagnccgccaggcttataatttccaatgcttccttcatttctggatcagctaggggatcgtacgactctggaggcggggatagttcagctaaagtacgtcaacggattagttcgaagccacaaagcaagtatcgaagctaaatagtcaagaaataatacctatacgcctttcgtgttctgcaacttcttcaactcgctttgcctctgcccgggcgtcgtgggtgtctttttcactcttttttataat

SEQ ID NO: 79077 - DNA, 266 bp, Zea mays
tgtgattcttctgctgcttttttccaggacgctgccggcgggcgtatcctctgcaaagatccatggtaaaaatatctggatcagagctcaatcgatttgccagtgctcaaattgaatcggcggtggtggtggtggcagggaacccaaccaacgacctcgtggccctcatcaacggcaagagggaggctagcaggctgcctgcgctgtgcaacagcagaagcctcgggtgcatggcgctgcagaacatctccgagtgcatggcggcc

SEQ ID NO: 79078 - DNA, 266 bp, Zea mays
taacttgtaatattttttttttgggaaaaagaaaaaggctaacctgtgtcctgggctcggattcctcctctacccatttccattcctcatcctgcgtggcccagttagccaaatctctcccccgcgtcatcccactttcccttccagtttctttctttttctctgctggcgcttacaagtgggccccatgtcgtcagcctctctgcttgcgcgcacggctccatcgttgtcactgccagatgggcccttcatggcggcttcatctt

SEQ ID NO: 79079 - DNA, 298 bp, Zea mays
ctatgaggcgacactgtatacttctcctgctttaacattcagttgttttttagcagcggcaagattttaatgacaaccgctaacactttaccaaggaactaataaatgatcggtttacactgaatactgatgtaatgaatctatttgtcgagaggagcagcaatcatagcacatggctagtgatccacaccatctactactttcatccatggtagacgcataaacagaagtacattttgttaaccatccttatttctagagctacacaacctggagttgacatggatgtattttagga

SEQ ID NO: 79080 - DNA, 268 bp, Zea mays
tctagagggtagatttttttttatgattaacaaatgttcattttgagaaagacaggatttgtttcgcacgccccgcaggtaatcacgatggagacaatcatccacacaagaacatcttgactaccgacaggccgcttgagctactccacatggatctattctgcccgattgcttacataagcatcggggggagtgagtattgacttggtattgtggatgattatcctcgcttaacttgggtatgatttttacaggaaaaatctgatac

SEQ ID NO: 79081 - DNA, 264 bp, Zea mays
tacccatgatgaggtttttttccagataaagggtcctagatcagcaagccaacaatcggtacagtccttaaacgactcagatggatacactacaccgagactcctttctcgtgcaagtcacccgcccggtctcagctttattatttaaacccaaagtttggtacctggcagaggtacatattttccgatgttgaatccattatggccatgatggattcaccatcaagttttatttttgaaaaaattcccatccactgaagcatc

SEQ ID NO: 79082 - DNA, 268 bp, Zea mays
tctttaaccctcgcttttatttttcctcgcctctttctaaccatggtaaattcattatcgtatgtgatattctatgcatgtttaatctacttgttctcttgtatggtgtattgttggtttcctaatttcaatggatggatgtatgtatgtttgcgctcgcatagagaacgatccggttgaagagcccgaggaactcgcaggagaagcccctgagcaacagtcggttggtggaggcaagtgtcccttgacctatctctgtcctattcat

SEQ ID NO: 79083 - DNA, 265 bp, Zea mays
tggcttccatttttattttatagttgctaattttggaccaacacttacaaattcatctttgtgactgccctttaatatttgcaatacagacttagctgaattggttatgatatattgcattcatagtgtggtgattgctgctgcttattacaggcgctaccagaattcctctctttgtcgagtgtcaaatgatttgtgaaagggaaatgtgcccttgggccatttctaagtattttggtgattgagtgcaaacacaagggcttaa

SEQ ID NO: 79084 - DNA, 288 bp, Zea mays
ggacctatagaaactcaagctttgtaggaaaagagattatttattctttggggtgcttgagggagttaattcaattcttatcaactcaagctatcaatcttcaaatgatctacttattcaagattgacccaaggttatttcaatttattatattcaaaacccatatcatctcgggaaaatattaatgttgtaggaaataaagaatcatcatgtgcgggaaatcaaggcctacaacatggaggaatgtcaaaggacggtaacacttatgcttttaagtacaaacatctt

SEQ ID NO: 79085 - DNA, 268 bp, Zea mays
tggtgccaatggagaatctttttccttgaagtcttggctgtcaaattgcttgccattgtcaactgtgagtttggacgggactccgaagcgacaaacaatattttgccagaagaatttctaggcagtcttcaatgttattgtggatacaaccctcgcctcgatccatttggtaaaatattcgacagcgacgaaggtgaacttgaggttcccctgggccgtgggtaggggcccgacgatgtccaggccccagcgctgaagaggccatgtg

SEQ ID NO: 79086 - DNA, 270 bp, Zea mays
tcctctgaagctccgtctcattttactgaagctgaagctgggccttcagagcccttcagggaagaaactttggaaaccgaagcgataaaaataccagaaccaattttaattgaagagactgacactgccatccccgaagcgcctgccagcatgtgtgattacattatacgacatgcttcggggaaaaagctatctgatggagaatttcatgaagctaatcattatgcaaaggagctaaaatatccaaagggggcaataatattcaatggg

SEQ ID NO: 79087 - DNA, 270 bp, Zea mays
tgggcaaagtccacttgtttttatcttcggagaaacccgacctcgttgcaacatgacaccagaaggtccaacccaacaagcgttggatgaattcagaattattgcagagcatatcagtacaagagacctggttcaggagtttttggctttcagggtttttcctagtttaaaagaatgggaaatgccgaagctagagggggagaagaaagaaggggaacttgtgcggttaccttactattacaagtttaagaaatactttaaaacaccttg

SEQ ID NO: 79088 - DNA, 267 bp, Zea mays
tcatggccagcgtgattttattcagggcgtcatataccttctcagatcttggatgcgacttatcttcaaccaggaacttgtgcatcctaccatctaactcaataacgctgtacccagcagatttcttatgatctttttcctttagcagcttccacacccgggcaacaccgtcccatttgccacatgacgcgtatatatttgaaaggatcactaggttagctgtattgtgtggctccaggtgcattagtttttccaccgctgtttccg

SEQ ID NO: 79089 - DNA, 267 bp, Zea mays
tgagaaaattaatttagtagttttgcggagatgcgcgcgattcgacgaggaaggcaagaccacatacgcgtgtgggtttttacacacacacccttggctgaatatcgggttagcggttaaagccttatttggatgctaagtcttgaagtattggaaacggatgttgaattggaaactagtaaaatacctttctggtcgtgtatgttacgggatgtttagttagtgattaaaattaattgagacatttaaaaaacctaactaattttt

SEQ ID NO: 79090 - DNA, 294 bp, Zea mays
aggcgacactatatactactcctgcttgtgactggagggctttttttttgtgtccggcgcacaccggacatgtactgccagatgtccggggcaccggcatgggcattcctgacgtatgaacgcgcttttcgcgcattaaatgcaccgcagagagccgtgggctccggaaggagccgctgctttgctggcacaccggacagtcttgtgcacaccggacagtgcggtgaatgttaccgtagcggctcccgcgcgaacccgaggctggccagttcctgaggccgaccacccttggcg

SEQ ID NO: 79091 - DNA, 298 bp, Zea mays
aggcgccactatatactcctgcttcttctgagaccccatatcatttttcatgggcctagaccacatctctctgttcgctgcctgcctaacggccaacgaaactcatctttgtatacaattcaccaaataccacggaccctatgaggtccatacaatccttgccagagtgtttgacttcgaggatctgctcttctgtaaattagtgtcacaagccatgtctaatgatggagaacaaggaacgggaacaaggtgcgttacgagtctgctctaagggttgcaatggcattgctcactcccg

SEQ ID NO: 79092 - DNA, 273 bp, Zea mays
tgtgcaaagtccacttttacataatttccggaagaaacccgacctctttgcaacatgacaccagaaggtccaacccaacaagcgttggatgaattcagaattattgcagagcatatcagtacaagagacctggttcaggagtttttggcttttcagggtttttcctagtttaaaagaatgggaaatgcccaagctagagggggagaagaaagaaggggaacttgtgcggttaccttactattacaagtttaagaaatactttaaaacaccttg

SEQ ID NO: 79093 - DNA, 265 bp, Zea mays
tgcataggtttctttttttttaaagaaatgtcaacgcgactgcttaaccctgagcggtggaagcgacactagatacgggtgaaggaggcatcgcggaggtagtcccattggcaccaggggctggtcctagctcctcgggagcctcttctccctcgcttcccgcttcattggcctccatctccaggtggtgcatgtccaagtggtcattggcttcctcaagttccctctgcacgtcgtggagctggttctccaagacatcaatagt

SEQ ID NO: 79094 - DNA, 248 bp, Zea mays
tttttagcttccgcttctgccaataagccttcagttgtctgaagctcgaagtttttcttttcaatagtatctgattgctcttttaatttgctctctaaattttcaattataacctcatgttttttgtcttccagatcctgctgcattttcaaggctttactcaacagcatactctgcacataaacaaccttcgttagaaatgtcttcgttattaaaaacaatgaaagtcaagggaaaaatagttcacc

SEQ ID NO: 79095 - DNA, 264 bp, Zea mays
tatttgcaaattcttttattgtgtgataaaaaatacatatcttgtgggaaaaagttcataaatactatatttaatacgagggaagtctttgcatccattttatcaggagagactatgtatgactggatggcaacgggtcggattcgggtcgggtataataaatacccgcccacgaccgtacccgcgggtattagccatacccgccagcaattgtacccgcgggtaaaaaattgtaccagtgcccgtacccatcgggtatcaggt

SEQ ID NO: 79096 - DNA, 270 bp, Zea mays
tggtgccaatagagaatctttttattcttgaagtcttggttgtcaaactgcttgccgttgtcaactgttagttcggacggtactccgaagcggcaaacaatgttctgccagaagaatttttgggcagtctttgatgttattgtagaaacagccctcgcctcgatccatttggtgaagtactcgacagcgacgaaggcgaacttaaggttcccctgagcggtgggcaggggcccgacaatgtccaggccccagcgctggaggggccatata

SEQ ID NO: 79097 - DNA, 269 bp, Zea mays
tattcatcgcattctcttttattgatcattttgctctagcttcgtgagaagagggagcttcgtcaaaaatactcaacttcgttaaaacgcaagaaattcaacatcaaatggccagagtgcgctcaacatctagggttacacacgatggagaggaaatcgaagctactgaaactgctccgatctacgaagttatgaggcggtcgggactagttgtaacggagggaactcctgacaaagacgcccctgctactgaagcgaagccgacagac

SEQ ID NO: 79098 - DNA, 268 bp, Zea mays
tgacccaaggacccgcttttttttttagcccaatcgtgcgcaccggagttcaagaacccgccggcgcacgtggaccgggtaagcccctgcaccattttccaattccttgcgcgtatggcctctgtgtcaccccgtgaagctcctcgtgcaccctaattgatctatgccgccgtggtttggccggagcaggagccgacgacgacccccaccgcctgtgctcgtggccagggtagtttcgaccacctccgacaccgacccgcacatcggc

SEQ ID NO: 79099 - DNA, 268 bp, Zea mays
ttaccaaaaggacgtgtttttttccttcctcaatggaccaatcaaggaagaggtctatgttgagcaacctcccggctttgaagacagtgagtatcctaaccatgtttataggctctctaaggcgctttatgggctcaagcaagccccaagagcatggtatgaatgcctaagagatttccttattgcaaatggcttcaaagtcggcaaggccgatcctactttattcactaaaactcttgacaatgatttgtttgtatgccaaatttat

SEQ ID NO: 79100 - DNA, 266 bp, Zea mays
tggctttcaggctatttttatttatgcccttagttttggcaacttcctaaatttaccctgagttgtattttttgcacacttttgcccttttgctctttagcgctggaagcacaaaactgagcaaagaacacgactaagggtaaaaatgaggacaccagcaaaaccaagggcaccaccttaaaaaaccgggctagttttgttccagtcaaactatcttgagtttgccaactttataaaaaaaaaataccgatactcatattaccaaa

SEQ ID NO: 79101 - DNA, 268 bp, Zea mays
ttacaggaggagattaatagtagctttggggcgcttgagagagtcaattcaattcttattaactcaagctatcaatcttcaatgatctacatattcaagattgacccaaggttatttcaaattattatgtctaaaactcatatcatctcgaggaacatattgatgttgtaggaaataaagaattattctatgcggaaaaatcaaggcctacaacatggaggaaagccaaaggatggtaacacttatgtttttaagtgcaagcatctta

SEQ ID NO: 79102 - DNA, 264 bp, Zea mays
tggcccatgcgtgtttttttgtcgagggctcgacgagtcggaatttgagacctgaccgaggctcgccttcgggtcgtactagcccgctccacattatttcatgcggggcaatgctttagaccctgtttttcgaccatgctcattttggcctaaaaaactggcccatattcctagcactagcatgcacaccacttcactgactgccaccgccatccacctgacaacaactgcaccacatgtgaccatgccagcaaaacccggcgg

SEQ ID NO: 79103 - DNA, 225 bp, Zea mays
ctcagctgacccaagaccccttttttccccgccaagggacggcacaggagaaagcaaccccgacgcaccgccgaccgggaaaacccggcaaccctaaccaagaccaaggcgcacggacgcgccgtaagggctaaaacaagccccaagagccatggtaggaacgcgcaagagagggccggacggaaaaagagtccgaaaacaccaacgacgaccgtactttaggca

SEQ ID NO: 79104 - DNA, 266 bp, Zea mays
tcatgagtggcagctgatgtcttcatgtataagcagctttagccgaagctgtttcttcctgcaggaccttcggcgacgaagcatggtcccaacatgagttaatattataccatagtaaagaactatgcggaatatcggcaaagggtagagaataccgatggagttgagtggaagcgcctactttgccgaatactccatttccctttcaattctatgactaagcatgagaatacacttgaaaacacattagtcatagacataaaaga

SEQ ID NO: 79105 - DNA, 263 bp, Zea mays
tcgcacctctgaactatctcggctgcatcgttcttcgctgtcggccaatagaatcctgacctgaaaaccttcccaactagtgttctggatgctgcatgtattccacattgccctgcgtggacctcctccagaagttgcctcccagtggacgggagaacacacttcatgaggatgcctgatgcgccccttctgtacaatatctccccaatgagtgtatagtgagccgactgactggcaatgcgctctgccgagttcttgtcgtc

SEQ ID NO: 79106 - DNA, 266 bp, Zea mays
ttgccgcataacattttttgaccttggaaggggaaactaacacagcagccgctcctgctccgaaggttccccaagatccatcacaaaacactgtccatgcttcggcgtctttatttgtttcttcctcctgagcccctggcgtccagtcaacaatgaagtctgccaaagtctaggactgaatcgaagatctatgaacatattcaatacaaaattcattgagctctgcagcccattttccaatccttccagtagcttctcggttcctc

SEQ ID NO: 79107 - DNA, 264 bp, Zea mays
tctcctggacaattttctgtacttaccgctgagtgcgaagctgccacatataataataaagaagcccctggcacaggtggagttaatgctgttagatctattaaatactgcttcaggtcttccaaggccttctgctggattggtccccattgaaagacttcggctgacttcagcacttcgaagaatggtaagtttctctctgctgatctggatatgaatctattgagagatgccaaccttcctgtcaatctttgagcccccttt

SEQ ID NO: 79108 - DNA, 271 bp, Zea mays
tgtgaagattcttcatttctatataagcaagttggtgatgccagagccagcccatattagtcttagcaattaagcaagtgtctagttcagcattgttatcattaaaatcaactaaatataggtgaccatccaacactcccttaaaagctattgaatcatcgcttcttctaaagacagttacaccaacatcagtaaagagacaattgtaacctattttgcataattaagaaacagaaagtaagttgtaatctaaagaatctacaagaaaaac

SEQ ID NO: 79109 - DNA, 271 bp, Zea mays
tcggagcgccgaaggtctttttaacaccttccctgagctcgttgtcgagaaacgattcaatttcccagcgcgtagcggccccaccttgcagagttactgtttggtctctacggtccaccacgcagcgagtgcgagcgggtgtccgcctggtgtaaaaatcctggtgcttcgccttcttacctgcagtactatataaacagacgagtaggtgtgaagttaccacagcattcattgctatttgcactgttttgctgccaaaatttttaaccat

SEQ ID NO: 79110 - DNA, 268 bp, Zea mays
tcacggggcgctaaggtttttttttgtgcaaggaatcgaaaagaactcaccgtggagctcggtctatgctcgccggcggtcgggtgaagttcggtgaccttgatccggtgtctccgacgaggcagagctggattcctcgctctgggagcttcaccgaggcacatagagtctttctcgagggtcggacggggctgggaatggctcggtcggccggtctacggtggtgggttctcgggcggccgctggcacgccgtgtgcagggcaaaca

SEQ ID NO: 79111 - DNA, 268 bp, Zea mays
ttgatttttttaaaaaatttttaaattcaaaataatgtgaacaaataagaaattaccatgtcgaacaggtggtcgacaccgacggatcaagatcggtaccggccagatctctagtgtggggggtgggtactaacagatctggttctattgcgataggtatcgaccgagccgactctttagtagcccccatcggtcgaccggtatcaatcgcatgtgccgccatgttaccggtcgacaccaacatacccaacctaaggctagttccagc

SEQ ID NO: 79112 - DNA, 262 bp, Zea mays
tcgggatcccctttcttttatccatctcccggcagactgataattctttgttgtctgggaggcagtataagaagtcatcttcgtctgtgccattgaatactaaggccccctttggatacttcggttcccgggcatagtgattagcttcaaaaatctcttcttcagataatctttttcccgaagcatgtcgtataatataatcaagggcttcggaggttgcttcgggggcagcagtgtcagttccttcaaccaaaattggctc

SEQ ID NO: 79113 - DNA, 266 bp, Zea mays
ttattgaagcggcttttttttatgcgaatttgcgaaagagcaaggagatattatgtctgtgcatcgattgtgataataagatagcttggagagatacaggagtaatccaatcacatctgctaaaaagagggtttaaaaacaattacacgatatggtcagaacatggtgagttggatccgtgtgaagtgcctggtaatgacgagagagttgtcggaattttagatcttaaagttgatggtaaagtgaataatgtggatgctaatcaa

SEQ ID NO: 79114 - DNA, 284 bp, Zea mays
cctatctaatcttctcttctggaatcgactgtttttcttcgacgaccaggtgaacaagctccctgaatcttataaggttgaacatcatgagcatctgttttggtgaaggcaagtgtcctctgacccattatgtcccattcacttataatccactgtctagcattacttaattgaaacataaggattgactagctctgtatttatcttgcccttgattaccttttgggttattatggatagcttcatgctattgctttattttaatcaatgaacatgatgtaaat

SEQ ID NO: 79115 - DNA, 267 bp, Zea mays
tgtggcgccctcggtgctttttgtcgcagtcgaagtaccaggtctcccacctggaagtctcaggaccggacccttcgggcgtggtagcgtcacagagactgttgataccgcgtcgagtgtagtaaggccacgtcccaagcctcctccagctggtccaatgaatcttctcggctggtctggttgcttcggtcgtcgtatgtctttgtcctcggggaaccgtattctaagtctgtgggtaagatagcctcgaccccatagactagaaag

SEQ ID NO: 79116 - DNA, 266 bp, Zea mays
tggtgccaaaggattttcttaaatccttgaagtcttggctgtcaaactgcttgccgttgtcaactgttagttcggacggtactccgaagcggcaaacaatgctttgccaaaagaacctttgggcagtttttgatgttattgtggaaacagcccttgcctcgatccatttggtgaagtactcgacagcgacgaaggcgaacttaaggttcccctgaccggtgggcaggggcccgacaatgtccaggccccatcgctggagaggccat

SEQ ID NO: 79117 - DNA, 263 bp, Zea mays
tctaaagggagacttcttgatagggttaactaatgtgcaattcgaaaaagatagaccttgtgcagcatgtcaagcaggtaaacaagtgggaggagcacatcacagcaagaatgtgatgaccacatcaagacccctagagctgctacatatggacctcttcggacctgtcgcctatctaagcataggggggaagtaagtatggtttagttattgtggatgacttttcccgcttcacttgggtattctttttgcaggataagtct

SEQ ID NO: 79118 - DNA, 267 bp, Zea mays
tgcataggtttctatcttttctaaagaaatgtcaacgcgactgcttaaccctgagcggtggaagcgacactagatacgggtgaaggaggcatcgcggaggtagtcccattggcaccaggggctggtcctagctcctcgggagcctcttctccctcgcttcccgcttcattggcctccatctccaggtggtgcatgtccaagtggtcattggcttcctcaagttccctctgcacgtcgtggagctggttctccaagacatcaatagtg

SEQ ID NO: 79119 - DNA, 264 bp, Zea mays
tagtttaaggattaatttccttgggtaaagtttgaaatgctttggaaattgtttggtcccaaacctaagacactagcttcctagggaataattgcctaaccctaatagagtactaaccgaggaaactctagtgactagtgtgtatgatgaaggaaagttgtattcaagaaacaacttagtgtgtttctattataactgcatattcatagcatcacataagcattcatgtatatgtattgttatgtatagaaaacgaagaagtgg

SEQ ID NO: 79120 - DNA, 271 bp, Zea mays
gctatgaagaattcttcatccaacatgggctagtcggcggtgccagagccaacccatgttagtcttagcaattaaacatgtgtcgagctcagctcttatcaaatctactaagtatagctgaccctctaacacacccttaaatgctattgaatcatcacttcttctaaagacagtgacacctatatcagtaataagacagttgtagcccatttgacataattgggaaacagaaagcaagttgtaatctaatgaatcaacaagaataacattg

SEQ ID NO: 79121 - DNA, 289 bp, Zea mays
ttctggcgagctaagggtgttgctgaccggttagctatgagccaattccgtgaagtttcttacattgctaccatttcgatgaaaattatttctgtaaatagggttcttgcgggagactgcgaaaaggtaagacacgccaagaagctggtgtgtgtctcgtgtgtgctcaacaagcaggtaggctctcttggagcagagttgtatacggacattgctgtggcaaccatactactatacccttaagatctgatcgcttgtccacggtgactttcggagcgatggtgtcatg

SEQ ID NO: 79122 - DNA, 379 bp, Zea mays
  unsure (1)..(379): unsure at all n locations
atcgacatctaacagtcgcgggcgaaacgctacccagatctattccagagccgttattaggagattaacggccagtggccatccatcctaacttctaatcgtggccgcacaaatncaatctgacggcgccaacccaacttcttcacccccaactcagtgtacggctgcgcagaaagctncacggcagcgatctcgctggctcaagctgatctggcgccccagaacactattttcttcatggacaagtactacacgatctacagagcagattaattcgattgaactangatgtaccagtgatggagcagtgcgacacgccagccactgcgagaggctgaaggacgacgcgcaccttactccgatgagcaattcacctagc

SEQ ID NO: 79123 - DNA, 197 bp, Zea mays
ctcagcttgtaactactaccttcgctttcgaatattttgtgtgcgctagttcatttttgaactacaacatgacacattaaatagaggtagtatacagttatagagtggattggatacagtgtaatacctggagtaatagatttagggtctcgttggttgggctgcggctgtggaaaaagttctatgggctgtgagct

SEQ ID NO: 79124 - DNA, 263 bp, Zea mays
actcagcttataatgacgaagagtcttctatggccataagaattgtcttttttctttctccaacttgaagaagtgagtcctaacatgttataacttctatgccttatgctcagcagcccaatacatggtctgatgcctaaaagaatttcttatcactaatggcttcaacgctggataggtctatcctacacttttaccatacacttgaaattgattgatatatgccatattcatgctgatgatatgatatttgggtctactaa

SEQ ID NO: 79125 - DNA, 270 bp, Zea mays
cttagaataaaactcgcttaaccctgatagagcattaacccaggaaaccctaataacttaggagtaccatgatgtggcagaaccttccaagttattgggcccacatgcacctgtccttgtctatagacctcagacggctatgcatgtgcaccagataatctaacaggatccgtccgagtgtgccaaggactcctgataaaccacttacaaccaggatggcaagattaagtaacacaaatcacacaccaacatcttgcagcagaattttat

SEQ ID NO: 79126 - DNA, 221 bp, Zea mays
  unsure (1)..(221): unsure at all n locations
tccttgggatataatgattttcgaacgaaggttatgaaggtcataccttcacagatatcacatatcataatgaagaaggaatcacatggaatatgaaagataacatatacagttatatattattatcaactcatttctattntattgctatggagaaatagaaatgacatcggattacaaatgtacctctgactttgaaaaggtgacagtacaagcgtgat

SEQ ID NO: 79127 - DNA, 154 bp, Zea mays
  unsure (1)..(154): unsure at all n locations
acaagtcttagntnntaagctttagcacttanattcttactttntatgtaattattggttcttgaaatatgcatgacgtactgcacttatggggagtattcanaactcaaatcactcatgaaaacccctagtgcaagccaaaatgcaaatttca

SEQ ID NO: 79128 - DNA, 426 bp, Zea mays
tgctggatggtgcgggagagtcaaagaactcttcttggtatagctaacctgacgttctgagtcacggtgagaatcgcctgtgtgggttaaccaatatacccaaattgatctatatgctggctttcagaacaatatgttagcagaaaagttcgccggcattgtactggactgataagcacttctctagataaatgtgtcccaatgaatgatttaaatcctcttcgatcatggatgaatagatgtgttcacaacttctgctatgatgatggaagacacatcaaaaaataatgtggggactgcacggaacgaccatataccggttcttcgtggagccatgaggataacaccccgcttctgatctccccagattcttagcgactgatccaatctgcaacataatgattgctagaatggagcctgtaaatg

SEQ ID NO: 79129 - DNA, 201 bp, Zea mays
  unsure (1)..(201): unsure at all n locations
tgatctatatatccaagactggcccaaagttattntgaattattatatctgaaactcatatcatctcgggaaagatattgatgttgtangaaataaagaaataccctgtgcgaaaaaacaaggcctaccacatggaggaaagccaaaggatggtaacatttatgcttttaagtgcaagtatcttaacttatcatttcttat

SEQ ID NO: 79130 - DNA, 182 bp, Zea mays
actggatatgaatggacctttcaagaaagctcaaggaggatacactcatgtattggtagcaatcgaccaattcactaaatggatagaagtcaagcccattgcctctttgacctcaactaaggccgtggaaatcataccagacataatattcagattcgggataccaaacaacatcataactg

SEQ ID NO: 79131 - DNA, 153 bp, Zea mays
  unsure (1)..(153): unsure at all n locations
gcttctaangggagaacacatgataggtctaactaatgtaactttcgaaaaagatagaccttgtgcagctngtcaagcatgttaacaagtgggaagctctcatcatgccaaaaatgtgatgacaacatcaagacccctggagttactttatat

SEQ ID NO: 79132 - DNA, 323 bp, Zea mays
  unsure (1)..(323): unsure at all n locations
gaagtctatgttgagcaacctctcggctttgaagatagtgagtaccctaaccatgtntataaactctctanggcgcttatgggctcaagcaagccccaagagcatggtatgaatgcctaagagaattccttatcactaatggattcaaagtccgaaaggccgatcctactttgttactaaaactcttgacaatgacttngttnngtatgccaaattatgctgatgatattatatttgggtctactaacgagtctacatgtgaagaattattaggaacatgacacanaaattcgagatgtctatgatgggggagttgaagtatt

SEQ ID NO: 79133 - DNA, 491 bp, Zea mays
  unsure (1)..(491): unsure at all n locations
ctcagctagaaaatctggatgaatctgcgataatatccagctagtccaagaaaacttcggactttgtgaacagtggttggggggttccactccagaatatctttgaccttgctaggatctaccgcaatttctttagccgataacacgtgccccacaaattgaatttccttcagctagaacgcgcactcgctgaacttggcatatagctgatgttccctcaggcgcgtcaatacaatccgtagatgcttgagcatgtcctcttcattcttagaatatatcaagatatcgtcgatgaagaccaccacgaacttgtccaactcgggcatgaataccgagttcatcanataggtgaagtgggcangagcatttgtgagctcgaaagacattaccangtattcaaacaatccgtaccgcgtagtaaacacggtcttcggtatatctccggctgatacggattggtgatagccgactgagatcaatttgaaataccc

SEQ ID NO: 79134 - DNA, 412 bp, Zea mays
  unsure (1)..(412): unsure at all n locations
atcttttccttcgtcgcaagcgccttccgcctcactcaagcttcgtcttggccataatcttatgtactcataatccaattccgaagatacctgctcacacatttcacttggaaaacattgttaaatcatgtttttgaggaccttcggaagccgaatgccccaacagtagcccctcgcaatattaattttttgtactgatanattcatattgcgatatggacgaaggccttaagccgaaggtccgaaaaacaccttccctttgtagaatagcaaccagcctttgacaagcgggacccttcaaatttcaacgctctgggcgataaataagnctcatctcgagtcatttgtacgctctcttgccaccgttttactcacccacctttagcctaccncaacacacttgttggctttt

SEQ ID NO: 79135 - DNA, 132 bp, Zea mays
tcgtacacaaggtaaaatataaaatcaacagcacactaccgctgaatactttatattctaagaatggttcaaaaaaatcttggaaaatcacaaaaaattaatctaggtaatctaaaagcggaatggacttaa

SEQ ID NO: 79136 - DNA, 176 bp, Zea mays
gttggagtccatcattcgcacaagaacattatgaccaccgacaggccgcttgagctactccacatggatctattcggcccgaattgttacataagcatcggcgggaagtagtattgtcttgtaatagtggatgattattctcgcttcacttgggtattctttttacaggaaaaatc

SEQ ID NO: 79137 - DNA, 304 bp, Zea mays
  unsure (1)..(304): unsure at all n locations
ctatagaanctctataatactcatatagctaggctcaatagaaacattntatgatatatattaatattaattatattacaccgtggaggtatttatgccatacggtacgatacgtagaaaaatcagtttgtgctgcatatgcataaatttaggatgacgagatttgtgcgtgagagaaaatagattaacatataagggaacacaaaaatatgatttanatgtttatttccttcataaatataggatctttacaacagcaatgcacgtaggctcgtanggaaccaattatgacatatactgatac

SEQ ID NO: 79138 - DNA, 205 bp, Zea mays
  unsure (1)..(205): unsure at all n locations
ccacaacagtagcccctcgcagtattagtttggttctttgtaacaaactcagacttgcaaacgaatgaatgccttatgccgaagttttgaaaaaacacctttccttagctagaatagtgaaactttttgaaactgtggggccactttgcagtggtgttttgtatatatatgaaggttgtgacanaatatttttcgtgctatcaac

SEQ ID NO: 79139 - DNA, 119 bp, Zea mays
aatgtgacaagtgtgtacaagtgtacaaaagggacatgtataaaaatgtccaagtcaaaatgtatctcacttgtttgaccatgtatgtctttctatatgcaaaggtgtcatgctaattg

SEQ ID NO: 79140 - DNA, 67 bp, Zea mays
tcagctcagcttcgcatacttcagcttcgtcatcctgcacatattaaggagcagaataagaaatgtg

SEQ ID NO: 79141 - DNA, 318 bp, Zea mays
  unsure (1)..(318): unsure at all n locations
atcggacatgagatgtatccgtggtgtgcaaaactaaccatagatggttatggtgatggtggatctcgtggtgaccaaaacgtggtagaactcaaaactctataggaataaactaagaccagcaactcgacacaaccgatgcaaccaaaaactcaataagccctagctaagtagtactagtaaatgctcaatgtgttataggatngcggtaaaactaatctaactattttttggctttntctagactatacgagataagaaaacagtgaagaaaagtaaatctctcaccgataaaccttgctctgataccaacttgat

SEQ ID NO: 79142 - DNA, 341 bp, Zea mays
  unsure (1)..(341): unsure at all n locations
tagcacgcaatatatcatttttatctctaagatcggannatgaacatngcaaacatctaattctttagccttagcgagcaatntttcattttcatttctaaggctagcaagagtaaccattaattcttcaatcttagcaagtagatcgacattattatctttaagaatgtggaatgaaacgttacaagcatttgaatcaaccttagcaattagactagcattttcatttctaaggggtgngataacatcatggcatgtngcttagctcactagttaattttcacattnttcaacttctagagcataagcatttttaaccttaacatngctttttgtttcct

SEQ ID NO: 79143 - DNA, 270 bp, Zea mays
  unsure (1)..(270): unsure at all n locations
ctcagcttcggaaacccatacttctagccatctnccgacagactgataactctttggtgtccgggatgcagtataagaagtcatcttcatctgtgccattgaatactaaggcccactttggatacttcaattctcgggcatagngattagcctcaanaatctcttcttcagatnatctttttcccnaagcatgtngtataatataatcganggctttggaggatgcttcggggacagcagcgtcagtctcttcaatcaaaattggctctg

SEQ ID NO: 79144 - DNA, 322 bp, Zea mays
  unsure (1)..(322): unsure at all n locations
ttcgaacttttttcgacttctgcttcaagcttcgcatcanaattcttcttttcttgctcgaagctttctgactntatgaggacttcactatntaatctagcaatttcggcttgggattctgccagtgaacccttcattgatngaagaagaaaatctttcttttccagagcagcttcatgatctttgattntactttccaagccctcaattataacttcatgcttcttatcttcgaggtcctttgcatcctcaaggctntacttagtaacatactctgtgcaaaataacctttcatcagaaatcaccttcatcgcanaacaat

SEQ ID NO: 79145 - DNA, 292 bp, Zea mays
tccatttcttgacatataagtggtgtcaggtatccttactgcgagacaatgacaagaggctttacaacttatagcatctgccaccacattaaccttttctgggtgattatgaatcttcaagtcatattccttaattagctcaagccaccttttttggctcatggttagctctgactgggtgaagatatacttcaaactcttatgatccgtatataagtgacatatattcccgagcagataatgacgccaaatcttaagggcatgaactactgcagctagttccacatcatgt

SEQ ID NO: 79146 - DNA, 327 bp, Zea mays
  unsure (1)..(327): unsure at all n locations
agagagtgattggtgtgttcattngagctctggcgcttgtgattgcttctttctctcattctttcttacgatcaactcaattgtaaccaaggcaagagacaccaattgtgtggtggttcatgcngagactctgtgtcccgtgtgattgagaagagaagctcactcggtctaagtgaccgcttgagagatggaaaggggtgaaagagacccggtctttgtgaccacctcaacggggagcacggttgctagaaccgaacctcggtgaaacaaatacttgtgtctcattcctatttgctngccgattgttttcaccctctctctcggact

SEQ ID NO: 79147 - DNA, 234 bp, Zea mays
  unsure (1)..(234): unsure at all n locations
gcttcttggtcccacagaatttcttttgtgaccctaanacttggtgctcaatcaatgattggctttcttttgagcaacaggggttagcacatggtgatatacaattcaaatgcgcacacgtgcgagaatgangntcacatgaattaagtttgcaattataacctcatgagcaacattaagcatgatatggtcatcaactaatttattatgagaatgtgacaacatatcatactt

SEQ ID NO: 79148 - DNA, 113 bp, Zea mays
ctcagcttaatcatatgctcagacagacttacttgtattctgcttcgcacaagagtaagagcttcgagaaagaacacaaaagtgcagaacaaaaatttcaagaaagtcataat

SEQ ID NO: 79149 - DNA, 169 bp, Zea mays
  unsure (1)..(169): unsure at all n locations
gagaatcacagtactgctgctcagttgtcttccgatgttgtccttagctcgcagtctgaacaagagagcgggagtaagtaacagatacgtacgaagacccggggcgcctnctcttgctcgtcgtcgttccagaacttgacctttcggaagaagatctccgcgcttcctt

SEQ ID NO: 79150 - DNA, 52 bp, Zea mays
cctttggccttaactacttctcttttgggggtttagtgcagttctcgctctt

SEQ ID NO: 79151 - DNA, 322 bp, Zea mays
gtaaaccatactacaatatgcgtctgaatatggactgcgaagactttgcggttatcaggggctgctattaaaatacttaatataagcagtgataacaatatagggtgacctttgagaaacatataatgttgggctattaggcaaatatcatgactgcttcaagtcagagaaagtaataagttgcgcatgttcatccgattacttcctcaacggaagaaaattgcctcacatttgtggtgagaaaacaatttaccccgctatctgaagctatgtactggagactttatgtagaacacgtctctccagaatgtgatcagtctac

SEQ ID NO: 79152 - DNA, 362 bp, Zea mays
  unsure (1)..(362): unsure at all n locations
ctcagcttacacctctgactagctagctgcatattcttcgacgtcggncatataattctgacctgtatacactttcgactagtgctctggatgctgcatggatnccacattggcctgcatggaccttcttcagaaggtggttttcagtggacgggagaatgcacttcatgaggattgctgacgcgcccctttctgtatattcttcctcaatgagtngatantgagccgactggctggcaatgctctctgctcgagttttgtcatctggctctttctcattctttatatacctaataatcgaccggctacagtcatcagaaattgactctggttgactatgatgtgcactcttctgtagatct

SEQ ID NO: 79153 - DNA, 238 bp, Zea mays
gagacggataaactaacatatcacttcggcacactattgttaagagttgcaatttgcagaaaaaaatcgctcttatttttgtacaaactaataactactttactaatatgctgcgcttgaaatagggtcgttcgagaacaactacaacaggcaccatatgtgagttgcatgcaactagggtctgaactaaataattgatacagcagactgatttttgctcgcaaaacgttataatcca

SEQ ID NO: 79154 - DNA, 146 bp, Zea mays
ccccatacaagaaatctacaagacgggtagaaaagactagccttgaactctcgatgtaccagaaataccgccgcagaagtgactgaaaagtgaaaacgttgtttacacatgtgacagaaaagtttttttttttcaatcttttttgc

SEQ ID NO: 79155 - DNA, 345 bp, Zea mays
cttgaactcctttccatggagccatgggtgaactgcgttttaatatgatagacgattctcacagatttactgtcttcgtttgcttaatcaacatgatggtggagcgtaagtcaattggatcgcggcaaacctcggcttacaccgatgagttgttatttgatgcactttcaattcacgccttgacatgctttttctaggctacaggctggcttgtggtatagcccggatcttttaagaatttttacatcatcaatctacgctcattaacattacattgtccaatgtattaatcaactcgactgttcgacatgacccccttgtatgcaccaattggtgacacgcgtt

SEQ ID NO: 79156 - DNA, 474 bp, Zea mays
  unsure (1)..(474): unsure at all n locations
ctaagctgtgagatcttattccacatgtgctagtcgacgatgccagagccagcccatgttagtcttagcaattaagcaagtgtcgagttcagctctatcaaaatctactaagtatagttgaccctctaatactcccttaaatgctattgaatcatcacttcttctaaagacagtaacacctgtatccgtaaaaagacagttgtaacccattttacataattgcgaaactgaaagcaagttgtaatctaaagaatctacaagaaaaacattggaaatggagcggtcaggagatatagcaattntacccaaacctttgaccaaaccttgattcccatccncgaatgtgatagctcgttggggatcttggtttttctcgtaggaggagaacatcttcttctcccctgtcatgtggtttgtgcacccgctatcgatgatccaacttgagcccncggatgcataaacactacaaacaag

SEQ ID NO: 79157 - DNA, 185 bp, Zea mays
tcaactaaatagacgttgtcgtctaatacacccttaatagctaataaaccatcacttcttctagagacagacacatctacatttgtgaatagacaattatatcccatattacataattgacttacggataacaaattatatccaagcgactctactaagaatacattataaatagagtgctcatt

SEQ ID NO: 79158 - DNA, 108 bp, Zea mays
ttcttaactctaattagcggctctaatgccatgtaattcttatgtgtcttctcatatgtttttagtacttctattttcacttaagaccttgtctgatttgagagacta

SEQ ID NO: 79159 - DNA, 224 bp, Zea mays
  unsure (1)..(224): unsure at all n locations
aaaattaccttatgttctcgtagaatcatttctcatagagtgtcacgagcttggtatctcattgcatatcctaaaataaaatatgaaactaaaaaataatgacatgacancatgctttaatcttngcatacaacctngtaagatgacatancatctataaacgtcttacatgctgaacatatctatcacatctatatttaccatgtttctatcactatgtatgt

SEQ ID NO: 79160 - DNA, 283 bp, Zea mays
catatgatgctgcatacgatgccctcttttgtttccttccccgtatgttgcccctcccttatgtagtgttggcttcatttcgtcctcctataggctatgataatgctcccaaccaatgacagtgatgctttgaacaagtctgcttactccgatactgctcaattttaacgacgaaggaactgatgaacacaaaggatgaaagtgtacttgcatgtgttattcctcaaattatacccaacttcaatggttgtaattggtgcttcgattaacaaaatgtcttatg

SEQ ID NO: 79161 - DNA, 215 bp, Zea mays
tctcggagaccctccatacggcaagcctcagcactgtgaaagtggctcaccctacccatatctgcaaatataaactgaattgggtgtctcattctttatcgtggaaacagaaattttacatacgaagctgccggtctacgtctttatcccttcagactgcacatttctctatagacgacactcaccccgaacggtaaaactctccgactcagtat

SEQ ID NO: 79162 - DNA, 407 bp, Zea mays
  unsure (1)..(407): unsure at all n locations
ggtgaagattcttcatcccaacatgggctagtcggcgatgccagagccaacccatattagtcttgacaattaagcaagtatcgagctcagctntgttaaaatcaactaagtatagctgaccctctaatactcccttaaaaactactgaatcatcacttcttctaaagacagtaacacctacatctgtaaatagacagttgtagcccattttgcataattgagaaactgaaagcaagttgtaatctaaagaatctacaagaaaaatattggaaatagaatggtcagatgatatagcaattttaccaagctctttgaccaaaccttgatttccatccccgaatgtgatcgctctntggggatcttcgttnttctcataggaagagaacattcttttctcccctatcatg

SEQ ID NO: 79163 - DNA, 379 bp, Zea mays
  unsure (1)..(379): unsure at all n locations
gtctacaccaagaaactgtccgcgcacataccaactacaaggcgcagccggaccaacgtatgaaatgtgatagaccaagcgcacaatgacatggacatagccggacgtgcgaaggcgtacaacctcattatacaaaccgtatttacacacgtacagcgagggcatcacaccttacattggttcgaccttcggaatgattcccatctccctantagtgaatagcattatcctaagctcctcaccctccaaaagacttcgcaactccccctcacctacactcgccccaaccggcgaggacagcaatatccgcttgccagccctgcccacacgaagccgacccgcatccacctcactcacccttcgcttcgccaccgccttc

SEQ ID NO: 79164 - DNA, 391 bp, Zea mays
  unsure (1)..(391): unsure at all n locations
caataaatcaagtaaaacaatagccaacaatcatgtaatcagaatgctattgaactgatgacctctccaacttaaattactgataacctctcgaagactcaaagttcatccaacaactatataattggcttggtaaatttactactactgattaacaggaacccctaacttccaattaagccagataaattagttntacttcaaagggtctttctgtgtacaacaaaattagtgtgaattacaaggttaagatgaataaaaacagcaacactctctagctaagaatattaatgtggtcataaactattgcacaaatgcttatatatgtgatagagaaggaaaatgacttatcaataacaaatgacataatgtcttaactgtaagataatct

SEQ ID NO: 79165 - DNA, 409 bp, Zea mays
  unsure (1)..(409): unsure at all n locations
tatgaagattcttcattccaacatgtgctagtcggcaatgccagagccagcccatgttagtcttagcaattaagcaactgtcgagttcagctctatcaaaatctactaagtatagctgaccctctaacactcccttaaatgctattgaatcatcacttcttctaaagacaataacacctacatctgtaaaaagacagttgtagcccattttacataattgcaaaactganagcaagttgtaatctaaagaatctacaaggaaaacattggaaatggaatggtcaggtgatatagcaattttacccaatcctttgaccaaaccttgattcccatccccgaatgtaatagctctttggggatcttggtttttctcgtaggaggagaacatcttcttctcccttgcatatgg

SEQ ID NO: 79166 - DNA, 336 bp, Zea mays
  unsure (1)..(336): unsure at all n locations
atgttcattntgagaaagacaggatttatagcgcatgccaagcagggaagcaagttggtgcccatcatccacacaagaacattatgacgactgacaggccactggagctcctacactnggatctattcggcccgatagcttatataagcatcagcgggagtaagtactgtctagttattgtggatgattattctcgcttcacttgnngtgttcttttgcacgaaaaatctcatacccaagagacattaaagggattcttgagacgggctcanaatgagttcggcttanagatcaagaaaattagaagcgacaacgggacggagttcaagaactcac

SEQ ID NO: 79167 - DNA, 357 bp, Zea mays
ttctcgactaaatcggtgacagggcctcatggacgggtgaaagtacgcgtaagcggctaggccgaccgagccgagggattcccacgcctctgggatacggatacctcactcgtcccttccgcgaaaagcaactctcgctcacacaaacatccctattaccgacagagtccagatgctcgaaacaagaggaaaaaaggacgcagcttcgcaagcgcggcgagggcgtgttcttctggcctcggcggccgcagaaaacacatgctacaagacgatctgatcctgcaggctcgggtcttcacgccgaggggagccgtagcaccctcggcatcgacgacgtctacagcaaagcccgaccca

SEQ ID NO: 79168 - DNA, 427 bp, Zea mays
  unsure (1)..(427): unsure at all n locations
gtctaagctcattcttttcttgtgttaactacaagcaccagtgaaaatgtgtatcatgtgtcagaacttttctgcggttgaccaagttctttgtactaatatttacctcacacgcttcttcagaaagtgacgtgtattcagctttcagcttgttcacctgagtagtcaaatctttcagcatctggattgtgtcaccaagtatagatgccttatcgntcctgggacggtctggatctggatatttgtgcatgataaaattaaagagccaactctaccactttaagaatcaaatagatgaagctagtatgagtagcacatacaacttctgaacattgtttagttttgattatgcattaactatcaaagctacaacatatttattaatttcaagacangtaacacattcatctgcaggacatcaaacaca

SEQ ID NO: 79169 - DNA, 426 bp, Zea mays
tcatcatatatatgcaccacataaccatgtaaagcattcaatgtccatatcatctatgtcctggaccacactcgttcctttgaaacacatcatagaacttaaccaattcggatcagagattaagagaagatggactgataatctcattcccaatgatactcatcaagtatccatcttatgggagaaacatgaccaatagaattgttcataacttttcattacattccaacaatgggatgaccaattcaatcttacccagcatggtcagtatcatcacttgacaagttataacatatgcgacactttgtatggcaggatgtatgtacaatacagtccataagacatgtttctgagaaacatatgcaatatccatcactatcaccttgtggtttcacatgatagaaattatatggatatctctataat

SEQ ID NO: 79170 - DNA, 390 bp, Zea mays
  unsure (1)..(390): unsure at all n locations
ctgctggatatcaacgcctctgtttgctctgatcattgccctttaactctctaaattcgagaggattgtatagggaagcgcagatttcattttgaaggtttctggcccaagctccctcggttcaatgaggtggtggctgattcatggaatcagccaatgttggcaacctgccctatggaaaggctgtcctcaaagctcagaaggcttgctaaacagctgcagtcctgtgggcatagagaggtgggaaatgtgagtaaccaagtgggtcttgctagagaggtgatgcatangttggaatcagcacatgactttagacgtttgtcaggagatgagatatggctgattgaaagctgaacaacatttgtttgttatgctctatggaagacaatg

SEQ ID NO: 79171 - DNA, 296 bp, Zea mays
  unsure (1)..(296): unsure at all n locations
ctaagcttaccaatggcgtgaaaggccttctaatggaccaatcatataagaggtctatgttgagcaacctnccggctttgaggatagtgagtaccctaactatgtatattaactctctaaggcactttatgggctcaagcatgccccaagagcatggtatgaatgcctaagagactctcttatcactaatggctttcaagtcngaaaggtctatcctactttatttactaacactctcgacaatgatttgtatgtatgccaaatatatgtcgatgatattatatttgggtctacta

SEQ ID NO: 79172 - DNA, 264 bp, Zea mays
cttctcagggagaacacgtgataggtctaactaatgtaacgttctaaaaagatagaccttgtgcatcttgtcaagcaggtaaacaagtgggaagctctcatcatgccaaaaatgtgatgacaacatcaagacccctggagttactccatatggacctcttctgacccgtcgcctatctaagtataggaggaagtaagtatggtcttgttatagttgatgatatttcccgcttcacttgcgtattctttttgcaggataaatctg

SEQ ID NO: 79173 - DNA, 373 bp, Zea mays
  unsure (1)..(373): unsure at all n locations
gcttctaagggagaacacatgttgtgactaaccaatgttcattttgagaaagacagggtttgtagcgcatgtcaagcangaaagcatatcggtacccatcatctacacaagaacatcatgacgaccgacaggacgcttgagcaactccacatggatttattcggcgtgatcgcttacataagcatcggcgggagtaagtattggcttgtaattgtggatgattgatctcgcttcacttgggtattcttattgcaggaaaaatctcacacccaagagaccttaaagggattcttgagacgggctcaaaatgagttcaaattgagaattaagaagataagaagcgaaaacgggacagagttcaggaactctcaaa

SEQ ID NO: 79174 - DNA, 413 bp, Zea mays
  unsure (1)..(413): unsure at all n locations
ctaagcttggcaggcataaccttgatggtaccatctgggttgaattcatacctgacgctcctcctagacatttgctggctatgcagagaagtangagcangaggtggatgagggtacggtgcggtccttccatcgaattggaacccgtgcgcttcgattcgacttgccaagtctagttctgtcagtacgtccacccactgaataaataagggaagaattgaagctgctgagagtgagatatcagctgagttaggtggaagattgtatctcaactagtattacaagcaaagtactgagtgcctcaaacttgcctgaacaaccaagtaggacttcaacatcactgagcangtangccagcaggagggatgcatgcctgaggcaacacaacaccagctatcgcagaaagctatact

SEQ ID NO: 79175 - DNA, 359 bp, Zea mays
  unsure (1)..(359): unsure at all n locations
gctcatgaagctcactgccagatcctatacctatttcattcagaagatccacaagatgatttggggggttcatcccagttacaagcaagggatggctgcatagttttaataggtactgcaatgcctgcattaaaaatgcaaatttagttagaaagcaatcccattaaaacaaanaaaaaatgtaagggcttgttcgttntgatgttaaaccatgttgaatgggtgggattgagtcgttttaaatccataacaagtcaaaatgcaccccaatcccactcaatccacatggaattgaaataaatgaacaaggcctaaatgaataacaaggatgagattcaactgcagcacctgaaacacat

SEQ ID NO: 79176 - DNA, 302 bp, Zea mays
cacgtgatatggttgactaacgtacaattctaaaaagatagaccttgtgcagcttgtcaagcaggtaaacaggtgggaggagcgcatcacagcaagaatgtgatgaccacttcaagacccttggagctgctgcatatggacctcttcggacccgtcgcctatctgagcatagggggaagtaagtatggtctagttattggtgatgacttttcccgcttcacttgggtgttctttttgcaggataagtctgaaacccaagagaccctcaagcgcttcctaaggagagctcaaaatgagtttga

SEQ ID NO: 79177 - DNA, 141 bp, Zea mays
taatgtaaacgcgaccagtattattagatcatattatgatgagatagatgattagctatacaatttaaccgtcgctaccaattcccgagttgagactcctatcttattgatataaacacatgattagcgcgcatacgacac

SEQ ID NO: 79178 - DNA, 228 bp, Zea mays
tatcggcattaatacgctaggtgatgctgacaatgagacgaaaattatctacctgctaccacaacacagatatgggagcatcatcaccattcttcacaacatggaggacttgatctacatgaaccctaccattgggattgggaaaatcccggcttttgagatgtcgcacaaaatgagtcggagagaggagccaacttcctcaaggccatatgcttatgcatgtgatga

SEQ ID NO: 79179 - DNA, 371 bp, Zea mays
  unsure (1)..(371): unsure at all n locations
atggacgtgaagagtgccttcctcaatggaccaatcaaagaggaggtctatgttgagcaacctcccggctntgaagatagtgagtaccctaaccatgtatataaactctctaaggcgctttatgggctcaagcaagccccaagagcatggtatgaatgcctaagagaatttcttatcactaatggcttcaaagtcggaaaggtcgatcctactctattcactaaaactcttgacaatgattngtttgtatgccaacattatgttgatgatattatatttgggtctactaacgaatctacatgtgaggaatttagtaggatcatgacacagaaattcnagatgtcgatgatggngggagtgaagtacttctt

SEQ ID NO: 79180 - DNA, 164 bp, Zea mays
ggtacacgtacgttacaatctattgacttattccatatatttatgatttacatataatagactctctagtgtgcaaccacttttatcgtgcatatacagtactaatgtatagtgatcttacagacattataccacattgtacacatgtgcactcctgcactata

SEQ ID NO: 79181 - DNA, 290 bp, Zea mays
tgagagagatttgcttgtgttctttcgagctcttgctgctggattgctttcttctttcttggatctttattgcgatcaaactcacttgtaattgaggcaagagacaccaatcttgtggtgatccttgtaggaactttgtgttccaagtgattgagaagagaaagctcactccgtccgatggaccgtttgagagagggaaagggttgaaagagacccggtctttgtgaccacctcaacggggagtatgtttgcaagaaccgaaccctcggtaaacaaatacgtgtgtcaca

SEQ ID NO: 79182 - DNA, 323 bp, Zea mays
atgtggggattatgtgttctttgagattgagaagaagcgctcaacatatctaagtgaccaatcgagatagagaatagttgaaagaggcccgtccttagtggacttctcaatggggacataggttcttcatagccgaaactctggaaacaaatgcccgtgacattgtgttgatctggttgtgattggtcttctttcactctctagttcttactggcatgatcatatatatgagtgctccaagtattcacatctttggcacttagcagagacactctcctctcgatgttcattttgttacccgactggggattattatctctctt

SEQ ID NO: 79183 - DNA, 307 bp, Zea mays
  unsure (1)..(307): unsure at all n locations
aattgataggaagagcacatcacggacttgtcagtntctggggagatccctgatgtcttgggcttcataganacaaaactctgtagctctatccaccgccgaagccgagtacattgccgtatgccattgttgtgcgcaattactttggatgaagcanacactcagggactatggctaanaattgagcanagtccctctcctatgtgataatgagagtgcaatccgcatggcggataatcccgttgaacacagctcgactaagcacatagacattcggtatcactttttgagggatcaccaacaaagg

SEQ ID NO: 79184 - DNA, 237 bp, Zea mays
  unsure (1)..(237): unsure at all n locations
tttctttgagtgtaaatggataaccctaagtattatatgaccgaatttgngatgacacagatccaaccttaataattgcttcaaggacacgacacatatatccttgcccatcaagcagaccaagtttatntctcgacatatccatgtaaaaagtngtctacatggagggttgtgtacaatgtaaatccccgtgaactcctatacactcctggtgagggatgaatatcaatttggcac

SEQ ID NO: 79185 - DNA, 405 bp, Zea mays
  unsure (1)..(405): unsure at all n locations
tgtgaagattcttcattccaacatgtgctagtcggcgatgccagagccagcccatgttagtcttagcaattaagcaagtgtcgagttcagctctatcaaaatctactaagtatagctgaccctctaacactcccttaaatgctattgaatcatcacgtcttctaaagacagtaacacctatatctgtaaaaagacagttgtaacccattttgcataattgagaaacggaaagcaaattgtaatctaaagagtctacaagaaaaacattggaaatggaatggtgaggtgatatagcaattttacccaaacctttaaccaaaccttgatttccatccncgaatgtgatagctcgttggggatcttggttttctcataggaggagaacatttntcttctccctgtcat

SEQ ID NO: 79186 - DNA, 388 bp, Zea mays
  unsure (1)..(388): unsure at all n locations
ttccagaagtatgtgtttcggctattctaaatatctcctaattccctgctggaactaaaaatcatgaaactaattttattaaatactataaaaaatatgagtctagcaaaattggtctggtatatttagcattttctataattttctagaaattctctagctctggcagaaaaggaaaaaagaanaagactctatagtgctaggctgaaactggcccgagccggcccatatgcggacgaaagcgcgcccgcacgcgcctgcgctgtcggttatgcgctgagagccctgatgattngaaattctttaaagagttcctcccactattcttctgtctcgctgacagttgcaggaacacccttgcgctttcctctcttcacaatccccagtc

SEQ ID NO: 79187 - DNA, 441 bp, Zea mays
  unsure (1)..(441): unsure at all n locations
atggtattaccgaccagactaaaagtgagtgcatttaagtaatattatacaaaccagggaaggcacaaactccttccgagaagctaaaagcaaaagatcctaagtggaggaccgagtccttccgcacttcagtcttgtttttcttctttcggaaccaccttggcacagaagcagcaaaagtctgctactttctcacctaanaacaacgaagggataaaccctgagtatggaattactcaacaagtcttacccgacttaagaaaagactctcaagggtatgctggttatgtgggagtcaaggtaaggcttttcaatcgtcaatgactctgtttttgagaaatgctactaaagtggatcttaaaaatccaatnttatttgtcaagtaggtaaattacctgcctagagtctttctacctagtcaatactggtctgcctaccatt

SEQ ID NO: 79188 - DNA, 369 bp, Zea mays
  unsure (1)..(369): unsure at all n locations
ctgtttaatggatggatatgtnttcattgttacatatcaacactcaatagataatcccattcctatactttggtgctgaactggcaaaacatacatgattaatctacttcatctaggctgntcttgcacagagctgtaaaagccaaagcatcagataaagtatgtaacaggcttttaatggggcttcaaacaaatgaagaaaatgaaaatacagtagttgtctaatgtctcatgcttgtattttgagtttccatcagtatacaagtccagaatctagtttttgttgtgctcaaatcagtggccaaagaacttgatccatgatttgcttctttcctagattcacttatttgaaagaattgcatttaaccc

SEQ ID NO: 79189 - DNA, 319 bp, Zea mays
tgacctgaaaaccttcccgactagtgttctggatgctgcatgtactccacactgccctgcatggacttcctccagaagttgcttcccggtggacgggagaacgcacttcatgaggacgcctgacgcgcccctcctgtataatacctccccaatgagtgtatagtgagccgattgtctagcaatgcgctctgccgagttcttgtcatctgggtcttcttcattctttatatacttaataatcggttgtctccagtcatcagagtctgactcgggttgatctatgatgttgcactcttctatttgatccgtcgagatgctc

SEQ ID NO: 79190 - DNA, 441 bp, Zea mays
  unsure (1)..(441): unsure at all n locations
actcttgtgggcgcaattctccattatgaaggtggacaaggtgatggaaggctccccatggttttttaacattntgtataggaggcatgagtgaagaaaaccgtttggtgtggcaaggtgtcacacccggatttaaggggtccaaaacccgggcacgaaataatcatcaagtgtgtgctaggatcaagtctcacacatatgatgactcatggtatagaaaaaatgtcacatcattaatatatatattggagttctgtacaaaaatagttaaataattatatcatacgaagacaacgatccagcaacccanagttgattgggagacgacggcctaaaccactcacgaactcatcacaacatccttcacgcgcctcatcctgtactacctgttcttgacttgtggggttgtgagtacagcangggtgagctcacatacgttca

SEQ ID NO: 79191 - DNA, 243 bp, Zea mays
  unsure (1)..(243): unsure at all n locations
ggatatcaaccaaggagaatattttgcttgttttgccgtgaaaacaanggccataccaccaggatgtgccatgttaccatccaaaagccaaaggagatagccgaagctgcagcacaacaagctcagccgaagcaggtcatgcatactgcttcgtaccatgtgccttacattccagaatacgtatgaaaccaccctgcagtttctgttgcttcggcaagtcaacctcaagcttcctggcaacaa

SEQ ID NO: 79192 - DNA, 372 bp, Zea mays
  unsure (1)..(372): unsure at all n locations
agtgtcttcctcaacggaccgatcaatgaagaggtttatgtttatcaacctcccagctttgaagatagtgagtaccctaatcacgtttataaactctctaaggcgctttatgggctcaagcaagccccaagagcatggtatgaatgcctaagagattatcttatcactaatggcttcaaagtcagaaaggccgatcctactntatttactaaaactcttgacaatgatatgtntgtatgccaaatttatgttgatgatattatanttgggtctattaacgaatctacatgtgagggaattagtaggatcatgacacagaaattcgagatgtctatgatggnggagtngaagtacttcttgggatttcaaagt

SEQ ID NO: 79193 - DNA, 252 bp, Zea mays
  unsure (1)..(252): unsure at all n locations
agctgcaggttggtttgccacatattctggtatgtaaggagagtggcacgaagcagtatgtaaaacctgcttcggctgattctgccgagcttctgcttcggcaatctcatattgcttcagaatagtaatctggcacgttcttatagtgtcgcccttgtcctcaccacagaataagcaatatattnttctaggctaatcccaatatcttcccccgaagcccctgaggcctctgccccttggagctggtggcct

SEQ ID NO: 79194 - DNA, 237 bp, Zea mays
  unsure (1)..(237): unsure at all n locations
gtcgcctacagggggggtgaataggcgaaacctaanaattataaactttaaacacgcactatgcccggngttagtgttagaaataattcggagtggggaagatagttctccttgctatgagttgctcaatcaatgcgaataaccttgtgagcaaactcaaattaatatgagcaagggaacttttatagagagaggaatagggaaacaaatcgaatggagatcaacacagatgaacac

SEQ ID NO: 79195 - DNA, 469 bp, Zea mays
  unsure (1)..(469): unsure at all n locations
actaagcttgcccctgtacattggtcctttccctgttcttgaacaatgctgatcagtggcataccgactccagttacccgaaacattgtctgctgtgcataatgtgttccacgtatctcaattgaagaagtgtcttcnggttccagaaccgttgaagtgacagatgttgccttataaccagacgtgacatattccaaacatcctattcgagtcttggatccaaaggacaggactactcgaaggagaactctcaagttntataaaatacagtggaaccaactcacggaagatgaggctacatgggaaactcaagaatttctaganaagaatntccaagactntntagcttcatgtaaattatgaaatatgtacaatngttgtaaagaaggaatanaccccgacacccctgccttatacaagaaagaaagaaataaannatatgtcgcatttcttttccattacttaccct

SEQ ID NO: 79196 - DNA, 366 bp, Zea mays
  unsure (1)..(366): unsure at all n locations
tctaatgggagaacacatcttgtgactaacanatgttcattttgagaaacatagggattgcagcgcatgtcaggcagggaagcaagttggtgttcatcatccacacaagaatatcatgacgactgacaggccactcgagctcctacacatggatcttttcggcacgatagcttacataagcatcggcgggagtaagtactgtctagttattggggatgattattctcgcttcacttgggtgttctttttgcaggagaaatcccatacccaagagaccttaaaaggattcttgagacgggctcaaaacgagttcggcttaaggatcaagaaaattagaagcgacaacgggacagagttcaagaactc

SEQ ID NO: 79197 - DNA, 446 bp, Zea mays
  unsure (1)..(446): unsure at all n locations
tactaagcttatcagcaatttcttntcctttctttgacgctgcggtcatttcttcttcggcagcagtggcagcttcctctgcagccatgtctagcagcattnggtcaatatgttcaattgtgctctctaaattcaaatcttcagctgaggtaacttcggcggctgcggcctccgaaggtgcaatttcaatatctgccccctctgctgctgcttgtgttttttgggccgaagctcttggcggcgttatgtcaattacctctgtcacggtaatgattctttgtttctttcctttgaatggtttcctcaatttctcaggctccttgttcttctgaaaaaacttagtcagttgaagacccagtggacttagcttcgcaggtaaggattcagtcattaccttcagaatttcttcaacaacagcagcagaaagtgatgcggnggtttcttct

SEQ ID NO: 79198 - DNA, 308 bp, Zea mays
ccgcgtcgtcggaatagcccaatcgtgtctactggagttcaagaacccgccggcgcacgtggaccgggtaagcccctgcaccgttttccaattccttgcgcgtatggcctctgtgtcaccccgtgaagctcctcgcgcaccctaattgatctatgccgccgtggtttggccggagcaggagccgccgacgactcccgccgcctgtgctcgtggccagtgtagctccgaccacctccgacaccgacccgcacatcggcgtgaccgttgcgacctcccggacgtcactgaccaccccgccggagctctac

SEQ ID NO: 79199 - DNA, 407 bp, Zea mays
  unsure (1)..(407): unsure at all n locations
tcgtcatctgataagaggttaccctgaaggtaagagatgatgtcagttctccaatcttcgctgtagacaggagatatgttgaggaccgctctttcgaggagctccactgaaggtgcctttattgtttcgaagaatacatccgaaggtaacggcagcccctgtgctgcagacttggctagcaaatcagcatgctcattttgtcctcgagggatattcttgacagagaatccttcgaaggaggcttcgatccttcggaccatgtctagatatatttcaagcttcggatctttagccttgcaacttttgtcaacatgacccgaaaccacctgtgaatcagttntaagtatggctcttctgattcccattngctttaactttcgaagacctagaatcaatgcttcgtactc

SEQ ID NO: 79200 - DNA, 406 bp, Zea mays
  unsure (1)..(406): unsure at all n locations
ctcagcttctggacactgtgtatatggacaataacgaagcctaatcangtcttatcgggtttgttcgccatgctaaatagttcaaatgtataggcatgaggatgtaaatgtaattttatcaaagatgtgttctacgcctataaatagagcaacaatgccatgtatttagacatcttttttatattggcagaaaggacggttgattctcgcttacgaacctatcgttcttctttcgtcttgtaagcttcacaaagccgaagatacaattataatatctgaattgataataaaaggagtcgaaggaagtatatactntatgttcatatgtacatttctcaaattattgctntattatatcacccatattaactacagtaatttcttcatctttaaatntcaccttctt

SEQ ID NO: 79201 - DNA, 449 bp, Zea mays
  unsure (1)..(449): unsure at all n locations
tgtcacacccgattntggatggtaaacctaatgtgaaccatgtacgtgccatgatcagaaactcacgtacacaacgattacataattggacatcatcacacaatacttgaaataaatagcggaaaggtactttattacatcaagatgtctgagacatccatagagtctaatacataaccattgtctttaacataattatcaaagtgcgaagaaacgaaacgtagatgataagcctacacaggcagctcactgggggtttgccactaagtaaactagaactcgtcgtaatcctggaactcctcgaagtcctccatgttgctagcatcacctccggagcactgagtacagtanggacaacttgnggtggtgtggtttgtaaagcaagggtgagtacacatcaacgtactcagcanatgtcccgtatggctaaagtggactacctgtatgtg

SEQ ID NO: 79202 - DNA, 402 bp, Zea mays
  unsure (1)..(402): unsure at all n locations
aagatattcatgacaatcgagagtcaataaaagcagctgaaaaggttgcggagcttgagagacgaataggtattacttaatggtttttaactttgttgtttattnttgtgacttcgaactgatatacgttttctaccgtagctgaactatctcctcctccagagcccttctagtcactggccgagccagaggcaaaggaatcaacagaaattattaacatggccaaaactattgtagacgaagtcgttacccaactgctgaccgaagctgcagataaagttttgaaagaagaagaatagctattgtaaaaacattgctagaatattaatgtaacattngctggactatgctttgtatattggtgctatgggtttgaatgtatatataatggtttgtattcat

SEQ ID NO: 79203 - DNA, 289 bp, Zea mays
  unsure (1)..(289): unsure at all n locations
tcgctttctaacacactcctttactttccatctcattaggcaaaccaccagttttttacggtgaagattattgtacgtggagtgataaaatgaggcatcatctaacctcactccactctagcatttggacattgttgagtttggagcgcagttactatccatggnggatgaaggatatgattctgtcggtgtttcgaccccggnggggtccctggatcgacgagtaaattgtcgcgtgccccagcacagatgggttggcgtgagacggaacacaaagaggggaaaaccg

SEQ ID NO: 79204 - DNA, 359 bp, Zea mays
  unsure (1)..(359): unsure at all n locations
atgtctcaagacgaaggagtaaaccgatctaaagatgaaatgaccattatacccatgatagtttgtgtcatgattgtaatcgattgtgaagggcataaatgtaatttcacacaggctgcgccctgtgcctataaatagatgaacagtacccctatactgttcacgctatcttgtaatcgctcgcgcgcaacactagggtttttgccttctgtcaagccgaaggtataaatgtaattaaatatcatatttaaatatccaaatttgtataatgataatatatgaatgatattatgtgcttaatgtgtgttatctttcatgttttatatgnttcatctttcattatcttataaccatgatga

SEQ ID NO: 79205 - DNA, 299 bp, Zea mays
  unsure (1)..(299): unsure at all n locations
gaagctgccgacaacagacgggagagtctcttcgggacttcattcggcgattctcgaagcagcgcaccgagctggccaacatcaccgactcggatgtcatcggcgcgttcctcgccggcaccacctgccgcgacctggngagcatgttgggtcgcaagacccccaccagggcgagcgagctgatggacatcgccaccaagtgcgcctccggccaggaggcggtcgaggccatccttcgaaaggacaagcagccccatggccgtccatcggaagatgctcccgaggcgtcgactcagcgc

SEQ ID NO: 79206 - DNA, 322 bp, Zea mays
  unsure (1)..(322): unsure at all n locations
gatgaccttgtcagcttgtcagcaggtaaacaagtgggaggagcgcatcacagcaagaatgtgatgaccacttcaagacccctggagctgctgcatatggacctcttcggacccgtcgcctatctgagcataggaggaagtaagtatggtctagttattgttgatgacttttcccgcttcacttgggtgttctttatgcaggataagtctgaaacccaagggaccctcaagcgcttcctcaggagagctcannaatgagttgagctcaaggtgaagaagataaggagcgacaacgggtccgagttcaagaaccttcatgtgg

SEQ ID NO: 79207 - DNA, 388 bp, Zea mays
tctgccatgacgtgatgtctctatccggagagaagagttctatgtctaggccacattctgactgccatgacgaaggacttcgccatgactacggtattgcccccgtacaaagatatagttgcttcgtagctcatcaagaactgcttcggatctgagtgcccatcatacatggggagctggtgtggcttgtatgatgggggccatatggtagcctgcagttctgctgatagaggagaagcatcatcaaaagcaaaatttccataatggaaatcgtcataccaattatcatcattgtaggaattgtcttgacgaagctctctttgtggacgtcttcggtcctagtcatcttgagtaagatgtcgtatttcttcagcagcttcatcgatct

SEQ ID NO: 79208 - DNA, 325 bp, Zea mays
  unsure (1)..(325): unsure at all n locations
ngagacaggaacaaccgcggcatgcactacatcccttgattaatatgtcaaggacttgaggattgccaagaagaggaagcaaaagaagaaaatcaacacctcttccaaaagcctcaaccatgcctccataaaaggtaacatccaaagtaataatcaagttacacttcatacaaatgaaaataagaagtgtagagaatgctttgaaaaggggcatttgattagatcatgtccctacattaaaagtgtcttgattattaacgaggatgatagactttgttttaaatgctccaagaagggacacttacttatatcttgtccccattta

SEQ ID NO: 79209 - DNA, 405 bp, Zea mays
  unsure (1)..(405): unsure at all n locations
gaatggagggaaaataaatggtttattcatacactaacgaaatatatatatatcaaatatatagtcttgcattcatgctggtgttttatttgtgcatctaaaactaaaagtttggaattcaaacttgaaattgatttggagttaaaatagaaattagaaagtcaaattgaaaaaatgggaaaggaaaagttcatgaaacccttttattcctctcataaataaataaaagggaaaagaatgaatcataatattntaaaacactaaagttatattcacattaaagaaatattggcccttggaaatttgaagctcaaaatagggatttaaattcggtttgaacccttgaacttgaaataggaaaggaaaatcagaataagagaataagaaaacatgaaaacgtttggt

SEQ ID NO: 79210 - DNA, 299 bp, Zea mays
  unsure (1)..(299): unsure at all n locations
ctaagttctcttcgtcaacgccaccgaagagcaacgctcctggctagtagccgcatgatgtagcataatctcttagctcctctttntcagccttagataactcctgaccaatcatgtttngaanattgaagtcctccgaaatatcttcggtaatcttcttctctttgttaaacaccttcttccctttccagccactttggccaggtttccttacagttgaacagttctttcgtggcatgtcaaaatcatctatcaatatcagaaatacgccctaagatttgggcttcngccgcacacct

SEQ ID NO: 79211 - DNA, 448 bp, Zea mays
tcgcatctctgaactaactcggctgcatcgttcttcgtcgtctgccaatagaatcctgacctgataaccttcccaactagtgttctggatgctgcatgtattccacactgcccagcatggacttcctccagaagttgcttcccggtggacgggagaatgcacttcatgaggacgcctgacgcgcccctcctgtataatacctccccaatgagtgtatagtgagccgattgtctggcaatgcgctctgccgagttcttgtcatctggttcttcttcattctttatatacttaataatcggccgtctccagtcatcagagtctgactcgggttgatctatgatgttgcactcttctgtttgatccatcgagatactcggctgcaggagttcttgtacgaagactccgggtgggacctgagttcgaccggatctgagctcggatagtacat

SEQ ID NO: 79212 - DNA, 355 bp, Zea mays
  unsure (1)..(355): unsure at all n locations
aactcatacatactgatgtgtgcggaccaatgagtacgacaactaggggaggattccaatacttcataaccttcactgatgagtttagtatatatgggtatgtctacttaatgaaacacaagtctgaatccttagaaaagttcaaagagtttcagaatgaagtataaaatcagcgtggcangaaaattaaagcactgcgatcggatcgtggaggtgaatatttgagtcatgagtttagcaatcatctaaggagttgtggaattgttccacagcttacgccgcctggaatgcctcagaggaatggcgtgtctgagcgacgtaatcggactttattggatatggttcgatcaatgat

SEQ ID NO: 79213 - DNA, 419 bp, Zea mays
  unsure (1)..(419): unsure at all n locations
catctaaaaagttnggacattttttgacttattatctattttctataaatccagaagcaatgttttaagctattttaaatactccaaaatccttatttgttctaaaatcagtcaactattttttattaaatactatgaaaaataaggaatctacgaaaattaatttgacattcttagggatattctataattttctacagctnttcaaaagtctactgaaaaagaaaaaggaaaagcttcaatagtactgggccgattctagcccagccggcccaacaaacacagaaaaaagggcgcgtgcccgcgctggcaatcttgcagaagggccctcggtgttctaactaactgggaacgggttcagtactatttctctgagtcactgaccggttacacataaacccctcacgttctatttcctc

SEQ ID NO: 79214 - DNA, 416 bp, Zea mays
  unsure (1)..(416): unsure at all n locations
gctacgctctgcngtaaaaaccagtggtatctgctcaagcagaaatacttcaatggtgtacctgccaatgagataagcacaacttctcctgtatcttacatgactgatgaacagtggagcgcattaattgcaaagtggtctgatccaaagaacatggtatgggtatcttgtcatatattggtctttcactataagtttgcaaaggatcttcgcatattgaacctatgatctaatctgacatgttcattctcttgtaggaaataagtgaaaagaacaagcagaaccgcagtcaagtcaagtttcattaggctacgggttctcgctgctatgtggcacacttacatgcatatgtaagtaactattaccttgtactactacctgcacttttgcactcaacttctatttgcatttatctg

SEQ ID NO: 79215 - DNA, 393 bp, Zea mays
  unsure (1)..(393): unsure at all n locations
cttctcctggacaagtgctgcacttaccgctgagtgcgaagctgccacatataataacaaattagcccctggcattggtggacttaatattgttagatctatcaaatattgcttcagttcttcgaaggctttctgctcgattggcccccattgaaagacttcggctgacttcagcacttcaaagaatggtaagtttctctctgctgatctggatatgaatctgttgagagatgtcagccttcctgtcaatctttgagcccccttttttgtacttggtggttccattcgaagtatagcttcgattntgcttggattagcctcaattccctttgttgaaactagacaaccaagaaatttccccttctttactccgaagacacattnttctggata

SEQ ID NO: 79216 - DNA, 400 bp, Zea mays
  unsure (1)..(400): unsure at all n locations
cggacacttgaaactaagctatctgctcccttgccaatgcgtgttagtagatagtatcactgaaattcttgaattatattatnggatggagggagtagtatttaaataagagccttgcatgcaatttcttttatttgaataatgttttcaacttaaattccttttttgcatgcgtgacatttattcttcgtaatattatttccattgatctgacttgtgagttatttntataaaccaacaccaaacatgaatccatgtttcttacttgataaccccgaacaaacaccattagcaggaggcactcgcgttggggtcgctcatcgacgacgagaagaaacttggcgactgccagttcgacctctagaaacagtcctacgtggccgcatgtgccgctatgtac

SEQ ID NO: 79217 - DNA, 415 bp, Zea mays
  unsure (1)..(415): unsure at all n locations
gcttacatgtgtcggatacggatganaaggcttgttgatagaatcttgaatctattcttcaaggcaccgaaggctctctcaattgttactcggagggaagaatgccttagattgaagagttctcttggattgagtggatgatttcctccaccaaattctcttagatgatatcttgtgctatggtatggaggtagaaatccaggtctaacaccataaccagtgtcaactaaatagaattttcctagttcanagaattctagttagtttgattgcgaagtaatttaaaagcatattcaaacatggtatggaattacttggtggcacaatgaggccatcagatctttccaatgcatccgatagaatcaaggcatcatgagctgaaccttcccagccagcaagaacataggtaaatctc

SEQ ID NO: 79218 - DNA, 287 bp, Zea mays
  unsure (1)..(287): unsure at all n locations
cttggttgtgttctgctgcgtgccttgcttactagcttctacttgacatatagatcggaacctgtacatcctatgtattataatgtaatctaacattntgtaaatgagtcagttcatatgagctaaacttctgcaccttactcaggagaaatatcagttacgtctaaaagtactagaagatggactaagagggccaccaagtggctctattcgtccacctactgaagganagagctttagcaatgtcccttcccgccggttgtcactcggtggagctgataatatat

SEQ ID NO: 79219 - DNA, 217 bp, Zea mays
tatgtttcacccaacattagctacaagtgttgatcagttacaactcccaaaaatgataactatttggagagcaacttaccatggcagcaggttctgtacaagatgctgaaaacagctgccttgctacatacagcactggtaggaccatccccacccgcggcaacctcagctgccacccacatggtctcgcctcgccgtggcatgagaagatgggcgc

SEQ ID NO: 79220 - DNA, 430 bp, Zea mays
  unsure (1)..(430): unsure at all n locations
tctaaagggagagcacattntcggactaacaaatgttcattttgtgacaggatttgtagcgcatgtcaagcanggaagcaagttggtgttcatcatccacacaagaacatcatgacgactgacaggcagcttgagctactccacatggacctattcgggccgatcgcttacataagcatcggcgagagtaagtactgtctagttattgtggatgattattctcgcttcacttgggtgttctttntgcaggataaatctcaatcccaagagaccctaaagggattcttgagacaggctcaaaatgagttcggcttaaggatcaaaaggattagaagcgacaacgggacgaagttcaagaactcacaaatagaaggctttcttgaggatganggcatcaagcatgagttctcttcttcctacacaccacaac

SEQ ID NO: 79221 - DNA, 482 bp, Zea mays
  unsure (1)..(482): unsure at all n locations
ctaagcttatggtgagcttgaacagttctgatgatttcttgattcattcgcgtggagtgcttcgtgctgtcctccttgactaggcaactggattatgtgccttttatcttcgtatgtatggggatcatggagcctagaaagaatatgtgcattgatctgtagacgcctcatgtcaacatttcagtcttgtaccatgatgcgagttgatctgtgtcataatggttgcagatctattggctatatcttcgtttattgtacatagccatttgtatcgatagtgcaaagtgaggcgaaacattatgccattcgaggacaactccgactcggcttggcttcgtcaggcgagctcaggatggctatgggtacccgctaccttaaatatggtgggtttttactctattaggatataagtttagtcaatntctctacccatgagtttgttaatgagttaaataaaaactcaacgagtacgtgagcatgag

SEQ ID NO: 79222 - DNA, 376 bp, Zea mays
  unsure (1)..(376): unsure at all n locations
tgtcagaatgcctggtcccgaggttaatctgcgccaaaaccatgccaaatgaatttggtttgagttcaaacattcccagaatgtgttcaacgtaatatcgcacgactatgatatttggatcttctggcttctgagtttgaaaaacagagaacacatatgaactttgagaagaggtctgaaattcagaaattcagaaatctgaatttctctaagggttcattgatcaagggctgtattggggatatatatgagttattttggctaagccctcacaatctttcttgtngcttaacaaatatattttaacttatattattggctcaactcaaaatttaaacttttcatcctctcttcatattttcttgattttgatcat

SEQ ID NO: 79223 - DNA, 429 bp, Zea mays
  unsure (1)..(429): unsure at all n locations
cttattccaacatgtgctagtcggcgatgccagagccaacccatgtttgtcttatcaattaagcaagtgtcgagttcagctctatcaaaatctactaagtatagctgaccctctaacactcccttaaatgctattgaatcatcacttcttctaaagacagtaacacctgtatccgtaaaaagacagttggtacccatcttacacaattgcgaaattgaaagcangtggtaatctaaagaatctacaagaaaaacatttgaaatggaatggtcacgtgatatagctatnttacccaatcctttgagcaaaccttgattcccatccccgaatgtgatagctcgttggggatcttgggttttctcgtaggaggagaacatcttcttctcccctgtcatatgggttgtgcacccgctatcgatgatccaactt

SEQ ID NO: 79224 - DNA, 361 bp, Zea mays
  unsure (1)..(361): unsure at all n locations
ttctaccatacctcgccagagcacggcggcgccccgtcaccgcgtggcgaacaagtctgtgagcggctagccgagaacccaggtacaatcgccaacatcggagggacctactgaaagcggacatcaaaccgaatagggttaggaacatcataccatcgagggcaccctggtgaagccggcctgcgacagacagcggatctgcgttacacggactgctccggtgagcaatcnggatggcgcatgtgacaaattcttcacggtgcaaccacagcctcccacccgcaggccagaagaagccctatgacacaactccaggacggcgaatcgaagtccacacgcggcagcccaatcatgctcccat

SEQ ID NO: 79225 - DNA, 392 bp, Zea mays
  unsure (1)..(392): unsure at all n locations
nttcggacgagggattcctatatcgccttcgacctggaattcatatcgggttctctcatctagtgaaactntgtaaggcatcgcattggatccctagccattcaccttaggagtgtctgagggtcttgcaaaccctggataaacaggaaacatgtcttggtgggtaaagatgtcaacctcttcatagtgtaaaactggtacatcattcttgctcacagtgaagagtgactcatgactctcgcatgattaactcatagaattaaacttaatatgtcatttgcattgcattgcgggaattattattaatcgttatctcttatttaattgggatggtgtctacttatacttagtaactacttaataaaattctgaccaactataagcagtgctca

SEQ ID NO: 79226 - DNA, 367 bp, Zea mays
  unsure (1)..(367): unsure at all n locations
gcttctaaggggagagcacatttgggactaacatatgttcattttgagaaagacagggtttgtagcgcatgtcaagcatggaagcaangtggtgttcatcatccacacaagaacatcatgacgaccgacaggccacttgagctactccacatggacctattcggcccgatagctttcataagcatcggcgggagtaagtactgtctagttattgtggatgatttatctcgcttcacttgggtgttctttntgcagganaaatctcanacccaagagaccttaaaaggattcttgagatgggctcaaaatgagttcagcttaaggatcaaaaagaatagaagcgacaacgggacggagttcaagaact

SEQ ID NO: 79227 - DNA, 462 bp, Zea mays
  unsure (1)..(462): unsure at all n locations
ntatatggacgacggngtctgactccgcttaatnggtctgtatctatagaaagatacttctctatacctgatatggtaaaagaggttgaagaaaacgttcacagaattattcataatatgaagaaagctcaagcacggctaaagagttatgcacacaaaccacgaatgcccttatantttcttgaaggggactatgtctacctgaaggtatcaccaatgaagggtgtatcgcgttacggagttaaaggaaaacttgcaccacgatatattggtccttttcttattctggaaagatatgggccagtggcgtatcgactccaactacccgaaaccttgtctgctgtcacaatgtgtccacgtgtacaactaaagaatgtcttctgttcctgatcgaaccgtgaaatacttgatgtgtcctgaccagattaacatactcgaaacatctatcgagttctgatcaaa

SEQ ID NO: 79228 - DNA, 239 bp, Zea mays
gcctagctaccggtgcataggtttcaccgaaatccaaaccttcgacttgtgagtatcccttggccacaagtcgagctttgttccttgtcaccacaccatgctcgtcttgcttgttgcggaagacccatttggttcctacaacatattggttaggacgtggaactaaatgccatacctcatttctagtgaagttgttgagctcctcttgcatcgtcaccacccaatccgaatcttggagt

SEQ ID NO: 79229 - DNA, 371 bp, Zea mays
  unsure (1)..(371): unsure at all n locations
atgacaantacacagacatttatgccagttggcattactcaacgcagagtcatattttgtacagtcatggttcacaggcttaccatcttatgcattacacaacgcatagttacgcaggttttcacatacatttatgctaagtatatgtacagtcagactgctgcataactgttaaagcttatgacaaactacacatccatttatgccagttggcaagtatatntatgattctttctggaagtagtcaaacgaacacaggaatcacatttacacaagggaaatattgtatcttatggtcttctactctctaccagatgaagtcatcatctccgacatccaccgttcgtttttcgacgttgatgtctcattcc

SEQ ID NO: 79230 - DNA, 442 bp, Zea mays
  unsure (1)..(442): unsure at all n locations
ntccgagcctcggtcgccgtggccagctccctccagtcgtttacaagacgcgccaacccctcggttagcttgagtcctctgacacggcagaacttcaccggaagaccgagatcgccctcgccggacttcggtcgcccaccgccgcgcgtggaccgagctctccgggaagccattttcaaattcattgcacccatgtcgtccctagcacccagtgaagctctctgacccgttcgattgacctatggcgccgtgagtagaccgaattcctcgccgccgacgagcatcttcgcctgcgcacgtggaccggccgactccgaccatccccaatggcgacccgcacatcgccgtgatccctgagacctaccctacgttctcgaacacctcactggagcaacctctcgcgcggtaagcccctccacccttttcttcgccgccggtactg

SEQ ID NO: 79231 - DNA, 271 bp, Zea mays
gttcgatttaattctgaatttagcttagcttctgcagtagcttcgttgctgaactcaagtcttcttctaatacagctgatgctttttatttgctctcaatttcaattataacctcgtggtttttatcttccaagttctgctgcattttcaaagctttgctcagcagtatgctctgcgcacaaacaaccttcgttagaaaacatattagttattacaaacaataaaagttagagaaaagttgtttacctttgaaattggataaaataaacta

SEQ ID NO: 79232 - DNA, 392 bp, Zea mays
  unsure (1)..(392): unsure at all n locations
aaacagtatatagtaccttctccaattcttgataatggttctttgataaactaagaacctcggatacgaaatatattggggcctgcttcttaacttgaccttcaagcttctcctggacaagtgctgcacttaccgctgagtgcgaagctgtcacatataataacaaaggagcccctggcgtaggtggagttagtgttgttagatctatcaaatactgtttcagctctttaaaggccttctgctggattggtccccattgaaagacttcggctgacttcagcacttcgaagaatggtaagtttctctctgctgatctggatatgaatctattgagagatgccagccttcctgtcaatctttgagcccnnctttttgtacttggtggctccatt

SEQ ID NO: 79233 - DNA, 227 bp, Zea mays
gcttttgcgccgatcggatcacctgtcttcgtcataatacctttcgtctcgctcaagcttcgtcctgaccatgctcttgtatgctcatgatccgattccgaagatacctgttcacatatttcacttggaaaacattgtcaaatcatgtttttgaggaccttctgaagccgaaggcccccaacactatgcatggctcgacttgatcacatatgctgggaaaacacatg

SEQ ID NO: 79234 - DNA, 261 bp, Zea mays
tgatgtgtcgcgcctcatatggacgactgaagaactccatttgtcccgcgccttggtgaaggacagcgccgaagccctcacctgaggcgtcacagtccacgacgaaggtcttctcgaagtcaggcatctgaaggaccggacccgtggtcatggctgttttcatctgctggaaggcggcctgtgtgtcttcgtcccatgcgaatgcatcgttccctaaaaggcgcgtgagaggtgccgcgatgacaccgaagtcgctgatga

SEQ ID NO: 79235 - DNA, 431 bp, Zea mays
tctaaaggggaacatgtgttatgtctaacaaatgtaactttctataaagatagaccttgtgcagcttgtcaagcaggtaaacaagtgggaagtactcatcatagcaaaaatgtgatgaccacatcaagacctttggagctacttcatatggacctcttcggacccgtcgcctacctcagcatcaagggaagtaagtatggtcttgttattgttgatgatttttcccgcttcacttgggtattctttttgcaggataaatcggaaacccaagggacccttaagcacttcctaaggagagctcaaaacgaatttgagcttaaggtgaaaaagataagaagcgacaacgggtccgagttcaagaaccttcaagtggaggagtactttgaggaggaaggaatcaagcacgagttctccactccctacacaccaca

SEQ ID NO: 79236 - DNA, 453 bp, Zea mays
ggacgtgaaagtgccttcctcaatggaccatttaaggaagaggtctatgttgagcaacctcccggctttgaagacagtgagtatcctaatcatgtatataagctctctaaggcgctatatgggctcaagcaagccccaagagcatggtatgaatgccttagagattttcttatcactaatggcttcaaagttggaaaagccgatcctacactcttcaccaaaactcttgaaaatgacttgtttgtatgccaaatttatgttgatgatattatatttgggtctactaacgagtctacaagtgaagaatttagtaggatcatgacacacaagtacgagatgtctatgatgggggagttgaaatatttcttacgatttcaagtgaagcaacttcaagagggcaccttcctaagcctaaccaactatactcaagatattctaagcaagtttggaatg

SEQ ID NO: 79237 - DNA, 424 bp, Zea mays
  unsure (1)..(424): unsure at all n locations
cttcatcccaacatgggcaagtcagcaatgtcatatccaacccatgttagtcttagcaattaagcaagtgtctagttcagctttgttatcattaaaatcaactcaatacagctgaccatctaacacttccttaaatgctattgaatcatcacttcttctaaagacagtaacacatatattagtaaaaatacagttgtagcccattntgcataattgagaaacagaaagcaaattgtaatctagagaatctatgagaaaaacattagaaatggaatggtcaggggaatatagaaatttaccgaaacctttgaccaaacctcgatttccatccccgaatgtaatagctcggtagggatacttcattttctcgtatgaggagaacantcctttatcccctgtcatgtggttcgtgcacccgctatcg

SEQ ID NO: 79238 - DNA, 266 bp, Zea mays
  unsure (1)..(266): unsure at all n locations
actgtgggtgtacatgcacccacgacaatttataaaaccagtagaatagaatagatttttatcatatatgcatcatttacaagatattattatacacgctcaaagcgtatgcaccctcccttcattcactttangttcgccactgcaggcttgccacgtgctatagcaaaacaattaggaacatcatagcgaaataccatatacaaaagtgttgggagcatctatttccaaaggtccttaagtgttacattatacgctgaaacatg

SEQ ID NO: 79239 - DNA, 378 bp, Zea mays
  unsure (1)..(378): unsure at all n locations
tcaggtttgagaaccggccttctaatccccattgcctttaacttccgaagccccaaaagcaaagcttcatactcagcaatattatttgtgcaactaaaatcaagttttactacgtagcaagttctaactttggaaggtgcaactaacacagcagctgctcctgccccgaaggttccccaagaaccgtcgcagaatactgtccaagcttcggcatctatagttgtttcttctccctgagcccctagcgtccaatcagcgatgaagtctgctaatacctgngactgtattgaggatctatgcacataatcaatgctaaactcngttgagttccgcacccactttccaattcttccagtagcttctctgttcctcatgata

SEQ ID NO: 79240 - DNA, 360 bp, Zea mays
  unsure (1)..(360): unsure at all n locations
ccgatcatccaagcatataagtttctggatgagaagtggtcacccaagttctgttgatgaagcactagaagaccaatcaatgaaggaatccctgtgggagttcgcaagagaaaggtttgtgtgttggcatcgatgcttcttcaataagccagctgccaagcgaaagctagaagcctgaagatgatctttgagtagccagaatcagtgtttgcaatcagcaaccggatgctcctgaaaggccagattntgttgaagttccatctcctcgaagagtctgcaaagtgaagatatgtagctgaagtaaagctatacccataacccttctaagccgaatctcgaggacgagaattacttttaagt

SEQ ID NO: 79241 - DNA, 236 bp, Zea mays
tatgcctggacacactacgggtatcatatggctaacgtccgggctgtagttccgttgagtctaccacagaattagctacgtgcactagtgggaacgtgaccacttttagtggattatcattgaatgagatagatgattagctatacaaagtaactatcggaaccagattccatattgagacctggatcttattaatataaacacgtgattagcgcacataggacacggggggatgc

SEQ ID NO: 79242 - DNA, 347 bp, Zea mays
tagaaaaatctggtatgaatcggctgttttatccagccagtccaaggaaacttcggacctgatgaacagtggtcgggggtttccactccaaaatgtccttgactttgctgggatctaccgcaatccccctggcagacaatacatgtcccagaaactgaatttcgtccagccaaaacacgcatttgctaaacttggcatataactgatgttctctcaagcgcgttaacacgatccgtaaatgttgggcgtgctcctcttcattcttggaatatatcaaaatatcgtcaatgaagactaccacaaacttgtccaactcgggcataaataccgagttcatcaaatacgtg

SEQ ID NO: 79243 - DNA, 326 bp, Zea mays
gtatcaaatggacatgaagagtgcttttctcattgtaccaatcaaggaagtggtctatgttgagcaacctcccagctttgaagacattaagcaccctaaccatgtctaccaactctctatggctctttatggacttatgcacgccccatgagcttggtttgaatgccaaatacattgtcttatcactaatggattcaaagtctataatgccgatcctactctatttactaaaaatattgtaaaggatatactggtatgccaaacttatgttgaagatatcatatttgggtttactaacgaaaatacttgcgaacagtttagtagga

SEQ ID NO: 79244 - DNA, 342 bp, Zea mays
tgctgcggtcaggccaggacgccgtgctgtgtgagagtgaccgagggggccagaatgaacgaacctagcagccgaacgggcaggggcatggtgtggatggtgccgccaccatatcaaccaaaacctcctctctcatgcatgcatcatcgatcatccaggttcgtggccgtggtcgacatggacagactcagacaggcttgctcgataagctttggaggaatctaactcactgctgatatatgtgatcgtcaccacgcaccgcggcgtgtgacgggacgggacgggaatccaaattagccgccgaaatttatgcgtgaggggggcgatgcatgcgtctcgagt

SEQ ID NO: 79245 - DNA, 346 bp, Zea mays
  unsure (1)..(346): unsure at all n locations
tggacggtattttgtgatggctcctgtggaaccttcggtgcaggagcagttgctgtcctantagcaccatctaaagtcaggacatgttttgcaacaaagttagacttcagctgtacaaataacattgccgagtacgaagctctccttttggggcttcggaagctaaaggcaatgggaataagaagggcaatccttaaaattgattcacaagttattttgggccatgtggataagagcagcaaggcaagagatccgaagcttgaaaaatatttggatgcaatccgaaggttggaagcttcttttgaaggcttttctgtaaaaaaatatcccaaggggagagaatgag

SEQ ID NO: 79246 - DNA, 341 bp, Zea mays
tcggcttctaaggcaccagctgtttgtagcgcaacagctaccgaagctacagctgccgaagctgccacgaccgaagatgtacatttataaagcacactttctaatattgataaaatacttctagacatggccgctgaagaaactgttgcagccaccgaagaaaccatggccacagagcctgagaaggaaaagaaaatagccgaagacgcttcgaaagaggaaattttcaactttcaaaacttaattggacaagagttgatgaaggctgagaaagaagagttaaaagaatatgccatatcctgcggatatcaaccaggggcactgctcttcgatggtgttga

SEQ ID NO: 79247 - DNA, 344 bp, Zea mays
ttcttcggcgccatagcgagggtttatatctttcgaaggtgttcaaaaaactcgaagtggaagtgagttcaccggaggtgggcgccaatgttggggacttgttctcaaatgctaagaattaagaacaaggcaacatagaaaatgttaagtgtaaaagtccttcgtcctccataacattatatccctttgggatataaagcatctcggacgaaggttacgaaggacgtagcttcgtaagcgtgacaatgaggaacgaagcattcatataaatcatgagatatgaaaatacttaaatgttatcataaaatcatctccatttttattattataaacgaatgtaaatg

SEQ ID NO: 79248 - DNA, 339 bp, Zea mays
tcagagcaacagcctgaagctgatttctatgccggaccttcagagcccaccaaggaacaacctttggaaaccgaagaaaaagctacaaaagcagctttggaaaccgaaaaaatgtcagagcctattttggttgaagaaactgacactgctgctgcccccgaagcaccttcctccatacgcgattacattgtgcgacatgcttcggggaaaaaattatccgaagaagtttttgaagctaatcactatgccaaaaaattgaaatatccgaagggggcactagtgttcaatgggacaaacgaagatgacttcctatactgcctcccagacaacaaagaatta

SEQ ID NO: 79249 - DNA, 339 bp, Zea mays
taaagccatggtaagtagcatatttcatattatgcgaattgactcaagcctagctacgggtgcataggtttcaccgaaatccaaaccttcgacttgtgaaaaccctttggccacgagtcgagctttgttccttgtcaccacaccatgctcatcttgcttgttgcggaagacccatttggttcctaccacattttggttaggacgtggaactaaatgtcatacctcgttcctcgtgaaattgttgagctcctcttgcatcgccaccacccaatccgaatcttggagggcttcctctaccctgtgtggctcaatagaggaaacaaaagagtaatgttcaca

SEQ ID NO: 79250 - DNA, 344 bp, Zea mays
tgtttaaaaagttttgtgaatttttggattataatttactctctaaaattctagaagtatggattttggctattttaaatgtcccaaaattccctattggaactaaaaatcatgaaactatttttattaaatactatagaaaattaggagcctagcaaaattggtctggtatttttagcgtttttctacaattttctagaaattcttaaaccctgacagaaaaagaaaaaggaaaaaaacatgaatagttctggaccggaactggcccaagtccacccatctacaggcggaagcgcgtccgcgtgcgcctgcgctgctggttttgcagaaatgtccctcacggg

SEQ ID NO: 79251 - DNA, 340 bp, Zea mays
tcttggcaacaaccttcgtctccatctccgttacagcaaggacagcagccagaagggagccagtatgctccacaccaaagggacttccgagagcagtccgaagctcgtacagtcaacagcaccgtgccagagtcaaagcacatctattgacaaatatcctaccctaatagcaatattttctatccagttttgttttctgtaataaaggatattgtttaggtttcatataaatactttcgttgattcccacaaggaaaatatatttttctcaggcttaaattgttaaagtttaaagacttgtgataatcaagaggaccttcggactaccgaaaattattcg

SEQ ID NO: 79252 - DNA, 336 bp, Zea mays
tctaaagggagagcacattttatgtctaacaaatgtgcattttgagaaagacaggatttgtagcgcatgccaagctgagaagcaagttggtgttcatcatccacataagaacatcatgacgactgacaggccacttgaactcctccacatggacctattcggcccgatagcttacataagcatcggcgggaataagtactgtctagttattgtggatgattattctcacttcacttgggtattctttttacaggataaatctcaaacccaagaaactttgaaagaattcttgagacgggctcaaaatgagttcggctttaggatcaagaaaattag

SEQ ID NO: 79253 - DNA, 347 bp, Zea mays
tcgagctagacaaaaggaaaggattgctcagcgacacattatcaagaactatgctgttgataatcttgaggagttcatgactccatatatctctattgctaatgaacctgctgaaaatcctttgataatcgtagaagacccaagttcttcacagctatgtggtgctaaatgtttcagtgaatcaactggagaaatgaggcaatcctccaagaaatcaaggagatattctgaaatccctcaagatctttatgccagaattcctgataacgctgcttcatccaaggacaactcaaaggccaccgatgtcttcaatccagggaccccaaatcacctgctacctgtacttg

SEQ ID NO: 79254 - DNA, 345 bp, Zea mays
tgaagccatggtaagtagcataggttatttatatacgaactgactcaagcctagctacgggtgcataggtttcaccaaaatccaaaccttcgacttgggagtatcctttggccacaagtcgagctttgttccttgtcaccacaccatgctcgtcttgtttgttgcggaagaccaatttggttcctacaacattttgattaggacatggaactaaatgccatacctcattcctagtgaagttgttgagctcctcttgcatcgccaccacccaatccgaatcttgtagtgcttcctctaccctgtgtggctcaatagaggaaacaaaagagtaatgctcacaaaaat

SEQ ID NO: 79255 - DNA, 341 bp, Zea mays
tgcattgcatgtttaaattccttgttttgcatctaggacttctctaacctagttgagataaccgccaactaggggtgtaatcggatcgaatacggacggatatcaatgaaatcatatttgttttcatatttttagtcggattcgaattcggatacggatagcttcgaatacgaatacaaatatggatgttctcgaatacaaatacggatagtcgtggatcgaatatggagctaatcggacacgggtagcgtcggtaatgaatatttttgtcggatatcgtgtaagaaaccattccacacatatcatagttgtaatcatttagcccctcctttagtccaaac

SEQ ID NO: 79256 - DNA, 343 bp, Zea mays
tttggcatccattttcttaacacttttcttttcttttgcaggacttttaccacaccccctccgaactaaattttgaacagcccgagagaagccaggcaaactctggaactccagaagaaacatcaccttatctgatccaacctccttgagcatgtcagttatactgctatgtccacccttgacaatatctctctttctactatccatatcccttatgcaacaggcaccgtcaaactccgattcattgtcacaaacagatgaatccacggaagaatggcaactggccgttctcacctccatgccagtggaagactcaacggctgtgatttcaccatggcattga

SEQ ID NO: 79257 - DNA, 342 bp, Zea mays
tcatgcaactactgccaaaaatgatatagtgaatttggtacctttgtctgatactatcttctttggaacaccatgtaagcatacaatccaagacatatatagttctgccaacactgcacggttataggtggtcttgactggtatgaaatgggccacctttgtcaagcggtccattactaccaagatgcagtcataaccagcacgagtgcgaggcagaccgactttaaagtccgtcccaaactcatcctatttccactgaggaatctgtaacggtgcaacaaacctgcgggcttctgatgctctgccttgatcctctgacaactatcgcatatgaccacatat

SEQ ID NO: 79258 - DNA, 341 bp, Zea mays
acaaaggaaaaagaaaagagttattatgttgggcgcgtccaggacagccggtcagtaaagacaggattggacaaaacccaactatcgtcccttgaaacgggcccttgagcgggagggcccacgctaacctcggatggagcccccagacacacgacgctagatataggactaaggggtcgcaggaaagactaacgctagtacctcgccccaaaaccctaggccccagaggcccccatcgactaggcgtcggagtgtttggaaacgcgacaacctacagaggatcggatcccgatgcctgctgcttctctgcaggacgacgatataaagatagcaacagcaac

SEQ ID NO: 79259 - DNA, 343 bp, Zea mays
tgatcaatgacagagagctcatcttcactgtccttttcgcaaatgcaattggaatcatcaatgtagaagttctcaataatgtataagcaaagttctccaattaaaaatattccatcgtgtttatcaagaccagcaacccgttcacagttgtatttatgccttattttctcatagggctccagataaggcctgataagatactcaccattgtcaagcaactccttttctgatttatcctctgaggttcttgcatcagtacctttgactgaaggtgccctccttggtgaactaagttcagatttaccctggtgactctcagtcatgtgaaaagaaagggaacttg

SEQ ID NO: 79260 - DNA, 347 bp, Zea mays
tacgcaagcttgtgatccataaagcccgctttttgtgatgccctctgaaagcggccttgaactctctccattccaccacgtggtcaattggctgcagagcaaggaagtatgtgacgccctcagaaagcgtccttgaactctctccattccaccacgtgggcaactggctgcatagcaaggaagcgggcccaccatgtccgcgcgggtccgcgaagctgctgggtggctaacctgaccttacccacatccgaacaaactccattaagaagtgggaacttagagtccactaccctgagccatacatcagcatcaagtggatcctctgcccgagagaacagcggcggctg

SEQ ID NO: 79261 - DNA, 336 bp, Zea mays
taagcatttctcctgaagtttttttttgttttctgcaaatttgagtatttatccacttcagctttcaggcttgtttcacaatatttcttttcttgctcgaatttttctgattgacggagcaattcgttctttaattcgtcattttcagtttggacttcagccaaagagccctccatggtctgaataacaaaatccttcttttctaatgcaccttcgtgctctttgaccatgatttcaagatcttggattgcgaagtctttctttttcatattggcttcgtagttttcaaccttttcagccaaatcttgaatgacggctttatttttctcttcctcc

SEQ ID NO: 79262 - DNA, 341 bp, Zea mays
ttaaagtgtcactagggcaggacatcgccctatcgggcgctacaatctccagtgcagtttcacacaaacaaattcatgcgcgtggtttgaggcaatggtggcccaggctgttctttccacggtgattattcatatagctgatcctgtgctttctctggttcacgttctttgatgttttgttgcaacatggattaagaatgttgtattttaggagtagtctgccatattttttagatgatagtcgagtgtcagacaataaaactggtggaagaggaagcagaagacttatcaagattgggcatgaaaaataatctgtttcagaaaacataaatattgaggat

SEQ ID NO: 79263 - DNA, 338 bp, Zea mays
taaacatttatgagggatcgtccttcttataacatcgcacgcaaggacatatatgcaatataaacaagtagaacaataagaatggcattcacacaacagttgtgattcggtatggcttgttttcacatggtgatctccatctccaataatctgtccatcacgatgatctccatctccatgatataggtatgccatcctccaggtgatgagtccttcaagacctatctaacgtatgctggtaaacaaattacatatacgctttggatcatcacatgttgacacgcaggtcattacattaaatttggacaatacatgtggctccagccgtattgccctgg

SEQ ID NO: 79264 - DNA, 335 bp, Zea mays
tgtgaagattcttcatccctacatgtgctagtcggggatgccaaagccagcccatgttagtcttagcaattaagcatgtgtcgagttcagctctatcaaaatctacgaagtatagctgaccctctagcacacccttaaatgctattgaatcatcacttcttctaaagacagtgacctacatcagtaaagagacagttgtagcccattttgcataattgagatacagaaagcaaattgtaatctaatgaatctacaagaaaaacattggaaatcgaatggtcaggagatatagctattttacccaagcctttgaccaaaccttgatttccatcccc

SEQ ID NO: 79265 - DNA, 345 bp, Zea mays
ttttgcatcatgcttcagaccttgtcttctcattgtccacacaaagatattcagccttatgattgcctcgggggtaagttgatgaagatagacttcgaagattttcagcacctccacgacgaagctgctcaagggaaatcgcagtccagctttcaaaaagcttcggtacactacgacttcattctcttcagggtgtggacaagttttttccccttcgtcggccctcacaatggacaaatcccggaaataccttcctctcatgttgaccagatgattctctttgatagttgatttaccataaactgaatggcttggtcgccagggacgatcttcggagtcttcacc

SEQ ID NO: 79266 - DNA, 342 bp, Zea mays
ttagattcttggcaatttgaagattattttgacacactcgcacatataggaagggtatgggtttaaatatctttgatatatgttattgtctttgaagtgcagatgacaataacctcacccctccctattcctttacggtgatgtggtaagttgtttttggcttaatgcttgatataatttatttttgaaattttaatattgtttgtttaatgctgtagatatcgctggtcatttgtgagaatgaagttgttattatgcttgtgatatacaagtatgcctatcttgttttcaccatgtttttcatggttgagttttattacaataatattgttatatatgcct

SEQ ID NO: 79267 - DNA, 342 bp, Zea mays
tggggcgccctcgggcgtcttgtttctttcgaagtaccaagtctcccacttggaagcctcggggccgaacccttcgggcgtggtagcgtcgcatagactgctgataccgcgtcgagtgtagtaaggctacgtcccgagcctcttccagctggtctaatgaatcttttcggttggtctggttgttttggtcgtcgtatgcctttgtcctcggggaaccgtattccaagtccgtgggtaagatggcctcggccccatagactaggaaaaacgatgagaagcccgtggcccggctcggcgtcgtcctcagactccaaaccaccgagggtagttcttttatccacc

SEQ ID NO: 79268 - DNA, 344 bp, Zea mays
ttaagttcactccagacccttggattagttgatgggacccttccacaccctccgacaaggaaaaccctagtttacccactgttttaagattgtttcaccatacgtagcatttacaaaattacatgttactgatatgcttatattttattcattgcattcgatagactgtaatctcactgacggagagtacatcctcgttccggagcaaggagctgctcaggaggtagtccaggagccagcaccagagcctaccatcgaggatctgcctgccccagctttggaaggcaagccccagttttatgcataaccatttatatatatgttattttactacacttaatgtt

SEQ ID NO: 79269 - DNA, 351 bp, Zea mays
tcgctccaccagagggcgaagacgttatataagtatgacaaagtcatcagcatatcagccaaggaacaactacaactgtgggcccctgcgcatcaaaaaccacaacctccaaaaatagaaagacatcctcgaggccaagcaccaacgtgtcaccgcacaggccaaggtgcgccagatgatacgagacgaagagtagagagctcaggagctcgagcaagaaatcacgctcatgcagagtgaaggccagcatgacctgcaacacggaccgcccctccaacagcgcgtcctagccggagacctcttcatacctcagcgtgggcccttcatcccgcatgtcaccactatccaagg

SEQ ID NO: 79270 - DNA, 339 bp, Zea mays
ttattaaggctcgtctagtctttgttcattcgaagcttcccgtttgcctttggaacgatgactggattggccagccacactgggtgatgaacctcttcgatgaagccatcgtccagcagcttctggacctccttacggatgaagtccttccgctcaatggactgtctgtctccgaggcttctaactcaccggcttggcatcagggtggatctttagatgatgctcgatcacctccctagggaacccaggcatctgcgacggctcccatgcgaacacgtcggcatttgcctggaggaaggcgacgagcgcgagttcctatttttcctctagatcacccgc

SEQ ID NO: 79271 - DNA, 341 bp, Zea mays
tctttcggttctcctttgaggacggaggtaccagaagggcagcttgacgagcctttacctcgtttgcttcctttttccttgtgatccttgtccatttttccgtagaagaggtggacagtggagttctccgggtagacggatcctctgctcctggcttgcaggaggtagtcttcgctcggagcgctggaggttgcgctttttcctgcttctttccggcttttccggagattgttgaggaaggctttctctccggcggatccgcgatgcgatgtagagttccctcttcgtctgccacggatgaaatggttccgaagccgaacatggacccagggcggaggatg

SEQ ID NO: 79272 - DNA, 340 bp, Zea mays
tatgaagattcttcatcccattatgtttctagtcggcggtgccagagccaacccatgttagtcttagcaattaagcaagtgtcgagttcagctctatcaaaatctactaagtatagctaaccctctaacactcccttaaatgctactgaatcatcacttctaaagacagtaacacctatatctgtaaaaagacagttgtagcccattttgcataattgagaaacagaaagaaaattgtaatctaaagaatctacaagaaaaacattggaaattgagtggtcagaagatatagcaattttacccaatcctttgaccaaaccttgatttccatccccgaatg

SEQ ID NO: 79273 - DNA, 340 bp, Zea mays
tgagctttgatgttggactcataatttatcaagtcagcttgacttgatctagattgacatcgcttggctccaacatcctgtaaaggtcacatagaacatctccaaacataggaacaacccaaactaaagatcaaagtgaacttagctcttttgggctgcttccagttctggtttcgacacttgttctccttctagtgaccttgatctcctccttagagcttgatcttgagccttatgacttacaccacataactatagctgttacctcattggctgtaagtcacgtccttatgtagtgatccttgatgtgccgtagctgttctcaactcgatcacccttg

SEQ ID NO: 79274 - DNA, 333 bp, Zea mays
tctcataaagcatgctactactttttaatccaacttggtaatataatgtcacctttatcaaggattgtagctttcaatgttaaaatagcatatttattggattctcctatttttgagcttgattgaaaatctaatgcctatgttgttcttttgatcgcatctgttgtttgatcattgaataacttcaattatcacttatgctacttagtgcctcatgtaatttcaattggtaatttcaatcgatatctatcttgatatgcactaagttaaaaggagaattcatgatataattatgcgattagtgatctaccttttatctaaaaacaatgactt

SEQ ID NO: 79275 - DNA, 337 bp, Zea mays
tggatccggtcggactcttttcccgcccggggtcttcgtgcaagaaattctccagccgagcatctcgacggatcaaatagaagagtgcattatcatagatcaacccgagtcagactctgatgactggaggcaaccgattattaaatatataaagaatgaagaagagccagatgacaagaactcggcagagcgcattgccagacaatcagctcactatacactcattggggaggtattatacaggaggggcgcgtcaggcgtcctcatgaagtgcgttcccccgtccaccgggaagcaacttctggaggaagtccatgcagggcagtgtggagtacac

SEQ ID NO: 79276 - DNA, 335 bp, Zea mays
tgtcagaattgttttgaataactcatgaaaaggttaaccactgcaccaatattggtaatgccagacatccacaagggatttgatgtgtattgcgatgtatcacaccttggacttggatgtgtgctaatgcaagaaggaaaagtgatagcttatgcttcaaggcagttgaggaaacatgagaagaattatcctacgcatgatttggaactagctgccgtagtgcatgctttgaagatttggaggcactatatgattggaaacaagtgcagaatcttcacggatcacaaaagcctgaaatatatattcactcagaaagaactcaacctcagacaaag

SEQ ID NO: 79277 - DNA, 344 bp, Zea mays
ttccagattgttaaagagtgcatttatatgaattttgaaactccagttatgtttgttttactgtggttgttcctgtttgcctggcaaaaatgagcaggtctgttcactggtaggtttcatctagtaaatggccgaattggctcttccaactatggaatcttttgtagagggataaaagttcttactgcgagcagaatttcatattttttggttgagtagtttgggatatatcaaattttgaatttaactctgctgctgtctgaaacaaattcagtcagttatcttgtcagatattttagaacttatagatggcaaaatttaattatccattgaataccgaagtt

SEQ ID NO: 79278 - DNA, 345 bp, Zea mays
  unsure (1)..(345): unsure at all n locations
ntacgaagaggaaccttcggctattttattcaaacagcttcatccgaggatcgcttctctatataagaccttcggcgccgaagcgtagacccaacagtagcccctttcgcggtgctagattgtttttcgtaacgagcttgatccgtgaaaaaagtttcttaaacttcggagcgccgaaggtctcaaaaacaccttccctgagctcgttgtcgagaaacgattcaatttccctgtgcgtagcggccccaccttgcagagttactgttcggtctctgcggtccaccgtacagcgagtgtgagcgggtgtccgcctggtgtaaaacttctggcgcttcgccttcttac

SEQ ID NO: 79279 - DNA, 341 bp, Zea mays
tcaaggattatgcaaatctatcctgttttcgttgtcaaatcatgttcatagagaagaacttgagttgtggccattgttcgataaacatttttctgtagacgagcaggataagattatcggtcatataattggaactactggtgctgaggttctgcagtcaatgttaccttgggttacatcagcacttagtttagaggaacagaacatgatgctggatacatggaagcaagcaaccaaaaacaccatgtttgatgaatggctaaatgaatggtggaagggaccttcaacttcatctgacccatcagacaaggcttctactccttcagaaggtttgttcagtt

SEQ ID NO: 79280 - DNA, 340 bp, Zea mays
tatgaagattcttcatcccaacattgttttgtcggcggtgccagagccaacccatgttagttttagcaattaagcatgtgtcgagttcagctctatcaaaatctactaagtatagctgaccctctaacacgcccttaaatgctattgaatcatcacttcttctaaagacagtgacacctacatcagtaaagagacagttgtagcccattttgcataattgagatacggaaagcaaattgtaatctaatgaatcaacaagaaaaacattggaaatggaatggtcaggggatatagctattttacccaaacctttgaccaaaccttgatttccatccccgaa

SEQ ID NO: 79281 - DNA, 347 bp, Zea mays
tggacccctgggtggaagcccaaatggtcgagctctctggtgacgctcttgctgttgagcccggagaacttggaatttcctcttgaggtgccccttctcttcctcttttgccctttccacctggatagccttgttggagaggtgagagaagctgtggaagtcttggctggcgaggatggtcttaagctcgggtcttaatcctctcaggaaacgggccatctttctggactcggtgctgacatcctcgggctcgtagcgggccagctctgtgaacttgtgcacatactcactgactgttctctcgccttgagttagctcccggaactcatcctccttgagttgaacta

SEQ ID NO: 79282 - DNA, 339 bp, Zea mays
tggggtggttcatgaggtattttttttctgaatttgaagcacttttcgtcagaagacatgacgagtaaagttttgcaatttctttagaacagtagtggcaggatgtgtaattttggcgaagtaacaagggatagcacataattgaaccctaacaagctggttttagctagagtaatccagattattggaaaaaactgggaaactgattttatgaaactggaaagaaaaactatatgcttctaaacaagccctaaatccatgtcccgaatgatgttagggaagttctaaaccactaaaatatagtttggtcacatcaaatgtttgaataataactaaata

SEQ ID NO: 79283 - DNA, 341 bp, Zea mays
ttacaccattcaaactattgtttgttgacgaagcaataactccggaagaggccaaagcaggatcaataagaatagtagcttcggaagaaggcgaagctgaagctgatcactctgtggaaaaagatgctatagaggggatcaggcttcaagctgtggaaaacatcaacaaatatcaagctgaaacaataaaatggcgtgatagaaaggttaagctaaagaacattaaaccaggacacttggtgcttcgaagagtagccaaccctgagacagtaggcaaattacagttaaagtgggaaggaccttttttggtagtatcttcgtcaagacccggttcatacaga

SEQ ID NO: 79284 - DNA, 341 bp, Zea mays
tcttcaccacgtgttcgtatatattttgaggaagtcgagcaaggcatattctccttaattgtctttgtttcttgtttccaagcaattttctttttgaccctacaacttgttgctcattcaaacattcgcttccttttgagcaacaggggttagcacatggtgatatattatccaaatgtgcacttgtgcaagaatgaggttcacatgaatttaagtttgtaattacaacctcatgagcaacatcaagcatgatatggtcatcaactagtttactatgagaatacgacaacatatcatacttttcacctagagcaagtttttctaaatttatcatttctact

SEQ ID NO: 79285 - DNA, 338 bp, Zea mays
tctgcattgaaaacagttttttttgtttccgaagatgtctgaagataagaaggctgctaccgagatgaagctgagtctcgatgaagagaagaatctggggtttcttatagcaatgtcgaagaccaatacagaaaaaatcaccaaagagattttagaaggtttgtctgaagatactggtgacagcgacagttatgatgtggacagtggtggtgaagactccaaagatcgcccttggcgaccaagccatgcggttttcggcaaatcaactatcaaagaaaatcatcttgtcaacatgagaggaaggtatttccgggacttgtccgttgtgagggccgacg

SEQ ID NO: 79286 - DNA, 344 bp, Zea mays
tgtggaggttcttcatccccacatgtgcttagcggcgatgccacagccagcccatgcaagtcttagccattaagcatgcatctagaccggcctcttcttttgcaaaatcaactaaataaagtttgccgtctaatacacccttaaaagctagtgaaccatcacttcttctaaagacagacacatctacatttgtaaatagacaattatatcccatttgacataattgactgacagatagcaaattatatccaagactctccactaagaatacatttgatatagaatgctcattagaaattgcaattttacctagcccttttaccttgccttgattcccatcaccg

SEQ ID NO: 79287 - DNA, 337 bp, Zea mays
tgataatgaggagatggctctcgttatcaagagcttccgccaaatcctcaaacaaaggagggggaaagactacaagtcccgctccaagaaggtttgctacaagtgtggtaagcccggtcactttattgctaaatgtccattatcaagtgatagtgacaggggcgacgacaaaaaggggagaagaaaggagaagaagagatactacaagaagaagggcggcgatgcccatgtttgtcgggagtgggattccgacgagagctcaagcgactcctccgacgacgaggacgccgccaacatcgccgtcaccaagggacttctcttccccaacgtcggccac

SEQ ID NO: 79288 - DNA, 335 bp, Zea mays
tatcttcaattggtgctaaccctattctatcacgtatatcattgttctggacttgattactgctgataacacttgcagctatttggagtttagtggatgcacatgagtttcgtaattttacaacatcctcctggttgaacatctttacgccttaaaacaggagtacatgcctgcctgcttagcctccttttatacacctttctctttatgttttatgggattgaagattgtgcacatccacattttggtttgctttaagtgttttctaatgtttgtataattatagttttatttctatctagcacgctacatcaaatgaaatcctattatgtgtt

SEQ ID NO: 79289 - DNA, 345 bp, Zea mays
tcggcacagtgacagatctcaagactaatgggttaaccgacttaaagatgaaatgacttaaagacccatgatgttttgtgtcattattgtagtcgattgtaaagagcataaatgtaattttacacaggatgcgccctgtgcctataaataggtgaacagtacccctatactgttcacacaatcttgtaatcgctaacacattacgctggaattattgttttctgccaaggcgaaggtataaatatacctaaatattatgtataatatttaggcttgtataataaaatatgtacgaatgatattatctatctttggtatatttttctctaatattttgtatttcat

SEQ ID NO: 79290 - DNA, 344 bp, Zea mays
tctaaagggagagcacattctaggattatccaatgttcattttgagaaagacagggtttgtagcgcatgccaagcaggaaagcaagttggcactcatcatccacacaagaacatcatgacaagtgacaggccactggagctcctacacatggatttattcggcccgatcgcttacataagcatcggcgagagtaagtactgtctagttattgtggatgattattctcgcttcacttgggtgttctttttgcaggaaaaatctcatacccaagagaccttaaagggattctagagacgagctcaaaatgagttcgggttaaggatcaagaaaattagaagcgaca

SEQ ID NO: 79291 - DNA, 332 bp, Zea mays
  unsure (1)..(332): unsure at all n locations
tatcccctaccccagtggtngttttctgggttcgttggagctacggcggtgcgcccgccggagttggtcaaaactgtgacagatggccacaccaccccacctgactagtgcaaaacaacgtggaggcgatcgcgagacagaaggtgggcttacctctaagtatcatggcgttcggagtcctgcccatggtgtggcacggaacaccggcccctccccaagtccgacgagaaattgggtcgagaacggtggtctttcccgcccgccaacgtcacgatgagcacgcacgcaccccggcggccatcctcgagcacaccgcggacttcaaacggcgg

SEQ ID NO: 79292 - DNA, 345 bp, Zea mays
tttcttaacatggaattagtaaatgttttttaattcatggcaatataaatattataggttattagattatttatctccgattattattaataatactttcttttaagaagaaaagagaaaactaaaagaatatcactagtcgtaacaagaataggtttgtactagccaaaataaaggtgtccataagtataacacttatttacttagaatagtaaaatgcttatttatgtcataacaaccatgattatgttattaaagtccaattagtaatttacattaattcttagaatattaatgttagaagaattataaataaaaaaaatttagttatacgtataatttcta

SEQ ID NO: 79293 - DNA, 343 bp, Zea mays
tgagtaacggagaaaccacctctattattatccaccaccaaaagacggttaaactaactttttgagagatcactcacaaaatggtgatatcgtaatagaccatgtgagcacacatagacaattagccaatatcttcacaaagcccttagatgagaaaaaaatgtgagcttgggtataaactaaatattcttgattttcacaacatggatttcccccaaagctaaactagtcgttgcctaaaatctacactttcccgggtgcaccagacctccaacaatacatatttggtgccccactcaacccttgtcagactgcgaaatcaattgtcgttttgacgaaaact

SEQ ID NO: 79294 - DNA, 335 bp, Zea mays
tccttggtctcatctggacattgtttctaggagctaacttgcccttgatcccaaatctctggacacccttggtgggcgataccttaagataaacatggtctcccacctcaaactgtagaggctttcgcctcttgtcatgatagctcttttgcctggcctgagtagcttctaagttcttcttgatgatcctgacctttgcctctgcttcaagtaccaaatctggcccaaaaaattccctctctcccgcttgagaccaattcagtggggtcctacaccttctcccatataatgcctcaaagggtgccatcttcagactggactaatagctgttatta

SEQ ID NO: 79295 - DNA, 341 bp, Zea mays
ttgcatcttcccctacttgctgagctcccatcgtaagtgtgctcacccttataaatattttgatcagaagggtaggaagaagaaggttttgaagaaggcatcaaaaattctagatctagcgatgtgtcgatcatcttcctgtgggagatcacccatgagaactaatgtgttgtgatggaataatgtttaaggcaattatgtcgttgagttgtaataagtactctactcttatttatgttttgagcattgtctcttgatattttatacttgtgatgtcaaatgtgtggaaatagatcctgacacacatatcctatgcattcgattttgcccctaaaatcggg

SEQ ID NO: 79296 - DNA, 340 bp, Zea mays
tgtggaggttcttcatccccttattttctaagcggcgatgccacagccagcccatgcaagtcttagccattaagcatgcatctagaccggcctcttcttttgcaaaatcaactaaataaagtttgccgtctaatacacccttaaaagctagtgaaccatcacttcttctaaagacagacacatctatatttgtgaacagacagttatatcccatattgcacaattgactaacagatagtaaattatatcctagtgactctactaaaaacacattagagatagagtgctcattagaaattgcaattttacctaacccttttaccttgccttgattcccatc

SEQ ID NO: 79297 - DNA, 341 bp, Zea mays
tataatctgtcatggaccttttgtttattttgatagctgtcttctccggcgaggttatacccctctgccgcaggcttggttctagggtagcagccctaggcgcttgagagtgtcattgcaagggagagagagattggtttgataatgatcttgcttgatttattccctgctgccatgcggcttataaatagccctatggctaaccaacttctcctacaaactctcaactaactcctactttcttggacttatctgctgctaaccaactctccacaattctctcatcccaatcttattctctagccttatctcagctcatctcaatcttattctctagcctt

SEQ ID NO: 79298 - DNA, 341 bp, Zea mays
tgtgaagattcttcatcccaacgtgtgcttgtcggcgatgccagagccaacccatattagtcttagcaattaagcaagtatcgagttcaactctattaaaatcaactaagtatagctgaccctcgagtactcccttaaatgctactgaatcatcacttcttctaaagacagtaacacctatatccgtaaaaagacaattgtagcctattttgcataattgagaaactgaaagcaagttatagtctaaagaatctacaataaaaacattggaaatagaatggtaaggtgatatagcaattttaccaagtcctttgaccaaaccttgatttccatccccgaat

SEQ ID NO: 79299 - DNA, 339 bp, Zea mays
tagtatcaatttaggatgaatacatttacaccctaaaataaagtagggtatgataccgcagaagattttccaggtttagagttaaaaaagagagaacatgtttggtaattgcagaacaagtgggtatatctttgacaatgaattgccaaaccaaaggaaacttcatattgacaacaaaatggttttttcaataaataggaaatataacttttcaattccaatcctacacattacaaaaaaatcaataacaaaagacaatgtcctacatccatcgtggggtcaaatcaaacctacagccccctagaaaacatcaacattacctgtttcgtatcttattcc

SEQ ID NO: 79300 - DNA, 336 bp, Zea mays
ttgattggcaccctgtatctcgcttataactgatctgcagcttcatcatcgacacgttgaggacgaacaccacacgccatggccccgggcagcgccagcaccggccgccgcaccatgctggggaaacgacccctgcctgcgcctccgggtgggccatgttggatcacacggccccgtacgtctatagacctcgagtgttccatcaggtggacttatttgggacttggccacttgggagaatcgcgccaggagccgcatccccggccgccgtcaccaactgcaccccgggctccttgcatggccggcttcaaaccaccacaggaagaagagtagaag

SEQ ID NO: 79301 - DNA, 345 bp, Zea mays
tgaggaaggagaaaccgcagtaatgtgtcttactccttgagaaagatgttcctaaagcaataagtgaagaaatcaacatgagcttggaaaaagggataaggagatgcttcggatgcaatgacaagaaccatacgatcacttcttgtccactaatgataaatcaagcacgtgcactctccgggatgatccccaccaagaaagaagacaaatagcaagcatcatgtcaggttaagcgatgtttttgctacaagtgtggtgagcagggtcatctatccaaggtatgtaataaaggtaaggttcctaagcaagtaaatttgtctcaatcttatttgcttaggagaccca

SEQ ID NO: 79302 - DNA, 343 bp, Zea mays
tgagacagtccagtccatgtcccattgatacgagtagctgctatccacagtatcttgcacaagcacaacatcatcagcagtcaagacagtagaagagcggactatctgactgtgtaagtaatgggtttctgttgatatgaacagttttttctgcatgtcctggcagagaagctgttgagaatccgtggacatgaatgacacttcaggaagaacaaaaaaaaaatccataagatctacaagacatatggcaattataggctcctgacattgtacctgcaaaaaaacgtactttctaatataacaagcttctatggcacaccgcacactaatttgtcccctgtca

SEQ ID NO: 79303 - DNA, 345 bp, Zea mays
  unsure (1)..(345): unsure at all n locations
tgccaatacttgtcaaagcaacagcatantcttgcacagcagctgcaaaccataccagtaacctggcctttcgcatgctggggactggatatgattggacctttcaagaaagctcaagggggatatactcatgtactggtggcgattgacaaattcactaaatggatagagttcaagcccattgcttctttaacatctgctaaggccgtggaattcatacaggatataatattcagattcgggataccaaacagcatcatcactgacttaggatccaacttcaccagctcagaattctttgacttctgcgagcaaaaaagcattcagatcgagtacgcatctgta

SEQ ID NO: 79304 - DNA, 343 bp, Zea mays
  unsure (1)..(343): unsure at all n locations
tgtcttgccccattgnnggnnntcttcgtcttctctngggggcttcttttgatcttgagtcttggacttttttcttctttttatgtcttcactttgaggtgttgtatcctcatctttttagcccaatcctccttgcattttgatactttcactcatatgtcttttgctcaatattgactccacaatagtgatatgttgatttcaagctttccaacctttctagatgtgttgaaaagattcctcagagtaattagaacttatccaaagagtagaactattggtagttcatctattccacgtattacccctatttggttggaagtgagcttattcttacttagaa

SEQ ID NO: 79305 - DNA, 345 bp, Zea mays
taggccaccgggctggaggatattgttgttctctaggaagaacgactgaatgcagtaatccaatcagcacggtaccagcagactctaaggcgctatcacgacaaagctgtgcggcaacgtttcttttcaataggagacctcgtcctccgccgaattctaacgggggagggacggcacaagttatcacccttatgggaagggcctttcatagtagcagaggtcactcggcccggatcatatcgcctcactcagatggatggcacagaagttgggaactcttggaacatagagcatctcagaaaattttatccctagctgtgcttcaaaactgctgaggcaacaatg

SEQ ID NO: 79306 - DNA, 339 bp, Zea mays
tagacgaggctttctgtggatttgtttgatgtgaatggtggccattgtctgctgacttggcccaaagtcactagacccaaggacctggggggtctgggtattagtgatcttcggatcatgagctgggcgctgcgggctaggtgccttggctgcaaaaatctgataggactaagccatggtcggactttcagattcaaacttgcgacattgtgcaaagcttgttggctgcggctgttatcactcatttgggagatgggtctgatactctgttttggaaggatcgttggctgaatggcaaatgtattaaggaggtggcacctgctgtcttaggtatggtgc

SEQ ID NO: 79307 - DNA, 344 bp, Zea mays
  unsure (1)..(344): unsure at all n locations
tatcaaatggcactagttaatattccattactaggccgnaagaaactctcagttagaatctgcatgaaaatggatacaatttcaagtttcaggttcccaatctaataaatttataaacaacatgtagaataaaacaagaaataatataacaaaaggcatgaaaacagcaaaaacaaaaacataagcgggctccaatctgtacaaggggtgcatatgtaacaagctaaaaatcacctttttctagattacaaagcagctcctccgaacaaggtatataaaaatatggcagcacctgaacaccaacgagagagtagtaatcagggaatgatgaactaacttatgat

SEQ ID NO: 79308 - DNA, 309 bp, Zea mays
tgttcgcaacatgagagcaattagtttttctggtttgcagaatatttgttgcgtgtcggtggtggaactgaggaagtgaacaacgatggtgatgttcgtcttccagatgaagtatgtgtgccatataccggtgatgaccgcgaccttgacagattggtagatgactttacccccattctaaccaaaacctggttatacaagctacatcactttcaaaaccatttttgcttattcgaaccaatggggtgatttgattaattttaagatgatcgatcgtttcccacgggaaccaaataatgtccctttctt

SEQ ID NO: 79309 - DNA, 342 bp, Zea mays
ttaccaaatggatgtgaaaagtgctttccttttggaccaatcaaggaggaggtctatgttgagcaacctcccggctttgaagatagtgagtaccctaaccatgtctataaactttctaaggcgctttatgggctcaaacaagccacaagagcatggtatgaatgcctaagagattttcttattgctaatggcttcaaagtcggaaaagtcgatcctactctcttaactaaaactattgctaatgatttgtttgtatgtcaaatttatgtcgatgatattatatttgggtctactaacaaatctacatgtgaagagttcaataggattatgattcaaaagttc

SEQ ID NO: 79310 - DNA, 334 bp, Zea mays
tctaaagggagaacattttttggttctaacaaatgttcattttgagaaagacaggattcgtagcgcatgtcacgcagggaatcaagttggtattcatcatccacacaagaacatcatgacgactgacaggccactcgagctcctacacatggacctattcgacccgattgcttacataagcatcggcgggagtaagtactgtctagttattgtggatgattattctcgcttcacttgggtgttctttttgcaggaaaaatctcatacccaagaaaccttaaaggggttcttgagacgggctcaaaacgagttcggcttaatgatcaagaaaatt

SEQ ID NO: 79311 - DNA, 337 bp, Zea mays
tcttaatagggttggtcgttttgttttggttcaaagtgtccttagtttagttccccttcactttatgtgtgctattaaggtgcctattagcgtccttcgaattatcgatagaaataggtgtcggggaccataattaggggtacccccaagactcctaatctcagctggtaacccccatcagcacaaagctgcaaaggcctgatgggcgcaattcaggtcaaggctccgtccactcaagggacacgatctcgcctcgcccgagcccagcctcgggcaaagacagccgacccaagaggattcacgtctcgcccgagggtcccctcaagcaacgggcgca

SEQ ID NO: 79312 - DNA, 342 bp, Zea mays
tgtgtttacaagaaggaaagtgggttcgctgttgtatttctgatcttgtatgtggatgacatattattgattgggaatgacattcctatgctggagtccgtcaaggcttcactgaaaaagagtttttctatgaaggacttaggggaagcagcatatattttgggcataaggatctatagagataggtcgaagaggcttataggattaagtcaagatacgtacattgacaaggttttgaaacggttcaacatggaacagtccaagaaaggtttcatacctatgtcacatggtaaacaccttagccagatgcaatgtcctgcgacggctaatgagcgggagcgc

SEQ ID NO: 79313 - DNA, 335 bp, Zea mays
tcgatatctttgcctgtcccttcttcgttagcccctggcatccagtcagctatgaagtctgctagcgcctgtgattgaattgaagctttgtgcacgtagtcgatggtgaattcattgagctccgtggcccactttccaacccttccagtagcttctctgttcctcataatatccttcaaaggctgtgacgagggaacgattatatggtaagcttgaaaataatgccgaagcttcctggaggccattaatacagcatataacactttcttcaattctgtgtaatttttctttgataagcttaatacttcagagacaaaatatactgggacctggtt

SEQ ID NO: 79314 - DNA, 344 bp, Zea mays
ttaagcttttggatgagatctaagtttgtctttttttctggtttgtctaagtaattcaatttggtcatttttagcaagtgttggtgatgtaaaaccatgtgtatgcttgtcttggttttagtttgtggtgtttatgttccccacctctccttgtgagagtttgcattccatatcattacataagcatacatgtatttgtaattgacttgtagaacacctataagaagtggtgtttgaaggagtctactctagtggctgctgatcaagtggaagagccatctaactgtgtattggatagaaggatctagagcttcttcacttgcacaaatgcaagccccggtgaa

SEQ ID NO: 79315 - DNA, 344 bp, Zea mays
tcagcaacaaagacttcagtagacatttttttagcttcaacagttttctttggagttatgcttgaagattttatcgtttccaaaacatctagcacattaaccatcctttttcttttcggggtcgctgctggacccttttggcttttcatggcctcaatttttgttggaggacttaaaatttctaatgtttttgtttcttcaatcctcggttcttctattttctctgttgttggtgcttcggccgcttcttcgatttttggcattggagttggttctctagcttcgctggccgaagaggcctcaccaataaactcaggcactgtggccggttcaatataacgtgg

SEQ ID NO: 79316 - DNA, 335 bp, Zea mays
tgtcttgagggggagaagtgatttgttgcttaatgtgcttaaagcttgtccttgtagtgaggacaagcaccccttgttctcaaaggggaacgattttcttaagtgtctttatatcttttagggaatgcattcttgatgttaataatgctaatattatgtgattatggttatatattgtgtatttgtcgatgcttatgttttaattcatattatcatgttgtagcatcatcttaaattgatgataaatggtatctatgtgttgaagtggaatcagtacggtgcatattgcttatcttgatgatagatattcatgtgatgatttattttgttcatat

SEQ ID NO: 79317 - DNA, 333 bp, Zea mays
tttgcagaattgggagaggattttttcacttgggtgtgtctagaattgaatgctacagctcttgtaagtagttgaaaggtggaaaacttggatgacttgaatgtgggggtggttggggtatttatagccccaaccaccaaactatccgtttggtggaggctgctgtcgcatggcgcaccggacagtccggtgcgccagccacgtcaccaggccgttgggttccgaccgttggagctctgtcttgtgggcccgcctggttgtccggtggtgcaccggacaagttctgtaaactgttcggtgtgccacccgcgcgtgcactgcttctctgcgcgc

SEQ ID NO: 79318 - DNA, 337 bp, Zea mays
ttagtgactagagagagtgatttgtagtgttcatttgagctcttgcgcttggatcgcctcttttctttcgcattctttcttgagatcatactcacttgtaattgaggcaagagacaccaattgtgtggtgatccttgcgggaagtttgattcccaagtgatttgagaagagaagctcactcggtccaagggaccgtttgagagagggaaagggttgaaagagacccggtctttgtgaccacctcaacggggagtaggtttgcgagaaccgaacctcggtaaaacaaatccttgtgtcacacttcttatttgctcgagatttgttttgcaccctctct

SEQ ID NO: 79319 - DNA, 341 bp, Zea mays
tgaatgttcaaaatcaagaacttctgtgcaacttgaaaattgcaagaacatcaatgcgtcatctttattgattgaatctaagtctagctcctcaaataataccttttgcaaacattgtgccaaatatcatgcttcttgttgtttaactaaccatgcaaggaagaaaagtccacatgtaaaggtcaaagagatattgaaaagatgctctagcaatgatgggttaaagaaagttgaacccgagtacatgtccctaaagcccaacaatggaagaagggggattgggttcaactcatccaaggaaaaccctagcatagtgcataaggggtggagatcccccaagt

SEQ ID NO: 79320 - DNA, 343 bp, Zea mays
tctctttttgctgaacaatgaatatttttaaataatgctttatagaacaaattggtgtataatatgaggagaaaaggttgccctgttggtagcttacacaacaaatatttgactgttgttataagttctctctcaaaattataatacctaaaaatgttgcataaatcaatacccaatttcagaacggtatgagtaattgggtaaaccatgggcaatgataaaaacgagctggactatacatctatgtatataaaaatctctgcttgaaagcattagcctgatgccgtgcactttaccaccattacatacacacatattctcctatgtgcttgaaagcacaatg

SEQ ID NO: 79321 - DNA, 340 bp, Zea mays
tatcggtcaatcaaatcagtttgttttagaaaagctagagcttaattctaaacttgaagccgaagtccaagccaactcaaatttgaagaaatcattaacaagccttcaggataaatgtttgaattttagcaacaattgtatccaacaactaaagaagatcttttactcagttggagccagcagtgggaaatttaccccttcggatgaagatttaccaaaagccttcgatcatatcgaagctgaaattgaagaacttgacgaagttatagctgggcacggtgacttctgtgcctgggtagcttctcggggtactgctgcagcattcctgaaggctggctgc

SEQ ID NO: 79322 - DNA, 352 bp, Zea mays
acctatcccaactctagcttctgggatacagcgtttttttcttttcaggcgatcgtcttggctggaaaagcacacgtggttcagcgttcttgctggagaacagcctgaatacttgggtgtggcagaaccaacgagtcgtggcactactatcgagcgaggctgaatatgctgccagagcaaaagcagcatgtcaatgtattcggctgaccaagctacatggggaattggtggagattcacgcaccaaagggaatgctggtggctgacaacaaatttgctattgctttaagcaagaacccattactgcatgacaggagtaaagcatattgacgctcaaatatcatgctgcctca

SEQ ID NO: 79323 - DNA, 339 bp, Zea mays
tgtgaagattcttcattcctacatgtgctagtcggtggtgccagagccagcccatgttaatcttagcaattaagcaagtgtcgagttcagctctatcaaaatctactaagtatagctgaccctctaacactcccttaaatgctattgaatcatcacttcttctaaagacagtaacacctacatctgtgaaaagacagttgtagcccattttgcataattgagaaacggaaagcaaattgtaatctaaagagtctacaagaaaaacattggaaattgaatggtcaggagatatagctattttacccaatcctttgaccaaaccttgatttccatccccga

SEQ ID NO: 79324 - DNA, 339 bp, Zea mays
tggcgacggtcgcctgctgctcgatgttcagcctatcatcccgctacccgaagcgacccagttccagacgcaaatcgggctcaagcggcaggccgagcagaaggcgaaggtggagcgccacgagatacgctacgagttctggcaaagcctgctcgcgctcgccgctcagcatacgccgctgcatgccggtcggagcccttccaaggacaactggatatccgcctcagcgggcgttccgggcttcaacttcagctacaccatccggcagagcgactctcaggtccacctgtggatcgaggacaaccagagcttcttcttgcgcatggaagccgagcgcgc

SEQ ID NO: 79325 - DNA, 342 bp, Zea mays
ttgaagagttgactaaagaacatatttttctaatgtgctctcatgttgatttggtctaaaggtatgaatctatttcaattgagcaacataactccttattttgtgtagctcaattagtaaataggaatgccttgcttaaggaccaagtagaaaggctaaagattgaaaatctagcctttcaagaaaaacatgatatgcttctatgttctcatgaaaatcttatggatgatcatatcatgttagacattgctcatgaggttgtgatagaaaacttaaaatcccaacaacctcactcatgcacatatattcaaatttaaactgtattaccatgtgctaatgctt

SEQ ID NO: 79326 - DNA, 346 bp, Zea mays
tgacaacgaggagatgtcgctccttattttgagcttccgaaaaatcctcaagcaaaggagggggaaggactacaaaccccgccccaagagggtgtgctacaaatgtggtaagcccggtcattttatcgttaaatggcctatgtctagtgatagtgacagggacaacgacaagaaggggaggaagaaggaaaagaagaagtactacaataagaggggcggcgatgcccacgtgtgtcgggaatgggactccgacataatctccaccgactcctcctccgacgaggatgtcgcaaacatcgctgtcaataagggtcttctcttcctcaacgtcagccacaagtgcctc

SEQ ID NO: 79327 - DNA, 337 bp, Zea mays
tctaaagggagaacacattttatgtcttacaaatgttcattttgagaaagacagggtttgtagcgcatgccaagcaggaaagcaagttggtgcccatcattcacacaagaacatcatgacgaccgacaggccacttgagctactccacatggatctattcggcccgatcgcttacataagcatcggcgggagtaagtattgtcttgtaatagtggatgattattctcgcttcacttgggtattctttttgcaggaaaaaatgagttcaaaatgagaccttaaagggattcttgagacgagctcaaaatgagttcgccttaaggatcaagaaaattag

SEQ ID NO: 79328 - DNA, 339 bp, Zea mays
tgtcagtagcatatccttgttcttttgccacgaagtaatagtccctagccgaagagaagtataccatgtttggtccacattccgaactgccatgacgaaagatttggccatgacagctgcattgcctccatatgaagatatggttgcttcataactcatcaaaaactgcttcggatccgaatgcccatcatacatagggagctgaggtggcttgtatgatggaggccaagggatagcctgcaattctgctgccaaaggagaagcatcatcaaaggtaaaggtatcatgattaaaatcatcataccatccatcctcattgaataggccttcttaatgaag

SEQ ID NO: 79329 - DNA, 339 bp, Zea mays
tctaaagggagagcacattttaggattaaccaatgttcattttgaaaaagacagggtttgtagcgcatgccaggcaggaaagcaagttggagcccatcatccacacaagaacatcatgacgaccgacaggccgcttgagctactccacatggatctattcggtctgattgcttacataagcatcggcgggagtaagtattgtcttgtaatagtggatgattattctcgcttcacttgggtgttctttttgcaggaaaaatctcaaacccaagaaaccttaaagggattcttgagacgagctcaaaacgagttcggcttaaggatcaagaaaattagaag

SEQ ID NO: 79330 - DNA, 344 bp, Zea mays
tgccagtacttgtcaaagcatttttatctaccagcacagcatctgcagaccataccggtgacttggcccttcgcatgctggggactagatatgattggacctttcaagaaagctcaaggaggatacactcacgtgttggtagcaatcgacaaattcactaaatggatagagttcaaacccattgcttctttaacctcagctaaagccgtggaattcatacaagacataatattcaggttcggaataccgaacagtatcataaccgacttgggatccaacttcacaagttcagagttcttcgatttctgcgagcaaaaaagcattcaggtcaagtatgcttcggt

SEQ ID NO: 79331 - DNA, 344 bp, Zea mays
tctaaagggagagcacattttatgattaacaaatgtccattttgagaaagacaggatttgtagcgcatgccaggcggggaagcaagttggagtccatcatccacacaagaacatcatgacgaccgacaggccgcttgagctactccacatggatctattcggcccgattgcttatcataagcatcggcgggagtaagtattgtcttgttattgtggatgattattctcgcttcacttgggtattctttttacaggaaaaatctcaaacccaagagaccttaaagggattcttgagacgagctcaaaatgagttcggcttaaggatcaagaaaataagaagcgac

SEQ ID NO: 79332 - DNA, 339 bp, Zea mays
tcacgaagaggaaccttctgctattttatacaaacagcttcagccgaggaccacttctttctataagaccttcggcgacgaagcatagtcccaacaattgcaaaatgtctatacctgaacataacgacggatgtggtggtggcagcaggtgcctctcagatgggagccctggtactggtagggatgcatctagttcttcaccatcactaggagtaggtgccattttagatgaatctgtacaacaaaatcagcagtaagtgtagtaagtatgtgccattttagttgtagtttatcagatccaaacacacagctaaaattaggtcccccacgcccctgcgc

SEQ ID NO: 79333 - DNA, 335 bp, Zea mays
tgagttatgttattacagaccagttctaatagtgagtgcagagtagtaatattatacaaaccaagggaggcacagactcctcccgataagctaaaagcaaaagttcctatgtggaggaccgagtcctcccgcacttcagtcttgtttttcttctttgggaaccaccttggcacagaagcagcaaaagtctgctacttcctcacctaaaaacaacgaagggataaaccctgagtatggaattactcagcaagtcttacccgactaaagaaaagactctcaagggtatgctggttagatgggagtcaaggtaaggcttttcaatcatcaatgactct

SEQ ID NO: 79334 - DNA, 328 bp, Zea mays
tgctctcagcctccccgaaataacttagttttctcatcataaccatgtcatcctccgttatagtagattttccaaactcaatgtggctaggctttgttgggctcagaatactgttatcttcttcactatcattgtcactttcgcctccagctacaatctgttcagcttcggtattgggggcaccttcggcggtaacttcctctgacacaactagacccgatcgcttcatcacttctaaaattggtgctgtttcggctatttcggtctcttctccttcacgagacaccctagcagtggaccttaccatggccagttgtgttctggttct

SEQ ID NO: 79335 - DNA, 141 bp, Zea mays
  unsure (1)..(141): unsure at all n locations
agtggtgcccatcatccacacaagaacatcatgacgaccgacaggccgctngagctactccacatggatctattcngcctgattgctacataagcatcagcgggagtaagtattggtcttgaatagtggatgattattctc

SEQ ID NO: 79336 - DNA, 273 bp, Zea mays
  unsure (1)..(273): unsure at all n locations
actaagctgcttagcctctctttttctgcagacttaccgacatcccattanattatgaggtgagcctgatctaggattgactcctgagtactctaacagtgtatgggcctctttgtgtgctgtgacagatcanaagactactgatgatcctaggatangtgaatcttagtgaaaagatcttacgtgatccttatggagtactagtgttagtattataattattatttattgtttgccggtatgtgcatactccactatcatcatcagatcaat

SEQ ID NO: 79337 - DNA, 333 bp, Zea mays
  unsure (1)..(333): unsure at all n locations
ctcagctatncgctcattgcttcactgtgggtagctntgtacgttccggcagcanacaattatattttatgttaatagacaatgaaaaccaggaagcaaacctacccaataagcattaatttaatgtttttcacatagcatcactcacatcagagcaacctagcatcattgatcactgaccacagctcacggtctacacagtcacacgtcactgaccaagttgagtcactgtccacactcacggtctcacacgcacaacaggcaacacgcagcaacagcaaggcagcagtgcaggtgcagcacacagcaataacaatggcaacgtgtagcagt

SEQ ID NO: 79338 - DNA, 163 bp, Zea mays
tttctcaatgatacatgaagctacaattaaaatacatctgacatctgtgactttacattggatataaatcttcaattagaaagctaatcaagagactggaggcgacctttgagagaactaaagctcactaatattaatacacgcatatatggacttttacgca

SEQ ID NO: 79339 - DNA, 245 bp, Zea mays
  unsure (1)..(245): unsure at all n locations
tgagcctcngatgtagatggatcatcaaagctcgtgatctttctcgangccttcgatcatgcactcaaacttacaaaatgcccgattatcttctcgggggtcattntagtatatctagggaataccacgaataatngaacttgagtgggataaggaaaatgagagatcttagaataaccttaaccatttcgtgggtcgtccacttgacgctcccgagggtgcgcactgggttcaccanagtcttg

SEQ ID NO: 79340 - DNA, 216 bp, Zea mays
  unsure (1)..(216): unsure at all n locations
attcatatataaaaattcgacagcatctcctttgaaaatggcataaacgggggaagcaacaaagtatatatagatatcatgataagaaaacatataagacattaataatctgctagcaatgggaagacaaccataacaacaatgaactgaactaatcagtacgcacgactagttaaaaacaaacatncttngacaagaagtttctaattaaatcat

SEQ ID NO: 79341 - DNA, 164 bp, Zea mays
  unsure (1)..(164): unsure at all n locations
ctgatcttctgatactgtattgatgaaactacgcttgttgatacattcatnnccatttggtgagaagtccaggacacatgcncgtagcatatcttcaagtatttggttcacttctctcagtctgctcactggttngaggatgatangccgaactgtggagtaac

SEQ ID NO: 79342 - DNA, 220 bp, Zea mays
aggccataactagctgaccgagactagcatttcatgccgctttcgtgctagtacaacaactcctggaacctgcacacacttgtctgaccccctctgttgtgtggaaaccatgtcaccattataacggaaaaagctactgtctggaggtactctttgtgcatccatcgactgatgtcttactggggtaaagacaaaatatgtcaaagcaacaacagatacc

SEQ ID NO: 79343 - DNA, 145 bp, Zea mays
tatatctttgtgatgacttatttaacacttctcttaggcgttaggacatgacgacgctaatgtcccatgtgcctgcaaatcaacacccacaccattacaacaataaatatctatactttatggatacatgctctgaaccaccata

SEQ ID NO: 79344 - DNA, 126 bp, Zea mays
gtggggtcatcaaatctgactgtgattacgatcctgcacgcatgtcaaatgattttcacaacccctatgatgattatgagtttagccgtaccatcgaggtggctgtcttatttgaaataaagcttt

SEQ ID NO: 79345 - DNA, 328 bp, Zea mays
  unsure (1)..(328): unsure at all n locations
ctcagcttccatggtgccttcgaccgggcctgactgcctgtcagcctcacttctgtgagtggctccttattctgagcggcgcangcngcgctgtctttctatcaggctggtcagtggagcggcgaantgacgacgatcacttcggctctggngcgcgcgcgtcaggataaaggtgtcaggccanctttgcattatatactcctatgacttggtcggtcggtgcggcgaattggtcagagttgcttcttagcgaagacagggcctcgggcgagccgggaacacattcgccgttggaggggggcctcgggcgagacggagatccctccgg

SEQ ID NO: 79346 - DNA, 362 bp, Zea mays
  unsure (1)..(362): unsure at all n locations
ttctcggtactccccgaccacanggctaccgctgctttgacctcttctctcaccgggtcctcatctctcgccatgtggtgttngatgagtccgtatntncctaactctncaccaccacaccacccttcttcaaccnctgaccttttggctattctgtaaggctcttcctctcgcaagagacgcangtggacactctaccccttcactgtgagctgtaccccacctcatgcgcataccttgttggatacgatcggcatctatctcattctctaagtgggaaagtctgctttctgataaaggcaggacctttctagctgcactggcgcaaccattcctttatcgatatacggcgtatacttagt

SEQ ID NO: 79347 - DNA, 262 bp, Zea mays
  unsure (1)..(262): unsure at all n locations
actcgctcaggattgagtctgtgatattccagacaactttattctatttcttatgtcaaagctcttgtagaaatgaaggaaccttgtacatatgcatctgcactacattatctctgcctacgtgatagngaatctccaattcataatccttaatcagctcaagccatcttctcttgctcatatttagctctgactgggggaagatgcacttcaagactttatgatctgtataaatatgacatacattccccagcagataatg

SEQ ID NO: 79348 - DNA, 87 bp, Zea mays
aaccactataatttcaatccactcacgacgactaatcttctgttaaaggttgcacgaggttcacttctcctctcctgtatggattgt

SEQ ID NO: 79349 - DNA, 234 bp, Zea mays
aaaaatatgatccgtaattgtataggatgaaaagataaacatgacctctgcgtgaaagctcaggatttccgcacttttgctaagaccgtggcaagcgaagcttccgtccgtgtaacaacacttgtgattgtgaaagccaaacgtataacaaatttcttggttcatctattcaactccaatggacatgtacggcgacttctgctgtgtgtgcatagttctggagaataaattcaa

SEQ ID NO: 79350 - DNA, 134 bp, Zea mays
  unsure (1)..(134): unsure at all n locations
ctttatacagatgctggcaaccactgcttttcttcaccctcgaccctgngccacatatacctccatagaattgtttctcatcagatatctccaacatgctattaatgggaaatcatagctatgaaatacataca

SEQ ID NO: 79351 - DNA, 173 bp, Zea mays
gctgactactatccagtcagcggacatggctgctctacttctgaggattctttggacaatagacaccttcagggactttggaaagagcgtgctcatatatctcatgtctagtgggattggggactgagatatatttttctccaggtactgctttagatgacaactatataaga

SEQ ID NO: 79352 - DNA, 65 bp, Zea mays
ataagattcatattttgattccacatatgatgatgaaatgaatattattgaatcaatccttccat

SEQ ID NO: 79353 - DNA, 233 bp, Zea mays
  unsure (1)..(233): unsure at all n locations
acaagtgggaggagcacatcacagcaagaatgtgatgaccacttcaagacccctggagctgctgcatatggacctcttcggacccgtcgcctatctgagcatagganggagtaagtatggtctagttatttgtgatgactnttcccgcttcactttgggtgttcttttgcangataagtctgaaacccaagggacccttcagcgcttcctcangagagctcanaatgagtttg

SEQ ID NO: 79354 - DNA, 177 bp, Zea mays
accactgagctgtagacaatgcatattcaatggtcgcactcggtgctattttcaatcaactcactggaatcctggccaatggttgtctgaccactgctcttgttggggaaccctgtctaaattttagagggacaagctactatctggaatgtactctttgtgccccccatcaatttg

SEQ ID NO: 79355 - DNA, 224 bp, Zea mays
  unsure (1)..(224): unsure at all n locations
gcgagtgaaaaagcttaactcggatcaaacttgacaagtcttagttttaagctttatcacttaaattcttactctttatacaattgttgggtcttgaaatatgcatgaggtactgcacttatggggagtanttcaaactcanatcactcatgaaaacccctagtgcaaggcccaaaatgcaaattcaccattcgcctatttttctctaaaaatatctagcctat

SEQ ID NO: 79356 - DNA, 262 bp, Zea mays
  unsure (1)..(262): unsure at all n locations
acacaagaacattgtgacgaccgacaggccactggagctnctacacatggatttattccgcccgatcgcttacataagcatcggcgggagtaagtactgtctagttattgtggatgattattctcgcttcacttgggtattcttcttgcaggaagaatctcacacccaagagaccttanagggattcttgagacnggctcaaaatgagttcggcttaaggatcaagacaataagaagcgacaacgggacggagttcaagaac

SEQ ID NO: 79357 - DNA, 250 bp, Zea mays
  unsure (1)..(250): unsure at all n locations
tcattatcgtatgtgatattctatgcatggttaatctacttggtctcttgtatggcgtattggtgggttcctaatntcaatggatggatgtatgtattgttgcactcgcatagagaacgatccggttgaagagcccgaggaactcgcangagaagcccctgagcagcagtcggttggtggagggcaagtgtccttgacctatctctgtcctattcattctttaattcacctttccgattacacatttatg

SEQ ID NO: 79358 - DNA, 277 bp, Zea mays
tcagctttaagggacactttggactacaatgttatttgagaagacagatctgttctctgtcagcagaaccagtggtgttatcatcacacagacatatgacactgacggccctcgagctctcacatggcctattggccgatgcttactaacataacgggagtagactgttagttgtgggatactatctccttactgggtgtttttgcagaaaatctataccagaacctaaaggatcttgaatgactaaagagttcgttgagacaaaaataaaacacac

SEQ ID NO: 79359 - DNA, 161 bp, Zea mays
accagcagagttgcctctcgggcacggtcagcccaccttactctttagatcggaatctgcgcctgtaaaaaaggcaagaggctatctactcggacttaacaagcggcatagacagagtgcacatgcttttagaaactgtcactgcagcaaaaaagaacctt

SEQ ID NO: 79360 - DNA, 183 bp, Zea mays
  unsure (1)..(183): unsure at all n locations
tcaaatggactccgtgaaagagccaacggcattataatgacaggaataatgaagntaatcttcaaccaacccacnggaaaatggccagatcagttaaccaaagtggtgtggagccacaacacaacaacatcaaggtctacaggcttcactccattcaagttgttattcggtgacgaagcaata

SEQ ID NO: 79361 - DNA, 317 bp, Zea mays
tcttgaatacccggcttcgagaaaatccaccagccgtagtgttttactgctgaatatccaataaggccgagtcgcttgagcagaccattaaatgataacactatcctcgattggccacaggcactaaggacagtccagtctcatcaggtaggataagcaatcataacataacctacttagaatcaatatacatactgagttacaaagatatattgtcgaagacgaagactagtaaaatgaaagggaaccgtcatatctatgtctctagcagatgtcactcatgcaccggggaataggcaatctcacccagttcaaac

SEQ ID NO: 79362 - DNA, 396 bp, Zea mays
  unsure (1)..(396): unsure at all n locations
ctaagcttgtgactataccttgtcaaagggagtaaccctaaccctctgaaccctatcttctatataccttggtgaaggggggagagattaagaaaatgtgcaaatcatgtctaacccttggcaaagttaagtaacatattaatcaacaaatttggagaggaaacattgcataaagaccccttaagataccncaaatccattccttaagtagagaaagagctagagctctctaattctctctaagtcaaaatctacacctaatctatagatccaccgtgttcaccttgtatatggcaccaaaaccacctaagttctataccacaaatgtggcataccacctaaggcaacccctggataatgttgagaccgagcccttgacgttgacacgacttggat

SEQ ID NO: 79363 - DNA, 352 bp, Zea mays
  unsure (1)..(352): unsure at all n locations
gaatatacttgaatcacctntatacttctgtttataatataaaccctaattggaaccctggaataccctataacataaacctatggacctatgtgcatattagtccactcttggactaaagtgcacaaaccaagtcaaataagtatttgaagtcatttggttacaaatgtgtggacttgtaggccaaaatttggattntggacttaaatgcaaaatggacctcaattaggttctattctaagtctgaatttcagngatattggctcaactgtggagccttgtatctttcagaatatatgagatgttgccctatgtcaccacatcatatgtgtagcccaatcatagaaggaca

SEQ ID NO: 79364 - DNA, 307 bp, Zea mays
  unsure (1)..(307): unsure at all n locations
tcaaaggtcttcatctcatgctctntataaatcatttggttatcttcatctcaagctctagaaatcaacatttcgttgtcggtccatgctctagagatcaacattctgtccttatgggttgaggattcattgggtgtagccctcgagctttgagtggattactgaaaataatccactcaaaggtcttcatctaatggatttagaagtcattatcttatcttcgtctcatgccttataactcagcattatatcatcagcttatgctttagagatcagcatgttgtcttcaattctttgcttagaaatc

SEQ ID NO: 79365 - DNA, 136 bp, Zea mays
tggccaatgtgtgggcaaggggttgcacttttagctggagcgtaatcatagggggctatacatattgcggcaatgggaagggtaggtgattgcaactgatataagcatgggcttggagattcagaggaatatagtt

SEQ ID NO: 79366 - DNA, 372 bp, Zea mays
  unsure (1)..(372): unsure at all n locations
gtagcatatgcaagtaatatgcgaattgattcaagcctagctactggtgcatatgtttcaccgaaatccanaccttccacttgtgaatatcctttggccacaagtcgggctctgttccttgtcaccacaccatgctcatcttgcttgttgcggaagacccacttggttcctacaacattntgattatgacgtgggactaaatgccataccacgttcctggtgaagttgttgagctcttcttgcatcgccaccacccaatccgaatcttgtagtgcttcctctaccctgtgtggctcaatagaggagacanaagagtaatgctcacaataatgtgcaacacgagatctagttggtatccccttatgaatgtca

SEQ ID NO: 79367 - DNA, 254 bp, Zea mays
tgtgacgcttcttcgggagagaaagaatttgaccttcggcacctgggtggcaggaactgtccgaggcagacaaagagcggctatcagtcgggatctatgctcttcgacgcgggtgatgaagacaatttgggatgtattcgcgaccgcgccggagcaaacataatcggcactctgtctaagagtgttcggttcccgaagctagagtctgacattagtggtaaccgacgacaacacattgtcggtagcctattcta

SEQ ID NO: 79368 - DNA, 414 bp, Zea mays
tactcagctgagtaggcctattacccgctagacacatcatgtccttcaacatcctatccatattcacacttgcaggaggtgctatatcatgataaatcctacaacacaatgtcaaaaacctataacgacgagccagtcaaacgtgacatataaaccaaacgaattataatttgtgagagagggagtatctaaagttcatgcgttcgggtagctaaagaagtagatcgtaatctataaatgtacaatggaaacattgagggacttgcgacaatgagatacaagcccggtagtggaatgtgatgccagcggtaacaaccgctacggtgtaaataatcgtcctatttctctgtgctaccaaccaaacacaatactgagattcactgcatcttctcaacatcacctgcaatcaccatc

SEQ ID NO: 79369 - DNA, 310 bp, Zea mays
tatgcatgactgcttggctgacttgtgagatgcacttcgctatttccttttgcttctggattgtaatatggcacgtactggcggtatggcccttgctttctacacagaacaagcgaaacagcttacttgcgtgatctccgaatcttccgccgaagcccctggcgcctctgcctcttggagctggtggccggaagatagtttgttggtcgcccgaagcctgtgaagagcactgcggtctgttctgctgactccgcttatcatcattctgagtagaattgcggatggacctaacatgcctccgataggatct

SEQ ID NO: 79370 - DNA, 263 bp, Zea mays
  unsure (1)..(263): unsure at all n locations
gatcacttcatcaaaacgaatgttcctacttcgagatgcttgcttcaacccataaatggatttctgaagattgcatatctttccagcattgaacggatcgacaaaaccctcgggctgtatcatatacacgtnctcatctatgtttccattaaagataagctgtttgacatccatctgccaaatctcataatcgaaatatgcggcaatagctagaatgatccgaatagaattaagcatcgctactggcgagaatgtctcgtcat

SEQ ID NO: 79371 - DNA, 234 bp, Zea mays
  unsure (1)..(234): unsure at all n locations
tcttgggtggcgaactgcttgtcgttgtctactgctagctcagacggtactccgaagcggatacaatgttctgcagaagaattttgtgcagtctttgatgtgattgtggaaacagccctcgcttcaatccatgtggtgaagtattcgacggctacgaaagcgaacttaatgttccnctgagcggtgggcatgggcccgacaatgttcatgccacatcgctggagaggccatgta

SEQ ID NO: 79372 - DNA, 388 bp, Zea mays
  unsure (1)..(388): unsure at all n locations
ctaagcttctgaactggtatagaatataaacaagttaagactgacaccatcctcgtctacgtttaattacttgattatggtgctctgcaatcaagtaagacttgatgaggcacagcttctnttagaacacatggttagcanaggatattgtctaagtacatcatttactatctgcttggatgcatacttcagagacggtaatgcagttggcgcactgaaatgctgggatgatatgggcaaanattgattgcagactgattttattgccttctcagcatatattaatggccgaagccgattagattacgtgaatgatgcttatcangcatttgctgagatgacgagcagaggaattgtaccatacaatattacttacaactgcatcata

SEQ ID NO: 79373 - DNA, 544 bp, Zea mays
  unsure (1)..(544): unsure at all n locations
ctaagcttaccgagctacaaaagtcgttcctatagagcgcaacgtaagtttgccgaagctacaaatagcattttctaagagagcgcagtgtaaagtttctgctcaaaagtcgttccaaatggaatgcagagccaaataccgccgaaatataaggccaagcgcgaaacgtaacgcgaataccaccgaatataagcgaaaagtcaaagacgttctaagggatgcagaactacaccgtaaatagcggtgaaccgaaaataagcggcaagagatttgatcgccctaaagaacaaagagattgattntagcgtgggtgtgtcttcggcattagcatcattctttgcatcatatcatcgcatcatatcgcataacatcacatcatacattatatcacatcaataacacgaattggaaatgaagtcgatcttcggagaatgcttacaaaacaaaatggtccatgcacaaataactgagagacatcttatcactctgtatggagaaagatctatgttacacacattgagtattttcggcgcagttctaatat

SEQ ID NO: 79374 - DNA, 319 bp, Zea mays
  unsure (1)..(319): unsure at all n locations
gagtagcagcctacagtgagatgataggaacatacatcatgctacagcgagaaaaaggaacaacatcagaaggtaagtacatatgacaatanggtgagaaatttcagttctacatgtgttatcattacttacaaaacctaaaaattgagacagcnacatgaacccataaagacagagacttttcaatctgcattatggagatgcctggtggcggagatgggcttcttgactcagcgacttggtggtcaatgatgtccactgattatatgtaaacatatgtgtgtgtaataatattacatgaaaataggtattctctcta

SEQ ID NO: 79375 - DNA, 279 bp, Zea mays
  unsure (1)..(279): unsure at all n locations
tgcaaaacactgtanacaacacaacttgtnttgaaattttgcctattgaatgcactctatgtgtgtcaaacatatgcaatgccaatgctatgatgccattgctcaagtttagttatagtaaccaccagggtgttacatggcggagcggagttcgccgtcttccgggacttatcccgagtccgagccctgtgtcgggcggagcggagttccctatggtgccttcggcagggcctgactgcctgtcagtctcactctgtcaagtggcaccgcagtcggagt

SEQ ID NO: 79376 - DNA, 339 bp, Zea mays
  unsure (1)..(339): unsure at all n locations
tactaagctgctntcaccgatgcttgtgtacgcgccgagcacatggcagtttcggacctctttctttgcggagagtgagggccaagagcacatgctagcttgaagacctatggccccgtgctatgagtncagatggcacatgtggcggtctgggacccgcttgcggtggtctagacatcatacgtggaggcttatgataccacctgggggtccagacttatagtagtagtcagtggacatattcacccctatgacacgtagcagcaccggacctattcctgagtggngagcgggtctcaaggccaatggtnccgtcatatgggtatggacccatgggtc

SEQ ID NO: 79377 - DNA, 374 bp, Zea mays
  unsure (1)..(374): unsure at all n locations
cagctgccatactgtaagcacaaccatgccacgcacactactaccatccagttcttggctttccatgcgggactggatatgatggaccttcaaaaactcaaagggatatactcatgtttggtgggattgacaattcctaaatggatgagtcaagctcattgttcttaacctctgcaaggcccgggattatacaagacatatattaaattcgggataccaaacattatcatcactgacttatgaccaacttcaccagttcagaattctttgacttctgcgagcataagagcattcagatcaagtacgcatctgtagcacatccaagagccaacgngcatgtcgagcgagccaacggaatgatattggaggcactc

SEQ ID NO: 79378 - DNA, 357 bp, Zea mays
  unsure (1)..(357): unsure at all n locations
ctaagctttactatgatttgggcacttggntngcactctaanctcagttctagcanaaagngtgttttggtgctagtctgagatgaaacacgaaatctgaggagaagaggagatagagatgaagttctgagacttagtcaattagattactctctcaatatgtttgtctacgtcacagggaggtgcccaagaaattccaaatagattgaaagaggaatcaaagaacaagctcttttgagttgttgtctgtgagcaccagaccccctacatgagttggtccggtgtgcaccggactcccaacagggaactgtatggtctcggtaatttcactaaaatngcccggactacctacaatac

SEQ ID NO: 79379 - DNA, 273 bp, Zea mays
  unsure (1)..(273): unsure at all n locations
ctaagcttntatatanaggctgagcacagtgcaccacgcatcacggtcacactgtttcacaacggtctggtcatgtgcgcagtctgcanggtggccctggcgctgcttgccagcggaatggacatgacgcaatatatgccgtgggggcacatcatctgtcagaatggtggacaggcggcgtgtcctctctgcaataaatgcggaggccgcgcggctaagatccattatgtcatgctccgcccgctggcctacgtcacagacaataagccatgt

SEQ ID NO: 79380 - DNA, 401 bp, Zea mays
  unsure (1)..(401): unsure at all n locations
ctaagcttaagctctttgacatagaaccacttcatctagttntagcanagatgcaataatgcatgtgtgatagtntaagagattaaactacgtgtgaagcagaganttatgcataggacatgctctctcttncctatatatggtagatgcaaaggatgcttattagaagaagatttatgtacaagtttaaatgataggaagtggtttacccttttgaccttctcatagagacgctctcttcattgtgctttgtcttagtcttaagtgcttaagacctatactgcaatgacaatatatggaaatacttgcacaagagagagttctacaactagtgatcttnttcaagctattggtagcatatatcacatggatcacacgttgcataaatgaatcatgaattc

SEQ ID NO: 79381 - DNA, 309 bp, Zea mays
cacatatgtgttgaataaccactgttacgatatgtattatatctggcacatggcatgaattataatatgcagctaataggattctgaagatccgtcatgagatcctacgatgactcatatctttgaattataaatatgcaacatatatatctagtaccgaataatacatctccgacgaatgaacactctcttatgtagagagaatatcgtctatttgagattatagtctctacatggaacctttccagaagacatagagtctgtgttcacaccaaagtttgataatccctattaaggataaagaccata

SEQ ID NO: 79382 - DNA, 385 bp, Zea mays
cacagatggattccacggctagaaaggacataattaagtagagagtcgatggatatagcttcatggctactataaaaataagatcattgtctgagagttgaaaaccaccagacactgtacgctctttttccttccaataatttgctcttgccaatgaccacaaatgtaaacgggtgatcaattacataggcctataatgaaattacagatatgtataactacgaaacaattgcaataaatggacatggacttcttgtagtcattgaacaacattttataaatactggcatacattgacaccaactatgatgccatcagataatgataaccgacttacttcattactactactcctattcttactgatccttgactagagattctg

SEQ ID NO: 79383 - DNA, 416 bp, Zea mays
  unsure (1)..(416): unsure at all n locations
atttcacaactcgatgtggccatgaatggaatntattgngcacagtattgctgaaagagcactatatgggcttgaatgttgagccaatcttcttnggttattgaataaatgaggctcttcaatatggatggagtatgctgggtagcttatgaaattaggtatttaggtctttgaatggcgcaaggcaaggcctgtgcacccatgcattgcccggtgcgcatcttgatacaatggctaagagataagcaaactcattaatgtcgctttgtttgatgcacataggatgcagcctctctaatgccatctcccaccctatgaattgcactctgggatttgctcgttccaacttgagtgttaaatgctgacgcgatgtatatattcatggtgacttgtagtattctgaatattgcatctgg

SEQ ID NO: 79384 - DNA, 229 bp, Zea mays
tactcgcgctcaacgacagttgcaaaattgcacttgtgatgggacactctcatctgggaatcacgtcaagcactagtcctgcgggcggcccattcaccccctgagctttgcatactttttgaggtgcgcagaaactgagttagctgacctggcaaatgcgcaaactgcgtactgacagctgcttcacaaccctgctcgacgtctgttgacctaatgttgccttgtatgc

SEQ ID NO: 79385 - DNA, 274 bp, Zea mays
atgaacgcatttatcgtatttattatcgggagcctagatgttatgatctaagcacactctggggacaaataaattgaatgccgtatgggtaatgtaccttgagactgcaagcatacctgaaactgtggccattcatcttgcgtccacatgaatggagattaatatgactatcgagatgccagacgcaaggatgattattggtatatgacgataccaatcgcattctccgcaagaaaatccgatacttgcggtatcatgtcgcttattgatggtc

SEQ ID NO: 79386 - DNA, 370 bp, Zea mays
  unsure (1)..(370): unsure at all n locations
cacatgccagcacagcaactacagaccataccagtatcttggtctttcgcatgcctgggactggatatgattggacctttcaagatagctcaaggtggatatacccatgtattggtggcgatggacaaattcactaaatggatagagttcaagcccattgcttctntaacctctgctaaggccgtggaattcatacaagacataatatttagattcgggataccaaacagtatcattactgacttangatccaactntaccagttcagaattctttgacttctgcgagcaaagagcattcagatcaagtacgcgtctgtagcacatccaagagccaacgggcatggtgagcgagctaacngaatgatatt

SEQ ID NO: 79387 - DNA, 185 bp, Zea mays
ctctggggccttatagcgaggcaaggcaacacccgggcagggacacaccggtgacgcgctacgggcagtcggctcgcggcagcagtatgacactggctcctcgctatctttcaacctatggtccgactttcgactctccaatccgccacattgtcttgcatactttgttcttaacactgatgatt

SEQ ID NO: 79388 - DNA, 368 bp, Zea mays
  unsure (1)..(368): unsure at all n locations
ctaagcttgagccatgtaagtatcatatgctaataatataccaattgactcaagcctanctacgggtgcatatgtttcaccgaagtccacaccttcgacttgggagtatccctcggccacaagtccggctctgttcttgtcaccacaccatgctcgtcttgcttgttgtggaagacccacttggctcctacaacatcttggntaggacgaggaactaaatgccatacctcattcctagtgaagttgttgagctcctcttgcatcgccaccacccaatccgaatcttgtagtgcttcctctaccctgtgtggctcaatataggaaacacaagagtaatgctcacataaatatgcaacacgagatctagt

SEQ ID NO: 79389 - DNA, 240 bp, Zea mays
aatatcaaggcatggatgtatttacacggctgcgcctgtgcctataatatatgaacagagcattgactgttacgctgcttgtattactacacccactctgagctcacaccttgtgtcaaccgaaagacaaatgaattattattgtattaatgtctgacatgaaagataaagaaaatatctgacattcaatataatggctatattatttccatagttcatatgctctttactctcatatat

SEQ ID NO: 79390 - DNA, 347 bp, Zea mays
  unsure (1)..(347): unsure at all n locations
ctcagctggggggggtccttcatgactctgcactgaatgattcttgctttttggcctatctgccttcttagtttgcgggctcttttcttctgaaaagcttcgcagatgtggccccagggacttatcttgacaggcaaagattcagtcattacctttagaatttcctccacgtcggttgacatgcagatggtgtngcaacagtttcttcttcttcgtcaattgccttctacttcggagctgtagcttttctcttcttcgaagcatctatttttggctcaggcttcaactntttctttttaaatggtctctcatcgctttanttagagcaccagccactctctttctct

SEQ ID NO: 79391 - DNA, 328 bp, Zea mays
  unsure (1)..(328): unsure at all n locations
tactcagcttcttcctcgcggactcggctggccgaaccagccgccgcggatcccgcgcgtgggccaagttctncgctcacctgtcagctgactggtgggtccgcttccgctgtggcatcttccgcggtgggtagtaccattgcgccgaactccccgataactactctacaggccgacgttgccttcggttcttcccctgccctatatatgctagcgattttccctcgccatcaagcgtgcgaaccgagctaccatcgaagcagtgtggcgaagggtcaagctcgcgggttgtgtccgtggctttggcggcggcgtgatgcctcgatgc

SEQ ID NO: 79392 - DNA, 298 bp, Zea mays
  unsure (1)..(298): unsure at all n locations
ctgcacacatagctcatttatatacctttgatcatatctcntttatatgctatgactaatgtgttntctagnttatctcanacgaagccatatgtatatcgaaagggaatcggagtcttccgcgaataccaaagctctcactccgtaactcatgcttcgtcatcactccgagcaactctctatatcttgtggagaaatgagcatcatagataaggacttcatcctttggggagagagtaaagctcaaaagctaaaggaccggacttcatctttggtataatcttaactcgttacttat

SEQ ID NO: 79393 - DNA, 438 bp, Zea mays
  unsure (1)..(438): unsure at all n locations
ctaagcttcgcgaggtaaaantttggcggaaacaggcaatagcatgatgctgggtacttacaccactcgctgttatataggtgcaggaagaagcgaacgccgagtttacacaggcgccacccgcttcgctcgtgcgcggtggaccgaggacaacagaaactctgaaggtgggaccgtggtgctggaaataaatcgtctcggaacgactcaggaaaggtttttgaccttcngtcncgaacttaagagacttttacggacaagctgtacaaaacgactacacgcaaaggctactgtggttatgtcgcgcgaagcttacggaaacggtaaatgggacagatttcgactgatcaaagaaagctcaagtgcacacccaactggaaagaacttgatgtccaaaagaacactaaataaagcataactctgaggttaatatacaag

SEQ ID NO: 79394 - DNA, 213 bp, Zea mays
attcataaacgacatatgggagaagatggcaacccttcttcggaaggtggccgtagaggtgtgtggagcaaccaaagggagtgaatgcgatgctaaatataccggctaccaactatgtcgtgctcgatggcacatgatctaacgctcatggacgtgacatatcatacttgcccctatggtagctatgattacatactagtgaaggacatctac

SEQ ID NO: 79395 - DNA, 321 bp, Zea mays
  unsure (1)..(321): unsure at all n locations
tcttttccttcnncctttcctctttgcgggactcttccgatgaagccttcacgtggctcgtattgtggctttcgccggtctacatcttcttcttggcgtgatctnccgacatcacttcaagcggttatgctctaatgaagcaccggtctctgataccaattgatagtcgcctataggggggtgaatagggcgaaactgatattacaaagttaatcacaactacaagccgggttagcgtnagaaatataatcacagccaccagagagagtgcataacaaatcgcaagcgaataaagagtatgacacgcggatttgtttaccg

SEQ ID NO: 79396 - DNA, 334 bp, Zea mays
  unsure (1)..(334): unsure at all n locations
tgttattctgagaaagacaggatntgtttcgcatgccaagcatggaagcaagntggtgctcaccatccacataagaacatcatgacgactgacaggccactggagctcctacacatggatctattcggcccaattgcttacataagcatcggcgggagtaagtactgtctagttattgtggatgattattctcgcttcacttgcgtattctntntgcaggaaaaatctcatacccaagaaacattatagggattcttgagacgggctcanaacgagttcggcttaaggatcaagataattangagcgacaacgggacggagttcaagaactcac

SEQ ID NO: 79397 - DNA, 393 bp, Zea mays
  unsure (1)..(393): unsure at all n locations
acatgtgctaagcggcgatgtcacagccagcccatgctagtcttatctattaagcatgcatctagaccggcctcttcttttgcaaaatcaactaaataaagttggccgctaatacacccttaatagctagtgaaccatcacttcttctaaagacagacacatctacatgtggtaatagacagctatatcccatatgacataatngactaacagatagcagattatatccaagactctccactaataatacattagagatggaatgctcattaganattgaattntacctaacccttttaccttgccttgattcccatcaccgaatataattgaatcttgggaatccctattcttgacgtaggaagtgaacatcttcttctcccccgtcatatg

SEQ ID NO: 79398 - DNA, 320 bp, Zea mays
  unsure (1)..(320): unsure at all n locations
ctaagcttatgtagctggctaccaaagtgagaagtaaactgtgtgcctctgtccgatattatcttcttttggtataccatgcaagcacacaatctgagacatgtataactctgccaacactgcactgttataggtggtctaaactcggtatgaatatgggccgcctctgntataacggtccactactacccagatggagtcgtaaccagctcgagtgcggngcagaccaactataaagttcatcccaatctcatgccatttccactgttgataaacccaacgggtagaaaggtgcccaatctttcgatgagagatgatgg

SEQ ID NO: 79399 - DNA, 393 bp, Zea mays
  unsure (1)..(393): unsure at all n locations
ctaagctttatattgctaagaggcattctatgaatntgaaactccagtatgattgtttactgtatctgttctttgttgctggacacaaatgagcgggtctgtccactggttggctctatctactanatggccgaattggctcttccaactatgaagactcttgtagagggataaatagtcttacttccagcagaatgtcatgatttttggctgagtagttcgngagatatcaaattttgaagttaactatgctactgtctgaaacagattcngtcagttatcttgtcagatgtgttataacttatagatggcagaatttaattatccattgaataccgaagttgtagagtatttngtgtagatactcctagagtatttgcttgtatcaccact

SEQ ID NO: 79400 - DNA, 414 bp, Zea mays
  unsure (1)..(414): unsure at all n locations
ctcagctgtgagatcttattccacatgtgctntcggcatgcagaccacccatgttttttatcataacaagtgtcagtcagtcttcaanactactaagtatagctgacctctacactccttantgctattgaatatacttctttaagacagtacacctgatctgtataagaagttgtacccatttacataattgcaaactgaagcaagtgtatctataaattacaaaaaacattgaaatggatgtcaggaatattcaatttacctaatcttgaccaaccttgatcccatctcaatgtgatactcgtgggatctggctttctcgagatagacatctctctcctgcatatgtgtgaccgcttcatatcactgacccaagctaaccacaacagtatctgattagaccaatggttggct

SEQ ID NO: 79401 - DNA, 361 bp, Zea mays
  unsure (1)..(361): unsure at all n locations
tctaaagggagaacacgtgataagtctaaccaatgttcattctcaataagatagaccttgttcagcttgtctagcanggaaacatgtgggaggctctcatcacaccaaanatgtgatgacaacatcaagacccctggagctgctacatatggacctcttcgaacctgtcgcctatctgagcatatgaagaagttagtatgggctagttatcgttgatgactcttcccgcttcacttgggtgttctttttgcaggataagtctgagacccaaagaaccctcaagcgctctctaatgagagctcataatgagtttgagctcacagtgaagaagataangatgcgacacgggtccgagttcaag

SEQ ID NO: 79402 - DNA, 228 bp, Zea mays
  unsure (1)..(228): unsure at all n locations
accgcgcatcatggtattacacatctctactcntttatgcataatgagaagaagctcgtattgcaccccatgtnccncgatgctattttgaaagatgaagttgctagagctcgcaaagagaanaatacatctgttcataataaaaatctatgtgctgcaaacgagttggtacaacataagagtgacaattctaaatctactcaagtgatgaagacagatatacaactg

SEQ ID NO: 79403 - DNA, 435 bp, Zea mays
  unsure (1)..(435): unsure at all n locations
tatcaagtgtgagttctggatcagcgaacntctattcttgngtcatattatatatcgagtattactanctgcggatccaaagaaagtagcagcgattctcgactggacagcaccacaagatgtccagcgaatcaagagtttcactgggatggccggttattatcgacatttcatttgacgtttctcctagattgcaaaccaatgacagccttgctagcacagaaagttgagttcatatggaccccaacgtgccaagaatcatttgagatgttgaatcgaagttgacatagcaccgtattggtctgccaatgtcacagccttctcttatactggatgctcgccaccgactgcatgtgtgtatgcacgatatatatatggcatcatctctacatcgaagtatgaaaaatatctctcatgacgactacacagggtctg

SEQ ID NO: 79404 - DNA, 351 bp, Zea mays
actacttgcgctatcgtacaattaactattcattacttgcattgttaagcctggggtgatcaacaccccagctacagctgtagcagattgcccttaactgtatttgatcggcaataagaattacaaagggaaaatactttacttaaatgacttataatttgttggatcttaaactaaataatgttatatttaaacataagtgagtgaaaccttgaagagaaaaggtaagctatcagggaaaatcttaagtttatagttgcggacagatattataagaccccatttacaatcattgtgtgaagaaacgcttacattgaatctgtatcacgaatcagctgggagattatgtga

SEQ ID NO: 79405 - DNA, 292 bp, Zea mays
  unsure (1)..(292): unsure at all n locations
cttgaagcctgcttcgtcaagagaaaaaacttctgaagataaaagtatntaatttccacanattcagaattaaatggccagagtacgttctaccgctatggttgagcatgaggngggcgaagctgatagttcggagactgttcccatctccgaagcgatgcaaagatccggactggtaacttcggataagatccccagtgatgatgcggaacaagcagaacaagcagttgccgaagcagaagaagatattgaggaaactgatcccgaagatgattatcgcattgccatgcct

SEQ ID NO: 79406 - DNA, 253 bp, Zea mays
  unsure (1)..(253): unsure at all n locations
tctgctcaccggagtttatattctcggcgcacgtggccgggtacccatgcgccatttcgattaatgacagaagcctctcatcacaccgtgaagctcaccatgccttggatggacttgtcgccgtggttgccggacacccgccgcnacgaagacacccgctgcgcacgtgaccgacgcttcggcatgcccgcgtcagccgacatcgtgtgaccgcagaactccggaccacccgccttgcggaccttttccgcgg

SEQ ID NO: 79407 - DNA, 390 bp, Zea mays
  unsure (1)..(390): unsure at all n locations
tacagctgacaatcccgtancctctgaagtactttactcaaatgctcctcatgctcttgctcattctgngaatatataagaatatcatcaatgaataccaccatgaacttgtcgaggtagtccatgaacacatttgntcattantgtacatcgaagtaaatctatcgcattattcaataccgaatgacataatcgtgaactcatatagtccatacttggtgatgaatgttgtcttcgatatgtctgaaggtcagattctgagctgatggtagcctgacctcatatctatctntgagaacacactgactcctctcaactgatcgaataaatcttcaattctgggcaagtggtacttaattcttgatagaacctcattcaaagctcgataat

SEQ ID NO: 79408 - DNA, 331 bp, Zea mays
  unsure (1)..(331): unsure at all n locations
tagaccttgtgcagcttgtcaagcatgtaaacaagtgggaggagcgcatcacagcaagaatgtgatgaccacatcaagacctctggagctactacatatggacctcttatgacccgtcgcctatctaagcatatgatgaagtaaagatggactacttattgttgatgactattnccgcctcacttgggtattctttctgcaggataaatctgaatacccaagggaccctctagcgcttcctaatgagagctcaaaacgagtttgagctcaatgtgaagaagataaggagcgacaatgggtccgagttcaagaatcttcaagtggaggagta

SEQ ID NO: 79409 - DNA, 376 bp, Zea mays
agatctatatgctgcaagctgtgcaagtgtattttctagggtgaaactcgcaagggctagagaacactgacataatcatatgatcagattgctttttaaaggtttcactcgctaaccacgagattgttgggagtggcggtcttttcatgagcagaacagacaacgtagatagcaagactaccacctatatagctagacaagagaattctcaacctaacaagactatcataacaatgcaactgtcattattttgcagttcataaatagcaatacatcacattattcacaatctcttattatcggaataaatgtgagagaagcatgttgatccacaacatacaattatgatgcgacagtcatgatgcatgctcattct

SEQ ID NO: 79410 - DNA, 321 bp, Zea mays
  unsure (1)..(321): unsure at all n locations
cactctctgacagagagctgataatcttcgctctagttcgatctcttatacatcctaaggcttcttcngtaatttcgccaaagagcatcgctcctggctagtagccacaggatatagcatactcctgtagctcctctttcacagacctggataattcttgaccaattatattttgaanattgaagcctttttcttctgaaatatcttcggcaatntccttccctttttcaagcactgtggccaggacttcttctatagaagcaagagtctcctccgcagccaaatccaagagcactctatcgatagcagataatgtactct

SEQ ID NO: 79411 - DNA, 208 bp, Zea mays
  unsure (1)..(208): unsure at all n locations
catcanaatccaaaccttcgacgtgtgaataacctgtaggcacaagaccagctgtgtttctctgcaccacaccatgctcatcatacctgctgcggaatacccgcttggacctacaactcnttgattatgacgtggaactaaatgtcatacctcattcctcgtgaagatgctgagatactcttgcattgccagcacncaatctggatct

SEQ ID NO: 79412 - DNA, 324 bp, Zea mays
gattaccgagaaaagaccatttcatctctttacagaattattgagacgctttcaaactcacgaggcttatgttcaaaaactcaagaagcagcctggtgtactactacaaactgtatttgctagaatttacaaatcccaagaattactttaacattcaaactttagctcgatttacctgacttgcattaccacaactgaatattaaaggccttatccatgagtccaaacatgaacatgctcttgcgttttgtttctctacctgcgcacaaagagtgacctgactataaatatacttcacaatatacttcgcattcatctcaactt

SEQ ID NO: 79413 - DNA, 340 bp, Zea mays
  unsure (1)..(340): unsure at all n locations
gtcaagcaacaacatttaccagcacagtagctgcagaccatacctatatcatgtgccattgcgtgctggagattggacatgaatggacctttcaagaaacctcatgtgggctatactcacgtactggttgccatcgacaaattcaccatatgtatataggacaaacncatgtgctttttaacctcactcaatgcagtggagttcatacaagacatagtattcatgtttgggataccgaatatcattataactgacctgngatctaacttcactagctctgaattctttgatttctgcgaacaacggagtatctatatcaagtatgcatcagtagcacacc

SEQ ID NO: 79414 - DNA, 283 bp, Zea mays
  unsure (1)..(283): unsure at all n locations
ataaaatgagcagagcttcatatcaggcattggcaattggattgcagacgacgtgctttaccangtattcatacattcttcagcagttaggtggtgtggctcgcataaaatgtagcaaaattaaatttgattcnttttgccagtcaaggatccatccattacagattgcttcgaatctacctatggagagttgtgaagcactgcaccagagtatcgaagaggtgggtctaatgggacatcactatgtacctgaattactttctaccgaagtatgtatagcata

SEQ ID NO: 79415 - DNA, 365 bp, Zea mays
  unsure (1)..(365): unsure at all n locations
taagcttaagggagccattagactaacaatgttcatttgagaaagacagattgtttctcttgttagcatggtagcaagttggagntcatcatccacacaagaacatcatgatgaccgagaggccgctcgagctactccacatggatctatgtggcctaattgcttatataaacattggcaggagtaagtattgcctctgaattgtggatgattattctcgcttcaattgtgtgttctctttgtaggacaaatcacaaacccaagagaccttgaacagattctcgagacgggctcataatgagttcggattgagaatcaagaagatcagaagcgacaactgaacagagttcaagaactctcaaatt

SEQ ID NO: 79416 - DNA, 204 bp, Zea mays
gtttgcaactccttattgataatcaacagtttacaggaccagattacaattgaaatatacgtgatcactcctaactaataaagaaggatgttgaaatgctcaacttgatgcatatttagaaacatccttgtatctaaactactatgactacataaccttacaaacatgcacatattttctacaagataacgtactatctgtatg

SEQ ID NO: 79417 - DNA, 267 bp, Zea mays
  unsure (1)..(267): unsure at all n locations
agagcgatagctgcatatatcagttttgatgtcatcacaaactgaacatgtatagacttcccagcgctggacataagctccgctctccagttaggcaagagagaggctacccggtcaataatagcttgaacttggtctctgggcagcttcttaattgaaagaggcaaaccaagatatttgcaaggaaagctcanaatggagcatgaaaacagctcctggacacatgccaaactatcgtcattacagcatgcagggagcacattactt

SEQ ID NO: 79418 - DNA, 246 bp, Zea mays
  unsure (1)..(246): unsure at all n locations
gctcagctcatctatgtatggattgctttcnagtctgtccaatttccttcggtccttctgtgttcttcctgacttccatgaatagcaatgggcccttggtccgaatgtatcttcatgcaaagataagctgggtgaagaatcgcttcgaaggcatcgatagtaccacgaccaatgattgcattgtaaaggtattccatatcaacaatatcaaatacaacttgttcagtccttgtgttgttaatgaat

SEQ ID NO: 79419 - DNA, 295 bp, Zea mays
agcactggttcttggcttagatgtgacaccccttattcttttgggcccaccactatccgcggctggtgtgaaaggaatgtcccttggccattctaatattttgggattaacgtcaaacaagtgctagtgtaaatggggacagagacaattcaagataaggtatgttctccacttagacattgttttgaactaatgattggtctaatgctgaaccgaaaatcaatgaaagaatggcttgtcaccaagccacttgttggtgaccgactgtcgtgggaccgacaggtcgtgcccagct

SEQ ID NO: 79420 - DNA, 312 bp, Zea mays
  unsure (1)..(312): unsure at all n locations
gcaactaaacatgcgtcgagttcagctctatcaacatctaccaagtgtagctgaccctctaacacacccttaaacgctattgaatcatcacttgctttatagacagtgacacctacatcagtggagagacaggtgtagaccatgtgacataactgagatacagaaagcagattggtatctaaagaatctacaagataaacattggatatagcactggcaggtgatatatcaagtttacccaatcctgtgagcaaaccttgatatacatccncgaatgtgatagctcgcatgcgatcttgagtgttctcatat

SEQ ID NO: 79421 - DNA, 428 bp, Zea mays
  unsure (1)..(428): unsure at all n locations
gctgngacatatagtctatttgatgaatgacangcggtatttattgcctcggcccaataataatccgatatattatattccgctaacatagacctagccatatcaatgagagntatattctttctttcaacaatacccatttgttccggngtatattnggaagagaattcatgtttaatacccttgtcatcacaatattcatcaattcttggcattttgaattccgacccattatcacttctaaccttnttgatgtcgaaatcaaattgattctgagccaatatagcgaatgacttgaatggttcaaacacattagatntgtctcatagaaaataaacccaagtanatcttgaataatcatccacaatcacaagacaataagaattaccaccaatactcacataagatgtgggcccaaataaatccat

SEQ ID NO: 79422 - DNA, 466 bp, Zea mays
  unsure (1)..(466): unsure at all n locations
tcttctctactctctcttcctgctatctctctagaagcatctatgatgntaacacatatgccgaggtactcgctaggcgaggtggtggtgctggcgctggcgttgcctgcagctgggacgattgcctgatgctggaaccgaaagaagccgagcgcgaacttggcattgcttgagatcagcttctcgcacatgccgaggaactcaccgggcgcaagagtatcgctcttagcagttgctgccaagcatgtggttggcagcacaacaaccatcaacgttgaagacacagccgagagtggcgggaaggcgcaaagagccaaacgtgctcgtcgtgcgaattctaagctatctaggccaaatgagtacgctgtgactgttagagatatatgcattctcccgcttatattaattgcatagattaacattatgatgatgacatataacaaatattaaccatagaaatcgcgat

SEQ ID NO: 79423 - DNA, 333 bp, Zea mays
aatgtaaccgtaagattcaacgctgcagaatggctaactctaactttttacaccaaagaattagagatatgtgtgatctaattagacttcacagtatgggtatattgctgctctatcgtctgaacagtaataaggactgcaacagcaggtggcccatacagtcctctgtcaatgcccaaaaaaaaaaaggcaagcagactgtagattctgactcaaattgcggccaccttatttgatgatgtgttcttcaatatgtacgtgcaaccttgtacaaccatgtacaggtgcataccctatatcatcgggtgcattttgtgccatgagctttattca

SEQ ID NO: 79424 - DNA, 433 bp, Zea mays
  unsure (1)..(433): unsure at all n locations
taccgtgataactgattctttntaantctgatacccatctttctgtngccattgngctttggtgattgatagcttttcgatgggcacaacgaatcatgagctaccatatatgcaagggagaatctgttgaacaatgtcttgcatgccattcgtacatgtgttcgattcttttttattctgatacccatcttacagttgccattgtgctttgttgatttatagcttttcgatgggcacaacgaatcaggagctaccatatacgcaagggagaatctgttgaacaatgtcttgcatgccattcgtacatgtgttctgcatggaggagtggcttgtcgtactcccacgtgcgcttgttgcaggcgtcatcanaaccgataaagatttctaggttgtgggtaagtatatttgacaatacctacgaaacaagtgtaat

SEQ ID NO: 79425 - DNA, 418 bp, Zea mays
  unsure (1)..(418): unsure at all n locations
tctaccaaatatacgtgttaaccttaaccataataattgaaatacnggccagaactctatagtgtccagcgtccacaaaaattctaatccacgaaattgagaagatgatcacaaataaaatatctagtgaattatcaattactctgctacgagactgctgactactggtacggccttgttcggtttggcctacaaccgactgggacacgccccgatccatctgaaatgatttggtccggattgaaattaagaccgactctttaaatgactattcggataggcctgatccgaaataaaaccaaaacattccacacttttcactccctcctgagcccggagtggagctacatcagcgaacaactggaatcgaaccaaaccggctgggaacaggatctagtgaacatggatggattccata

SEQ ID NO: 79426 - DNA, 347 bp, Zea mays
  unsure (1)..(347): unsure at all n locations
atttattattttttagaacaacattnnttgcactgactgactacagattggcaaagggctactctcggatcatgtcttattttcttttcgctccaattcgttttgggtcacatattgctctgctgtcttgactgtcgtattctgaggtttaatatggtagactggtattggagtgacaacaacatatgatacagagagaacctttctgctgtatgcttgtttgatttgcaaacatagatgatatttattggattcgttcggcgttgtacatttctttgatctaaccaactcgtttgtgtctgcgactggcatcgaaatccacactgcttagtcttgcattatataca

SEQ ID NO: 79427 - DNA, 459 bp, Zea mays
tttatcgaaaaaagtagatacctcaaactacttaattttattgcgttgaatattgaaaattatgttcctataaaatataatgaacgtagaaacatgcataccatcgcattggttaaagctatgctatcatgcatgtgaatcaaggcaagtcattcactaatatagattcttatagaagaggtagttcgtatatctatatagggacatctgatatatctttatagaggcgggtatacccaccgcctctagtttttcatctctttaaattaggatctgtagatgcacgtatttagctacatctagaaatgtgttacactcagtttcgaggacaaaatcgaatgccctctatacatgtgccaagaccaaaattacatgtcacacccggatttgaggggtccaaaatctgggcgcgaaataatcaccaagtgtgttacgatcaagtctcacacatatgatgac

SEQ ID NO: 79428 - DNA, 437 bp, Zea mays
  unsure (1)..(437): unsure at all n locations
actcagcttctaagggagaacacgtgataggtctaaccaatggtcaattctaaaaagatagaccttgtgcagcttgtcaagcanggaaacaggtgggaggagcgcatcacagcaagaatgtgatgaccacttcaagacccctggagctgctgcatatggacctcttcngacccgtcgcctatctaagcatagggggaagtaagtatggtctagntattgtagatgatttttcccgcttcacttgggtgttctttntgcaggataagtctgaaacccaanggaccctcaagcgctttctcaggagagctcaaaatgagtttgagctcaaggtgaagaagataaggagcgacaacgggtccgagttcaaaaaccttcaagtggaggagttccttgaagagaggggatcaagcacgagttcttcgctccctatacaccac

SEQ ID NO: 79429 - DNA, 396 bp, Zea mays
  unsure (1)..(396): unsure at all n locations
tctgtagacaacaacctcattttcttcacgtgcaggggcggtgctgtcccctccaaccctcacaatagacatgtcacgaaagtatcttcccttcatggcgtcaatctgactctgtttaatggacgattttccaaagatggtatggcttggtcgctagggttgatcttcggaatcttcatccccactttctacatcgaagtcatcactatcaccagaatcttcagacaaatcagccattatttcgtttgtaatcttctatgtgtttggtttttccatagcttcataaaacaacaaattaataccgcgatgggctactattgggggccttcatcttccaaaggtcctcaaaaacacgactaacatgaattccagaanagtacactgtcacaggaagct

SEQ ID NO: 79430 - DNA, 390 bp, Zea mays
  unsure (1)..(390): unsure at all n locations
tacggacacttaaaactcagcttatatcgtcagaattctagcttcgctgactcttagattggcccgcttacagtggacttttcaatgtctataccactcggccaaagagtaccttgccttctttatgttccatcgtcaacctttttcccaaccatcatggtctactcggtagctcgattgggatggcttggatacataagttggcttctgtggtccaaagagtaccttatctttaagttccgtcgacagacttatgcccaaccatcttggtcttctcggtagcttgattggggttgcgtcctggcaaaatgttccatgatactgctgacgctattcggctactaagaatgtataactcgttttattcatggngagatgtgacaaaatgat

SEQ ID NO: 79431 - DNA, 302 bp, Zea mays
tgggctggacccgcagcaggtattcaagacgttgctggcgttcatcgagaaaggcgagttgctggtggcggtggtgccagtgggaggcaccctggacctcaaggccctggcccatgctgccggggtgaagaagtgcgagatggccgacccggcggcggcgcagcgcgctacgggctacctggtgggtggaatcagcccgctggggcaaaagaaacgcttgcgcaccttcatcgatgattcggcgcagaactttgcaaccatccatgtcagtgcccgacggcgagggctctaggtggagtttg

SEQ ID NO: 79432 - DNA, 418 bp, Zea mays
  unsure (1)..(418): unsure at all n locations
ntaccactgtctaatatgcttactatcatggttaaaggaaccatgcacgctatctcaacaaacagttgactaccgtttaaattatttttatattttccgatcttatgtgggcacgcatcttttcttcttgtaggatattgatgacgtgacgaactcgcggcgagtgtccgcatgcatcctaatttgtgtgtcgntttcctcaagtagcactacatcttcattgaatccgccactagtacaatgaagctatgtagatttctttgaaccgctaatgtcactatcaaaatccggctcttctgtgagtacttatggctntatcgagggtaatttatcgaacaatcgataaagcattctttatcgagtgttacgaaaacactcgacgaagtgcgtctttactgaacatcgacgctcgtcacat

SEQ ID NO: 79433 - DNA, 431 bp, Zea mays
  unsure (1)..(431): unsure at all n locations
atgggcttttctattctatacttctgcaataaacataaaaacgattatattagccaatcatttcgtaacatctggaatcagactggtttcagtaaggttttcctctgtggttagagaacaaaatatcctggtaaacatagcgtaactagagtacgatccatttagaaacgaatatagaaaagcctccccccattccttcagtaagcaaagctatggtttcaaagtatggaaaaaggatggaaggaaatgcatgacaaataatcaatggtgcttacattacagagacgccagatgacatgtgcagctgtcgatgaagctcatatgagaacatcagcatacaaactgcaataaaaaatgaactgaaaatttaggatagaattgcatgaagcatcatagcaaactgagcgaanaactcacgcttgtatactcat

SEQ ID NO: 79434 - DNA, 426 bp, Zea mays
gatctagagcaccaaagcccacagactctttattgtgcggtttggttagcggacggagtcttggagatgttttctatgaattcagagcactataccggtcggcgaactcgagatcttgggttagagataagggttggaaatgttacttgtgaatctagagcactagagcgcccgatggaccacgaatccaaccaacaaatcccctaattccttaatggcctccaaggatgagaaatagagattgatgcctaccagactggatggatgaggaagggagagacaaataagatgatgagatcaagagtcgtggagtagggtgtacaataagttcgttatgaaaaaatgagggccaacacacagattctaaaaacatggataaaaatacagttacaccctaaaacatgggcatacaagaagacatattgt

SEQ ID NO: 79435 - DNA, 463 bp, Zea mays
tatgaaacatgtcctttatgagtgccaccaacgttgcactttttgcaaaatcattatgaaataaacataataattatgcagcaatgcaatgattcagatttcagactctctaaagcaatgttattcctcacttgatgggagcaggacaatgtagtgagacaacacattggttataaaaaactaaccatgtcaaaaaattattaatcaagttgagcataccatgtctaaagaccctagctgaagaatcccgtgaggaaccactggtacaagcagaacagtctataggtaagaaacaatgaccatcagcttagtcaagcaggatgtttgcggtgcagctgttcaatacaggaatttttttgagtgaaagcagcagagtaagcacctactgtgaaatttttttgtttatataagagaaggaaaacaacaaacaggtttctcttaaggaaataaaagaattaaagat

SEQ ID NO: 79436 - DNA, 452 bp, Zea mays
  unsure (1)..(452): unsure at all n locations
tgccaagccctcggacccggccggacttcaccggaggcccgagatcgatctcaccggacttcggtcttccgccgccgcccgtggaccgagctatccagtgagtctccgcccaattccttgcgctcatagcttctctggcataccgtggacctccctgacccatttgattgaactatctcgccgtgaccaggccggtctcctcgccgccgacgagcatccccgcctgcgcgcgtggaccgaccgactccggccatctccgacggcgttccgcacaccgttgtgatcccagcgacctccccttcgtgctcgaccacttcaccggagcaatctcgccgccggtaagcccctccgcccttntctccgtcgcggttactgtttaaggtagaagaaggacctcgggttaagattggtagaacccgacgggttttctgtaatgtcactgactcgtgtga

SEQ ID NO: 79437 - DNA, 410 bp, Zea mays
  unsure (1)..(410): unsure at all n locations
tgtgaagattcttcatcccaacatgggctaatctgctgtgtcttatccaacccatgttaatcttagcaattaagcaagggtcgagttcagctctatcaaaatctaccaagtatagctgaccctctaacactcccttaaatgctattgaatcatcacttcttctaaagacagtgacacctacatcagtgaatagacagttgtagcccatttgacataattgggatacggaaagcaaattgtaatctaatgaatcaacaagaaaaacatttgatatggaatggtcaggagatatagcaattttaccaagacctttgaccaaaccttgatttccgtccccgaatgtgatagctcgttggggatnctcggttttctcatatgagggagaacatccttttctccctgtcatgtgg

SEQ ID NO: 79438 - DNA, 429 bp, Zea mays
cactggcatcgaaatcattatgaatgttcttctgcagcgatgcaatcttgctcacagcctctgatttgttgcagaacactttacttttgcagccaacacagtcgttcacattgaagattgtgtgtgttatcttgaccagcatggtgggaggaaccattgcaaagtgaccatagtcgaggaggtaagcagcaacctctctgaagcctgtctccccaacccgtacagaccttttcaggcccggctgtcccagagctttccccacaaaaccttttggattatttggagcaaatggttcctcatcagttggcttgacaattgccacacgctctccccaaatgttcttgaagtagtaggcaccacccatcccactgttaacagcgactgggtcaacatcattcattatggctttaatgacatccttagcaagct

SEQ ID NO: 79439 - DNA, 442 bp, Zea mays
tgactgcataacatgttctgactttcgaaggtgctactatgtctttagccgctcctgcaccgaaggttccccaagaaccatcatagaacactgtcccagcttcggggtctgtatttatttcttcttactgagcccctggcgtgcaatcagccatgaagtttactaacgcctgggacacaagtgaggatctatgtacatagtgaatggtgaattcaaataactctgtatcccatttttcaatccttgcaatagctgttctgttcctcattatatccttcaggggctgtgacgaaagaataattatgtgatatgcttgaaaataatgtccaagtttccttgaagtcattaacacagcatacaacaaccttctccattactgtataatttttctttgatagacttaaaacttcagagaccaagaacactggagcttggttttgac

SEQ ID NO: 79440 - DNA, 363 bp, Zea mays
cattgagctggcgcttcctttgcaggtcttttttgccgcttcttgcgaccttatagcgccgtcttgagattcttgatgatgacagccatactcttcatcatttagtccggccgcctcaatttgtgccaccttgctaaggaccgactccttgcttcttgttgccatgagagcaaaaggttgaagctcattgattggaccattcaatgcgtccgccacatatcttgcttccttgatcatcattctgcccgctacgaatttttcaagtatctcctcgggcgtcatcttggtgtacctaggattctcacgaatattgttttcaagatgaggatcatggacagtgaaagaccttttcaataagcgaac

SEQ ID NO: 79441 - DNA, 441 bp, Zea mays
  unsure (1)..(441): unsure at all n locations
cttgccacgaccaaatccgctcgcccgcgagatcttnttatcttctcgtggatatccactgtgtgccaagcacgaatcacggcgacaggcacgtatttgagcgcgtgggtcaccggcggcgagggggactgaaccctgagatcttttcgttactgtaccatcaggggcagcttcagttgttttgatagagcgttttgcatcgcaatttgcttcaaatttcatgtagtgacatggccacctctctgtatcaaagatgtagccctacaatccagttacaatcttgctatagcaaccatgctcaaacactcactggattatcttcaaaagagctcccagagttcaccccatgtcactggtagtaaaagatcagactctgagctaactgacagccagactttgagtccatttaactcccacttttgtacaacacttatgcctgat

SEQ ID NO: 79442 - DNA, 325 bp, Zea mays
  unsure (1)..(325): unsure at all n locations
tgcatgtatatgcaaggcacgcaccgcactgtccacgtncacgtncatgcatgctcgctctgcctgtggacatgggctccgagttctgagcgcctgcgggttcatggccggacacgggcatatttgcacgcacccaactactcaacatcgcggagatctgcaaacgcagtatcctctagacgtgcaaacgggttggttcggtcccagactacctccgacagcnagctttctattataccttttatttcatctatattttaaactttattttgcaaacaatgttatctacggtgtaaaacaatgatttaaacgatcatataacgat

SEQ ID NO: 79443 - DNA, 450 bp, Zea mays
  unsure (1)..(450): unsure at all n locations
tcttcgccttttactttcagcggaatcagcggttatttttcgctgtaagccttccttaggagcttcttcgccttttactttcagcggaatcagcgtttatttttcgctgtaagcctcccttaggagcttcttcgccttttactttcaacggaatcagcgtttattnttcgctgtaggtttagaaaacttacactgtgctcccttaggaacgactttttactgtttcaaacaatttgtactgtgtccgttagatcaaatttttgataatacaaaggtcctccaaatcagtataagttcttatgcttcggcaactcaagcctattgaaaaacatatttttattatggtaaaagacgaaagtgttagaaggaattgaaatttaacaaaagacatttaaactcttcataattgtttcttattgacaaaagggtaatagtgaatgtagaaatgca

SEQ ID NO: 79444 - DNA, 405 bp, Zea mays
  unsure (1)..(405): unsure at all n locations
aaatctggaatgaatcagcgatagagaccagccagtccaaggaaactccttacttgatgtacagngcgtgggggtttccactccaaaatatccttgactttgctgggatctaccgcaatccccttggtagataatacatgtcccacaaattggatctactccagccagaatgcgcacttactgaacttagcatataactggtgttcccttaaacgcgttaatacgatccgcaagtgctgagcatgctcctcttcatttttggaggatattaagatatcttcaatgaataccaccacaaatttgtccaacctgggcataaatatcgagttcatcacatatctgaagtgggcaggagcatttgtgcgtccgaaagacataaccagatattcaaatacgtcataccgc

SEQ ID NO: 79445 - DNA, 412 bp, Zea mays
gaatgacatcagcttctgccaaagctttcatttcgaaattgttctatagaagatttttaacttgctcaatcacattgagatttgatccaaagatcaagatgtcatctacataaaggcacaacataacagactcacccccaccataccgataatacacacatgtgtcagattcatttacaacaaagccagctgttgtaagagtattatcaaacttttcatgccattgcttaggtgcttgttttaagccatacaatgattttatcaacctgcacaccttgttctcttgaccatccgcgatgaacccttctggctgatccatatagatctcctcatccaactctccattaaagaaagctgtcttaacatccatatgatgagatataagaccataagagtctgcatggctattaat

SEQ ID NO: 79446 - DNA, 452 bp, Zea mays
  unsure (1)..(452): unsure at all n locations
tcggccccgtagaccaggtgaaagggaaatgtgcctttgggtcatttcttttattttggngattgagtgcaaacacaagtgcttaaatgtgaaaatatgcccatggatgaacaaagtgcaaatcacaagttaaggtatgtttctaagccttagtacattggttntgtgtactaatattcttgtctaagtgttagaaacaagaagaagaagaggagtggagggctgcttctggctggggcaccggactgtccggtgtgcaccggacagtgtccggtgcgccagaccagcgcggagcaaaccaaccgctctcgggtttttctccggcgacttcggctaaaattcaccggactgtccggtgtgcaccggactgtccggtgagccaactgttggccgggccaacagtcggccgcgcgatcggcgcgcgacacgtggtcgagccaacggtcggaatg

SEQ ID NO: 79447 - DNA, 446 bp, Zea mays
  unsure (1)..(446): unsure at all n locations
ntcaaagacttctgtgagcaaattggcacgaagatccattttgcatcggttagacatccggagtcaaatggacttgtcgaaagagctaatggcattataatgacgagaataatgaaattaatcttcaatcagcccacgggaaagtggccagatgaattaatcaaagtggtgtggagacacaacacaacaatgtcaaggtcaacaggctttacaccattcaaattactgtttggtgacgaagcaataaccccggaagaagctaaagcaggatcaataagaacagtggctgcggcagaggacgaagttgattattctatggcaaaagatgctatagaaggaatcacgcttcaggctatggagaacatcaataaatatcaagccgaaacaataaaatggcgtgacagaaaagttctattaaaaaatatcaggccagggcacttggtact

SEQ ID NO: 79448 - DNA, 468 bp, Zea mays
  unsure (1)..(468): unsure at all n locations
ccttaaatctcagcttattctgagggctttaacttcngttgattttgaatcattctagacatgtgaagcttgcttacttggtaagatgaccaaggcgcccttcacgggtttaccggagaggacgttagatttattggaactcatacatactgatgtgtgcggaccaatgagtacgacagctaggggaggattccaatacttcataaccttcactgatgattttagtagatatgggtatgtctacttaatgaaacacaagtctgaatccttagaaaagttcaaagagtttcagaatgaagtagaaaatcagcgtggcaagaaaattaaagcactgcgatcagatcgtgggtggtgaatattgagtcatgagtttagcaatcatctaaagagttgtggaattgttccacagcttacgccgcctggaacgcctcagaggaatggtgtgtctgagcgacgtaatcagacttt

SEQ ID NO: 79449 - DNA, 439 bp, Zea mays
cactcaagctttattaccatgttcagggatgtccttttgctcatcatcatgttttattgccaggttgattatcaacacttccagctaggttcgtgcttgcatcctcttcaatctgatagaagattgaaagcgaagtcagataatatcatttgctaaaataggtcacccaggatccatgacagaagagaacactgcataatagatgccacacacaaacagaactatctgcgaaatatcctaggtgcaactcattactagcataaataacaattgtaaatttagcttgagtaacaaaaaagaacaatcacctctgctttctgctgactttctgattcatctacgatgcagcttgatgaatcaccactactaggacatgtgccttcgttaaggcccaactgcaaccgtagccttcgcatagcagatccctgttgagtgaatg

SEQ ID NO: 79450 - DNA, 415 bp, Zea mays
  unsure (1)..(415): unsure at all n locations
actcagctgtgattatccaatttaaaataagcaccatctctcaatatttattntctatggataaactcaacacaagagatggcattagtagcacaagcactatgttcttatttagcaaccctttatatgtgaaagtcaaacgagttgctaaaatagagaaacctcataatatggactaaatttcccttgagccctcatgcacaatatattntgaatgacatggataatatgcatgggtgttcaatgaagtttaaagggctgacttaatccatattatggtgagtgtctaatatggaagaataaaatccaaattaactagatagaaaatacgtcacatatatttggattggtgaccatatgataatattcattaatcttccaattggacctttatttcataatcaacaactgatgt

SEQ ID NO: 79451 - DNA, 446 bp, Zea mays
acgttatccccagaggtcggctaagcatgtctgaatttctctctgaaaagtcgctccagcgtctttgaggccgaacagcatggaggtatatcaacagaaggctccgaacggggtgatgaatgttgttttttcctcgccttcttttgctaagctaatctgatgatacccggagtagcgatccaagaaagacaacacagaacatccggcgcttaagtccaccacctagtctatcctaggaagtccgaacggatccttcgggcagtgtttgttgagatccgtatagtcgacgcacatgcgccaatccactttattctttttgagtacaagaacacggttggctaaccactcaagatgtaatacttctctaatgaatcttgccacaaccaagcgagccagctcagcacggatggcttctcccttgtccggcgtgaagcaacaacaatttt

SEQ ID NO: 79452 - DNA, 375 bp, Zea mays
  unsure (1)..(375): unsure at all n locations
tcgtctngaccatgctcttgttacccgcaatctgattctttttatgcctgctcgcatacttggaaaacattgtcaaatcatgtttttgaggaccttcggaagccgaaggcccccaacagtcgcccctcacaatattaatttgctggaatgataaattcatattgcgacatggacgaaggccttaagccgaaggtccgaaaaaacaccttctctttgctagaatagcaatagtctttgacaagcgggaccctccagttatcaacgcactaggtgtataaataagagctcatcacgagtatatttggcacactttctttccaactgcgtttactcacccaactattaacctgcgcgcaacaacacttgcttggattt

SEQ ID NO: 79453 - DNA, 387 bp, Zea mays
  unsure (1)..(387): unsure at all n locations
ataaaactcagctgcagggtggtagaatctagtgcctattctanactctttttatccccggagcccgtaggctattttgggctcctcgacacatgtttttatcgtcgaacagcgatttcgagcctcccgtccgccacccatggattgaccattgagactggtaagggtgatttggcctcccgtgagctatagcacacgttttcatggccgagcgaccatttttatgtccggtgtccgccacacgtgtttttgtgcccagagaaccttaaagcagatcatggactacagcgagctatagcacacattttcgtggccaaacaaccaatgttattgatccgacctcgcaccttcgatttagacacgggagggcgctatggcatatttttg

SEQ ID NO: 79454 - DNA, 333 bp, Zea mays
  unsure (1)..(333): unsure at all n locations
atttatattctctgtttgagaacagtttcatatttgcgaacagttccatcatccattgcgcttctgaaaaaaaaaacttaagctcccgcgactgtcgtggtttgaaaaaaaagaaggttcgaactataagaaaaaattgctttcgcgaccacgtattgtttgctgtgaaaaaacaaaaagctatctggttcgaactacatttgaactctagattntatatgaaatgttgaaatactgtttttatgcaaattgtctgtggcaacattctntataacctacatagttcttaccgctataaaattatgtacacacaacttaatagcaatttttttt

SEQ ID NO: 79455 - DNA, 411 bp, Zea mays
  unsure (1)..(411): unsure at all n locations
ttagtgtctccgaagatgtctgatgataagaagactgctgctgttatgaagctgagcctggacgaagagaaaaacttggggtttcttatagcgatgtcaaagaccaatacagaaaaaatcaccaaggagattctggaaggtttgtctgaagatactggtgacagtgacagctatgatatggacagtggtggtgaagactccgaagatcgtccctggcgaccaagccattcagtttatggtaaatcaactatcaaagagaatcatcttgtcaacatgagaggaaggtatttccgggatttatccattgtgagggccgacgaaggggaaaaaacgtgcccacaccctgaagagaatgaagtcgtagtgtaccgaagctttttgaaagctggactgcgatntcccttgagcagc

SEQ ID NO: 79456 - DNA, 431 bp, Zea mays
  unsure (1)..(431): unsure at all n locations
nggcatgagaagggatctgntcangaatcttgcagtcaagcatgctctggttaatgcaatcttttgattgttcaacccccatatgatctgtgggacctcaagaaacttgtcacgtctaattctaggaagcaagtcaggggctgttgactcgtaaaactctttcttctcagatgaatctatagcaagaaaaggagacacaattgctctcaacaaaataagggccatcactatcagaaggcctttacagatgacaagccttgcacggatgctaaagggcttgaggtgcttaagctcaagtagaatgttcatcggaccgattattcaaactcttctcgtccttttagcacccaaccatgtaaactatgtcattaccaacaaccatggtgcatgataaacacttaccctcgaaaactttcagatgaagagcaagc

SEQ ID NO: 79457 - DNA, 258 bp, Zea mays
gctttggggaagatttggggatcagtcaaaaagaattcactgcctattctgtggtgaagacaacggccggaccaacgttattaatgttacaccttcttcttcataataaaagatctgaaagacttatactctaaacacgggaaataacaagattactttggacattgggactaatgtatctctatatattttacttatatgaacaacaacaaattacacatgtaccttcggcttgaggaaagtaacggtacaagcgtg

SEQ ID NO: 79458 - DNA, 400 bp, Zea mays
  unsure (1)..(400): unsure at all n locations
tgagttntcgccaccggaaccatttcttcngttttcgcaacaaacatgctttatccactactttaggtccaaaactcatgtttggggtggtttcacgcaatttctttgccgcacgtcacccgttcagaaaacgggtgtcggggtgcatacaaagcacgagttttttttccaccggaaccattttttcttttatcgcaacgaacatgcccaatccactactctaggtccacaactcatgtttggggtggtttcacgcaatttcggtgccgcacgtcacccattccaaatacgggtgtgggggtgcatacaaagcaatgagttatcgccaccggaaccatttctttctttttcgcaacaaacatgcccaatccactattttaggtccaaaactcttgtttgg

SEQ ID NO: 79459 - DNA, 356 bp, Zea mays
tcgtcggccggagcctggccgggccgtacactggcgggaccgacgccggagtctggttgccgaggccatgagccgggctgatgtcctctggggacagccggctgaggctactgagcggtcggtcgagccgtctgctcgggccgggttcccggaggagacccctgcgacaatggtccacgcgtggtgccgacaggttccttctaggtggagatcctggagatcctccgaccgtgttgccatccgaggccgggtcggattccgtccatgtggagtcaacgccgagggtgctgctgtttccccactgatgtctgaccctgccagaacagtttatcttgtagtgtgcgtatgttattttc

SEQ ID NO: 79460 - DNA, 377 bp, Zea mays
atacaagctggccaacgatcaaggcgaggtctacagcaacgcttggaacatccaacaactactgcgcttctacccttaagatgtgtcaagtcgttcatatacctcgattttctttacatacacaaataaaggctaactgtcaaggaagggtcagccttgcctcggcaaagcccgaccctcccttaatgctataagggggaaccctctctgcgccaaaattgtgcctaaaaaagacatttgccagaacatctttcgtaccattacgactgcttcgatagcggggtcctaataacgaccagagtatgcgtaagcggcaaagccgaccgaaccgagggactcctacgcctctgagatacaaatactcactcatcaccttc

SEQ ID NO: 79461 - DNA, 406 bp, Zea mays
  unsure (1)..(406): unsure at all n locations
actcagctntcacaaagcaaatggagataactgcttggcaagagcgattgaaataccaatatctgtctgggactagtcttcaacaatagataatactgatctcatatggagtcatcaagacaagggagaatacatctggtctccataagatcttaatatttctatcacaaattaccatcaccaatagcttagtggtcaagatttatggatcttccggcgccaaggaccactgacatattaatgcccaatttctcttcaagctctgtggtaatatgggatttcatggctattttctactcttcttactcctagtagatcagagatatattacggtaagcatttcaaagggtggaattcaatgtagttctgctacataaactccaggtatatgtccatttangactga

SEQ ID NO: 79462 - DNA, 380 bp, Zea mays
  unsure (1)..(380): unsure at all n locations
ctcagctgagaaatattatacatggtccgaaggattgatgcttccttttataggtttctgncaaaaatattcctcgaggagaaaatgaacatgctgatttgctagccaagtcagcagcacatgggatgcccttaccttcagaagtatttttcgaaacaataaaagcaccttcggttgaacttcttgaaagagcagtcctcaacatatctccttgttatagtgaagactggagaactgagatcatctctntccttcagggtaactttctttcagatgacgaagcttataacaagaggatagaggcaagagctcgaccatatgttataatagaaggggagctgtacaagcatggggtctgttctccactactcaagtgttta

SEQ ID NO: 79463 - DNA, 443 bp, Zea mays
  unsure (1)..(443): unsure at all n locations
ntggaggaaggtatggtattcagcccaagagactgttctttctactatgtggggaagaaaagggacacacgacaaggatgtgccaagtaacgatccaaaagcagaaggaaatcactgaagccgaagcacgacagaacccacgcgaagcaggtcttgcatactacttcatgctattccccatatatctctgagtatgtgggcaatcaacagcctacaacgtccattgcttcggcgagtcactcccaagccttctgggctcagttgccaccaccaccactactggcgcctaccttgatccataatcaactgccagaagggcatcgccaggctcagcagcagcgcgacactcgggaggaatccgaagctcgcacaatcaataacactgtgcccgagtcaaggcatatctactgagtgtcttaatccaatataattttacccttttt

SEQ ID NO: 79464 - DNA, 416 bp, Zea mays
  unsure (1)..(416): unsure at all n locations
tggacaatattctgcgatggttcctggggaaccttccgggcttgtgaagctgccattntaattgcacctaccaaagtcagaacatgctacgcagtgaaacttgatttcagttgcacaaataatattgctgaatacgaagctttgcttttggggcttctgaagttgaaggcaatggggataagaagggcggttctcaaaactgattcccaagttatttctggccatgttgacaaaagttgcaaagcaagagatccaaagctcgagaaatatttggatacagttcgaaggcttgaagcttccttcgaacggttttctgtcaagaatattccacgaggagaaaatgagcacgctgatctactagccaagttagcggcacaggggctgctcttaccttcagaagtattctttgaaacaat

SEQ ID NO: 79465 - DNA, 367 bp, Zea mays
  unsure (1)..(367): unsure at all n locations
cccgaaacgcgatacacccttcattggtgtttctttcaagtggacataatcgcctaccagaaagcataagggttgtcgtcgtcngtctgcataactcttttgtcgagtctaagctttcttcatattatgaataatattctgaaccttttcttcgacctctttcaccatatcaagcctaaagaagtacctttctccaggttcagaccaatttagcggagttcgacactgtcgcccatataaagcttcaaaagtgccatcttgatactttcttgataactgntattgtatgaaaactccgctaagggcaaacattcatcccagttctgtgagaagtccagaacacatgcccgcagcatatcctcaagta

SEQ ID NO: 79466 - DNA, 404 bp, Zea mays
  unsure (1)..(404): unsure at all n locations
tggtttccattcatatccttgttttatatgaatctgatgataaccacttcttaagtcaatattggtgaagataaaaacaccgctaagttcatcaagcatatcatctaatctagaaaatggatgtctataccttacgatgatgttattgatagatcgacaaaccacacacattctccaagatccatctttcttatgaactagaaggacaagacaacacaacggaaagattctcttgtacgtacccattttgaatcaactcctccacatgttgaatctcctttgtttcttctgggttggtgcggtaggcagcacgaattgggagggaagcactgtatacgagatctacttgatgttcaatcccttccttanggagtagccctgataacacttcattaggaaacaca

SEQ ID NO: 79467 - DNA, 442 bp, Zea mays
  unsure (1)..(442): unsure at all n locations
gtctacttgatgtagactccttcttttttccttcgtgccttgtagcaaccagttgtgcttcggatgtggaggggtcatctagctcattgattttctttgagcctttgatcatatattcaaagctcacaaagtttcctattacttcctcgggagtcattagtgtatatcgaggattaccacgaattatatgaacttgagtatggttaaggaaaacaagtgatctaagaataaccttaaccatctcgtggtcatcttgaaagggaattangcttacacctagtttctaaataatattggtggatgaattgcccaacacaaataattggactaactagtttgctcgagtgtataagttatacaggtgtaaaaggttcacactaagccaataaaaagatcaagtatcggatcaacaaatgaggaagagacaaccgaatgcaccttt

SEQ ID NO: 79468 - DNA, 377 bp, Zea mays
  unsure (1)..(377): unsure at all n locations
tgtccctaanagattgtcntaacttgttaagggcaaagctcccatgcctcatgataacgagggttacattctataccctaccggttatcccgagcacaaaattaggagaattcattctagaaagtctcactctggctctcatcatgcttttatgtataagagtgaggcatctagttctaggcaatccactcatgtcaaattgcctaaaaagaaaactcctatagcatcaaatgaacctaacatttcatttaagactnttgatgcatcttatgttttaactaacaaatcaggcaaagtagttgccaaatatgttgggtcaaacacaaggggtcaaagacttgtgtttgggtacccaatgtgcttgtttctaatgtcaa

SEQ ID NO: 79469 - DNA, 455 bp, Zea mays
ctcttgtaaacactttcttcctgagtggctccaatatcatcccattggctgcttctacttggccattggctcttggatgcgctactgatgcatacttaatctggatgctaccttgctcctaaaagtcgaaaaattcaaagctagtgaagttggatcctaagtcggttatgatgctatttggtattccaaaccttaatattatatcttgtatgaattctactgccttggctgaagataaaaaggcaacgggcttatactctatacattatgtgaacttggcaatggcaaccaacacctgagtatagcttccctgagctttcttgaaaggtccgatcatatgttgccgccaacatgcaaatggtcatgttataagaatagtcttgagctattgtgcatgtaaatgttgttgctattataagaattggctagctttacatctcttgactaactcagta

SEQ ID NO: 79470 - DNA, 455 bp, Zea mays
  unsure (1)..(455): unsure at all n locations
taacttggggactgggttgctntgactntcggatgcttgagaccgatcaatacaattcttgaggatctcttggacctgtgggttaggagtcacacacgctttcgctgcgccactctgattttgttggttgatgttgatcgcattgtcttctttgaggttagcggctaacccccttaacagaatcgttgatacatgcttggtgaggatgtttccgactccgatcttgactgatttggaggagttggaggttgccaaatggacaggtgcaagagggaagggtatagataggaaaggtaagcatagatggattaaggagagaaggggagagaacccaactacccaactatatggcactcatctagtgaactgatgtcattgtggaccaagggccacaacacatcaacactcatcacaaagaagcaaatcagtcatcacacagagacaaacagcacaag

SEQ ID NO: 79471 - DNA, 434 bp, Zea mays
atgaaaaatctggtatgaatcggcggtaatatccagccagttcaatgaatcttctgacctgatgaaccgtggtcgggggtttccactccaaaatgtccttgactttgctaggatctaccgcaatccccctggcagacagtacatgtcccagaaactgaattgtctccagccaaaacgtgcatttgctaaacatggcatataactgatgttctctcaagcgcgttaacacgatccgtaaatgatgggcgtgctcctcttcattcttggaatatatcaaaatatcatcaatgaagaccactacaaacttgttcaactcgggcatgaataccgagttcaacaaatacgtgaagtgggcaggagcatttgtcaatccgaaagacattactagatattcaaataatccataccgcgtagtgaaggcgggctttggtata

SEQ ID NO: 79472 - DNA, 460 bp, Zea mays
  unsure (1)..(460): unsure at all n locations
gacctatgatactcagcttgttgacgtctgtgntggctctactccccttatcattgctttaccttcccagctcgccttccaccaactccatcttggtgatcatggtggcgtctttcccctcatgcgagatcttgagggtgtcccatatttgcttggacgttgccaagccactcaccttgttatattcatccctgcacaacgatgctaacaaaacagtggtagcttgtgcatctttatgaatatgttcgttaatgaatacaggggtatccgtattatcaaattgcattccattctcaactgtctcccacatactatgatggagagagaataaatgactactgagagcacctagagggggggtgaataggtgatccctgtaaacttatacttatagccacaaaacttagattaagcgttagcacagcaattgcctagtggctagagagaactcatacacgat

SEQ ID NO: 79473 - DNA, 430 bp, Zea mays
  unsure (1)..(430): unsure at all n locations
tcacacacttgccccagtgggcggctaagcatatctaaatatctctctgatttttctctccagcgatnttgaggccgaacgacatggaggtatatcagaaggctcccaacggggtgatgaatgctgttttttcctcgtcttcttttgccaagctaatctgatgatacccggagtagcaatccaagaaagacaacacagaacatccggtggtcgagtccaccacctggtctattctatgaagtccaaagggatccttcggacaatgtttgttgagatccgtatagtcgatgcacatgcgccaatccactttattctttttgagtacaagaacagggttagctaaccactcaggatgtaacacttctctaatgaattcagccgcgaccaagcgagccagctcaacatggatggcttctctcttgtcatgcgt

SEQ ID NO: 79474 - DNA, 398 bp, Zea mays
  unsure (1)..(398): unsure at all n locations
tcatccttttggggccttccacttattggcatttcacactattaatactatgntcgaaattgagtaagcaaagaatgacatcctggttccttttttgaggacaccactgtatgtgcataaattcataatttgtctgcacattgctttcctgatttctcacttgttgcatatactccaacatcttaaattttcacgatgacattgctgctggaggctggcattcaactgcactaactatacagggagaggtatttccattatcttgattctttaattcacggttatcatcttattatgtgctgttttatcctgtcagggcagcaaatgacacaaacatattgagggacaggcttttctttcttgcttttgaaataaactccatgaaaaaatgttgcatg

SEQ ID NO: 79475 - DNA, 409 bp, Zea mays
tattcaaagggttagatagaactaagattgacaagatctatgttttaattgatgcttcgaatgagaagaatagattcttagagaagcaagaggatcttttttatatgaagagcatgataaatttgttagtgcgcaaaattctcttgctgtagaagttaaaagaaatgaaatgttatcatgtgaactatctacatgccatgaatctatttctaacttatagagtattaatgatgatttaaatactaagttagaaaatagctataaatcaagctcttatgtataacatgttgtgatttgcatatgtgtaaggattgtaatgatgatgcttgtagtgaacacttaattttcattttcaaaataaatgatgaagtggctatgtttaatgcccaacttaagactagcaagaatg

SEQ ID NO: 79476 - DNA, 442 bp, Zea mays
acggacacttagaaactcagcttatcctctctttcttttcttttcttttgtttctaattttagacaagtatattagtactcaaaaccaatgtactaaggcttagaaacatacctttactcttgatttgcactttgttcatccatgggcatgaattcacatttaagcacttgtgtttgcactcaatcaccaaaatacttagaaatggcccaagggcacatttccctttcaccagtgccatgaacagaagcatgtgacccattccccattagcacggaagaatcctgggcgccctgataagaagagaacatgttaatgtcagaacacacatgaacattagcaccagtatcaagccaccagctaggtgattgaaatactgagaagatgaaaggtaaattatcataccctttgtcttcctcattgctagcgaccactgtgttgaca

SEQ ID NO: 79477 - DNA, 229 bp, Zea mays
gatatgataaaataaggatgcccggaaaaaagagatatggaaggccgagccgcaataagaaaggagttagaccctgattcggggatcttccgtgggacagagtccatggcagaacgcaagaacagagttccgtggaggagaccccgcggaaacaggcggagagctcacttcagaatacagactatggtacctgcgaaggtactgactgtgggatcattggcggatactg

SEQ ID NO: 79478 - DNA, 322 bp, Zea mays
taccgcatttgaagcacgaacgcttccccttggctttggtcttgcttggctggcccttgcgacctttaagcgccgtcttgaaatctttaatgatgagggccatctcttcatcattaagtccggctgcctcaaattgtgccaccctgctaggtagcgcctccttgcttcttgttgctttgagagcaaagggttgaggctcgttgattggtccattcaaggcgtcgtccacgtatcttgccttctgatcatcatccggccgcttacgaattttccgagaacctcctcgggcgtcatcttcgtgtacctgggattctcacgaata

SEQ ID NO: 79479 - DNA, 454 bp, Zea mays
  unsure (1)..(454): unsure at all n locations
tctggtatgaatctgcgataatacccagctagtccaagaaaacttctgacttggttaacagttgttgggggtttccactccagaatatctttgaccttgctaggatctaccgcaattcctttagctgataatacgtgccccaaaaattgaatntcttccagccagaatgcgcacttactgaacttggcataaagctgatgttccctgaggcgcgtcaatacaatccgtaaatgctgagcatggtcctcttcattcttagaatatattaagatatcgtcgatgaagactaccacgaatttgtccaactcgggcatgaacaccgagttcattaaataagtgaaatgggcaggagcatttgtgagcccaaaagacattaccaagtattcaaataatccataccgcgtagtaaacgcggtcttcggtatatcctcgggccgaatacngatctgatgat

SEQ ID NO: 79480 - DNA, 365 bp, Zea mays
gatagcttggagagatatatgagttatccaatcacatctgttaaaagagggtttaaaaacaatttcactatatggtcacaacatggcgagttggatccgagtgaaatgcctggttatgacaagagagttgtcggaattttaaatcttataattgatggtgaagtggatcatgtggatgctcatcaagaatttgaagaatatgattgtgaagagatgttgcgccatatggaaccagaaatgttaagttctgtgggatcgcagaaagggctatctaacatggatggacttgatagtgcctcttaagaacctttatatgatgaatcaacaggttgcgacatagagtttactacactgcgtacagctct

SEQ ID NO: 79481 - DNA, 178 bp, Zea mays
tcgcttgcctctgatagtggatcgccacttaacccttgtgttgacgccttttctgagcgccaaacactcaaaagaacacgggcggtgctctctggtcaggcgcggacggtccgcggcctgtggccggacggtccgcgacctggcgcatgggctgagtcctctgcccgacggccggacg

SEQ ID NO: 79482 - DNA, 422 bp, Zea mays
  unsure (1)..(422): unsure at all n locations
gtcgcataggctaataatatgcgaatagactcaagtctatctacgggtgcataaggtcaccaaaatccaaaccttcgacttgtgaataccccttggccacgagtcgagctttgttccttgttaccacaccatgctcgtcttgcttgttgcggaagacccacttggttcctacaacattttgattacgacgtggaactaaatgccatacctcgctcctcgtgaagttgttgagctcctcttgcattgtcatcacccaatccgaatcttggagtgcttcctctaccctgtgtggctctatagaggaaacaaaagagtaatgctcacaaaaatgtgcaacacgagatctagtggttacccccttatgaatgtcgccgacgatggtgtcgacngggtgatctcattgtattgcttggtgtactctt

SEQ ID NO: 79483 - DNA, 357 bp, Zea mays
  unsure (1)..(357): unsure at all n locations
ctggaggcgtcgatcgcgagactacaagatgtatactcatctttcttttctttcngctttgaacgcaactggttgcacctcctatgtggaggtggggccttgctccaagctgacaatgtgtttggagcctattctcattagtgcaaagctcacgaacttgtcaatcacttgctctggggacatatgtgtgtatctaagatcttcatgaattaactgaacttgagtgggattaccagaaacaagagatcttaaagataccttgaccatttcatggtcatgccactatctgctcccgaggttgcgcacttggatgaccataatcttgagccggctgtacattgcttgtggctcttctac

SEQ ID NO: 79484 - DNA, 403 bp, Zea mays
  unsure (1)..(403): unsure at all n locations
tgaaatggcgtttccttcatcatttcttgatatgcaagtatctctaatcatatatctcgtggatctgataaaaatattaaggccactatatttacatcatatgtttcagttggagcgatacctgngagtattaaaaggttatgtgcgaaatcgcgctcacccagagggttcaatcatggagggatacactacagaagaagtgattgagagctgtatagattacatcagtgacggaacaatgataggtgtgcctgtacctaaacatgagggtaaactatgtgggagagggagaatgggcaaaaaaacttttcgcgttgaggattacaagctagtacattgtgctcatggtagtgtactacaacatctcacgatagccgaccttacatagaagaacacctggatg

SEQ ID NO: 79485 - DNA, 385 bp, Zea mays
atgggactatggtcatgagctgaggagcaacctatgcagcactctgtaccttaacattgttgggaatgcttttagctctatgtacatgtcacttgatgcttgtaaaagagggttcttaaccgcatgctgacatctgatatgcttagatggatgtcatttgaagaccaagtatgatggaataatgttgagtgcattagggtttgatcctattgactgcatataaatgcatttgttgttgtggagattgaatgcatgacatcttggaaatggtacttggagacattgaagtatgaccttggtgttgagaacacgtactcatggtcggtgatgaccgacaaacagaaggtgaccacacccgcatagatcacactttgccatttcatac

SEQ ID NO: 79486 - DNA, 421 bp, Zea mays
tgtctcagccacggcttcaccttcggtggttgctttcgcttctcggcatctggtatgcacgtgaaggcggggctttgcaacgtgaagtctaagctgctacattagagaatgtggctcggcaacgatgacagctgtcgagaccccttcttcgtggactggattgtttcgaatgtttgggcatttgtcgagggcacgacagaggttcaagctccgtggtgaagaatcggagctacctcccgtggggtgtgttgaggcttggcaacgatggcgcactgcgatcttcctccttctgtgccggtgtttggatgtatgcgtcgtcgtattttctttggccatgtgtggcccgtctcgcgaagactagcttggctacgataactcttgatgggttgtgggggggggagcttccgtcgcctgggctgtt

SEQ ID NO: 79487 - DNA, 362 bp, Zea mays
  unsure (1)..(362): unsure at all n locations
actcagcttctaagggagagcacattntaggattaacatatgttcattttgagaaagataggatttgtagcgcatgccaagcacggaagcaagttggtgttcatcatccgcataagaacatcatgacgactgacaggccactggagctcctacacatggacctattcggctcgatagcttacataagcattggcgggagtaagtactgtctagttattgtggatgattattctcgcttcacttgggtattctctttgcaggaaaaatctcatacccaagagaccttaaagggattcttgagatgggctcanaatgagttctgcttaaggatcaaaaagattagaagcgacaacgggacggag

SEQ ID NO: 79488 - DNA, 386 bp, Zea mays
  unsure (1)..(386): unsure at all n locations
tatcatgttcctcatattagagaacctcttgcttttctaatttcctattcttatcattcaaggcatcaattaattcattaattttatctaccttggntctatctaggcccttaaataaacatgaataatctatgtcatcctcatcactagattcgtcctcacttgaagaagcataagtggagtctcgagtacttactttcttctccttagccatgaggcatgtgtgatgctcgttggggaagagggatgactcgttgaaggcggtggcggcgagtccttcattgtcggagtcggatgacgaacaatccgagtcccactccttgccaaggtgtgcctcgcccttagccttcttgtatgccttcttctttctcctctttgtcccttgt

SEQ ID NO: 79489 - DNA, 378 bp, Zea mays
tcttctccttctgctacctgtattcagctacacgcctcattttctgttcgtctacccgctggtgctcggcagcaagctgaaagggaaatgtgcccttgggcaaattctataatattttggtgattaagtgctcaacatgtttaattaagttcttatgtgccaagtaaagtgagaagtgcaaatcaaagaaaaggtatgtttctagacttagtacattgttttgagtactaacaatatttgtctaagtgctagacacagggagaaaagaattggaaaaagacttggctctgtgcagccaactccagctcggcttggcacaccggactattcggtggtgcaccggacagtgtccggtgcgtcaggctggtccgcatgaaa

SEQ ID NO: 79490 - DNA, 418 bp, Zea mays
  unsure (1)..(418): unsure at all n locations
gcttcgngaaatattctccgaagctataaaaaagttttgcgttgtatctccgatggggctacacttcgtctcgatttgtcttgtgcctcagcacaattttctcttttccgaaatattctccgaagaccaacactgtatccccttcttgttcctcatgcaatatgttgtatgatgcttatgttatgcagaatgatgtgatggtgttatgttatataaaatgatatttgtgccgcagatacatatccctgtaatagagcacacacactnttatctcagcgctgacttttcgctgtaagcctcccttaggagcttcttcgccttttactttcagtggaatcagcatttatttttcgctgtaagcctcccttaggagcttcttcgccttttactttcagcgaaagcgtttatttttcgctgt

SEQ ID NO: 79491 - DNA, 455 bp, Zea mays
  unsure (1)..(455): unsure at all n locations
ttacaaactcaagctgggccatggagagcagaaaccttgaggctggctgtcaactgttgtcgngncaactgtgagttctgaccgtactcctaagcggcaaacaatgttttgccagaagaatatctgtgcagtctttgatggtattgtggaaacaaccctcgcctcgatccatttggtaaaatactcaacagcgactaaggtgaacttgaggttcctctgagccgtgggcaggtgcccgacaatgtccaggccccaacgctgaagaggccatgagtgggcaatcagttttgtgaattgcgaagggctgtctgagcgaggagaaaacttctggcatgcttcgcacgaccttgtgacccgatttgcggcgcagatcattgcgggcatgtagaaaccttgacggatcatctttgcgactaaggcccttgggcctgcgtgagagctctaagtaccactgt

SEQ ID NO: 79492 - DNA, 310 bp, Zea mays
gtcatgacgaaggacttggccttgactgcagtgtggcccccatacgaagatatagttgtatctgaactcaatagatactgctttggatctgaatgttcatcatacatcgtgagtcgatgtggcttgtatgatgggggctatggggtagcctactagtctgctgcccacggagaagcatcattaaaagttaaggcctgatgattaaaaacatcataccattcatcctcattgaataagcctttctgaaaaaactcctgtgttggggccttctatcttgttcatcatgaacaagatgacacactatatctgt

SEQ ID NO: 79493 - DNA, 451 bp, Zea mays
actcagcttgtaacctgagggcggagctgcaagcctaatactagattagttactctctagcagctggtatttctatacatttcttcttatcctctgaggaaagataatcattgtgaaaatcacagaaatagcaatcatcttaatcactttgctttggagcgtcataatttacaatagaaaccaaccatacctgaggcaataacgaaatgcatatatgtacagatcctagaaattggatggccctgtaacctggaaattcaagccagttctccgttcatcctgataacatagaacaatgtgttagtcaatacttgaaagcagagaacaatgttttagcattataactaaagcaggtccttcattgaacacttgaatagcagtatgtaatgcataccaaggtaaaacaacgttgcttatcacaacatgtgcctcttttgtggatctcgtcata

SEQ ID NO: 79494 - DNA, 447 bp, Zea mays
gctatccctcacttctggagagaagagcctccacggaccacagcttcagaagtttctttcatggagtcatctctggcggaggagcggcgggaaaacctgctggtgcgcgcgaccgagcctgaggtagttcaccaccatctttgcatggagattttgttccatttacctgaacttttggtgcaccaagattcagaattcgtaggggagtcttttctaatcccctttagcttaattttttggttaagttccgcttgatcgctaatgcttaaattggtcagactcggaagacaaatgaggaaacttcacttcgattgctcaagtcctgtgatttctggcattgcagggcctttgatagattagcggtgcttaggaattgctgattgtaattaatagcacggggaagaaatacaatgaaaatgtgacgctgccacaatgaaattaatcaaa

SEQ ID NO: 79495 - DNA, 343 bp, Zea mays
tatgtgagcaaactgccgctttgaagatatgagtccctaacctgtctataactctctaggcgcttatgggctcagaaagccccagagcatgtatgaatgccttataaattctatcactaaggatcagagtctgaaggccgatcctcactctttccataaccttgaaatgattgctgtatgccaaattatgttgatatatatatttgggttactaacgaatctacatggaagagttagtaggatatgaacagaaactcagatgctatatggggagtgaagatttttagattcaagtagcacttcagaggaccttctaaccaacgagtatcttagatatctaaca

SEQ ID NO: 79496 - DNA, 456 bp, Zea mays
  unsure (1)..(456): unsure at all n locations
tgggaagattcttcattccaatgtgggctagtctgcgatgtcatagccaacccatgttagtcttagtgattaagcaagtatcaagttcagctctattaaaattaactaagtatagctgatcctctaatactcccttaaaagctactgaatcatcacttcttctaaagacagtgacacttgtatccgtaaaaagacagttgtaacccattttgcacaattgagaaacagaaagcaagttgtaatctaaagaatctacaagaaaaacattggaaatagagtggtcaggtgatatagcaattttacccaatcctttgaccaacccttgatttccatcctcgaatgtgaatcgctcttggggatcttgtgttttcttgtaagaggagaacattcttttctccccagtcatatggtntgtgctcccgctgtcgatgatccaacttgagccccttgatgcat

SEQ ID NO: 79497 - DNA, 436 bp, Zea mays
  unsure (1)..(436): unsure at all n locations
tctaaagggagaacacgcgataggtttaactatacttcaattctaanaagatagaccctgtgcagcttgtcaggcaggtaaacaggtgggaggaacgcatcacagcaagaatgtgatgaccacatcaagacccctggagctgctacacatggatctcttctgacccgtcgcctatctaagcatagggggaaggaagtatgggttagatattggtgatgacttttcccgcttcacttgggtgttcttcttgcaggataagtctgaaacccaagggaccctcaagcgcttcttcaggagagctcaaaatgagtttgagctcaaggtgaagaagataaagagcgacaacgggtccgagttcaagaaccttcaagtggaggagttccttgaagaggaagggatcatgcacgagttctccgctccctacacaccacaacaa

SEQ ID NO: 79498 - DNA, 454 bp, Zea mays
  unsure (1)..(454): unsure at all n locations
ntctatgtccagaacaccctagaaaagagtacatcaaanttgtatattgtggctacatctgcaaataaaaatacagtcttgatgccttatctacctccactagacagtgttgcagccttatgcaccaacttcagctggtgcaatcaaggttaatcatcattaagttgatggctcatataaatctaaacataaacaagataagatatagactattacacccacatattgtattgtacgacactatagctgtccaatattcaaacaaaaccttaaaccctttccgatcctatacgtattgagagaaaatagaaacatggccactcaaaagagaaattcaactattgaaaagagagactcataatangaaataatacctttcttttaaattacttggtagcttgtaacanaatgctacanaggaactaacttgcaatcacaattgagcaatatgtaa

SEQ ID NO: 79499 - DNA, 336 bp, Zea mays
  unsure (1)..(336): unsure at all n locations
tgccttcgnctcagtctatcattcgcagttcacagagttgtggaacgcgcccatggaaagatcttcacagcctgcaaaaaaatgctcctcgacgaaaaaagggcaagtgggccgagttgttacccgaggcggtctgggcactaaacacaactgagtgcagggcgaccgggttcactccttttcgccttctatacggatcggaggctatgaccccacaagaaataaaacatgggtccccacgaacagattcttcatccgttcgcgacgtggacgaggccacttcanatgatctcatcgatggagaccgaatctttgcctacaagcactaaacaatac

SEQ ID NO: 79500 - DNA, 426 bp, Zea mays
tgaggcagcaactgcatatcttgcggttaaatcatcaacacaccatggtccaagctgtagcaaataaatcatgctgctcatgaataaacacactcttttggatataccttaggaacatcatcaattcaaaatacatttctcaggcgtagatttatactgcctgcaaggtttcgacttaacccatgggagttcatgagcatgtgttactcatgaagaagaatggatatactagatcattaacatcacctacagttcgttacttcaatataaactttagagtaaggatgctgcaactattcagatagtctgcttgaatcgttactgataccatcatatatcagaggatacacatcatcaccagaatgtactagatttctttagtgcatatcatatcatatagaaaatcatcctatggctccttatgca

SEQ ID NO: 79501 - DNA, 441 bp, Zea mays
  unsure (1)..(441): unsure at all n locations
tgtgaagattcttcattccaacatgtgctattcggcgatgtctgagccagcccatgttagtcttagcaattaagcaagtgtcgagtttaactctatcacaatctactaagtatagctgaccctctaatactcccttaaatgctattgaatcatcactatttctaaagacagtgacacctgtatccgtaaaaagagagttgtaaccaatttacataattgcgaaacagaaagcaagttgtaacctaaagaatctacaagaaaaacattggaaaaggagtggtcaggagatataacaaatttacccaatcctttgacccaaccttgatttccatccccgaatgtgatcgctcgttggggatcttggnttttctcataagaggagaacatcttcttctcccctgtcatgtgggttgggcacccgctatctatgatccaacttga

SEQ ID NO: 79502 - DNA, 464 bp, Zea mays
ttatcaaatggacgtgaaaagtgccttcctcaatggaccaatcaaggaagaggtctatgttgagcaacctcccggctttgaagacagtgagtaccctaaccatgtttataggctctctaaggcgctttatgggctcaagcaagccccaagagcatggtatgaatgccttagagatttccttattgctaatggcttcaaagtcggcaaggccgatcctactttgttcactaaaactcttgacaatgatttgttcgtatgccaaatttatgttgatgatattatatttgggtctactaacgaatctacatgtgaagaatttagtaggatcatgacacagaaattcgagatgtctatgatgggggagttgaagtattttctaggattccaagtcaagcaacttcaagagggcaccttcattagccaaacgaagtacactcaagaattctaaccaagtttggatgaag

SEQ ID NO: 79503 - DNA, 473 bp, Zea mays
  unsure (1)..(473): unsure at all n locations
actcagcttctaaaggagaacacattntgggactaacaaatgttcattgtgagaaagatagggtttgtagcgcatgtcaagcanggaagcaagttggtacccaccatccacacatgaacatcatgacgaccgacaggccgcttgagctactccacatggatttattcggcccgatcgcttacataagcatcggcgggagtaaagattgtcttgtaattgtggatgattattctcacttcacttgggtgttctttttgcaggaaaaaccacaaacccaagagaccttaaaaggattcttgagaggggctcaaaatgagttcggattgagaatcaaaaagataagaagcgacaatgggacgaagttcaagaactcacaaattgaaggctttcttgaggaggagggcatcaagcttgagttctcttctgcctacacacctcaacaaaatggtgtagtagagaggaagaatataact

SEQ ID NO: 79504 - DNA, 438 bp, Zea mays
tcacttacacaatttaggacatctacttaattcatgaatatcatcgtcacacacatcgactcgatttgaattaaccacatatgtctatcacatgaatggagcatttcaacaaatatcctaaaacaaactaacttcatcacacatctttcattacaaacctacttgacttatttgaagtgtctactcgaaaccgtgagtacaatcatacactatatgtgaagcataatttaaggaacgcctaacgtgtatagactcgacttataattatagaggaagtgatgactacttacggcatgtcatcacctctctacataagccaaaacaatttctactatcgactaagagttctaagtattaaacacacggttactttccatgcgcaagtaaatctcaacttaacactagtgacaccgatggatttttataaactcatcatgc

SEQ ID NO: 79505 - DNA, 234 bp, Zea mays
aaaggccaataagtccttttaaaaggtaagatgaggcgaatacgaggaatgtttggggaagagattaaatatggagaagaataattgaaggggaagggttttaaatataaattaaagcctgaaatgagaaatttgggagggagaatttgtgaaatacgaattgagaaaaaaaaacaaatatgaatggttatctttcttctacttcgaaattgtgcgggcaccttttcgtgcgtc

SEQ ID NO: 79506 - DNA, 327 bp, Zea mays
tcattttgagaaagacacgatttgtagcgcatgccaagcatgaaagcaaattggtgctcatcatccacacgaaaacatgatggcgaccgagaggccgcttgagctactccacatggatcttttccgccccattgcttacataagcattagcgggaggaagtattggcttgtaataatggatgattattctcggctcacttggggattcttttgcgggaaactctcaaacccaagagaccttatagggatttttgagaccggttcaaaatgagtgcggcttaaggatcaagacaattagaagcgacaacgggacggagttaaaaactc

SEQ ID NO: 79507 - DNA, 383 bp, Zea mays
  unsure (1)..(383): unsure at all n locations
cagcaaagaagatcctcagaggagaaaatgagcatgcacacttattaactaagtcagcggcacacggcttccactaacttcggaagtattttttgaaacaataaaagcaccttcagtcgagctcatggagagaccagtgcttacaatctcgcccgtacatatcgaagaatggaggactgagatcgtattcgtcttgcaaggaanatgtctttcggatgacgaagcttacatcaaaagaatggaagctagaacaagaccctatgtaatcatagagggagagttgtataaagaaggagtctgctccccattactaaagtgtgtgtctaaaaccaatggtcaagagctgatgaacgagatacatacacgaatgtgccgagctcata

SEQ ID NO: 79508 - DNA, 449 bp, Zea mays
  unsure (1)..(449): unsure at all n locations
ngagtcaattcttctgcaaaagattattgatgcccaaagaaatgacaacggtatgaaacatattcatgagaagatagaggtcgacaaggcttattgctttagaaaggatgatcaaggtatagtatggtttaatactcgcgtagttgtgcctaaggatgccgaagtccgccaacaaattttggatgaagctcatcttagtcgatattccattcatcccggaagtactaagatgtatcaagatttaaagcaacactattggtggacaaaaatgaagattgagattgcacgctatgtggcgaaatgtgacacctgtacgcgtgtcaaagccatacatatggagacagctggacctttgcagtctttgcccatcccaacctggaaatgggaggatatcaacatggacttcattgtgggattacctangacaactaaanggtttgactctatct

SEQ ID NO: 79509 - DNA, 320 bp, Zea mays
tttaatcaactagtacgaaggcccttaatacactagtgttttgtaatctagctagccacatcagaggaacccttctttcttatgtgaaaactatgactgaggtggtccttgggtttatacgggaggagctaacttgacgacacgcttgactcgagccatggtgactcaaactcgttggggctctgcacagtcagcttgcagacggcgaaccatcgatctagccatggccaccagtccggccactcacgtggtgctgcttctcttacccttcaattgcgcgcacgggccatcttgcatgcatgctgtccattactcgcctc

SEQ ID NO: 79510 - DNA, 394 bp, Zea mays
tgctacaggggcttcttctgtttctgcatagcacgaacttttctggaacactaccccacttaaaatgaatgagggttgaactcttcaatcttggggatttgaactccttgaaggacatcataacaagggtgttacggggccttcttctgctgttgctgcttgagcacgatgcatagaaatgactgacacaaggttgattctgggagaaccttcttcttatcttctcttcactatcttctcttctcttattactgaccctttctttctctttgcatcttccattggacgattctatcacagagtattaccatcatacagaggaagaaaccagaaactatgaaccatgtacaacatgtcttaacccaagaatcaccaagcattgtgatcttatggg

SEQ ID NO: 79511 - DNA, 314 bp, Zea mays
  unsure (1)..(314): unsure at all n locations
ctttaaagggagaacacgttatanggttttctaacgcgcatttctaaaaagatagaccttgtgcagcttgtcgagcaggtaaacaagtgggaggagcacatcacagctagaacgtgatgaccacttcaagacccctggagctgctgcatatggacctcttcggacctgtcgtctatctgagcatangaggaagtaagtatggtttaattattggtgatgactattcccgcttcacttgggtgttctttttgcaagaaaagtgccgaacccaagggactctcaaacgctttctcaggagagctcaaaatgaagtt

SEQ ID NO: 79512 - DNA, 140 bp, Zea mays
gcatcatccaaagtaaagctaccatgatgaaaatcatcgtagcattcatcttcgttgaatgagccctcttggaaaactacctgtgttggggcctttggtcatgatcatcttgggtaaggtgacacatttcttcagcagct

SEQ ID NO: 79513 - DNA, 116 bp, Zea mays
tatctcaacctgagaggaagcttattctatagggtgatgtgttatcattgttagtgggggattgataagtcttatcatatgcttcttgcactattatatgtgctgcatcatatgga

SEQ ID NO: 79514 - DNA, 253 bp, Zea mays
tagccataagcatcttttatagattcatgacccagatctgggtaagtggtgggcggaaaatggcaggcgacgaagctcgaagccatcttaagccggtaaaaaacttatgtttgttacttttaccttctcccttgaaatttgtatctttcttactgtgctgcttgatatatacaggatgacgaatctgaagattgacaatgctgaagcttgacaatactgaagacaaagccttagctgaagcttgaaattgctt

SEQ ID NO: 79515 - DNA, 254 bp, Zea mays
tgtgtaatctacttcattatcactagagtcatcatcacttgaagtagtatacttaggggtatctcgagtgcttacctttttctcctttgccatgaggcaagtatggcgctcgttggggaagagagacgacttgttgaagccgaggcggcgagtccttcgtcgtctgagtcggaagaaaagcaatctgaatcccattctttgccaaggtgcgcctcgcccttctccttcttgtaggccttcttcttctccctctt

SEQ ID NO: 79516 - DNA, 250 bp, Zea mays
tgcaccatgatatattgtttcttttcttattcttgaaagatatgggccagtggcataccgacttcagttacccgaaaccttgtccaccgtacataacgtgttccatgtgtcacaattgaagaagtgtcttcgggttccagatcgaaccattgaagtgacagatgttgtccttgaaccagacttgacatattctgagcatcccattcgagtcttggatcaaaaggacagggttacctagagaaaaactctc

SEQ ID NO: 79517 - DNA, 251 bp, Zea mays
tgactgaaatggaagatgctcatgacgaaggatgaagcgttcacgaagctatgtgcagaaaagcttcggcatgacagcagaaaagaggaatcgacttaaagatgaaaagccaaattagacctcgaagaattactatagagttactggtaaaagcaaagggcattaatgtaattttacacgggctgcgtctcgtgcctataaatagatgaatagtactctcgtactgttcacgctgacttggcattagcatc

SEQ ID NO: 79518 - DNA, 253 bp, Zea mays
tccttcgaagggttttctgtcatgaatatccctcgaggacaaaatgagcatgctgatctgctagctaagtcagcagcacaggggctgcctttaccttcggatgtgttcttcgaaacaataaaagcaccttcggtggaacttcttgaaagagcagttcttaatatatctcctgtttttagcgaagattggagaaccgagatcatctcttaccttcagggtaaatttctttcagatgacgaagcttataacaaga

SEQ ID NO: 79519 - DNA, 253 bp, Zea mays
ttcttcggtgccttatttagggtctatagcttccgaaggtggtcaaaaaactcgaagtggaagtgagttcaccggaggtgggcgccaatgttggggacttgttctcaaatgctaagagttaagaacaaggcaacataaaaagtgttaagtgttaaagtccttcgtccttcgaagcattatgtcccttcgggaaataatgagtctcggacgaaggtcatgagagacataccttcgtaaacataacaagtaatga

SEQ ID NO: 79520 - DNA, 258 bp, Zea mays
cagcttgaaaaatatctgtttttggttcgaagagttgaagcttccttcgaagggttttctgtcaaaaatatccctaaaggacaaaacgagcatgctgatttgctagctaagccagcagcacaggggctgcctttaccttcggatgtatttttcgaaacaataaaagcaccttcggtggaacttcttgaaagagcagttcttaatatatctcctgcttttagcgaatattggagaaccgacatcatctcttaccttcag

SEQ ID NO: 79521 - DNA, 250 bp, Zea mays
ttgaatgtgtcttgttttggattgctagctcttgtattgaatgttgaaggttggaatgcttgggtgaagtgaatggaggtggttggggttgtatttatagccaccaaccacttcctagccgttactccattctgctgagcgcggacggtccgcccgccaggtccggacggtccgcccctgtagatcaacggctgaaaatgcaacggtcagcaataacggctatatcaacggctatattgcatttaatgcg

SEQ ID NO: 79522 - DNA, 249 bp, Zea mays
tcggggcagcagttttttcttttcggccgccagcgccgaggggcagaggcgccaggggcttcgagggaaggtttggagatcagccaagaaaaatttactgcttattctgtggtgaagacaagggccataccaccaggatgtgccacgttaccatccagaagaagaaggagatagcagaagcagtagcgcaacaaagtcagccgaagcaggtcatgcatactgcttcgtatcattcgccttatattccag

SEQ ID NO: 79523 - DNA, 249 bp, Zea mays
tgagaccaaacctgtgtcacccaggttaagtgctaaaacatgatttcacaagctacctagcatagtggacatgttgtccttctccatcgtatattgaggagctttgagcctagttgaaatcatgtatattaaagctaccgatatttcacaagtcagaaagtatagcctaggcatgtcaacttctaaatttcaggaagaactacctaagaaaacccctatgatcttctaacactcacaatgattcatcgt

SEQ ID NO: 79524 - DNA, 248 bp, Zea mays
tgtgaaggttcttcatccccacatgtgctaagcggcgatgccacagccagcccatgcaagtcttagccattaagcatgcatctagaccggcctcttcttttgcaaaatcaactaaataaagtttgccgtctaatacacccttaaaagctagtgaaccatcacttcttctaaagacagacacatctatatttgtaaacagacagttatatcccatattgcacaattgactaacagatagtaaattatat

SEQ ID NO: 79525 - DNA, 252 bp, Zea mays
tcgactgcggatactttgttctcatcggcaggccaggattggcgaaattcatggccattccgcactattcgtacatgatattgaatatgtctgcactaaagggatcattaccgtgcgtgccaacttccaaggcgccgcataacgtttccgagtggccattcaggcgacccttactaccaaaccaccgacgactttctccacgcaggccatctcaaagcctgaggaagacctcgcgatacctgcgaatgaagc

SEQ ID NO: 79526 - DNA, 260 bp, Zea mays
  unsure (1)..(260): unsure at all n locations
ntcagctttgttccagtgctctcattatcatgaagaataccttcaggcgtatgtccgaaggttcttatgactgagggcgcaagcgccaacagtgcctaatgaaattgttatcgaggccatgattaaggggcttcggccaggacctacagcccaatatttcgccaagaaaccccctcagaccctggagaaactgcttcagaagatggatgaatatatccgagcagataatgacttttggcaaaggagggaggaagcttaca

SEQ ID NO: 79527 - DNA, 252 bp, Zea mays
ttcttgaggatgagggcatcatgcatgagttctcttctccctacaggccacaacaaaatggtgtagtggagaggaagaatataactctactttacatggcgaggaccatgcttgatgagtacaagacttcagaccggttttgggcggaagcaatcaacaccgcttgctacgccatcaaccatctctaccttcaccgattcctcaagaagacatcgtatgaactcctaactggtaaaaagctcaatgtttcat

SEQ ID NO: 79528 - DNA, 249 bp, Zea mays
tcttgattggtgatcactttttttctgcatccgaaaggaacggccgaccgtgttccacttttaggacctccggataccaggcaaacccgcagcacgtgccaacggtcgtatgcaacggagctggaacagagaacactgatcaccgcccgcgtaaaaatcaaagcacgcgcccaaaggcgctctggccagagatcagctgacgaccggcgcggccccgtcgtccagagatccaatggtcggaacctaaca

SEQ ID NO: 79529 - DNA, 253 bp, Zea mays
tcatgaatgataccttcttttgttacgtacgggcagcttcagccgaagctgtctctttctgcaggaccttcggcgacgaagcatggtcccaacaactggttattgtaatatttgcaacttcgcgtgaatggtccttggaaatgaacgagttcatcgaaactcggcacctcgtgtaagttatctgatccacttacatatctatctgaagccttaagggcaaggattggtgtacatgggcccgataacttggttg

SEQ ID NO: 79530 - DNA, 252 bp, Zea mays
tgaggttgacttgcctaagctacagaaactgcaggatggtatgaagcagtatgcatgacctgcttcggctgtccctgttgcgctacagcttctgctagctctttttgtttttggatggtgacgtggcacatcctggtggtatggcccttgttctcaccacagaataagcaaaatgtccttcttggttgatcttcaacccttccgccgaagcccctagcgcctctgcctcttggagctggtggccgaaagaaa

SEQ ID NO: 79531 - DNA, 252 bp, Zea mays
taagaaaaataaacttattagagggggaaaatgatgtgttcagttttggactactgaactacatacgccatggtctgcaaacactataatatagttgtaatttatcagatctgatttcaaatatcttacattagggattagggtttgagtgctagcctagtcgcacaagtgaaaagagatgaagacgtgctggactcctcatggtgcaggtgtcggtcggcgggcatacctggtggctgggggcgcccctgg

SEQ ID NO: 79532 - DNA, 249 bp, Zea mays
ttgaggcacgtttcttccgagcggcagacgacaaactccggcgaggtcacctagactggccgcatggcaagtgggtacggggccagctcatggtctcatccacggtgaagatcttttcactgctgatcataatctgcacactagagagcacaaatcgtggtggtcggtgcgaatccagtcgctgaggtcaccggtggcaaggtgcattgcatccctgatattttcagacactgtaccatcgggatcttc

SEQ ID NO: 79533 - DNA, 247 bp, Zea mays
ttaaatgacctcttaatgattactatttattttttggtgtttttcaggaaaaggaaacctcggaaaaataccacaaaacaatggtttccaaagaatatggccgaatcagctcaacatcaggatgacaacccacaagatgaccccggaagaactgaaggtactagtgaaacacaggtgatgttgcgacagggaggtgatgttgtgcggcaggagttcgaggaggtggtggttgggcagcaggagttcg

SEQ ID NO: 79534 - DNA, 249 bp, Zea mays
ttgcatgtccgttcctattttgacgcagcattctttgccgttggccaatacaatcctgacctgaaaaccttcccgactagtgttctggatgctgcgtgtattccacattgcccagcatggacctcctccagaagttgcttcccagtggatgggagaacgcacttcatgaggacgcccgatgcaccccttctgtataatgtctccccaatgagtgtatagtgagccgactgcctggcaattcgctctgcc

SEQ ID NO: 79535 - DNA, 250 bp, Zea mays
tcaacctcttttttcctgccatttcctcttcaatcacttaaaccttgcttcatttattctaaatttgacaaatacttcctgattatatttttcatgaaacaactcagtagcaatgcagtattcatctgtgtattttgttgctctagcaatcttagcttaactcagacactcatctatctctagatcttccttttgctacactagcacctactttttagcaatcttagctaagatgtctgtcttcttctca

SEQ ID NO: 79536 - DNA, 247 bp, Zea mays
ttgaatggacgttttctcaagcagtaccatcctagtatgtggcaagatgcttaagaaaaccgatgtgatcacatcgagttagttgcttttggttcgctcagctccaccaaaaggcaagggggcatatgttgagcaccaaattgagaggccggacataagcttcagacattccggaatatacaaaaataagtcgcttaaacacagaataagagcactttaatttgaactgatcttagagaaaaatgtg

SEQ ID NO: 79537 - DNA, 253 bp, Zea mays
taattgacatatcctttttaatcatgtctctttcctttagtacatttgcatatttcttatcttcattgtgtgccaaggctaagactaatatgttttcatgagcatctcatgtattaagtcttagattgaaagggaaatagagtattcggcaaagacatcgcttccactcaactccattggtattatccactctttgccggtatcccgccgtctctccgtatttggtataatcttcactcatgttttatttgcc

SEQ ID NO: 79538 - DNA, 254 bp, Zea mays
tgtgaagattcttcattccaacatgtgctagtcggcgatgctagagccagcccatgttagtcttagcaattaagcaagtgtcgagttcagctctatcaaaatctaccaagtatagctgaccctctaacactcccttaaatgctactgaatcatcacttcttctaaagacagtaacacctatatctgtaaaaagacagttgtagcctattttacataattgcgaaactgaaagcaaattgtaatctaaagagtct

SEQ ID NO: 79539 - DNA, 251 bp, Zea mays
tgccaaatcatatcatttacaggaccaacctagaaaagataaagaagatttagtgataggtctaataccttttggactatggatacattcgtgagagccttagggcgtgtttgcgacgtgtatctagccggctcggcccactcgtgtgaaccaggccgaagttagccggtctcaactgatacaacatatcttgtttgtggatttgtaccaaataagcctggcccaagtgagttgatgtttgccacatgtag

SEQ ID NO: 79540 - DNA, 251 bp, Zea mays
ttgatggccttggtcgtccgttccagtttgatgtgtaggcgcaagagtggttgctggacagagggtaacggcttattctaggctgaatagaccgcttctttgaatccgtcaatgcgtgtctagaagttctcgaagcggaaggagttgtttgttttgcgcattatctccccctgtaagagcagaggtgtgtggtccgacatgagggagggcagggagtggatgtagcaggttgggaagagaagctcccaatc

SEQ ID NO: 79541 - DNA, 251 bp, Zea mays
tggaggcatcgatgtgagcctaattggtgtaaactccatcttcttctcttctgtcgctttgaatgcgacgggttgcacctcgggtgtggaggtggcaccttgctccaagttgacaatgtgtttggagtctttgatcataagttcaaagctcacaaacttgccaatcacttcctcgggagacattagtttatatctaggatccccacgaattaattgcacttgagtaggattgcgaaaaacaagggatctta

SEQ ID NO: 79542 - DNA, 278 bp, Zea mays
  unsure (1)..(278): unsure at all n locations
aggcgacactatatactactcacggtgacaaaaccnctgtctttgatgagctagcacagtgatgctggaaccatcgcacgctagccatgagcctatatcaagagactatttccccattatctaagactaccaaggataaggcgacacctataggacttcactgaggggcgtacgaattgtcattttgaaaaaacaaagtgatacgaacatgaggcaaaaaacagtaggctcatagggtacataattgttaaaccgaatgaaagttgaaattcaaagag

SEQ ID NO: 79543 - DNA, 250 bp, Zea mays
tgtgaaggttcttcatccccacatgtgctaaacggcgatgccacagccagcccatgctagtcttagcgattaagcatgcatctagaccggcctcctcttttgcaaaatcaactaaataaagtttaccgtctagtacacccttaaatactagtgaaccatcacttcttctaaagacagacacatctacatttgtaaataaacaattatatcccatattgcataattgactgacagatagtaaattatatcc

SEQ ID NO: 79544 - DNA, 249 bp, Zea mays
tcattctgcaatctctagataaacctgttcagagaagtaagtcttcctgctagcctctgatccccttttcttgactttggtggctccatccaaagtttctcttcgattttatgcgggtttgcttcgattccctttgttgatacgaggcatcctagaaatttgcccttttttactccgaagacacacttctcagggttcaactttaagcctgcccttcggaaattagcaaaggtttcttggagatctgag

SEQ ID NO: 79545 - DNA, 249 bp, Zea mays
tgacgcctttctctttgagacatcggaatgtcacttcaaggtcggagaggaggtcggaggccttccttgtcttgactacgatgtcatcgacgtaggcctcgactgtgcgaccgatgtgttcgccgaacacatggttcatgcaccgctggtacgtcgcgcccgcattcctcaaaccgaacggcatggtgacatagcagtacatgccgaagggcgtgatgaaagaagtcgcgagctggtcagactctttca

SEQ ID NO: 79546 - DNA, 246 bp, Zea mays
ttttggtagtttggaagcctccctctctagagatggagagaagaacagttcatctgcgaggatattagtcttattgcatcaagaggggttggtgaggtgctccaacatgtactaggggacaacaccatcaacttagtactttagtaagaatttggtgttttattattgtcggcgtttcgagaccggggggtccctgggccgacgagtgaatgtcgccgcgtgccccagcccagatgggtcgagcgc

SEQ ID NO: 79547 - DNA, 253 bp, Zea mays
tcttaatagttgttatattttactttcctgcaaaaaaatctggagggatccttgtaatataattatggaaaaaacttatgtaaatttgtacataccttgtaatatatcttatctcctttatccgtgtacaatctgctttgctgtgaacgaaactacacttttgagccgaaggcgaaaaacaccttcccttcttttcgtacacaacgaagcatgaaaattttcctctttcttcaaagtttttcctcattgccga

SEQ ID NO: 79548 - DNA, 254 bp, Zea mays
tctaaagggagagatttttttgggactaacaaatgttcattttgagaaaaacagggtttgtagcgcatgtcaagtagggaagcaagttggtgttcatcatccacacaagaacatcatgatgaccgacaggccgcttgagctactccacatggatctattcggcctgatcacttacataagcatcagcgagagtaagtattgtcttgttattgtggatgactattctcgcttcacttgggtgttctttttgcagg

SEQ ID NO: 79549 - DNA, 252 bp, Zea mays
ttaccaaatggacgttattagtgccttcctcaatggaccaatcaaggaagaggtatatgttgagcaacctcccggctttgaagatagtgagtaccctaatcatgtctataaactctctaaggcgctttatgggctcaagcaagccccaagagcatggtatgaatgccttagagattttctcatcactaatggtttcaaagtcggaaaagccgatcctactttattcactaaaactcttgaaaatgacttgtt

SEQ ID NO: 79550 - DNA, 249 bp, Zea mays
tgatcgattggcatcctcatttttctactgactattgcggcctgctccttgagacacacaaatcttgctcctggagctgacttctggttgcttttatatttcactgattgatttggcagcattttcccattctttcttgaagatgccaatcgctcccagcgagtataacagctctgcataccaacaaaaagaaacacagctgtaagttgtgatcttaatatatcaacaggcacgttttggttgaattgt

SEQ ID NO: 79551 - DNA, 252 bp, Zea mays
tggagtaagcatggtccctggggggcaatcatatcggaaaccttatgacagccgatttgatcaccacccatacccacagggaaccaggatacccgaattcgcaaaattttcggatgaccaaggaaaaaacacgcgcgaacacataggccagtttttagcacagttaggggaattggtcgacacagaagcattttgcgtgcgtttattttcattatctttaacaggaaccgcgtttgcatggtacgccacttt

SEQ ID NO: 79552 - DNA, 272 bp, Zea mays
ctacaataccttaagcgcaattggagcgttgcgtttttttggccgaaaaatcagagggtgacgctgtttgtatccttttatttttggaatttcggctataccaattctcatatcaccaatttaagttgaagatgtggacattgtaaagattcatttaaaaggataggcactgcgaaaatgtcagcacacgaatgagactacatataattctcaggggctgacgcaggacatcggtgtattgtgtaaacatgtacaccaaatatttttttgca

SEQ ID NO: 79553 - DNA, 251 bp, Zea mays
tctaaagggagattttttttatgactaacagatgttcattttgagaaggacaggatttgtagcgcatgccaagccgggaagcaagttggcactcatcatccacacaagaacatcatgacaagtgacaggccactggagctcctacacatggatttattcggcccgatcgcttacataagcatcggcgggagtaagtactgtctagttattggggatgattattctcgcttcacttgggtgttctttttgca

SEQ ID NO: 79554 - DNA, 251 bp, Zea mays
tctccgccagtcttttcttttcgaacgagaaaaacaagatctcaatgcaaaacttgaagccgaagctcagcaaaattcggatttgagaaaactactgacaaatcttcaagaaaaatgcctggaatttagcaacaagtgcattcaacgactaagaaagattttttactcggttggagctagcagcgaaaaatttaccccctcagctgaagatctaccaaaaaccttcgaacacattgagggggagattgacg

SEQ ID NO: 79555 - DNA, 250 bp, Zea mays
tctgccaaactttttttgtctggctacccccggcattggcaatggcagatcaatttcattctgggatgatcagtggagtcagggcatcccgaggcatattttcccagagctcttctcctttgccaagaactcaaaaatgactatcaaagaggtcaaggatcaagagcagtttcatgatctttttcatttacctgtctctgatcaagcgtttgatcaatttctggtactcaaggggtcttgggagcaaatt

SEQ ID NO: 79556 - DNA, 249 bp, Zea mays
tgcatgctgtttcgctaatagaaagttgcatttttgcttcgtttctttgcatattcagtttggtggatgcaagcgaagatgaatcttcgagttcatttcgtctttttgttgagcctgcacgcgttgactaatataagaaagttaaatcccaatctgttacgcttacacttcgcactgatttgagataaactgtgaagtatatatattagcatttgatcctgacgaaccatggttgatatgtccatcagc

SEQ ID NO: 79557 - DNA, 248 bp, Zea mays
tgaagtaccctacaattttggggatgtgactcctccattatttcatgtgaactgctcccagcaccgagtgtaatagccaataaccctgacaacacaaaagaaaggggcaacataattagttaagaacatacaaaattaaatttgtaattagtagatactcaatcaaaaacaaacaatactactataattttagaacctcaggaacaggttcgctattcactcatttatgaaaaatcttcttaacttaa

SEQ ID NO: 79558 - DNA, 251 bp, Zea mays
tcacgaagaggaaccttctgctatcttaaataaacagcttcagccgaagaccacttcttcctgtaagaccttcggcgacgaagcatagacccaacatcaaccgtccccatcgattccccgtcagcagatcagggctcaccgccttggcgtacaatgccccactgaccccgactggccgtcgggcagtgaccgcacttgtacccaccataaccggaatgggagacctcgtctcaggacgcgtgaggggatat

SEQ ID NO: 79559 - DNA, 252 bp, Zea mays
tgaagccatggtaattttataggccaataatatacgaattgactcaagcctagctacgggtgcataggtttcaccgaaatccaaaccttcgacttgagagtatcctttggccacaagtcgagatttgttccttgtcaccacaccatgctcatcttgcttgttgcggaacacccatttggttcctacaacattttggttaggacgtggaactaaatgccatacctcattcctagtgaagttgttgagctcctc

SEQ ID NO: 79560 - DNA, 252 bp, Zea mays
tcgggtctcttgctttattgctcttgtcaacatgaccagaaataacttgagaatcagttttaagaattgcccttctgattcccattgcctttagcttccgaagacccaagagcagagcttcatactcggcgatattatttgtgcaactaaaatcaagtcttgccgcataacaagttttaactttggatggtgaaaccaacacagcagccgctcctgctccgaaggttccccaagacccatcacaaaacactg

SEQ ID NO: 79561 - DNA, 251 bp, Zea mays
tctgcgactggggcttcttttctgcaaccgatggacattaaccaggagaccgtctctcttcgggaggcccgaagccagaagagaaaggctgtcagcccgacacttcaggaagaggagctagaccaagaaatcagggatatggagatgctacaccaacaagtacaaaggaagaaggagaagatggcccgcctagccgagttgcaaaggcagatagacgaagcctctgaggaagtccgccatcttactcacga

SEQ ID NO: 79562 - DNA, 252 bp, Zea mays
taagctagacgaaggttgtttgagatgaaggacgggctgatcaccaagccgtacgagggatggtgcatagccgaagctatgcgcaggggagcttcggcatagtggcagaaaggggaaccgacttaaagatgaaaagactacttaggctttgacagatcctcataagtcattagcaaatgtagtggacatgaatgtaattttacatgggctgcgtcccacgtctataaatagatgaacagtactcccgtactg

SEQ ID NO: 79563 - DNA, 251 bp, Zea mays
tgcattgcatatttatattccttgtattgcatctagggcttgtctaacctagttgagataaccgccaataaagcgagtgaaaaagcttaactcgggtcaaacctgacaagtcttagtctttaagcttttagcacttaaattctttcttttcatgaaattattggttcttgaaatatgcatgaggtactgcacttagggggagtattcaaaactcaaatcattcttgaaaacccctagtgcaagccaaaatg

SEQ ID NO: 79564 - DNA, 252 bp, Zea mays
tcacaaatatcattttattttattttaaaaaaaacagagaaaccacaacattaacgtctcgcattagcttaatagatccattcaagaggtccacacatatacatgtgcatattaaacatatccatattagagatctctatacattaccaagatctctataggttaacatatccataatcacatgaatgtttgtatcatgttgcacaaccaacttacatacctttcccttgaaaaaaacttgaccaacaatgg

SEQ ID NO: 79565 - DNA, 250 bp, Zea mays
  unsure (1)..(250): unsure at all n locations
tgaaccgagagctctttnnaccggagaagccaaattgcgctcaccggagttcaagaactcgccggcgcacgtggaccgggtaaaacccttcaccatttcccgatttgttgcgcgcacggcctctgtgtcaccccgtgaagcgcctcgtgcaccctaattgacctatgctgccgtggtttggccggagcaggcgtcgccgtcgatccccgccgcctgtgttcgtggccaggggagctccgaccacctctga

SEQ ID NO: 79566 - DNA, 250 bp, Zea mays
tgtaacccctactattatcaccccggtgcaagataatataagcctcatcccccctcttgtgtttcatcttgcatcaactcatctgggcagggacacgcaacgtcaaattcactagtcggttggggtcctcgtgggtccaaaacgccgacaacagtaaaatgtcgtttttaccggatcactcggagttcagaagtagtggtccggtagacttattttcaaggcattccttgttaaaatcaaaaactgcaag

SEQ ID NO: 79567 - DNA, 245 bp, Zea mays
tgaaccggggaccttttttttcggaatagctcaatcgggctcaccggagttcaagaacccgctggcgcacgtggaccgggtaagcctctgcaccgatttccaattcgttgcgcgcatggcctctacatcaccccgtggagctccttgtgcaccttaattgaactataccgccgtggtttggccggaacaggagccgtcgacgacccccgccgcctgtgctcgtggtcagggtagctccgaccacc

SEQ ID NO: 79568 - DNA, 247 bp, Zea mays
tgcatgttgtattttttgattactgattagtgtgttttattgatgttttgtgaaaacatgaaacagcagctcataacgagtatattattcgaaacacatagtgcataaatcttgatgcattttgtgatctttgttctataattttcatgagttgacttggacgtgtatattaccttcaggtggctgttctcacagtgtatgtatttttatatgggaggttataccttgttttgagtggcttagaaaa

SEQ ID NO: 79569 - DNA, 249 bp, Zea mays
ttaccaaatggacgtttaagagtgccttcctcaacggaccgatcaaggaggaggtctatgttgagcaacctcccggctttgaagacagtgagtaccctaaccatgtctataggctctctaaggcgctttatgggctcaagcaagccccaagagcatggtatgaatgccttagagatttcctcatcgcaaatggcttcaaagtcggcaaggccgatcctactttattcactaaaactcttgacaatgatt

SEQ ID NO: 79570 - DNA, 247 bp, Zea mays
tcacgggctactgtcttttttttccgaagcactggcttgcccagaggatggctggagtgggctggccacggtggccgaagctctggcggcaatggcgggcgaaattaagctcgccggagctaaggaaaagtggctggccggtgagggtgagtgcggggcgaagagaggtgcgcccggggagactttataggcgcgggcgggcacggccgaaggcgtgggcgcgcggcgtacttgacccgacgccggg

SEQ ID NO: 79571 - DNA, 252 bp, Zea mays
tttattcagctaatatttttttacagagttgccacctaatttggatcatgtagttcttctttgtgtattcggtgacctagtcattttgaaatcgatgttttgatttaggtttgaattaaggtattctgtaactgatctggcatgaacttattgttctgtcatttttactaaaaaaacagccatggaaagccttccaggttattgcatgtgggtactacctcaatcatgctggcaagaaaatgccctgaaccc

SEQ ID NO: 79572 - DNA, 251 bp, Zea mays
tgtgaagattcttcatttcaacatgtgctagtcggcgatgccagagccagcccatgttagtcttagcaattaagcatgtgttgagttcagctctatcaaaatctactaagtatagctgaccctctaacacacccttaaatgctattgaatcatcacttcttctaaagacagtgacacctgtatcagtgaaaagatagttgtagcccattttgcataattgagatacagaaagcaaattgtaatctaaggaa

SEQ ID NO: 79573 - DNA, 250 bp, Zea mays
  unsure (1)..(250): unsure at all n locations
ttttgacattggttnttagttctaatatacctggctaagggttacaaacagaaagaataagaaaagagaagagttggctgcgtacagccaagaggctgtttcggtctggggcaccggactgtccggtggtgcaccggacagtgtccggtgcgccaggctggctcgagcgacgaggccgctctcgggaattcgacgacaacgtacggctaaaattcaccggactgtccggtgtgcaccggactgtcccgtg

SEQ ID NO: 79574 - DNA, 251 bp, Zea mays
tcggcgacggttttttattttggcagaaaaacagtgcaaatagcaatgaatgctgtggtaacttcacacctactcgtctgtttatatagtgctgcaggtaagaaggcgaagcgccagaatttttacaccaggcggacacccgcttgcactcgctgcgtggtggaccgcagagaccgaacagtaactctgcaaggtggggccgctacacgctgggagattgaatcgtttctcgacaacgagctcagggaagg

SEQ ID NO: 79575 - DNA, 250 bp, Zea mays
  unsure (1)..(250): unsure at all n locations
tccacaagcactgcttttttctatcgncttcagaccttaagtagtcctaaggggtctggccttgaggtcccggaagatatcgtaaacctgacgcgtctgagacatttggacatggatacatccaaaatcaccggcattgggaaactggttcacctgcagggatctgtcaagttccatgttaaaaatgaaaaaggccatactttaggagacttgaatggtatgaatggtcttcgtaaagagcttcatatca

SEQ ID NO: 79576 - DNA, 250 bp, Zea mays
tatgaagattcttttttccaacatgggctagtcgacggtgccagagccaacccatgttagtcttagcaattaagaatgtgttgagttcagctctatcaaaatctactaagtatagctgaccctctaacacacccttaaatgctattgaatcatcacttcttctaaagacagtgacacctacatcagtaaagagacagttgtagcctattttgcataattgagatatggaaagcaaattgtagtctaatga

SEQ ID NO: 79577 - DNA, 248 bp, Zea mays
tgtgaaggttcttttttctcacatgtgctaagcggcgatgccacagccagcccatgctagtcttagcaattaagcatgcatctagaccggcctcctcttttgcaaaatcaactaagtaaagttggccgtctaatacacccttaaaagctagtgaaccatcacttcttccaaagacagacacatctacatttgtgaaaagacaattatatcccatattgcataattgactaacagacaacaaattatat

SEQ ID NO: 79578 - DNA, 249 bp, Zea mays
  unsure (1)..(249): unsure at all n locations
tacctataacgagacatgctgttagncaaaaggtcctcgatcagcaggcctacatcggcttggtccttaaacgactcacacggagacactacactgatacttccttctcgtgcaagtcacccacccggtctcgtctttattatttaaaaccccaaagtttggtacctagcagaggtattcttttcagaagttgaacccaccacggccatgatggatttacatcatatttcttttctttggaaaaatccc

SEQ ID NO: 79579 - DNA, 249 bp, Zea mays
tgagaggatttttctttgttcaagctcgttacgaaaaacgatctagcgccgcgaaaggggctactgttgggcccatgcttcgttgcgccgaaggtcttgcgtgaagaagcagtttcggctgaaatcgtccccaggaaatggccgaaggttcctttttatagagcttcggcgttgcaaaccgacataaagatagaatgacctttttatccatagaggtctaacataatgttgtaaacttttgtaaagggc

SEQ ID NO: 79580 - DNA, 248 bp, Zea mays
ttattccagtgcacctaggaccatgaagaataccttcaggcgtatgtccgaaggttcctgcgcctgagggcacaggcaccaacagtgcccaatgaaattgtcattgaggccatgatcaaggggcttcagccgggaccttcagctcagtactttgccagaaagcctcctcaaactttggagaagctactccagaagatggacgagtatattcgagctgacaatgattttcgccaaagaagggaggaagc

SEQ ID NO: 79581 - DNA, 250 bp, Zea mays
tcggcgtctttatttttttctttttcctgagcccctggcgtccaatcagcaatgaagtcttctaatgcctgggactgaattgaggatctatgtacatagtcaatactgaattcattaagccttgcaacccattttccaatccttccagtagcttctctgttcctcattatgtccttcagaggctgtgacgaaggaacaattatgtgatatgcttgaaaataatgccgaagtttcctagaggccatttttg

SEQ ID NO: 79582 - DNA, 252 bp, Zea mays
tgcttttgaaataaatatttttttatgtaattcgcttccgcatttctttatctccgatgttctgtaatgtctgcaagacgggtgagacgttcctggtgaggtaaggaaagataccgagcttgtcaagtagttcaggggcacctacagggttgtctgaggtccgttggacaaggacaactgtaggtgggcctaattacttgggaggttccgtcacagctggtatcggagctggattaagtatatacggtcaca

SEQ ID NO: 79583 - DNA, 256 bp, Zea mays
tgacaatggaagcctttcttttactcgcctgcaccaggcggacactccccaaaagcctacctaagccaggtgagtgggactctggagttgtcatcgactcaatgtacgctggtgcttgaaaaaaagagcccaccttaatctcaatgctgtcggcgttatctagagcctctagcagaatcattatcacagtccttctgcatatgacaccggaggaatgacttacactactaaattcatgtactgcaaggtcacactc

SEQ ID NO: 79584 - DNA, 250 bp, Zea mays
tccactgcaaatctatattaactcttatgtctcacaagcctaccatttgtcttcaaatggtccgccattgattttcaattggtaactttgagactacatttggcatcatttacatgtcttctccaatacttgtgtcgtagaacctcccaagttatcgagcccacatgcacctgtctttgtcccaaggacctcagacggctatgcatgtgtaccaaacaacttaacaggatctgtccgagtgtcccaagga

SEQ ID NO: 79585 - DNA, 253 bp, Zea mays
tctaaagggagaacatgttatatgtttgactaacgtgcatttcgaaaaagatagaccttgtgcagcttgtcaagcaggtaaacaagtgggaggagcacatcacagcaagaacgtgatgaccacttcaagacccctggagctgctgcatatggacctcttcggacctgtcacctatctgagcataggaggaagtaagtatggtttagttattgttgatgacttttcccgcttcacttgggtgttctttttgcag

SEQ ID NO: 79586 - DNA, 251 bp, Zea mays
tctaaagggagatttttttataggtctaactaatgttcaattcgaaaaagatagaccttgtgcagcttgtcaagcagggaaacaggtgggaggctctcatcacaccaaaaatgtgatgacgacatcaagacccttggagatgctgcatatggacctttttggacccgtcgcctaactgagcataggagggagtaagtatggtttagttattgttgatgacttttcccgcttcacttgggtgttctttttgc

SEQ ID NO: 79587 - DNA, 249 bp, Zea mays
ttaattagatcattctgttccaggatgtgcctgaccacggtgacagcggataccgaacacagatcaagacgttccggttgattaggtgaagtgaagctcaatgggctgagcaggtgatgatcacaagcacgtgtgggcgctaaaacatggacaaaaagagtgagggtggacctggaagcagctagccgcgatgaggcggttcacggcggcgcaatcgaccaaattgggggaagaaggaaattctccggc

SEQ ID NO: 79588 - DNA, 250 bp, Zea mays
tgctttgttactttcttgagcaccagttacatgagtctgtgatttgtgagggacagggcggggcaaggtgacttccatagaagaagagagcagcgaacagagctccctggaggtggagcgaggagacgtatacaactttgagcaggggagcatcctgtacatccagagctaccccaacgccagtagacagcgtcttcggatctacgccatcttcaccagcgaaggcatcaacgccgatgacccctcggta

SEQ ID NO: 79589 - DNA, 250 bp, Zea mays
tgatcaaatgtttttttattgcatgttcctcttttcaagaaatgtgcactaatatcaaggattttacttcatgtttgtgtgacctatggatgatgacttctctttattttatatctaaagaaatcatcattcatcttttacttccttgtgctattaacatctctcttgagtattttcattaagtttggaaggaaaaagagtcaactataaagggaggacactcacatgaaagacattaagtgaaacaaca

SEQ ID NO: 79590 - DNA, 248 bp, Zea mays
tgctacccgcgttcgtgttcagaagagaatcattaaaatgatcttttttagtttcttgtaaaccaatgaaatcaattttttcttccttaatgatttccctcaggaaatcaaacttagaatcacgacccaaaccctgacaattccaaataaggcctctcatgatttaaaacggatcaggagggaggtcagaacagatagactccctttttttcgtagatggacctctacttttaggggaagcctttttt

SEQ ID NO: 79591 - DNA, 248 bp, Zea mays
tgtgcttgcttttttttcctctttcatgtgaatttggtggtaccccgagaagcaatcaaggagggacatgacttcgtagcctgctgtgctctcgacaattttgtcgattcgtggcaagggaaagttgtccttgggacaagccttattgaggcttgtgaagtcgatgcacatgcgccacttgccactcttcttctgcaccatgaccacgttggcgagccatgttggataagcgattggctcgatgaatc

SEQ ID NO: 79592 - DNA, 248 bp, Zea mays
taactgtagttgaaaaagctcaactcggctgaagtttagttcagctgataagctcaactgcagttgaacaagtttagctgcttttcaacaggaacactctaggtttctcaaacctaaccacgatcaaccatagaatgttaaagagatttttggttttccaaaatagcttttgaatttgaaggcttgagctatagcaaacaccattacttgtgcgaaaaactaccaaggaagaattacatcatgcaact

SEQ ID NO: 79593 - DNA, 252 bp, Zea mays
tctaaagggagatcatttttttgactaatcgatgtctgttttgtgaaagacagaccttgtgcagcgtgccaagtagggaaacaggtgggaagcactcatcatagcaaaaatgtaatgacgacgtcaagagcactggaacttcttcatatggatctcttcggccccgttgcctatcttagcatcgggggaagtaagtatggtcttgtaatagttgatgatttttcccgcttcacttgggtgttctttttgcag

SEQ ID NO: 79594 - DNA, 252 bp, Zea mays
ttaattttcgtcgattgttttagctatcgaaagtaaacgtcggttttcgatggccatagtgaggccaccaaaattaacgttggctaccggaaatggtttgaaatgttgttgtccctgatatgtctaaccctgtagatttaacagcagcgcgacatttgaggttagttgatgtggcattctaactaacaaaaagatgtaggatcaaagcgcgatgtcggtgcatggctgcatggaggtaggttgttgcattgt

SEQ ID NO: 79595 - DNA, 253 bp, Zea mays
ttgcaaatttgtgcttctctctcaacttaataattttgatgtcactcattaattcatattaatgtttcgaaattgaaattagcattatgatattaacccgatggttaaacaagattatttcccattaaatggaacatggagtgaccacccaggataacagtgcaacctcgagtgctatcatggctctggctttggtaattagctttatatgcttagtacctagcaaccttacataaaatatgagcaagagggg

SEQ ID NO: 79596 - DNA, 250 bp, Zea mays
tctgaaaccctatatttctcttccatctcccggcagatagataattctttgttgtccgggaggcagtataaaaagtcatcttcgtccgtgccattgaatactaaggctcccttcggatacttcaattcccgggcatagtgattagcctcaaaaatctcttcttcagataatctttttccagaagcatgtcgtataatataattgagggcctcggaggatgcttcgggggcagtagcgtcagattcttcaa

SEQ ID NO: 79597 - DNA, 250 bp, Zea mays
tctaaagggagtattcttttgataggttttactaacgtgcaattcgaaaaagatagaccttgcgcagcttgtcaagcaggtaaacaagtgggaggagcacatcacagcaagaatgtgatgaccatctcaagacctctggagctgctgcatatggacctcttcggacccgtcgcctatctaagcataagaggaagtaagtatggtttagttattgttgatgacttttcccgcttcacttgggtgttctttt

SEQ ID NO: 79598 - DNA, 250 bp, Zea mays
tggtgccgatggtgttttaaaaatccttgaaatcttggctgtcgaactgcttgccgttgtcaactgtcagctcggacggtactccgaagcggcaaacaatgttttgccagaagaatttttgggcagtctttgatgtgattgtggaaacagccctcgcttcaatccatttggtgaagtattcgacggctacgaagacgaacttaaggttcccctgagcggtgggcaggggcccgacaatgtccaggcccca

SEQ ID NO: 79599 - DNA, 250 bp, Zea mays
tgcataggtaccacattatattcaatataatcatggtatgaaccaattgtaaattccacacggaccatacgtgttaccttaagctcaccactgtcgttgaaccattggatgtagtaggggtgtggatgtggaagcgtttttagcccaagcttctctaccatggtggtgcttgctaagttgttgcagcttcctccatcaattataatacgacaagatcgttccaaaactacacatttagtttggaacaaat

SEQ ID NO: 79600 - DNA, 251 bp, Zea mays
tctagatatgttttatttgacaaatgatgagggtgaattggtagttacgaaggtcgcagctaagcaacttcgtcggttgcccatcattcctcggctttcaaggttgttcctcaacaaggaaatagctctgcatatgacgtggccaaagaatggtgtacgtctcgtcactgatccagacttaatggtccatccgtcggacggtgatgcgtggaaggcattagacgagtttgatcccgaatttgcaaacgacc

SEQ ID NO: 79601 - DNA, 249 bp, Zea mays
ttgtcaaatgcttatttatcttttctgatggaagtgtagttaatgccatattatatttcaattttaaattgctcagtgaagtgaggccaccaaggcaaatagctaaagcttcatctgtaatactgcatgaagaaagagaaagttcacagagtcttgacggtagaaccaatggcatgtccatggtccttccataaatgaatcttatcctctgctcatggcaaaagagccatgccttgatgatgttttctt

SEQ ID NO: 79602 - DNA, 247 bp, Zea mays
  unsure (1)..(247): unsure at all n locations
ttaccaaatggacgttttagngccttcctcaatggaccaatcaaggaagaggtcttttgttgagcaacctcccgactttgaagatagtgagtaccctaaccatgtgtataaactcttaaaggcgctttatgggctcaagcaagccccaagagcatggtatgaatgtctaagagattttcttatcactaatggcttcaaagtcggtaaagccgatcctacactctttactaaaactattgcaaaagat

SEQ ID NO: 79603 - DNA, 248 bp, Zea mays
tctaaagggagatcttttgataggtctaaccaatgttcatttcgaaaaagatagaccttgtgcagcttgtcaagcagggaaacaggtgggaggctctcatcacaccaaaaatgtgatgacaacatcaagacccctggagctgctacatatggacctcttcggacccgtcgcctatctgagcataggaggaagtaagtatggtttagttattgttgatgacttttcccgcttcacttgggtgttctttt

SEQ ID NO: 79604 - DNA, 248 bp, Zea mays
tcaataaacaatctgttccctctccatcacgctacagtcagcagagtcagagctcccatcaggcaccctccgttgcaagcaaccagccgccagcaaacgcctgttggcactgcgaggaccccagtcacttcaagaacaactgccctcagttgaaggcaccgggaccaacctactccaactcggtgaatggccccaagattccatcggcacctacctccaaggcgcttccttccaacagctagcagagc

SEQ ID NO: 79605 - DNA, 382 bp, Zea mays
  unsure (1)..(382): unsure at all n locations
actcactaatggttattcagcacctttgccttacctatgcnactagttcattctgccttattattgcttggttggtggctcatcaccaaaagggagattgaaaggaatatggcaaacatttctaaatgattttggggtgaattgccaacacaatattggactactagtttgtctaaatataagtctacangtgccaaggttaacacaaccaataaaggtccagtatggtcaaaaaaatgacaaagaaccaaactgcctgtctgccaccgatatgctgtcacaggtgacaatcactcgcacttcgttctgaaagcctcgtatatacaactgcgttgcaccacatgttcaccacgtaatcacgaactaaagctcatccgacatc

SEQ ID NO: 79606 - DNA, 348 bp, Zea mays
  unsure (1)..(348): unsure at all n locations
ggagttcattccatttatcattacttgatcatcgtggatatctttccaggtagtaccgccaagggctggaccatatgaatttgaatctaaaatgtctatgcaacgaagctggacattgattgcatatagagtccagtgactacgacagagcatatgaaccatgatctgntaacataaattgataggatatgacttaagaatgatatgaatgtgaaaaaagaaagtcaatataanaaactgaatatactgtgagcaagataacagtgtttggtatcaaaaaggagacttataananagaaacattaatataatcttacanacaagaaatggtgggacttcaccagttaa

SEQ ID NO: 79607 - DNA, 395 bp, Zea mays
tcggcgaacaagagatcaaactcttcgagttcaacgaggctgtagatccagagcatctgtttggtgaaggctagtgtcctctaacctatcatgtctcatttactgtataatatgagagtcttcatgtatcttcttaatgaaacatgtgctcacgcacattcttcaaagaagcgattcttcgtgtatttatggctggtacccatttatgctctggaaggcatggaagtgaatattggtttaaggtctcaactcaacgcttagacgatcaacctaaggattgacaagtattatggtttcctatccttgttatcctttagagcagattatcatgattagttctatgctagcgctctactttaatcaattaacatgatgagatccccatgatatactat

SEQ ID NO: 79608 - DNA, 218 bp, Zea mays
  unsure (1)..(218): unsure at all n locations
tcagtaataaaagctgctaacgtctatgactgaattgaggatctatgtacataatcaatactgaactcgttaagctccgcagcccattntccaatcctttcagtagctcctctgttcctcattatgtccttcagaggctgtgacgaaggaacaattatgtgatatgctngaaaataatgtcgaagctctctggaggccattaacacagcatacaacac

SEQ ID NO: 79609 - DNA, 303 bp, Zea mays
  unsure (1)..(303): unsure at all n locations
actagctgtaagactgtttgcaatatgagccggcctggaaaaattactttttttccctggtttacagcaataatactgagctatgatgcttagtgcactggtgatgaacttcatacttttcacacttcacaaccactcgatgatggtgcacacccgaattaaagggacacatcatgtgtgtctcaaatgtgtgcctaagatcaagtctcacacatatgatgactcatggtacanaatcaacgtcacatatttattatataatatgagttatgtacanaaatagctaaataatacatcatatga

SEQ ID NO: 79610 - DNA, 303 bp, Zea mays
acgcttcactttaatggggccggaataagtctacgcggtgccattcgctccattatcaagcgcgaacgattccttttttgcacgggagacaatctcgcgctcgggcggacactctggaaagctctgccctataagtggtgtctagcactctggaggacgtaagctaccgtacatctgttgaccattcgggcgtaggaaggaacacggacacatacggttccgcggccatggcagacgcgtagtgtcagcacagaagtcgtctaggcgcttggcgtatgtccctgcgtcatgacatcgccgcgc

SEQ ID NO: 79611 - DNA, 398 bp, Zea mays
  unsure (1)..(398): unsure at all n locations
ctcagctttagctcttgacataattacttacccagttaagcaaagatgtagaatgaatgtttataagtaaactatgtatgaagcacgggataatgccaaggtcatgcctttctcttcttttatacaagatatgcaaagagtgtatataagaggaagaattacgtacacgtttaaatgaaaggaagtgggtntacccttttgtaccttctcatagagacgctctcttcattgggctntgtccttagtcttaagtgcttaagacctatactcaatgacaatacatggaaatactttgcacaagagagagntatacaactagtgatctttttcaagtatttgtagcatatatcatatggatcacannnattcataatgaatcatgagnatctcttttacct

SEQ ID NO: 79612 - DNA, 350 bp, Zea mays
  unsure (1)..(350): unsure at all n locations
catatttctctctgagttagaattgatttctttcgtcagngagctctcatagcgctacctaatactatgttctcacaatacanaatacttgagttatatcaccaaacataattagagcaacctagtacaaatacaatggttcaggtgtgtatcattaagcataactaggtgaagctacctatccatgtcctctatagtatgtacacaaaagaagattctatcacaaagattcatcaactttattcaacacttatactntgaagaccaaaattgaatactattaatggcggcacanaatccatnntgttctgcaaacatacattaatcataataatctagcatacattagt

SEQ ID NO: 79613 - DNA, 248 bp, Zea mays
  unsure (1)..(248): unsure at all n locations
cttaactcgggctcaaacttgacaagtcttagntttaagttcttagtacttaaattcttacttactatgcaattgttggttcttgagatatgcatgagacactacacttatggggagtatctaaaactcanatctttcatgaaaacccctagtgcaacgcccaaatgcaaatcttaccatttgcctattntctctaaaaattatctatcatgtggcaaaatattttgaaaattatgagaaaatatatg

SEQ ID NO: 79614 - DNA, 335 bp, Zea mays
  unsure (1)..(335): unsure at all n locations
gaaacattgtctgctgtgcataatgtgttccacgtgtcacaattgaagaaggtcttcnggtcccgatcgaaccattgaagtgactgatgttgtcctggaaccagatttaacatactcggaacatcctattcgagttctggatcaaaaggacaggatcacccgaagaaagactctcacgttttacaagatacagtggaaccaacattctgaagatgaggctacatgggaaacccaagactttctagataagaaattcccaggctttntagcctcatgtaaattgaaagcctgtatagctgtgtaataaagaagtgacccccacatcacccctggct

SEQ ID NO: 79615 - DNA, 129 bp, Zea mays
  unsure (1)..(129): unsure at all n locations
ccacttttcacatcatagctattactgtcaccagtatcttcagacaggccttncaggatctccttagtaatcttctctgtatttgggtttgccattgactcaataaatccaacaatataaggattcaca

SEQ ID NO: 79616 - DNA, 209 bp, Zea mays
  unsure (1)..(209): unsure at all n locations
gaaattaatgaaacacaaatgatcgctttcagctctcctgaggagtacaatgacgccctatcaactagaaaaggtgccggcattgntgatgaaataccatatctcacagtgtttctctcacagtatagtcacaactacactatgtgtgggccaacttacacattcgatggagtatggtatgtgngtaacatttcttttgacttctctac

SEQ ID NO: 79617 - DNA, 307 bp, Zea mays
  unsure (1)..(307): unsure at all n locations
ctaagcttacatgggcttgcttctcacagnccaacactgtgtcgaaaactatggtgagcgcatgtgcacactcgcttggaaacgcttaaactatgccggcgtcgtcgtccaaccttcagcanggtcagcttcagcctcagcagncgggcgtgaggaacccctgcatctctgagagagagaagaagaagagacanacggacgtgcggcgcagtcgtgcagcacgtagacagacacccacagcgcccaccaacctactcgatcgatcgactncgtgcgtnctgcaatacattactgtaaaatcggatat

SEQ ID NO: 79618 - DNA, 345 bp, Zea mays
  unsure (1)..(345): unsure at all n locations
gagaanagactgcttantcctcgacacttactcttctggctaacagaaatgtcaggggggcatgaatgtaattntgcctangctgcgtcctatgcctataaatagatgaacagtaacaccgtactataaacgctgactngtaatcactcacacgtcattcctacttttctaccttctgtcaagccgaagtacaaatataattcaaagatcattgatgtttgttataattatataatagagatatgaatagtctaatgattcgaaatgaatattcttatntcctctatgtttcacatctttggttatgtccatggttactgagatcatgaanggtacgtcttcatg

SEQ ID NO: 79619 - DNA, 216 bp, Zea mays
  unsure (1)..(216): unsure at all n locations
tatgctcgaagctgatgggaatcgtcgtaacaagatgacgtccataatctaccagaaatcagcgacacctgtttcttagcctataggccctgtacatnctatgtgtgctcggncacccccttagccacccgctgagtcgaggacgacttcaattcaagtgggagagaatgatgatgacatcactttcatacaaataatgcatgaactgacaacaca

SEQ ID NO: 79620 - DNA, 263 bp, Zea mays
acatatatacctgccagctattggtgtgatcattctttattgcctctatttcaagccttatctctactgaatctactttctcaagagggacccaaacatcacgggtagcaccctctaagagtcccttcaaattaactctcgcactaccaatgctttcatcaccaaacatatctgcattatagcatatgatcttcagatattcaccaccagagagctcatcacactcagacttgtgattccaactcgtcggaccgtatgtgtca

SEQ ID NO: 79621 - DNA, 187 bp, Zea mays
acacagatctctgtgcgaatcttatgtcctgctagaatttatgaatggagccagattaaataatgggtgaaggacgcatcccaaacatcgggcacttctgaccggacggagactcgcaacttcatcttacgtggactgggctacttttgaatataaaacatggccgtggcaggttcattcaaaaaca

SEQ ID NO: 79622 - DNA, 319 bp, Zea mays
  unsure (1)..(319): unsure at all n locations
tatgtgattcaagtggtgagtattcatatgagaacagtgcatgagatacagagaggtggaagagtcaagaatatgtatgacagcaaagcaccaattcctggttttgctcttgtgacagcgttcagatgcagcaggtagtttaagaaagccctgatcaagtatgaactgaagacacatagacacctcanactcatcaaggatgagaagactangatcagagctgtttgtacttggattagttgcaatttggtcatatatggatcanagactagcagatcagagtggttcaagggtgtcaggtttgataatgtccacacct

SEQ ID NO: 79623 - DNA, 317 bp, Zea mays
  unsure (1)..(317): unsure at all n locations
cgcgagctagctcgtggctcaatccaacaataatgtggtacacaaaatcctaattatcatatggtgctagtaccaaataaatgattaatttatgatagttgggattacaatacanaagtaatctatcttctatatataatagtaatatatttattgtactaatttaagatatggtgcttaaattaattttaagatnttatattataatttggagggcaatntcacatttatggtcaggctcgttgagcctatagcgagtcgagccaacttttcagtctcactaaaggagcgagccgaccttgacttggtacttgatc

SEQ ID NO: 79624 - DNA, 74 bp, Zea mays
ctgatctgggccgagcctcatgtatccaggtgggccactgtcaagcgttttggagcccgctaagcatgagcttc

SEQ ID NO: 79625 - DNA, 368 bp, Zea mays
  unsure (1)..(368): unsure at all n locations
gcttggcccgtaccagcagtatgccacccttgccaattgagtaaattatttcttgcccacgcctgtgggaaataataaatctgagacagactgaagtggctattctgtttccatactcaaccagcttataaagccagctggccggagaactacagggcacaaagcaccgacccggtatacttataagcgcctacttcgtttaaatgttgaagggttggatgttttatcgaggggaaactttggagtggctcatagagcgaaacctattattttgacgcacggttgcaagttaacaatgttgaacttttcagatgtgagcttgaattngcagctcgctcgatttgtgctattttcttttgtcaactttg

SEQ ID NO: 79626 - DNA, 76 bp, Zea mays
ctcgcgctggcgctggcccttctctttaaagcctggctcccttataatacagggatgctactgacatatgggtgtg

SEQ ID NO: 79627 - DNA, 357 bp, Zea mays
  unsure (1)..(357): unsure at all n locations
ctaagcttgacactgtgctanggagacacctntcccgagtcagtgtgcctcgtcgccacttgtatatgagtaggtagagtcgggatggtggactctcacagtactagcttttgaccctgggtcangctagatagaatgagcttttggccgtgatgaatctgataactctttggaacatggtgactgtgatgtaagttttggaagaaagttatgcctttgaatctttatgttatgcagaatctatacttcgcttttgctcttcttccgataaacctaactggaaatggtattagaaatatggatnttagatggccgggagcgcgccggcagatgacgcgtnnctcaccgcacacactt

SEQ ID NO: 79628 - DNA, 352 bp, Zea mays
atgcttcgcctatccgtggatggggcccaaagtgcttgatttcttcacttggcattggtgatggaagaaatgatccaccagtcttgcggtcgcgaagtgtgggggcgaactgacttagtgcctttgacaactctggagacgggatggatcatattaaccacttgatcaggggccttgcctatgaacaagagtgggctgagaactctggtgactgcgcggtacctatggctcacactatgtgagtgggtgcctactactgctagactattgtgacatactctgcatgagcgggcgcggagaccctattgcccacccttccgctttaaataatttctataccatttagtatgta

SEQ ID NO: 79629 - DNA, 320 bp, Zea mays
  unsure (1)..(320): unsure at all n locations
acatacctgaagaggacctggagataagcttcacaagagctggaggtaaaggaggccagaacgtgaacaaggtggaacggctgntcgcatgggtcatattccaactggaattgcagntcgctgctcangtataatttcacaccagttcgcatttgcattgtggtgaacaacacatactcagtcttctctatgtacattggatcttatgcaatcgattacaaaanaagcaaataaaagtagtgaatgaattggtggtaagcaaagatgtgaaaactaattgatgcccttctgaaagtaccagaactctctacccctgaatc

SEQ ID NO: 79630 - DNA, 307 bp, Zea mays
  unsure (1)..(307): unsure at all n locations
gcatctcacgttcttgcacatcactngtntaaagccttcgtgcgagcatggttgtgccttgtgggaagatgaatattgtgaagctataatatcttgtgggcaagatgatttggcggttgagaaaattggatcgtcttactgaggacagaccactgtggcgtgcaaggcagctgataaatttgtgacatcgcagaccattttttggttgtcactgagataggatgtgtttattactgcttcttgggagacaaactcatacaatagtgtgggatcttactatgtagtctattacttatagtggatcttc

SEQ ID NO: 79631 - DNA, 232 bp, Zea mays
  unsure (1)..(232): unsure at all n locations
tacttcacaagttaagtactcttcctgaatctatatttgcctaatctatagcattcacttgtcctacactatgcttcatttaacagctctagtttcactcggtatctacgatgaaagtcgaagatccagtcttcatatccaagaagttcggcgatccgaatcgattaatactccagctggtgatctnccaccacacgacatatgtagcacttatacccttgcatatgtcaac

SEQ ID NO: 79632 - DNA, 368 bp, Zea mays
  unsure (1)..(368): unsure at all n locations
ccacgaactcgcttacttgaagcatgatcttcttacttcttgccaactatgcacgctgtatttttgattatctgagaagacattccccaatactctcggtggagaangtgtagatagatcacttcttactaacatggtcacaatggtctcatacttcttcagaagagatctaaggaactctcatacttctccagaagagatctaaggaacttatgagtgagatccatatctggtacattaaaaccaagtcccttgagttcattcactatctcatttaaccggntgaacatatcagatacactntcatcttctttcataatgaattgctcacattctcctttgcacacatataacttggcacttttcac

SEQ ID NO: 79633 - DNA, 265 bp, Zea mays
  unsure (1)..(265): unsure at all n locations
tcttgatggctggacaacatcacacgttatacaggccacaacaagcacgtgattggtgtgcacttgaaaatgatgatctaaaatcacaatggatacaaacttcagcgtaaatacttaccttaacaagcagcctattcttctcagaattatctttcacaattacacccattgattttctagtgtgatcaaattccaaaggtactactcttagcaacattgntccaccaccgacaacacccatgaaaataaataaaattattacatg

SEQ ID NO: 79634 - DNA, 337 bp, Zea mays
  unsure (1)..(337): unsure at all n locations
aggccttgaactcgctacataactatacaaagaccttctctatggcgtcacctgactntgttaatggtcgattttccaaagatagtatggctgggccgcgagggtcgatctttagaatcttcgtctccactcttcatatcanagtcgtcactgtcatcagaatcttcagaataatccgccattatctncttggngatcttctctgtatttggttttgcgatagattcataanacccaacaataaatgggtccatgaccttcttctnctcatncaccttcgtcacatcagaaaccttcttctgctcagacatnntttacaaacttcagcctatcacaa

SEQ ID NO: 79635 - DNA, 310 bp, Zea mays
gccttcaactaagctcttaagctgcctagattccctgatgaatgattgctttggctgagaagctgggattaccttcataactgaccccaatgctatgtagataagtgttatatttggcccttcatagcatgagtggaccgttcggcgaaagttctggcgagccatgaactcactatcgacctacgccgaggagatggcttatgagattttggatgtacaactttgttatcgcacgactacaagttccagtgataagctaccgagcagatggccagccgatggaatctgagtggttatgtaaagtgataag

SEQ ID NO: 79636 - DNA, 181 bp, Zea mays
atgaatttcacgccggtcctgcttaaagataacgactctgatgtatgcgactggatcctttgataccctgacttacttatcattaagcatataattgtttgattgaaataaaaagaatggtctttctctcatcgattacaagctttcttgactctctgatttattcaaggattagtatagc

SEQ ID NO: 79637 - DNA, 408 bp, Zea mays
  unsure (1)..(408): unsure at all n locations
ctcagctntgtaatgcatatctcaaccgttgtagctctggtntactccgttcaagtngcgatagatttgttatataattggctacgcagtaatagcattaattgtgtcatatcacatactcttataattagatattggttatcctatgagtagtagaattatcttactaatcaaagntagtttgtctacgagtataatgtaactaanatattatttctactctagtatgatgtaattaaagttattcctttactatctctatcacataatctggtaaatcaacatanagacctagatcccaatgggtaatcacatagaccttcccaaaaccatccctcttcaaccacaacttcgaagttagtgcttctcgaacccacagtctcgtagcagcgcgtagaatattcttac

SEQ ID NO: 79638 - DNA, 374 bp, Zea mays
  unsure (1)..(374): unsure at all n locations
ctaagctgtgcctcgaggcacaagaaacgggagaactcaaagaccccttaggggattactttaagcggatgggtttttgcctccgagtgtgtaataatattacttctgcactcatatatcgctggtctgtaataacaacactctctctatattttaatgtaaaataagttactggaattgctttcgctcattcgttcctccgatgtgttgaatatctgcgagacgggtgaaacgctcttgggaaaggcagagaatgcagataccgaacttgtcaagtgatcaggtgcatctgcaggattgntcgaggtcccatggacaaggacaactgtangtgggcctaatgacttggaangtccatcacagctcttatcgga

SEQ ID NO: 79639 - DNA, 382 bp, Zea mays
  unsure (1)..(382): unsure at all n locations
ctcagctaccgacttgagcatgtcgcttcccttggcttagtctgctcggctgccattgcgatctttatcaccgtcttgaatctctngataatgagggccatttcttcatcattaagaccggccgcctcaatttgcgccaccttgcttggtagcgcctacttgntccttgtggctttgagagcaaaaaggtgcggctcgttgatcggtccattcaaggcgtcgtccacataccttgcctncttgatcatcattcgcccgctgacgaattttcctatgacttcttcgggcgacattttggtgtacctgtgattctcacgaatattattcaccaaatgaggatcaagaacggtaaaggacctgagcattagtcggacgacgtcgt

SEQ ID NO: 79640 - DNA, 177 bp, Zea mays
  unsure (1)..(177): unsure at all n locations
catactaagaacccttnggggacttaaagctctatcataatgctctacttccgcaatcttctctgaagatagctgctttcctgaagcatgtcgaataatgaattccagctctttatgaggtacttcgggagcaggagatttagatttcttatgagcactctcttccactagtgctat

SEQ ID NO: 79641 - DNA, 298 bp, Zea mays
  unsure (1)..(298): unsure at all n locations
gaaattcttatcacatgaatcatgtaatagttagaagatgtacctcgtcaataaatacatgcatctatagntaactggtccaccaagcttacattcagttgctagatggactactaaatgaaccataaccgtgaaaaacccttggggaaagatcatctccattntgcatagagcaatgccaatngatttttccatatggtacgaactcgtaacatgaagcactatagaacatatgcctcgaanataagcagacaactcanatattacagctatgacatcatctggaagaagacccctc

SEQ ID NO: 79642 - DNA, 393 bp, Zea mays
  unsure (1)..(393): unsure at all n locations
tcttcttggtgctgactcataacnntttgattagaatgagcattagttagctgatgctcaagctncttaatgcaattctgatcagcttggtgttgcgtctgaagttctgtcacctgatgctctaatccaataattcgctcagcttgaatctttgtgtcctccaagttgtcttgtgcctgggtacaagccctattcttggccatttccatcatcttaaatgtngcataacttccagtgtacaactgctgccacatttgacgattgtgccctcgagtagctgaactctacacggcataatactcgacagatgccatctacaaatctgccaatangaatgcttcatatcngcctgtgatatcaccatggtactaggcactgcaggacacctataat

SEQ ID NO: 79643 - DNA, 206 bp, Zea mays
tactgcccattttcgattcatgacagatagctctacatacccgtgagctaccggccttggatgactaagcgcgtggtggcggacaccgcgcgacaaacaccgctgcccgtgaccgacattcacacccgcatcaccgaaccgtggacgcaagctccggcaaccgcctgcgactttgcgcgaagccccgctttttcgcgtctgtcata

SEQ ID NO: 79644 - DNA, 170 bp, Zea mays
  unsure (1)..(170): unsure at all n locations
acatgacatgagcaccatttgcttcacgtcaacagtgtagntgtggagagatctaatagttggattctagtgtaataaccaccatgttttatagtgctagagacnggtatgttagggtgttcatacattgtcgatacatggatggtngaccatagtggcattaacaaatg

SEQ ID NO: 79645 - DNA, 297 bp, Zea mays
  unsure (1)..(297): unsure at all n locations
atgtagtcttatctattaagcaagtgtcgagttcagctctatcaaaatctaccaagtatagctgaccctctaacactcccttanatgctattgaatcatcacttcttctaaagacagtgacacctacatcagtgaatagacagttgtagcccatctgacataattgggatacggaaagcanattgtaatctaaagaatctacaagaaaaacattggaaatagaatggtcagaagatatagcaattntaccaagacctttgaccaaaccttgatttccatccccgaatgtgatagctc

SEQ ID NO: 79646 - DNA, 319 bp, Zea mays
  unsure (1)..(319): unsure at all n locations
ctcagcttgagtatatcttcacccagtcagaattgaatatgagacanagacgatggctngagcttatcatggactatgaactagaaaataattatcacccaggcaaagccaatgttgtggcagatgcactatagccgtaaggttcctgtcactgtcttacgataaagacctctgacaacactctatgtcaagagatggagaagcttaacctgcgaatggtccaacaaggaaccctgaatcagctaaagcttgagtcaatcatcttgcaagggataatngatgctcacagggataatgcgggtatgaagcatatacagga

SEQ ID NO: 79647 - DNA, 305 bp, Zea mays
  unsure (1)..(305): unsure at all n locations
gtctatctcatctttagcctctcattatcttctttgagcttttgatatgtatcatcatatgatcctgcanattctagctcaaaggaagatttgcttgtcgacgaacaacaagcattagcacatggtaatgtgagttcaatttgaatacatgtgcatgagtgaagggtgtgggaatttaagttttctatcacaacctcatgagcaatatttaatatgatatgatcttacataagattttcatgagaacatagtagcatatcatatttttcttgaanatctcgattttcatcttttagcttttctac

SEQ ID NO: 79648 - DNA, 344 bp, Zea mays
  unsure (1)..(344): unsure at all n locations
agcttaactgcatctatcgtatggatggcttttgagtcagtccagtntccctcggcccttctgttatcttcctgacttccatgaatagcaatgggtccttgatccgaangtatcttcatgcacaggtaagcaagatgaagaattgcttctaaagcattganggtgccacgaccaataattgcattgtaagggtattccatgtcaacaatgtcaaacacaacttgctcagttctggtggttgtgatgaatccgaaggtcactggcatggtgatcttgcccagtgctacaatctgtcttcctccgaagccacagagagggtgtgtagcatcatgaatcttatcttc

SEQ ID NO: 79649 - DNA, 248 bp, Zea mays
  unsure (1)..(248): unsure at all n locations
agagattcaacgtctgacgttaaactggagaaggtcagaacagatcatgaagatgaagcctctcgccttcgacttggaattgaaaacttgaagaanaaagtcaacttgaaagaacaagaaaaaataaaattggtgcaatgattaatagagcttcaagacagctgttttgaaatagtttctcgatgctgcaaacgtctgcgcgaagtgtttcattcagttggcacagtattngtaacacccttgaattt

SEQ ID NO: 79650 - DNA, 318 bp, Zea mays
  unsure (1)..(318): unsure at all n locations
ctcagcttcttcgagggtntctgtcagaatatccctcgaagacacaatgagcatgctgatctgctatctaagtcagcagcacaggggctggctttaccttcggatgtgttctttgaaacaataaaagcaccttcggtggaactccttgaaagagcagttcttaatatatctcctgttttagtgaagattggagaactgagatcatctcttaccttcanggtaaatntctttcagatgacgaagcttataacaagagaatagaggcaagagctcgtccatatgtcatgatagaaggggagttgtacaaacatggagttt

SEQ ID NO: 79651 - DNA, 225 bp, Zea mays
  unsure (1)..(225): unsure at all n locations
ctcagcttatatatctctggtaccttgcaaactattaagtacattctggtacccatctcatgataggtccatcaatggtagccaataaagacttatgcacccaaatagccttggtcctagaatgtggtgaactcatcacctttctagcacaagagtcgaaattgggtcttctaagcatatntgaatgtattgacaagttacgcttaagagttntaccctttggac

SEQ ID NO: 79652 - DNA, 266 bp, Zea mays
agtcttagctattatcatgtgtcgagttcagctctatcaagatctactaagtatagctgaccctctaacactccgttaatgctattgaatcatcacttcttctaaagacagtgacaccaacatcagtgaatagacagttgtagcccatttgacataattgagaaacggaaagcaaggtgtaatctaaggaatctacaagaacaacattggagatggaatggtcacgagatatagcaatgttaccaagacctttgaccaaaccttga

SEQ ID NO: 79653 - DNA, 149 bp, Zea mays
  unsure (1)..(149): unsure at all n locations
tcttcagtagagagaataagccctaccatattaaattgatcattctccctcaagtcttagntgtaattacatgtcatgccatgcatatatcttactcattgcattcattagattgccatctcgctgacggagagtatgtgctcacccct

SEQ ID NO: 79654 - DNA, 107 bp, Zea mays
  unsure (1)..(107): unsure at all n locations
atatagcttgggttttagaatcaatgtccaaatcaaatatagagaagatacaaaagagatattgganggcctgtctgaagacactggtgacagtgacaactatgatg

SEQ ID NO: 79655 - DNA, 321 bp, Zea mays
  unsure (1)..(321): unsure at all n locations
agctcgacctctgactactcgctgcgtattcttcctggtgccatagatcctgacttataccttccgactaggcttgatccgcggtttcacatgccacatggacctatcagaatccttccggagatgagaaatgtcttcatgaaacgcctgatgcccccttctgtataatgtcttcccaatgagtgtgtagtgagccgactgtctggcgatacgctcggctgcattnttgcatctaggtcctcctcattctttatatacctgatgantggccttcttcagtcatcacagtctgactctgtgtgaatcacgatattacactct

SEQ ID NO: 79656 - DNA, 279 bp, Zea mays
  unsure (1)..(279): unsure at all n locations
atttcttcattataaccatatcatctgccataacagtagatctaccaaattcaaggtggctaggtttcgctgggctcangatagtgtaatcctcttcatcttcgntatcgctcccttctncaactgtgatttgntcagcttcaacggtcaaggtactttcggcaacaggcttttctggcacaacaagacatgatngcctcatcacgtctgatattgatgctgtctcaagtactttggccctcgtctcctcacgagacactctagcagtcgatcatactc

SEQ ID NO: 79657 - DNA, 143 bp, Zea mays
ttgtggtgatatatcatgaagtaataaatgagaagaccagatttaagaaggccttctttgcccttaaggcttgtgtagatggctttttgaatggatgcagaccatacttggcaatagatagcactcttttaactggaaaagtt

SEQ ID NO: 79658 - DNA, 269 bp, Zea mays
actagcttactttatttatttaatatttattcttggtacacccgataatagattttaatacacaaattaaatcgtgaaattccacatgatagcagactcaaaaaaatttctatcttaaacctcatcaaagacagatcgtaattcctacgctaaggtaaacaaagcgcccatacatggcaaatggatttttggcattaaaagaatatctgacttgtaccaaaaaaaatgatgctataaccatcatctcctaatagaaattgcgcgttgtt

SEQ ID NO: 79659 - DNA, 382 bp, Zea mays
  unsure (1)..(382): unsure at all n locations
taggacctatgatactcagcttcaagcctgttgctctccacatgtgcaagagaaccgtgaatcacgcctgtgtcatacagcanaagtgactcctgccctggcagattngaagtatttcactatgaccgcttgcttcgacaatgggctntgggcgattgatgaattagttcaccctattgcttcaaggatggaatatcattntgtcaaatggtctgaacagccggagttcattntcacccttgtttacaagataacaaaagattntatggatggagtggatgatgtactgcagcctttgattgatcaagcaaggctagtaggattaagtgccaaggaatcttgngtaactggaatggtgaanattcttgtaggataccttgag

SEQ ID NO: 79660 - DNA, 388 bp, Zea mays
  unsure (1)..(388): unsure at all n locations
tactcaagctatatatgagaatagaagcaagagctcgaccatatgtcataatagaaggggagttatacttgtgtggtgtctgttccccattgctcaagtgtttatctagatccgaacgtatagaattaatgaacgacatacatgcangtctgtgtggatctcacattggatctaagcccttgcatggtgaaagttttcgccaaggattttattggccaaaggcagcttcggatgcagcggatttagttcataagtgcgaaaggtgtcagaaatgtgcaagagatcaaaaacaacattcgtaattaatacaacccactttggccgtgcataggtggggtctcgatttgctaggaccattaccaccagcacaggggaacttaagatatgt

SEQ ID NO: 79661 - DNA, 262 bp, Zea mays
  unsure (1)..(262): unsure at all n locations
actctagaatatncttgaacttgctgggatcaaccgcaatcccatttgcagacaatacatgtnccagaaattggatttccttcagccaaaacgcgcacttgctaaatttagctataattgatgtcccttaagcgcgttaatacgatccgtaggtactgagcatgctcctcttcattcttggaacatatcaagaaatcatcaatgaagaccacanatttgtccaactctggcataaataccgagttcattagatatgtgaagt

SEQ ID NO: 79662 - DNA, 234 bp, Zea mays
  unsure (1)..(234): unsure at all n locations
attataaagctgaatatcttcgtgtgggccgtaagaagccaatgtcttgaagcctgacgcacaaagcttctgcnatatacatgaattatcatatgaaacaacaccttggggtaaggaacagtatcacaacaattttggctgctacatgtttgtttctcggttcaggtcaagcttgcccgtgccaaccttttngaaaagatggcccggagactggatgacngaatggttctatgt

SEQ ID NO: 79663 - DNA, 327 bp, Zea mays
  unsure (1)..(327): unsure at all n locations
gtgacgatgccacagccagcccatgctagtcttagttattaagcatgcatctagaccggcctnctcgtttgcaaaatcaactaaataaagnttgtcgtctaatacacccttaaaagctaatgaaccatcacttcttctaaagacagacacatctacatttgtgaatagacaattatatnccatttngcataatngactaacagataacaagttatatccaagagactcaactaanaacacattagatatagagtgctcggatgaaaatagcaatttacctaacccttttaccttgccttgantcatatcaccgaatattattgaatc

SEQ ID NO: 79664 - DNA, 126 bp, Zea mays
  unsure (1)..(126): unsure at all n locations
ctaagctntttggacaagtgctgcacttaccgctgagtgtgaagcaaccacatataacagcagagtggnctttctgtcgtnggnggagttaatgttggtaggtctatcanatactgcttcagctcg

SEQ ID NO: 79665 - DNA, 325 bp, Zea mays
  unsure (1)..(325): unsure at all n locations
ttcttagacatattcganacanatgattagccagcacattncgaaagcanacctgaatgtgaagcatgcagttgcttagctcggtcattacagctaccaagcaaagcanggttccctccatcatcattctccacccgatccttctcttcaatggcttcaaacacgcttgctcttagctcagcctagtcatgcagccagaaacatcatcaagaaaggtggcggaagcagaagtatgtgcattcggtggagaatagcatgattcgatagagaaaaagattaaaaaanaaccatgatagctggatttatctattgtatacacaatctt

SEQ ID NO: 79666 - DNA, 479 bp, Zea mays
  unsure (1)..(479): unsure at all n locations
tgtcactcaggtcaccttactttatattcttttcacatcttattatgcatatcatcatattntagtgtgtcgggacaaaattccagatcatggttgaatgaaacattntaatgtactctgcagctncttcataagagctagttacaatgtactatgcggcacatttatactgtaatctctgtagagagaggaactaatcgatcgccaatgtggaaatgaagccatccataaatttctggttcaggataaaattggctgcantggataaaaacaaagcgcagctatgaagtatacctagtgtgcttggccaatttggggccctatacngttggatagctgtgcattacatgtaataagcttttggtctggctggcatanngggctgatgactctcctccgcacaaatatagtcgtttactctcgctttatgctggtcgatgaatgtgataatctgactattataaacaatacataatatt

SEQ ID NO: 79667 - DNA, 326 bp, Zea mays
  unsure (1)..(326): unsure at all n locations
agctnntcaagcaaaccgaaccctgcctaccggacagcgagacaccctcgcggactttgtcgtccgcaccgncacagaccgggctacagtacaccattgtcaattgtcggccacgactccctaactccgtgaagctcccactactggatgagtattctgccgggtaggcgggatctcgcgcaacgagcttcccactgagcacgagtcgaccaattggcatcccgagacacacacatatggaccgcgaacctcctacgtatcgacagtaccgagtatctgcacgaagtctgcgccttctcaccgggctattctgagcacctaagggg

SEQ ID NO: 79668 - DNA, 351 bp, Zea mays
  unsure (1)..(351): unsure at all n locations
agagacattngaattatcttgtaaagatatttgtattngagaatcanactattactctgtatatntgtccataccttgtaatatatgtttaccttntcatccgtgtgtgaatggctntaatgtggacgaaacttgtatctttngagctgaaggcgaanaacaccttcccttcttttcgtacacaacgaagcgtatctttgcttctttatgctcatcgaagcattgtcatcaaagccgaagcatctgtttgtactctatgttatgatgatgatgatcctacaaatgtctatatgaatgtgtatgaatgcaatgaatgatgtaatgtaatgcgcanatgaatatnncaacaca

SEQ ID NO: 79669 - DNA, 319 bp, Zea mays
  unsure (1)..(319): unsure at all n locations
ctaagcttcgctacccttttncttttccggccttcgacaatttattcagntggtcgttgttcattgtattanaacccaangcatncagcactcgatttagtcttcgcatcggacgggtaccgaaggccgcagtcatcaactgatcttcttttttggagtaattaccgagtatttcattgcacattatttcaattgtgtccagccactcttggcaaggtggtttagagtatttcttatacttgtaatagtaaggtaaccgcacaagttccccttctttcttctnctcctctagcttcggcatntcccattcttttaaagt

SEQ ID NO: 79670 - DNA, 362 bp, Zea mays
  unsure (1)..(362): unsure at all n locations
gctcacatatactactgcaggttagtgatccgtggatgtatatccagagntgtatgtcgaaaacaatctcgtacaagctgtaaaagttttccattggctgtgaggctttcatttgtattataatggacgaatccctttgaggaacaaaagggccctttgaaagccagctcgtagccctttgctagctacactgtgaaacttgacctgttttcagttatctctggtctttctctgatnttcccctcttttctatagtgtccttcagaanactcgcangatggctatntnnctgatatacaagnttcgttcactaaatatttntntaacaatatangtcatgtttgatacatgagttaattact

SEQ ID NO: 79671 - DNA, 229 bp, Zea mays
  unsure (1)..(229): unsure at all n locations
ctcagctatatcatgtctatttgatcatatgcatatttaattaaacaacccagtgaaaccatcgagccccgaagacttctcatatagaagctggtgaatgataccatccatctcttattttcaaaggagcctcatgccacatagttcaaatttgtatagcataagcccttccaattaaaacttatngcttcttgcttgtgtacgcctaacagaatctataaatgattat

SEQ ID NO: 79672 - DNA, 114 bp, Zea mays
agttggtgctcatcatccacacaagaacgtcatgacgaccgacaggccactggagggtctacatatggatctattcggcccgatcgcttacataagtatcggcgggagtaagta

SEQ ID NO: 79673 - DNA, 296 bp, Zea mays
  unsure (1)..(296): unsure at all n locations
ctaagcttggtggtggaatgtctgctcagntgatgtcacatggtgccactgtcccggaaggagctgtatctctaatgcattggaacccatcgctgcttcagaaacagattgctgacttgaaagtgtgaacgctggtagtgacatcagttcttccttagctattttgattgatcaacttggttttaaccatgtatcccttttcggcttgcttgtcagatatggctcggcggtgctccgagcttgaggaanaacatcttcanagtcaagccgactcaacccaacggtactctgatctt

SEQ ID NO: 79674 - DNA, 200 bp, Zea mays
agacagagaggacgctaaccatgtctataggctctctaacgactctatgggctcaagcaagccccaagagcatggtatgaatgtcttagagaattccttattgctaatggcttcaaagtccggtaggtcgatcctaacgttgtcactaatactcttgacaatgatgttgttgtatgccaatatatgttgatgatatcata

SEQ ID NO: 79675 - DNA, 311 bp, Zea mays
  unsure (1)..(311): unsure at all n locations
acacattaatccttaattcattnttcccgtctcatggacaaggcattctctctgtatctatgtccatagactaacatatatcccattatcaagatgaatacaatcaattcctgacctcgcgcgagtgctagaaaaatcactcgacttctaccgagatcctgattagcaagcagctactcaacctagcatactagtattcatctcaaaaaggaatcctatagtcatgcaactagagggttcaagcaactcctacacttaagtgcacattcaatcctacaagcattaagtgtagtaaagagcatataataata

SEQ ID NO: 79676 - DNA, 278 bp, Zea mays
  unsure (1)..(278): unsure at all n locations
tgcgattctcacttatatgacccanacgacagtgccacatgtaggtaggacttatatcattaggccgagaccttntagcactaatattacagataggtgcatcatcaagatttanaatgaatatcccattcataatggatgcaaaagccacaaacatgccattcttagagatcacacaaccattggtntcactcgcaaatgaataaccatccttcatcaaacatgaaggagacatatatgttcgactcatactangaactagataacaagtatttaac

SEQ ID NO: 79677 - DNA, 205 bp, Zea mays
  unsure (1)..(205): unsure at all n locations
ccatcatcctcacaagaacataatgacgaccgacatgccgcttgagctactccacatgganttatttgacccgatcacttacataagcattggtgggagtaagtattatcttcgaattgtggatgaatatnctcgctgcacttgggtattctgttgcatgagaaacctcaacacaagagaccttanagggattcttgagacgagc

SEQ ID NO: 79678 - DNA, 506 bp, Zea mays
  unsure (1)..(506): unsure at all n locations
ctaagctatctgagctatgaacccttggataagttgaactgttgnacaagatttgcttattaattaattattgctctataaaggagaagagttctaccnctcggtaattaaggcacctgatgtcttagtaaagaatgaaattgtctaacaagttntggatggctagaggagttctaaggataagtagctccctggtagctattacttatgatgatagcttgtacgtataatcatgtaatgctntataataccttatttgctaactacataagcataagcatccatgatcatgtcatttcatgtagagctcccanaataaagagtgaagaattcagatgaagtggttgctaagaggagtctactccagtgcctgttgatcctatggtggagtttcatctaactacttaccagagtaggataattctgggatcttctnctgcaataaaggcaagccctggtgcattngctacctccctttgtgttataaatttatcactatatgctga

SEQ ID NO: 79679 - DNA, 288 bp, Zea mays
tttaatctggacaggtatatcatttgacctaccatagaggatacatgagcagacaaagtgccactgtaaattactcggggataaaacattgattaaatattaatgcactgcagctgcattttgaatgtaaggatattgaatactttataggagtacttgggtgtgtattgggaccatgatacaagtcacgttggtactactaaaatagctgttgggctttgtagaatatttaatagattgacatgcagccttatgcactaatgacattttcctttaacttgactagag

SEQ ID NO: 79680 - DNA, 435 bp, Zea mays
  unsure (1)..(435): unsure at all n locations
gcttgccttcgcctcagtctatcatccgcagtccaacggagtcgnggaacgcgcctatgggttaatcttcacagctgtcaaaaagatgctcctcgatngaaaanaggcagatggaccgatttgtacccgaggcagtctgggcactaaacacgactgagtgcagggcgaccggatntacttctttccgccttttatacggatcggaggccatgaccccacaagaaataaaacatgggtcctcgcgaacagttccgtcagccgtcctcgacgtggatgagccaacttcaaaggatctcattgacggagaccgagtcttcgccctacaggccctaaacaaataccaagcccagacaaaagcatggcgcgaccacgcagtcattccgatggaattcagcgaaggggacctcgtactcgtccgaacagctctgacagagt

SEQ ID NO: 79681 - DNA, 348 bp, Zea mays
  unsure (1)..(348): unsure at all n locations
tacttgtcaaagcaacagcatatgcctgcacaacaactgcataccataccagtatacctgcctttcgcatgctggggactggatatgattggacctttcaagaaagctcaagggggatatactcatgtactggtggccgatgacaaattcactaaatggatagagttcaagcccattgcttctttaacctctgctaaggccgtggaattcatacaggatataatattcagattcgggataccaaacagcatcatcactgacttangatccaacttcaccagctcagaattctntgacttctgcgagcaaaanagcattcagatcaagtacgcatctgtagcacatcca

SEQ ID NO: 79682 - DNA, 214 bp, Zea mays
  unsure (1)..(214): unsure at all n locations
aacnttgactcaatttttgaaacagtttttttttttttaagagtggtcatatcccatactagagatacgcgtagtctcatggttatacccaccccatacatcggatatatgctgatgggtatattcgctctggatttttgagaaaaacaccaaacctagggtctgacactcatgatcgatagaagaataaacactgacggcaaacttatgagtt

SEQ ID NO: 79683 - DNA, 435 bp, Zea mays
  unsure (1)..(435): unsure at all n locations
ctaagctnctccagctcctctgggcctttctggtctaagtggtatactagagaattcggtttaggtcgaacatgacattgcaccttccagaaggaagagaacatctgaagaatccaatagagaaccagggactgatcatctgcatcaatagatagctgtccaccgaatgccacttgatgcctctctacaaattacagtagtctagaatgacaaacacatatatgtcactatggacctagactacagtctacatactattggaaacaaagaacacatagttgactgaatcacatgagaattgaatctgcactcactccggaatcgacaagatgtcgtgactaggaccgtgcagcgttctatatcatgccttatatgtacgcgagatggatatctggtaaatacagagaatgtacttactcgtattatcaaattact

SEQ ID NO: 79684 - DNA, 413 bp, Zea mays
  unsure (1)..(413): unsure at all n locations
ggtcatgctcacacttctagattgagtgtgagatcatagcgaagctcgtcgaaggctataagatattctctgcatatagatgcaacactatgacgagttgactnaagaacatgaggagctagagtgctctcatgttgatttggtccaaaggtatgaaactatntcaattgagcaagataatgcttcacattgcatcgctcaattagtaaataggaataccttgcttaaggaccaagtggattaggtaacaatgaacatctagcttttcaagagacatatgatatgctcctatgctctcatgaaaatcctagagatgatcatatcatattaaacattgctcatgacggtgtgatagaggaattaatatcccaacaacctcactcatgcacatgtattcaaattgatactatatt

SEQ ID NO: 79685 - DNA, 192 bp, Zea mays
accctctttgctggtgatgctcaaacgtgatatcggatgttatgtcttagtgcggctgtgacaatgggattatcccgcatgtggatttactctcattatcacataggagtgggactttgctcaacttgagccatagactctacgcgcttgctcatgtagagaattgtgcccacaatgtcctgcagcatatac

SEQ ID NO: 79686 - DNA, 230 bp, Zea mays
  unsure (1)..(230): unsure at all n locations
taaattattaagaaanatgcttctacnncttttgcttgattganncangannctaacccctgcaatcaagntcttggtaagaaatgtgtatataaacatgttcggatgagattgcaatggagaatgagcaattaaagcaataagtggctcgccttgtcaaggctttgtatgacaagaaaggcaaagccaaacaaatccaacctcctcgggatagcaccagtgcgggagtg

SEQ ID NO: 79687 - DNA, 303 bp, Zea mays
  unsure (1)..(303): unsure at all n locations
tgtcaagccaggggagcagggttggagttcatcatccacacaagaacatcatgacgatcgagaggtcgcttgaactactccacatggatctattcggcccgattgcttacataagcatcggcaggagtaagtattgtcttataaatgtggatgaatattctcgcttcacttgggtcattcttttgcagganacatctcacacccaagagaccttaaagagaatcttgagacgggctcanaatgagtntggaatgagaatcaagaagaataaaagccacaatggaacagagttcaagaactctc

SEQ ID NO: 79688 - DNA, 274 bp, Zea mays
  unsure (1)..(274): unsure at all n locations
gaagacagtaagtatcctaaccatgtctataaactctctaaagcgctntatgggctcaagcaagcaccaagagcatggtatgaatgcctaagagattntcttatcgctaatggcttcaaagtcggaatagtcgatcctactctattcactaatactatngcaaaagagttgtctgatgccaaacttatgttgatgactatcatattgggtccactaacaaatctacttgtgaagaaattagtaggatcatgattcaaaaattcgagatgtctat

SEQ ID NO: 79689 - DNA, 352 bp, Zea mays
  unsure (1)..(352): unsure at all n locations
actagcttggtttgaatggataagtgagaccgggcgggtgacttgcacgagaagatagtctctgtgtattgtctccgtctgagtcgattaaggaccgtgtcgatgtaggcttgctgaccgatgacnctntaactggtcacatgcctcgtcaagggtaagccttgccttcggcagactaaggccagaataagataacacgcaatgggcgtggagcggtggcgagagtagcgtgtaccctccatggcangaggctggacggtggtgtatctgtgctctcnggtgacgtgaacctgatctggtcttaagaaccccggtcggcgggttgacatatgcagggttaagtgctacatat

SEQ ID NO: 79690 - DNA, 365 bp, Zea mays
  unsure (1)..(365): unsure at all n locations
ctcagcttcccacatcaactactcacttagctaacaggacattngntgagtatgttaatgtgtactcacnctngcttaanaacaacaaacaccaggttgtncccattgtaactagtgctcaagagaagatgaaggctatatggaggactctttggagcttcaggactttgagggagtctagaatagattagtggcaaacccccagtcagctgcctgtgaagtccttatagtactggtgtatcgtcagcactttgattatgaattaagttattgactntgtggatgttcgaacatcgtgatgaataaagtattaattccgctattattttgagcaatgtgtgatgatgtccaattatgtaaatcgt

SEQ ID NO: 79691 - DNA, 272 bp, Zea mays
  unsure (1)..(272): unsure at all n locations
acatgtgctaagcggcgatgccatattcagtccatgcaagtcttatccattaagcatgcatctagaccggcttcttcttttgcacaatcaactaaataaaagttgccgtctagtacacccttaaaagctagtgaaccatcacatcttctaaagacagacacatctacatttgtaaataaacaattatatcccatnntgacataatgactgacagatagcanattatatccaagtgactctactaaaaacacattagagatagagtgctcatt

SEQ ID NO: 79692 - DNA, 394 bp, Zea mays
  unsure (1)..(394): unsure at all n locations
aagacattcatgacgctcgagaagcaacanaagcagctgtaatagctgctgaactcgaaagacggataagtattacttaatggcnntttaactctgtgtttatntttgcgacttcgaactaatttataccttctaccgcagctgaactatctnnctccccagagccattcgacccactggccgatccagagacaaagaaggcaatagaaattattaatatggctgaagctattgtagatgaagttgtcaccaaattactaaccgaagctgcagaataagtcttgaaggaagatgatagctatttgtaaaacattctaggaataatgtacattngtgactatgttataatattgtgctatgagttgaatgtatatataatggttgtatttagtct

SEQ ID NO: 79693 - DNA, 283 bp, Zea mays
gtacctttatcgtacgattttttttcaaaccgtccctatctaaaactgtacctttagattaaacaagcccacatccctcagaaatgtaaatagttaatgactgcaagtacccaagcaaaaacttcttgtaaaacatatgcgcggtttacttaccctgcgtaaacgaacgaatatgaagctttgcacgtcgtactattacttgcacaattgtgtttagtgactcgtgaacgattggctcaagttaaaaaagtgtgaaactactacaaaaatggttatcagcaac

SEQ ID NO: 79694 - DNA, 283 bp, Zea mays
  unsure (1)..(283): unsure at all n locations
cgtctcagactgtngaanaccagctgtaagtcttcgatgaagtcttccgaattcttccgtttgattaccacatcatctacgtaggcctccacacgctngccccagtgatcggctaagcatggttgaatggctctctgataagtcgctccagcgtttttgaggccgaacggcatagaggtataacagaaagcaccaaacggagttgatgaacgctgtttttnctcgtcttccttcgccaagctaatctgatgatacccggaatagcaatctaagaaagacagca

SEQ ID NO: 79695 - DNA, 364 bp, Zea mays
  unsure (1)..(364): unsure at all n locations
agctatactaaagtgtatgtcaaacaatgcgttttcacaaggcanaatgtgctttttttatacacnnnctattgagcctataagcacaattcaagagaaagggcaacaagagtatgacatatctggaatcatggcttgggctaattattaacattaaagtatactaaatangcaacaacaaagaataacgaagcttggccataacaatntaaatanaaatctaaacaagcctctcaagtggatttcattatggaattctgaaattcagacatctaaatgtcagaccttgagccatagatcaagcgtgttcaccttgatccctaactcgaactctaatgggcccattgacanaaacatgcataac

SEQ ID NO: 79696 - DNA, 332 bp, Zea mays
  unsure (1)..(332): unsure at all n locations
tctacacgctggcnccagtggttagctaagcatgtcttaatggctctctggtatgtctctccagncgttttgaggccaaacgacatggaggtatagcagaaagctccaaacggggtgatgaattgctgtntttcctcgtcttcctttgccatgctgatctggtgatacctggagtagcaatccaaggacaacacggaacacccggcggtcgagtctaccacctggtctattctaggaagtctgaagggatgcttcgaacagtgtttgttgagatccgtatagtcaacgcacatgtgccaatccactttattctttnttagtacaagaacatg

SEQ ID NO: 79697 - DNA, 213 bp, Zea mays
tgggatgctctttgattagagatacagatggctcgagatacaaggattatgttatgggtttgagtcgactatgatgatgttgttcctcaatgaggaaatggttcatgggctaggtaatgcttaaatctggcttctactaatgataaatacctgaccaactaacagcaactgcttgagcctaaccccacataaaggtagtccacttcagcccaa

SEQ ID NO: 79698 - DNA, 212 bp, Zea mays
  unsure (1)..(212): unsure at all n locations
cttgatagcaacttgcatgtcttgtatgccagtgtagatggtgtcacaggtcttgaggctacaactgagaaggaagtggagccacatgtcgtggctntcgagtctaggacgtgacctcaagaaatgggtcatgttgagtcaaggatggttcacaacaatgtgtagatggcaagtcatgcctagtcacaggcctcgcggaatgaggtcgcatg

SEQ ID NO: 79699 - DNA, 117 bp, Zea mays
ttgactaaatctgaagttagagcttacatgctatcagcaacacttataaattgcgtaacctatgtacagtattagcataaaacgctgccagtcagacaaaatgcatgttatatttct

SEQ ID NO: 79700 - DNA, 317 bp, Zea mays
  unsure (1)..(317): unsure at all n locations
ctaagcttcatgtgcacagtcatttagcttggaatactcanctctngatatatgtngaatgtaatattcgtttattgaccatgtaaacattgatattctcttgaaatnntgtggagaaacagctgagaatcaccaaacactttcacatgctttactcncatatatcctaatagttctatgccaaataagaaagcttcatactcagtgttgggggccttcgtcttccgaaggtcctcaaaaacgtaattgactattgtctccanaagaaatatgtgaacatgtaccttcgaagtcaagttgcgagtatacaaaagcat

SEQ ID NO: 79701 - DNA, 310 bp, Zea mays
  unsure (1)..(310): unsure at all n locations
gctctaacgggagaacacatttgngactaacanatgttcattttgagaaagacaggatttgtttttatgtctngcanggaaacaagttggtggtcatcatccacataagaacatcatgacgactgacaggccactcgagctcctacacatggacctattcggcccgatagcttacataagcatcggcgggagtaagtattgtctagttattggggatgattattctcgcttcacttgggtgttctttttgcaggagaaatctcatacccaagacaccttaaagggattcttgagacaggctcaaaatgag

SEQ ID NO: 79702 - DNA, 138 bp, Zea mays
  unsure (1)..(138): unsure at all n locations
aacatgtgtcgagtcagctctattacatccactaagatagctgacccttacacacncttaatgctatngaatatcacttcttctaaagacagtgacacctatatcaagaaaaagaccagtgaacccaattgacataat

SEQ ID NO: 79703 - DNA, 219 bp, Zea mays
actatgtgatccccaggatacttcagaactttagcataatgatgagcttcagggatatgcttctttgtctagtggtttcccgaagcatggtgaatgatgaattcaaaatccccgggcgatactttgcttgatagactttcattcacctgctctgttggcctactttacgaatgtccagcatcgacactgtcaagaaacagactttcaccagcatttttc

SEQ ID NO: 79704 - DNA, 290 bp, Zea mays
taatactgagagagcctgataaactcgcaactatttttgtaatcatccctcaaatgcacaggagccgctatgaaagcaatagacgacggttgcaaggcgagaaaaagatcctaaaaggcgagcagtgcgatgatcacaaatacatctcaaagacgtcctgctaaagatcttcaaatgcacgcttgaagcgaacaaagtactactctctataattagaaatgagaagagaatccctttcctaagaaagaatatatgttcactaagtactgacaagtcttaaaaagttagaa

SEQ ID NO: 79705 - DNA, 313 bp, Zea mays
  unsure (1)..(313): unsure at all n locations
gactcagctgtgagtggatgctctggtatcattggggtatgctgcngttttcataatttttatnttttagcgcacatctgctattanaatttgattgcatctttgaaagcgcacttcaacactgatgctgctcaacttgccgagacatttgctgangcanagtgtgcaacaaaggtacattggagttgttttattctatattaccaccttntctttgttctctctgtctagnntttgtgatcancgttccttgtctgtggatgaactgatcccatctatttggacaggtgtangtgttcctgtaactttaaat

SEQ ID NO: 79706 - DNA, 439 bp, Zea mays
  unsure (1)..(439): unsure at all n locations
aagcttaggcctgttggaatgcagttaaataatatatttaaataaccttcttatattatcatggccaatgctacaatattacattaccatagtaaaccacctattgttaaatcaaatgtattagtacttaaaaaccgaatatttcagaaaaacaaagaaataaggcctaagtggagttcaaactaaaaaccatggttaaaacatatattaaactgatttactgactaccaaattttggttcatacatgatatataaacttagatatttaaactgaaatataacttcatcatgtacnggcaagacatcatcggtaatctgcatctactatatgcctcatggcgcgaccaagggaaaaacaaacatggagtgccggccttgtgtgtacagcggcgacatataaggtcaagtactctgtagtcacgcgagttcacaattatc

SEQ ID NO: 79707 - DNA, 162 bp, Zea mays
  unsure (1)..(162): unsure at all n locations
acactctatnntatggattttcataaaaagattttaagatanngttttagnaacacaagcactagctgggtagannaccttagaatatgaatgacatgaacgttactaacataagaaaacttcatgatatgaactaagttgcctttaaagatttcatgcata

SEQ ID NO: 79708 - DNA, 294 bp, Zea mays
  unsure (1)..(294): unsure at all n locations
ctaagcttgtgattcaatgtaaaatattatacctctgccntggcatatatataatttcgagtgatgtgattgcaattgccagaatctgtgaacagtaaaggaatactgttcactatntataggcacaggacacagcctgtgaggaattacaatcatgcccctcataannagttacaacatcgactcagacctttatggactaaaaggtcattctatctntaagtcggntcgtcccttcaccttcggatatgttgattatcaaagcttcatgaatgataccttcggcgtcacgta

SEQ ID NO: 79709 - DNA, 317 bp, Zea mays
  unsure (1)..(317): unsure at all n locations
tatggcaagagcacganaggagcaacttccggacctcangacagatatgcatggagccctctggttcaaggatcgcctgtgcgtgccagtgngagaaacacgaganaccctgctcgatgaagcccacaactcagcttactctatccacccagggaccaccaaaatgtacttagaccttaagaccagatattggtggaaagggatgaaaagggaaatagcacagtatgtggcccgatgtgacacctgtcagcgaacaaaggccgaacatcagaagcctgcaggcctacttcaacccctcccaatacccgaatggaagt

SEQ ID NO: 79710 - DNA, 80 bp, Zea mays
cggagggaagcggcaaaacgccccggagccaaagccggcagcacgcaggcggcccgcgacgaccgacccgggacgccccc

SEQ ID NO: 79711 - DNA, 543 bp, Zea mays
  unsure (1)..(543): unsure at all n locations
aaacttactntatatcanaactcgnnctctttattntcaactcttctagtctgatttcggtctatcaaaagactctacacagaagcactacaagatgatcaagttacgatgganggaacttgaagtgaagtctaccggaacgaaccctctataagctatggaagatgccccattctctgtcttatccccgccccgcaagaagtttcgntatagatctctcggatctattaccattcttcttgngtaggttgataggataggtctatagtgttaaagtttcgactagatccggtaggacgatattatattatattatattacaagtggggtttctaatcctaatattgctatataacccttgacttctatacttttgcttcttgcattgtattgcaccctgcncataactacctgatatacgaattcttgctcctactctacttgaaatcccttctatttgctctcgatatgcttctcctaactactcatatctggttgatcattatcctcacttatagtcatggtatctattcactctggcat

SEQ ID NO: 79712 - DNA, 155 bp, Zea mays
  unsure (1)..(155): unsure at all n locations
atcttcttttatctggacaaccctatcttttagcttccctattgcttcacttaatttgtcacatttnntctttagtatctttaacgggaggcttgagctcatttctagaggatgacatangtttggtttctttctttatttccttactagcttta

SEQ ID NO: 79713 - DNA, 304 bp, Zea mays
  unsure (1)..(304): unsure at all n locations
agcttatgggctactggcggagctagccgaagcactggcttgcccagaggatggctggagtgggctggttcttgtggtctaagctctggcgggaatggcgggcggaattgagctcgccggagctaagggatagtggctggccggtgagggtgagtgcgggcgaantgggcgccccgggagactttttgccggcggcaccgcgaggcgtggccgtgggacttgacggacccggggagcccaccggtggcacttggtgcacaggcaaactggcctcgtctgcagtttggcggggcgtatcaactgt

SEQ ID NO: 79714 - DNA, 110 bp, Zea mays
  unsure (1)..(110): unsure at all n locations
ctaagctncttgatctcgagggtccaatgtaacgaggagctatactgccctaatcccgaaacactaacaccctngtggggataccttaagaanacatgatctcccacttc

SEQ ID NO: 79715 - DNA, 402 bp, Zea mays
  unsure (1)..(402): unsure at all n locations
ctaagcttattctgacctatattaattnttggttcctatctttaaaatataaattatgttttattacatactnnttaagcctacatcattacttaattcgctttttaactcaacattcaatatatgggttacgtcagtggatatggacgatgatacactnttatgacgtatatgcgtactggcttttatatgctaatntaattntttattatataaagaanacaagaaatgagattcacaatatcatacatgactccatgtccaatatggcgtgaccttgctacggaacctaagcacaaacatgggttatacaaagtttcttttctaanacatagataaatatctatgacatataggcactgacatttgatatcattacaatcatgatgtacaacaagtatg

SEQ ID NO: 79716 - DNA, 302 bp, Zea mays
  unsure (1)..(302): unsure at all n locations
gagaacacgtgatanggttgactaacgtgcaattcgaanaagatttatcttgtgcttcttgtcaagcangtaaacaagtgggaggagcacatcacagcaagaatgtgatgaccacttcaagacctctggagctgctgcatatggacctcttcggacccgtcgcctatctgagcataggaggaagtaagtatggtctagttattggtgatgactnttcccgcttcacttgngtgttctttntgcaggataagtctaanacccaagggaccctcaagcgcttcctcaggagagctcanaatgag

SEQ ID NO: 79717 - DNA, 335 bp, Zea mays
gcagtgtgagttagctctatcaaatctccaagatagctaccctctacactccttaaagctattgatcatcactttttaaagaagtgaccctacatagtgatagacaattgtacccatttgaataattgaatacagaaagcaattgtatctaagaattacaaaaaacattgaaataaatggtaggagaatacaatttacccatcttgaccaaacctgattcatgcggaggtgatactcgtgggatctggtttctatagagagacatttcttctcctgtatgtggtggcaccgtgcgatatcaactgagcctcgatgataaccacaaaatgttagtc

SEQ ID NO: 79718 - DNA, 236 bp, Zea mays
  unsure (1)..(236): unsure at all n locations
ataaacacttgaattcttttacgcaacccctattttttacgcaacgcattccttttttcttatatgaattctttntgcatatagggcctggtcctaagcaacgcgttaagagcgcanaagaacgccgaagatgaaagttatgaaatggcgtttaataatttacgctccgaagttatcanactgagaaacgaagctttggaaaaagataaaattctacttacactggtagataaagt

SEQ ID NO: 79719 - DNA, 229 bp, Zea mays
cactatcaaagacatttagaccctcgagtacctgcgttatcctcagaatattcccatgaggagggttacagacagtcattacagtaaactttattacagacacagccctaatcacgcatgcccacgctgtgcccaactctgtgggccgaaccgcacatgagcctctctcggtggtgagtgagtgggaggtcctgtagtcttcggtggagccttcgtcttgcacgtgtga

SEQ ID NO: 79720 - DNA, 245 bp, Zea mays
cgtctcccattatatatattctatctatcaaattaaattttcatgttgttaattcatgctcggcaatattagcatctagttagctatataatcactttggtgcttaatcatagcaatgtgatcatggatagcatcaacattaatgtctctacatctagtacaaatagtgacatgatcaacacaagatgtagaggggttgcatgcatctaattcatcaatcttagcatgtaacatggcattctcat

SEQ ID NO: 79721 - DNA, 508 bp, Zea mays
  unsure (1)..(508): unsure at all n locations
gactaagcttnggattgcacatatccgaagatgaagggtcgaaccgacttanagatagagtgaccttttattccataaagggctgagtcagaggtgttaacttttatgaggtgcatgattgtaatctctcataggctgtgtcctgtgcctataaatagtgaacagtattcctttactggtcacgcattcctgtaattgcaatcacatcactcggaaattattctttgccaaggcagaggtataaatgtattcaatatttgaattcatcaagtttgtataatatgaaaatgaatgtggctcgttataatttaattggctttaatgcttcatatcttgcattgttgagagggagcgntaaagctcaatacnaagaatcaaccttcgtaattgaccgttttaaccttcgccanagtcattaatcctcaggaataatgcttaccgacgaaggcatacattaacatttatgtcgctatctaattatagatngagacagtcccacatgatttct

SEQ ID NO: 79722 - DNA, 162 bp, Zea mays
  unsure (1)..(162): unsure at all n locations
atatacatctaaacatacacaagatcagatatacacagagatatacatatgaactaataactcactagaaggaactngaatgacttctcagcttcaacataaatatacatcctagatgattcattgccacaactgactgtatctgaaggtntgacttatcga

SEQ ID NO: 79723 - DNA, 514 bp, Zea mays
  unsure (1)..(514): unsure at all n locations
tactaagcttcttcgcgcctaacaanggttatgatcgccgaaggtgttcanaaaactctatagagtggaagtgagttcaccggaggtgggcgccaatgttgtggacttgttctcaaatgctataagaacaggcaacatagaanatgttaatcggttaaatccttcgtnctacgaagcattattccccttangatataatggttttcggacgaaggttatgaagggcgtaccttcataaatacattatatagcgacgaagaatgaattgtaaggaatataaaggataacatagatacttgtatattattattatatataaacagaaataacattgaattacagatgtacctttcacttgaaggaaatgaaagtacaagcgtgacgaaaaagtgattgccangtcagcatgaacagtacggnnggtactgtcacctatntatangcacggcgcacaacccatacanaantacattcatgcnctttacactctgatatgattctatagtaatctatc

SEQ ID NO: 79724 - DNA, 367 bp, Zea mays
  unsure (1)..(367): unsure at all n locations
ctcaagctattattactgttagatgccaacacatataacccttaggacagaactcacncttaattaatagttgtagtgcanagtggcccattacacaactttngtattnntgctagagcataccttttattttgaacctcagattcctagacaggctatgttgaccaatggaagccctgaattttacggattttggaaaataatcactgtgagttaacctacctaaattctaatagaaatagaagggaatgtatgaataggctctaaccttgaatgcatgaaatataagaacatcctatgtatctacaaactaactaaggaaactaacactaagccctggccaaacctagtgtacactatttctcta

SEQ ID NO: 79725 - DNA, 327 bp, Zea mays
  unsure (1)..(327): unsure at all n locations
cgtcatcaacctcgacatataaccactccgacttcctttctgttgtccattngcttcggnagctgattacaggaaactntgtggttntccgataagaaaaattatagcaaccaaagttatcatgcaatccatcttttctagccttcgtctgatagtgcagctcgtgaactcgacaaaagctgtccgcaaacggctccaccgcctggcttcggagggcccagatataaacactaagcctaacgatagcgttaggagtcaactgatgaaagtagataccanacctcttcaatacctctgcaataatcccatgcagggggaatcttaatc

SEQ ID NO: 79726 - DNA, 236 bp, Zea mays
  unsure (1)..(236): unsure at all n locations
accttggtgagcctgacatcgccgacaacagggtcgacgacgagcgggtatttccncgggctcggcacatggtcggggtggtcggcccggtcgaaagtgatgggcttgtcggaccagtctatgtagactggcgccgccaccttcaccgagcagacttcccggcgctcttgcttgcggtgccgagacgaggtattcgccgcatgccctccatagatcatgaagcagtcgcggacctc

SEQ ID NO: 79727 - DNA, 453 bp, Zea mays
  unsure (1)..(453): unsure at all n locations
attgaatatggaatagtctcaataggcaagcctgataagtctaatactgcaaggtactttggtttggaggaaatacaagaataccacatagatnatgtcatgctggtgttgaacagtatgaaggtgcgaatcctggatggatcaatggtngatagaatgtncttgctgcattggagcacagactctcgtcaggaatatgataccactagcacttcttcattattttcatcataactcgtactaataccctctcgtctagatagaaaattggtagttacccacaagatcatgcattcgattcttctaccctaccaaactgttctctctgcacgtgagcatgtccgcgcatagtctctaaataactctagcagtgctttaagctgatgcccttttgtccataatccttactatcacaattaatcataccctctgcgatatatatcttttgaacat

SEQ ID NO: 79728 - DNA, 224 bp, Zea mays
tttttctatacagaatttgggtttcgatagcaaactatagaccaaaattgcatgtaatccatctgttctagccttcgtcctatagtgcagctcgtgaactcgacaaaagctgggcgcagacggctctaccgcttggatttgagtggccacatataaacactaagcctaacgatagctgtaggagtcaactgatgaaagtagataccacacctcttcagtacctc

SEQ ID NO: 79729 - DNA, 373 bp, Zea mays
  unsure (1)..(373): unsure at all n locations
ggacaatccagtgcaccatcggacaatccggtgaattatagtcgtacgtcgctgatctttttccaagagcggccttttcatcggagaccagcctggcccacctgacactgtccggtgcaccaccggacagtccggtgtgccagactgagctgagttttggctgcaccgagccaagtccttttgggttcttttcttcttcttttctcactgtttctagcacttagataacttcattagtattanaaaacaatggtctaagcctagaaacatacatcatgccttgatttgcacttttcatctttggacatatgactaaagaaatgtgtngtgacttatcaccaaacattatgaaatggccgaaggacatttcctt

SEQ ID NO: 79730 - DNA, 376 bp, Zea mays
  unsure (1)..(376): unsure at all n locations
agcttanagccatggtaagtagcatatgctaataatatgcggatggactcaagcctagctacgttttcatattgttcaccgaaatccagaccttcgacttgtgaatactctntggccacgagtcgagcatatgtccttgtcaccacaccatgctcatcttgcttgttgcggaagacccatttggttcctacaacattntgattaggacgtggaactaaatgccataccttcgttctagtgaagttgctgagctcctcttgcatcgtcaccacccaatccgaatcttggagagcttactctaccatgtgtggctcaatagaggacacaaaagagaatgttcacacaatgacaacccgagatcgagtagtacccccta

SEQ ID NO: 79731 - DNA, 313 bp, Zea mays
  unsure (1)..(313): unsure at all n locations
ctaagctctaagggagacacattntaggattaacanatggtcattntgagaaagacttgatttgttcgcatgccatgcggcgaagcaagttggagtccatcatccacacaagaacatcatgacgaccgacaggccgcttgagctactccacatggatctattcggcccgattgcttacataagcatcggcgggagtaagtattgtcttgtaatagtggatgattattctcgcttcacttgggtattcttcttacaggagaaatctcatacccaagagactntatagggattcttgagacgtgctcaaaatgag

SEQ ID NO: 79732 - DNA, 129 bp, Zea mays
  unsure (1)..(129): unsure at all n locations
ggaatgaaccatnatgatactatatactgggcaccacatgtgcctggttaaaattatctcgctgaggctcttccacgttcttccacctgaattgaaatctaccgtaaagatatggaatccatccaataa

SEQ ID NO: 79733 - DNA, 500 bp, Zea mays
  unsure (1)..(500): unsure at all n locations
ttcttcaatctaatgcaacattngattcttcatctcctctatgaggcacgaatggngnggcccgtgcanggacgttggtgctatccaatcgagagatgtctaaagactattcgaaagaaatgtagaaataaatgcacaatcgaggcttccattgcagaggcatacattctagaggaggtgtcaaacttcacaacaacttattatggtgacaaactgccgagcgtacataatccaccctctcgttacaatgatggcggcaatgaatcgaaccttagcatatntcgaggccaacttagaagcgcaagtggctcgaccaccaagaccctgacacattaagagtggtggatatcatgctatatgtattgaccacctttaagaggtnacgccatacatggaacaaattcttcatgaattctgcggcgatcaaggacctcactccacaagatatgacactcttcttagaaaggcgcgagaaatggattgcccaattcattttctgg

SEQ ID NO: 79734 - DNA, 253 bp, Zea mays
tgagaaaccgagcactatagcatgggacgcatggttcgccggtgaagctccgtcgtagtttgtggccggcgccgtcggggccagctgggaaagctttggttagcgtcgagcgttggatgagctatgggtgtctgtgattagatctaggtggcacttcgctcgtggtaggatcgtgtccgtcggtgggcagatcaacgcttacggaagtttatgactttgttttcctcgtagcaataggatgatgatcggacga

SEQ ID NO: 79735 - DNA, 251 bp, Zea mays
tctcatcttattaccttgttctcctaatacggctagtaatagcaagggatcgaattcggacatgatattgtaaatattcgttcataatatattcatagttgtaatcactatcggaatccggacctttaccgagtgccgacggctttgccgagtgttttttattggacactcggcaaagaagactttaccaagcgccgcactcggcaaagttctgcgctcgataaagagtttgtttaccgagtgcaggacac

SEQ ID NO: 79736 - DNA, 254 bp, Zea mays
tggtcattttattgctaactgtcccgacaatgatagtgactaggaacacgggagcaagagggaaaagaagaagcattacaagaaggccaagggcgaggcacatatcggaaaggagtgggattcggattgctcctcctccgactccgacaatgaaggactcgccgccactgccttcaacaagtcatccctcttccccaacgagcgtcacacatgccttatggcaagggagaagaaggtatgtaatcaaaacaatg

SEQ ID NO: 79737 - DNA, 254 bp, Zea mays
tctaaagggagagcacattttgggactaaccaatgttcattttgataaagacagggtttgtagcgcatgtcaagcagggaagcaagttggtgtccaccatccacacaagaacatcatgacgaccgacaggccgcttgagctactccacatggatttatttgtcccgatcgcttacataagcatcagtgggagtaagtatttgaaagtcgcctagaggggggtgaataggcaaatctgaaatttataaagtttaa

SEQ ID NO: 79738 - DNA, 253 bp, Zea mays
tgagctgcctgtgattggaagaacgagcttcgtcgccacaggtgacgaagcttgattactatgcgaagttattgttggagtcgtgtaagtgagttcaccggaggtgggcgccaatgttggttactttttctcgattgttgtggatcaaaaacaagacaacacaaatattaaatatcaaggacctttgtccttcgaagcattatcttcttttagagataatggttcttggacgaaggtggtgaagaacgagtct

SEQ ID NO: 79739 - DNA, 252 bp, Zea mays
tcgcaagcacaggattacacacatgcaagcaagagcatgctacgaccacctacatgtgtcctgcagatttacatactagggtagtagcaaggcctcaggcggcacatgctaggctcctgctagtctagagagatggatagagggagatactagaccaaaccatcgagctaggataagcaaaaaattcccaagctagcaaatgattctaaaccgaagaggcaaaaaaattacaagccacagcgcttagaaact

SEQ ID NO: 79740 - DNA, 251 bp, Zea mays
tttctacgcacagcttcgtgatcgtctagaccttcgtcataatcatctttcgtttcgctttaggcttcgtcctgaccatgctcttgtataatcatgacccaattccgaagatacctgttcacatatttcacttggaaaacattgtcaaatcatgtttttgaggaccttcggaagccgaaggcccccaacagtagcccctcgcaatattaattcattagtgataaattcatattgcaacatggacgaaggcc

SEQ ID NO: 79741 - DNA, 250 bp, Zea mays
tttaaagggagatcttattttaggactaaccgatggtcattttgagaaagacgggatttgtagcgcatgccacgccgggaagcaagttggtgtccatcatccacacaaaaacattatgactaccgacaggccactggagctcctactcatggatttatttggcccgatcgcttacataagcatcggtggtggtaagtattgtcttgtaattgaggatgattattcttgcttcacttgggtattcttttta

SEQ ID NO: 79742 - DNA, 251 bp, Zea mays
tttaaagggagaacatgtgataggtttaactaacgtacaattcgaaaaagatagaccttgtgcagcatgtcaggcaggtaaacaggtgggaggagcacatcacagcaagaatgtgatgaccacatcaagacccctggagctactacatatggacctcttcggacccgtcgcctatctaagcataggaggaagtaagtatggtctagttattgttgatgacttttcccgcttcacttgggtgttctttttgc

SEQ ID NO: 79743 - DNA, 251 bp, Zea mays
tctaaagggagaacacgtgataggtctaactaatgttcaattcgaaaaagatagaccttgtgcagcttgtcaagcagggaaacaggtgggaggctctcatcacaccaaaaatgtgatgacgacatcaagacccttggagatgctgcatatggacctttttggacccgtcgcctatctgagcataggaggaagtaagtatggtttagttattgttgatgacttttcccgcttcacttgggtgctctttttgc

SEQ ID NO: 79744 - DNA, 248 bp, Zea mays
tgtgaagattcttcatttcaacatgtgctagtcggcgatgccagagccagcccatgttagtcttagcaatttgaaagggaaatgtgcccttgggccatttctaagtattttggtgattgggtgccaacacaagtgcttaaatgtgaatctatgcccatggatgaacaaagtgcaaatcaagagtaaaggtatgtttctaagccttattacattggttttgtgtactaatatacttgtctaagtgttat

SEQ ID NO: 79745 - DNA, 249 bp, Zea mays
ttgactatacgcacgtgcagttcaggtgcaaaccgaggtcagcctcggcgtggagaaggcttcaagcataaaatgatgaagggaatgaagttgatggcttgtgcagcaaggaaaaagaaaagatagtgttgcctctgtatcatttgtaaatcatgtttgtaaactttgtgggcatgtttgtaatttcttatgaggttgtacaacttccctataaatgagtgaacaatgccatgcatccattcacctttt

SEQ ID NO: 79746 - DNA, 254 bp, Zea mays
tataatagagttggtcttagcacattcagtctttcacataagctctacgttttgtgaattacatcctacatccacgtagacttcacgataggtcctctgattcttatcagccatggtcaaaaaggaagcccattatatcataaagcaaacttgacaatatagctaacttgtgcatatccttttttcttattacacaaaagaaggtccattactcatgcaaatgctaagagcaagagtgaaaagtttcctaccct

SEQ ID NO: 79747 - DNA, 252 bp, Zea mays
ttagtgactagagagagttatttgtagtgttcatttgagctcttgcgcttggatcgcttcttttctttctcacttgttcttatgatcaaaactccattgtaatcaaggcaagaggcaccaattgtgtggtggcccttgcggggaagttttgttcccggctttgatttgagaagagaagctcactcggtccgagggaccgtttgagagagggaagggttgaaagagacccggcctttgtggcctcctcaacgg

SEQ ID NO: 79748 - DNA, 253 bp, Zea mays
tgtagatcaggtgtcctgtggtggtcgacttgccagagtcaacgtggccaataaccacaatgttgatgtgggacttctctttacccatggttggaggtgagattgaactgttaacaagacgaatcaacgattagaaacactagtaaatattaatactaccagtaacgacacaatttatcagatgggatcagaaactagatctaacgttgtcaccggagttatgagcttgaaaaaagcttgatacacataagca

SEQ ID NO: 79749 - DNA, 254 bp, Zea mays
tctaaagggataacacattttgggactaagaaatgttcattttgagaaagacaagatttgtagcgcatgtcaggcagggaagcaagttggtgttcatcatccacataagaacatcatgacgactgacaggccactcgagctcctacacatggatctattcgacccgattgcttacaaaagcatcggcgagagtaagtactgtctagttattgtggatgattattctcgcttcacttgggtattcttcttgcagg

SEQ ID NO: 79750 - DNA, 253 bp, Zea mays
tatgccaaagctgaatcttatgccgaagctacagctgcagccgaaaatgccaaccttgaaagtagattgtcaggaattgataaacttctttcggatatggctgtggaagaagcaactgcggcagcttcggagaagatcatggtcgtagtgactgataaagggaaaaagattgtcgatgtcgtttcagaagaaaaggacttcgaccttcagaacttggtcggtcaatagttatccgaggctgaaaaggagctac

SEQ ID NO: 79751 - DNA, 251 bp, Zea mays
tgtgaagatgcttttttccaacatgggctattcggcggtgccagagccaacccatgttagtcttagcaattaagcaagtgtcgagttcagctctatcaaaatttaccaagtatagctgaccctctaacactcccttaaatgctactgaatcatcacttcttctaaagacagtgacacctatatcagtgaatagacagttgtagcccatttgacataattgggaaacagaaagcaaattgtaatctaaagaa

SEQ ID NO: 79752 - DNA, 250 bp, Zea mays
tgccaagccctcggacccgaccggacttcaccggaggcccgagatcaacctcaccggacttcggtcttccgccgccgcgcgtggactgagctatccagtgagtctccgcccgattcctttcgctcatgttttctctggcatcccgtggacctccctgacctatttgattgaactatctcgccgtgaccaggccggtctcctcgccgccgacgagcatccccgcctgcgcgcgtggaccgaccgactccgg

SEQ ID NO: 79753 - DNA, 252 bp, Zea mays
tctaaagggagaacatgtgttaggactaaccgatgtctattttgagaaagacacaccttgtgcagcgtaccaagcagggaagcaggtgggaagtactaatcaaagcaagaatgtgatgacaacatcaagaccacaacaactcctacacatggatctcttcgggaccgttgcttatctcagcatcgagggaagtaagtatggtcttgttattgtagatgatttttcccgcttcacttgggttttctttttgta

SEQ ID NO: 79754 - DNA, 251 bp, Zea mays
tgaaggaaaaggtatgcacaaggtatgatttcttactggttcaagatgactccgagcttcgtctccagccttttctcgcccgccttttgtccatatcatttttacaaatctattagaaatgcttcgggcgaggtcaggaatatcatctaaaattgatggtgatagagtgaaattgggcctattaacaatttttccatggtcgcagccagccttcagaaaagctgcagcagtgccccgagaagctacctagg

SEQ ID NO: 79755 - DNA, 251 bp, Zea mays
ttgagagacctgtcctgtagagagacgatgtaaagtggtgcgtgttgtgaacttttgagttgtggttgtttattagtaatgggtctgcgactttcatcagtccaaaatcaagcttcaaatttgcaaattcattttttgggctccatcttggattagcgaacatggcctatttgttttgaagaaaaatcttatacgaagcttcttcacttaaggagctcttgctagcaacattaagctatatcccttggggt

SEQ ID NO: 79756 - DNA, 245 bp, Zea mays
tggtgccgatggagatgcagaagtccctgaagtcctggctgtcaaactatttgccgttgttgactgtgagctcggacgggactccgaatcgacaaacaatgttttgccagaagaacttctgggcagtcttcgacgttattgtggatactgccctggccttgatccacttggtaaagtattcgacggcgacgaaggtgaacttgaggttcccttgagccgtaggtagtggcctgacaatatccagc

SEQ ID NO: 79757 - DNA, 248 bp, Zea mays
tctatagtccacacacattctccttgaaccatctttcttgttcacaaatagaactagggctccctatggagacgaactggggcgaaaaaacctttttctagtaattcttctatttgtttctttagtttaattaaatctttgacatccattcggtaagctctttttgaaattggtgcggttccgggtaatagttcaataaaaaactctatatcacgatcaggtggcatacctagtgttgggggccttcg

SEQ ID NO: 79758 - DNA, 253 bp, Zea mays
tagaaatgagaatgctagtttgattgctaaggttgattcaaatgtttgtgatgcttcaattcccaatcttagagataataatgttgaattacttgctaagattgaagaattaaatgtttctcttgctagccttagaaatgataatgaaaaattaattgctaagcctaaagaattagatgtttgcaatgttataatttccgatcttagggataacaatgatattctgcgtgctaagattgttgaacttaattct

SEQ ID NO: 79759 - DNA, 253 bp, Zea mays
tggtgcccacaagtctcttcagctcgtgccaaaagctggaggtgaagttcaagtcgaggtctgacatcatggactgcgacataccgtgaaggcgaacgatatcggcaaagaaagcttgagccacgctttcgccgaagtacgggtgcgtgaaagggaaatagggtcaaaccttttcctaaatgattttggtggttgaaatgcccaacacaaataattggactaactagtttgctctagattatatgttctacag

SEQ ID NO: 79760 - DNA, 253 bp, Zea mays
ttttagaaaatcactttttcgctgaccgatcgggcccttgcggcggaccgtccacgacaccagggtgagcctcggacagaaccactgcaaaaacacaactttactacagaccgcccgatggagaagcaagcaccgtctgagaccaagcgcggaccatccggcctcaggcgcggaccgtccggtcggggaagaaccgaaaaacctgaaggtgacgggttcggtaaaatgaatttcagcgtcctcgtggaccgtc

SEQ ID NO: 79761 - DNA, 254 bp, Zea mays
tccatttctttttcttttttactacacatctaaaattctggaaataactttaaaggaattaacttttatcacttatttaaaggaaataaccttccctattttatcacttatttaaaggaaataacttttattaaatccttcatcaagaggttctttaacctaattcctttaaagaatatgttccaacatataattcatcatggattgttttattataccttctattccaaaatattatttattttagaggatat

SEQ ID NO: 79762 - DNA, 252 bp, Zea mays
tctggacgtccttgaccctggccggaggcctcatcgcctcaattgccctgattttctccgggtttgcctcaatgccccggtgcgaaacgaggaatcccagcaactttcctgtggagacgccaaagacgcatttgtccgggttcagcttcgtgcgcgtcgcccacagcttgtcaaagaccagggtgaggtcttccaccagagttgaccccctcttagtcttgaccacgatgtcatcgacatatatctctatca

SEQ ID NO: 79763 - DNA, 251 bp, Zea mays
tgtgaagattcttttttccaacatgggctaggcggcgatgccagagccaacccatattagtcttagcaattaaacaagtgttgagttcagctgtgttttcattaaaatcaactaaatagagctaaccctctaacactaccttaaatgctattgaatcctcacttcttctaaagacagtaacacatacatctgtaaaaagacagttgtagcccattttgcataattgagaaacggaaagcaaattgtaatct

SEQ ID NO: 79764 - DNA, 251 bp, Zea mays
tttcagttttcactatcaacttccttctaacaaaaactaatattacacgtttcaatgcagcataaaggaaaacatcaagaagggttagcttttagctagtattaatctgaataaatagaaccaacctctgaaactaatctgtttctcttgtatgaactccatggttgaggctccatgataaaaacacctccctgcaaaattacagatagtgaaaatatgtaattttcctcttaccgtctatgtgcaattta

SEQ ID NO: 79765 - DNA, 251 bp, Zea mays
tgttcgcaacatgattgcacagagcgacccatggtttgcagaatatttgttgcgcgtcggtggtggcactgaggaagagaacaacgatggtgatgctcaccttccagatgaggtatgtgtgccatatactggtaatgaccacgaccttgatagattgatagatgacatttaccccaaactaaatgagaacatgtctaacacaagctacatcacttcaagagcaatattgactacttggaatgactgggtgg

SEQ ID NO: 79766 - DNA, 251 bp, Zea mays
tggatgaggtgtcattatcatcatcatccgagctatcatccgagtcccattcaactaagtaggctttgccatctttcttcttgttatagtatttctttttcttcttgtcactttcatctttgcccttcttcttcttgcttggacaattcatggcaatgtgaccgggttccccacactcaaaacattttctatcattgaaagcatttcttctagatgtttgacctcttctaggttgacctcttttcatcttc

SEQ ID NO: 79767 - DNA, 251 bp, Zea mays
tcagcagaatgacttttaaggtccttcattctcagataggcagaaacgtgctaacatatgttgatgatatcatagtaaaaagcacgaagcaagaaaatcacattgctgatctgcaggagacattcgctaattttaggcaagttggtctgaagctgaatccagaaaaatgtgtcttcggagtaaagaaggggaaattccttggttgtttggtttcaacaaaagggatcgaaactaatccaaataaaattgaa

SEQ ID NO: 79768 - DNA, 246 bp, Zea mays
tgctacaagccttcttttttttctccatagcaggaaccttactggaatgctatcccacttaaaagaatgagggggtagatctcttgaatcttggggatttgaactccttgaagtacctcataacaagggtgttacggggccttcttctgctgttgctgcttgaccaggctgcggagagatgactgacacagggttgattctgggacaaccttcttctcatcttctcttcactatcttcttttcact

SEQ ID NO: 79769 - DNA, 249 bp, Zea mays
tctaccctgggcggtaaaattctactccgatgtgtggatgaagggcggacgtgagatggctgacgaagccattaaaaagaatgagaaagaatctcacgacacccgtgaggaagctaaacaagccgaagaagctttcgaacatgccatggttataggtacttttatttgaaacattttgccttgttgttcgtttttaccttcgtaactcaccatcatatacttattacagccggcctctctcccccaccg

SEQ ID NO: 79770 - DNA, 253 bp, Zea mays
tcttcaccatgtgatcacggttatcttgagaaggttgagcaatgcacttccctttaagttgtgtcaagctcatctttagcctctcattctcttctttgagcttttgatatgtatcatcttttgttcctgcaaattctagctcaaaggaagatttgcttgtcgacgaacaacaagctttagcacatggtaatatggtttcaatttgaatacatgtgcatgagtgaggttgttgggattttaagttttctattac

SEQ ID NO: 79771 - DNA, 253 bp, Zea mays
  unsure (1)..(253): unsure at all n locations
ttagggttttctctatttttattttgntttacccttctgaacctcatttagggttaagtgccctacattagggtcttatttgcaaaaataccatagcaatacaacttgtttgagatttttgcctagtgaatgcattctaggtgtatcaaacatatgaaatgctaatgctgatgatgttatgctcaagttttagtaacagtaacaccaggggtgttacatctttccccttgttttgttcttgttggggtactcc

SEQ ID NO: 79772 - DNA, 254 bp, Zea mays
taaagccatggtaagtatcataggcaagtaatattcgaattgactcaagcctagctacgagtgcataggtttcaccgaaatccaaaccttcggcttgtgaatatcccttgaccacaagtcgggctttgttccttgtcaccacaccatgctcatcttgtttgttgcggaagacccacttggttcctacaacattttggttatgacgtggaactaaatgccatacctcattcctcatgaagttgttgagttcctct

SEQ ID NO: 79773 - DNA, 254 bp, Zea mays
tacccatgcgaggcatgtggccagttaaaaggtccacgatcatcaagcctacatcggctcggtccttaaccgactcagaaggagacactacactgagacttccttctcgtgcaagtcacctgtccggcctcatctttattatttaaaaccccaaagtttggtacctagcagaggcacttcttttcaaatgttgaacccatcacggccgtgatggatccaccattattagtcttttgtttgtaaaaattcccatc

SEQ ID NO: 79774 - DNA, 249 bp, Zea mays
tggtaaacttgtagcgttaagtgacgagataacagagatgcagccgaccataagataaaaaatgttctctaatcaaacttctagtgcaaccccgtatcaataaactatcaaaagttataaaaattaaaattataaatatgctccattgtctactctattaatatatcaatttttttgtttattctatgtgtcgctgtctcgacacaagggtcttaccaaccagtaaaataatgttgtgtgctttgatcc

SEQ ID NO: 79775 - DNA, 251 bp, Zea mays
tatgttcgatggttgttcttatgtccgacggctgtcagacaagctgtcggagataagccgttatatccggcggtttactgtagtgctcccccacctctttcaccagcggccacaattttgtcctccccatcactattccctgctcgcgcgatggcgtttggtttccaaaatgtaatataaatgggaacggtaacgattgcattcgattaccagtggtaacaagtttgaatagactgatatcaatttctagt

SEQ ID NO: 79776 - DNA, 251 bp, Zea mays
tcatatttgcattaactatgaggtttactaatacgaataatccatacatagtgtgttatacctcactgcttgataaaccctgtaaggaatcagtcaaaccatcacctgttgaaacagagaggttattctagtaaaaggatatacttaagcagtcacatatcattcgtgcttaatgaccattacttttttcttatggtgaaattattgttttttaaaacaactttattagaagcagaacagctagattatcc

SEQ ID NO: 79777 - DNA, 252 bp, Zea mays
ttttaaaattgatttttttttgtgaactatttatggtcaacaataactcaagagaggttaaatggctttgcgattctatatattgaaaaacgttgttggatgagattgatctcaatgatataagtgatgactttgtatcacaaaatgttagaagatattttttaatgatatcagataacaagtgtttttggctatattttacatttgttatcttataaacttcaaatcagtgtatagtaatttttatacgtc

SEQ ID NO: 79778 - DNA, 251 bp, Zea mays
taaatgcggggccgttcagccagttgttgacagcagccgctgcgtcctgctgagcgagcgagggaatatctcaaatggggagaggatgaggtttccttcaaatgttacttttaccacgaccgaatggtttgtactaactgggacttttctgaaattgttttcttatctgaactgagaagcggcaattcctggacaggaatggaggagtccgcccaagttgttttctcctccgtcccaccgttccaaagcaa

SEQ ID NO: 79779 - DNA, 250 bp, Zea mays
tgtggatgactaccttacccgaaaggggcaagagaagtaggggagtggtcagtgtagggaggtccttgggttgattttgcagcgatggcggtcaggcgagggattcctgcacttgagcttcctataaactgtagcgggttttctgaagctagtggaactttgtaatggcctcaaagtgttactctgcctcgcctcctcggtagaggtgtatgggattggccattgtaacaccccaggtgttaccaaggcc

SEQ ID NO: 79780 - DNA, 247 bp, Zea mays
tcgtcatctgaaaggtatatttaccctgtaagtaagagatgatctcagttctccaatcttcgctataaacaggagatatattgaggactgctctttcaaggagttccactgaaggtgcctttattgtttcgaagaacacatccaaaggtaaaggcagcccctgtgctgctgacttagctagcaaatcagcatgctcattttgtcctcgagggatatttttgacagaaaatccttcgaaggaagcttc

SEQ ID NO: 79781 - DNA, 249 bp, Zea mays
tcatgagttttttcttcagcactacgtttaaactgatttgccgaaggtgtgtcttcctgcaggaccttcggcgacgaagcatggccccaacatctatgatgcactaaaaaaccatcaaggaagtattattgacccctcttgatatctagcctactaacccggtcaatttagttctctaaatatctcttgaccggaaaaacgaaaattctatcgaataccattaccttgagctatccaacatttccacta

SEQ ID NO: 79782 - DNA, 254 bp, Zea mays
ttagctgatttagagtcccttgttggattatccccaggtttagcttttccatctcttgacacaaagtgttctcggaggtcttcgccataagacagtggcaggaagtcttacgactcaatgcatctgccaccacattggctttgcctgggtgataatggatctccagttcatagtctttaataagctcaagccatcgtctttgcctcatatttaattctgactgggtgaagatgtacttcaaacttttatgatct

SEQ ID NO: 79783 - DNA, 255 bp, Zea mays
tggatgtttttatcattattagtaaacaaattcttgtgatatagaaaagattttcttcacgaagcatgaaaagaagggaaggtgttttttcgccgaaggctcaaaaaatggtatgtacgcaaagtttcatgcatcgtaaagaattaaattataaatagactatatgttacattcaaagttacaatacattacacatcttatgttccaaatgtttctacaataacgatttaattctccttgagaactatctctgca

SEQ ID NO: 79784 - DNA, 255 bp, Zea mays
tgtgaaggttcttcattttcacatgtgctaaacggtgatgccacagccagcccatgctagtcttagcaattaagcatgcatctagaccgacctcctcttttgcaaaatcaactaaatagagtttgtcgtctaatacacccttaaaagctaatgaaccatcacttcttataaagacaaacacatctacttttgtgaatagacaattatatcccatattacataattgacttacggataacaaattatatccaagcg

SEQ ID NO: 79785 - DNA, 255 bp, Zea mays
tcggaaaatgcttcgttgttttgcagtgccagtttcttcagccaaaatttgttctgttatttctatttctttggtttccaaggatttcaccttggcgggctctgaaggcccagcttcagtctcaacttggtgctttgtagcttcggcaccaaaggcttcaatttgcacttcggtagtttcggcaattttcttcggggtagtgcttgaagactttattgtctccaatacatccagtacattaaccatcctttttgc

SEQ ID NO: 79786 - DNA, 285 bp, Zea mays
  unsure (1)..(285): unsure at all n locations
tttangaaacactactctcaatactcaagcttctcctgaacaagtgtttttcttaccgctaagtgcgaagctgccacatataataacaaaggagcccctggcgtatgtggagttaatgttgttagatctatcaaatactgcttcagttcttcgaaggccttctgctggagtggtccccattgaaagacttcatctgtcttgagcacttcgaagaatggtaagtttctctctgctgatctagatatgaatctgttgagagatgctagcctttctgtcaatctttgg

SEQ ID NO: 79787 - DNA, 251 bp, Zea mays
tatttgctatattttttttcatacttcatgagtgggtatttcgcaaaggaacacaatgactatgctcctacaatgtgatacaatgtccatgaagagcctccagcttaggtgcatcgataagtatctatacttgaatttattatgaactagaacttagtatgaactagctccagtgcgtcattctagttcaatttaatttagacatggcatttctatcaaaccttttgaatcttggattaacttgctaaaat

SEQ ID NO: 79788 - DNA, 270 bp, Zea mays
gtgacctataaaactcaagcttcgaagtgaaatttttctttttttccgctgcactgcatctcactgctcccggcccggggtactatgtttcgaaaatttaattgatcttcttgatcaatacaatagcagctctgctgtctgattttttttcagttttttttttttttgattgatgatgatgcccttacttacgccttaagtccgatcctgtcttaatttgacagggtatttcgtggtggtcaactaagttgctattgtttaccccaccct

SEQ ID NO: 79789 - DNA, 253 bp, Zea mays
tgtgaagattctttttttttaacgtgggctagtcggcaatgccggagccaacccatattagtcttagcaattaagcaagtgtcgagttcagctctattaaaatcaactaagtatagctgaccctctaacactcccttaaaagctattgaatcatcacttcttctaaagacagtaacacctacatccgtaaaaagacaattgtagcccattttgcataattgagaaacagaaagcaagttataatctaaagaat

SEQ ID NO: 79790 - DNA, 253 bp, Zea mays
atgaatccaatctttgtctatgattagactgtaatttccttctacatcagcaacgaagaatgcaacagcaagggtcttagtcccgatggttaactcaacggacgtgactcccttggctttgattgaactatcagttccaacaccactaagggtcatgttggtcttgacgagtttgtcatcttgtttacctagttttctatataatgaataaggcattagatttatagctgccccccgtctaccaacattttag

SEQ ID NO: 79791 - DNA, 251 bp, Zea mays
  unsure (1)..(251): unsure at all n locations
tgccacggngaacgcttctaatcctttgcgccattgctctttcccctctccggccgccgcgcgtcttctccaaattagccgccaccattcgtgaatcctataaattgagtgtgccatcagctctgctaggtagttgtgcatccagtgaaccagctctcacctccaatcatcccctacagctccccaatttgagactacccccaaatcggtcaagaacactgtgctgtgtgagctcgccgcagtcagctctt

SEQ ID NO: 79792 - DNA, 247 bp, Zea mays
tctctgcttgatgtttttatatcccttaagtctcctattgctcgtagacccgtttgattgagctagaccgcacggaatcaccatgaacacctcggtttgtcttcggtatccaccgccgtcgtgagcagacgaactccgggccggattcgtgcaattgatggagggattagggtcgccaggggtaggattagttgtcgaccgagttagggcactgggtgttgcgcatctcggccagtacagatttgcc

SEQ ID NO: 79793 - DNA, 247 bp, Zea mays
tcacgggcttttgtttttactagccgaagcactggttgggctggagggtggctggagtgggctggccacggcggccaatgctctggcggcaatggcgggcggaattaatctcgccggagctaagggaaagtggctggccggtgagggtgagtgcggggcgaagagaggtgtgcccggggaggctttataggcgcgggcgggcacggccgagggcgtgggcgcgcggcggacttgaccggacgccggg

SEQ ID NO: 79794 - DNA, 118 bp, Zea mays
tcaacggtcagaatctatcggctatggtgacgtggcagaggcaccggactgtccggtgtgcaccggactgtccggtgcgccatcgaacagaggctgccagcaacggtcacttttggtg

SEQ ID NO: 79795 - DNA, 254 bp, Zea mays
tctaaagggagaacatttttttggtctaaccaatgttcaattcgaaaaagatagaccttgtgcagcttgtcaagcagggaaacaggtgggaggagcgcatcacagcaagaatgtgatgaccacttcaagacccctggagctgctgcatatggacctcttcggacccgtcgcctatctaagcatagggggaagtaagtatggtctagttattgttgatgacttttcccgcttcacttgggtgttctttttgcagg

SEQ ID NO: 79796 - DNA, 254 bp, Zea mays
tgtaaatatactcttttttagtggaatcctcaaacccaggtggttgcttcatatagatgtcttcgtcaagaaaaccatgaaggaaggcattttgaatattgatttgctgaataactgtcggtaccctgaatcaggggtaccccttactacaacaagcgcacggaagcagcgcgccaaccgccgatcaagctttggccccatctacaggctcgtatcctcccatgaggcgggcccgggggccactgtcgataccc

SEQ ID NO: 79797 - DNA, 256 bp, Zea mays
tgtgattttaccaattgttttgagcacaatctctacttatgaatttccatgaaatatcttaaaagagattgtattagtaacacaagcgatagtttcctatttagcaacctctagtatatgaatgacaagaaggttactaaaacatgcaaggaaacctcttgatatgaactaaattacccttacaagcatcatgcataacatcaattgtaaaaaagatgaaagtagcatgattatttaattaagttcacatggcaag

SEQ ID NO: 79798 - DNA, 254 bp, Zea mays
tattaatacatcttattataaccttggacgtcattaatgcaccctatgctctcaagtcttaactctgttagtactttactgcttattacacatacagaagaagaaaagggaaaggtagggaaacaatgtacacagagagagagaacagaatggctggtggccatcctcatattttgtatatgagtaaacatgtatcagtaatttcacatgtatctttttgtcatattttgcaccaaaatggtggaaacacacga

SEQ ID NO: 79799 - DNA, 251 bp, Zea mays
tcgacactatatttttttcaaagacgaaggatcgaaccgacttaaagatggaattactttttagtccataagagtctgagctatgattgtgatcttctgtaaggggcatgattgtaatttcttacaggctgcgtcctgtgcctataaataggtgaacagtacttctttgcggttcacgcaatcttgtaattgctgacgtattactctggaattattgttttctgccaaggcgaaggtacaaatgtgcctaa

SEQ ID NO: 79800 - DNA, 251 bp, Zea mays
tctaatggtacattgtactgaaatatccctgggttcagtccccctcgccgccgacgatctgcgtgcccggattcgcgtcgatcaccgtgatttgtgcctggcacgccgtggatattcgcggggaggtagctttggacgtgttgcgctctcgcggacctagccagagcctagtcggagataattcaccggcggccaccgtggctcggttatttccgccgccatgtcatccatgcttgctcgtccctcactgt

SEQ ID NO: 79801 - DNA, 250 bp, Zea mays
ttaaaggtgtattttttatatctaccttttaattataatatctatccttctgtaacacaaaggaacattatatgcagtggttaaggggcgtggctttggtccttgcagtccaggtttgaatcctggagccatcttccttttctccttttttgattaattcagctaggcaggcgggaggagcggagacgcgtggcgacgcacgaagagagattattcccatttaaatatagtagagattatgtgaatctaa

SEQ ID NO: 79802 - DNA, 253 bp, Zea mays
tgtggtcccgtatcctatcttattgaagttgccacccagcatgtcagctgttcatgatgtgttccatgtatctcagctgcggaaatgtgttcgcctacccactgaagtgttacctgaaccggacattgagatagaaccagacttgtcctatcaagagtaccccatcaaagtattggatcagaaggagagatcaacacgggcaaggtcaatccgaatgtataaggttcagtggagtcaccattcagcagaagaa

SEQ ID NO: 79803 - DNA, 249 bp, Zea mays
tcagaattatgaaccttcttaaagatagaatgaccttttagtctataaaggtctgagtcaatgttgtaaacttttatgaggggcataattgtaattcttcacaggctgtgtcctgtgcctataaatagtgaacagtattcctttactgttcacggattctggcaatcgcatcattcaggaatcaacctttgtcaaggcagaggtataactgtatttaatgattcaatatattgattaaatataacttga

SEQ ID NO: 79804 - DNA, 248 bp, Zea mays
tctaaagggagatcttttgataggtctaaccaatgtacaattcgaaaaagatagaccttgtgcatcttgtcaagcaggtaaacaagtgggaggagcacatcacagcaagaatgtggtgaccacttcaagacctctggagctgttgcatatggacctcttcggacccgtcgcctatctgagcataggaggaagtaagtatggtctagttattgttgatgacttttcccgcttctgttggggaccttcgg

SEQ ID NO: 79805 - DNA, 248 bp, Zea mays
tgaagctacatttcttgtatgataaagtgcacatgtacatcatcaaaaacaacaaaaaggatgaaacaaggagagcagtttagcagatagcaacactacaccttttgaacaaatcctgcagtcaattagataactgagaacatggaataaaggtattgttagactgtgtgtgggccggcaccactattgagctgctggcccattagggttagggttaagtctctatatgtatgtaccccactcctcta

SEQ ID NO: 79806 - DNA, 253 bp, Zea mays
tttccttgtcgtcattaatcttgacatagaaccactctgatttccagcctgctgcccacttgcttcggtagctaattacagggaactttgtagttttccgataggcaaagttgtagcaaccaaaattatcgtgtaatccatcttttctagcctttgtttgataatgtagctcgtgaacccggcagaagctgtctgcaaatggttccactgcttggcttcggagtgcccagatataaacaataagcctaacgat

SEQ ID NO: 79807 - DNA, 254 bp, Zea mays
tttggtaagattacaatttataagaacagcattaacggctagacgagtgaagtactaaattttactactcgcattacttcttcactatacacatacaaggcctaaatagcccctagctcaaatacattcatcaaagcattaactttcttcccaattactaaagtctagagcaaacagtaagaaggaaatgaattaatcaaatataacaaggcatttcgataaacacttcatatgcaacaagttttcatcaatca

SEQ ID NO: 79808 - DNA, 252 bp, Zea mays
tgctaagaacgagctttttctttctctgaaccaaacggagcaagcaacttgtgtctagaattactagaccaagctgatcgaaagcccgaaggtgggagttatcaatatataaatctgtcaaagcagaaccgaacggccacacacgcaccgtgttcagtgttcactgatgaagcaaagcgagaacagatctgagcagtttgctaaatcctcaagggctggggcggtgcacagcacagtggtgcaccatagaat

SEQ ID NO: 79809 - DNA, 254 bp, Zea mays
tgccaatacctgtcatattaacagcacatgccagcacagcagctacagaccataccagtaacttggcctttcgcatgttggggattggatatgattggacctttcaagaaagctcaaggaggatacacccatgtattggtggcaattgacaaattcactaaatggatagagttctagcccattgcctctttaacctctgctaaagccgtggaattcatacaaagcataatattcagatttgggataccaaacag

SEQ ID NO: 79810 - DNA, 253 bp, Zea mays
ttgatccatggattgtacttctccatatcattgggcatcaagagattgatggtgtacggagactctctggtggtcattatccagataaacaaagagtgggattgttcaatcgattcaatgggaaaatactgtaccgtcgtccgaaagttggaagacaaatttgagggtctggaatttcatcatgtagaaagagatcggaacacagcagccgatgtactatccaagttaggatctagtcgaactcaggtcccac

SEQ ID NO: 79811 - DNA, 250 bp, Zea mays
  unsure (1)..(250): unsure at all n locations
tgacattgtctttctatgtaagccaatgctatgcttaatgccagggcgtctcccactatagagcatgcttctagcaaatttaattttttcattttctaagtcatgctcatgaattttgacattaagttgagctatgtgatcattttgttgtttaattaaggctaggtgatcatgannagcatcaacattaatatctctacatctagtacaaatggtaacatgctcaacgaaagatgtagagggtttgcaa

SEQ ID NO: 79812 - DNA, 252 bp, Zea mays
ttcctgacaccaaattaatcattgacatatgcaagtacttcaaggaatgtatatatgaatgcaaggcatataatgttcctatagcctaaaccaaacttagccaaacaagagcaacttcaagagagcaacttaatgcttgcatatttctagatagcagcacaacggttaattgttttgctcctaactcacaaaatatgcatcgaaaattagtaaactaggactttatggaaagcttataaagtccactatacc

SEQ ID NO: 79813 - DNA, 250 bp, Zea mays
tgagttcatgtgacttattttagaaacttgagctcacaaactttctcttattttgtggaattatgtcattttataatctctattcgttcagtcactcgttgtgaattctcttctaatcgctcatttcattggtcgtattgtaccaagacatattagatgaagtaaacaacacatcagttagtcaaatcaaaaaaatattatacggagagccgagacaatcaataaaaattcttgaaattttttttggata

SEQ ID NO: 79814 - DNA, 251 bp, Zea mays
tgggagcaatacatgttcataagggaaaaagctgcttcggctgatcagccgaagcccatgctcttatgtgaggacatagcatagtacaaggtgctattgggatctcaactgggcgaagaacaggagaaaaccttgataaggtttttgttcaacaataaagatgtttttgcttggtcagctaatgatctttgcagagttaacagagatgttattgagcactcgctcaatgttgatccatccttcagacctag

SEQ ID NO: 79815 - DNA, 248 bp, Zea mays
tggcatacaattggcaatctcgtagcctctgaagtactttcctcaaatgttcctcatgctcttgctcattctgggaatatacgagaatatcatcaatgaacactactacaaacttgtcgaggcagtccatgaacacactattcatcaggtacatgaagtaagctggcgcgttcgtaaatccgaatgacataaccatgaactcatataatccatacttggtgatgaatgatgtcttcggtatatctgcg

SEQ ID NO: 79816 - DNA, 247 bp, Zea mays
ttaagctccttgactttagaattacttcacccagtttaaacaaagatgtaaaaatgaatgtttgagaagttaaactaggtatgaagcagggttaatgcatgaacatgctttctcttccttttaaacatgatatgcaattaatgtaggaagattttaggtacatgtatgaatgggatggagtagttttacccttttgtaccttcacatagagatgctctcttcattgtgcttgtccttagtcttattg

SEQ ID NO: 79817 - DNA, 248 bp, Zea mays
tactatgtaggtatactggtatagagcattagcttttgtacattatcatgagactgaggatattctgatagcgccttttttcatttaaatcctttgatgtcttttgcatgccataaacttgacatgagacaacataggtaaatttgatatcagcaatagcttgtgccatttcaatatcagattgcaactcttggtaggatcctattgatctgtctcggtcaactttagctacaaaaaataaacatgta

SEQ ID NO: 79818 - DNA, 254 bp, Zea mays
tttcatgtagtacttgttcacccaaattagagcacacatgtgatcgtggtgaccgtcacaagttggtgtgcttctatagtccgaatccagcctgctcaaatccttttccctttcgatcttctccctagttcctaagcaaaacaagtgtgcatgggtctccatgatctaaatatgatgaccatgaactcaagtgtgtactcacctgaaggttgtgttgacaaacacgagcgtgagtaatgggaccagaaattggt

SEQ ID NO: 79819 - DNA, 246 bp, Zea mays
tgctctcatggacgtgattattggctgtcttaaaggacctggcaatggaacaatctatgttgaccaacctttcagctttgctgactgagcgaaccctaaccatgcacatgatctctataccgcgctccatgggctcattcctacctgagcatcatggcttgaacgcattggacatgtcctaattgctaatggctaactggtcatgaaggccggacctactctatttactgatacacttgtaagtga

SEQ ID NO: 79820 - DNA, 254 bp, Zea mays
tctaaagggagagcacattttatgattaacaaatgttcattttgagaaagacaggatttgtagcgcatgccaggcggggaagcaagttggagtccatcatccacacaagaacatcatgacgaccgacaggccacttgagctactccacatggatctattcggcccgattgcttacataagcatcggcgggagtaagtattgtcttgtaatagtggatgattattctcgcttcacttgggtattctttttacagg

SEQ ID NO: 79821 - DNA, 254 bp, Zea mays
tttccacaggtagcttctttactgattcatccttctcccgaaccgcgctcttcatatcatgtacaacttcatcccatgtccgaaggttcctgtacatgtattatacttgagaaacatgtcattcgtgtttttgaagaccttcagaagacgaaggcccccaacaatagctttaacacaagatcatgacatttttagctagaacttgcatctaaatggacaattctcggtgaagtatctctatctggccctaacca

SEQ ID NO: 79822 - DNA, 248 bp, Zea mays
tcatgtaactattcatattcatgctgaaaacatatggttaatcacatttttgaggaccttctgaagaggaaggcccccaaaagtagcccctcgcagtattaatttgtttccttgtaacaaatttagactgcgacgtgaacgaaggcctttagtcgatggtccgaaaaaacaccttcccttcgctagaatagcaaacgacactgacatgcctgacccaccaaatcgtggagcgctaggtatataaatag

SEQ ID NO: 79823 - DNA, 251 bp, Zea mays
ttacttgacttttttttctgtgttcatactgggagcttgatgtttgagagctgattcttgtctgcaggaggaaaaacgtgcccttgcgacttctcatgacaaccttgacaagttgtatcgcgacaccagcaattctttgactatcttggagaggagccatcgttttaccattgaggacttggataatcaccgttacaagctgcaagagtctcaggatgaaatgattcgtcttaggcaattggtgtcgagca

SEQ ID NO: 79824 - DNA, 252 bp, Zea mays
tatttattctttgatttgttgcacatgtttgaatttatttgaatttgaaacctaatttgaatttggaattggaaaccctagagaaaagaaatagaaaaagaattagaaaatctagagaaaaagaaaaaggaaaagcagcccagtagcccagctcggcccagccaggccgcacgcccgcgcacccgcgtcgcctgacaggtgggatccacctgtcagcggcagttttcttcccgcgcgctctctctctctcgc

SEQ ID NO: 79825 - DNA, 251 bp, Zea mays
tggtgatttccttttttgatgatgaggtctctagtttgaattctttatgtggattcttttttgttggatttttttgtttttctgtttaaaaccttcacaattcatacctaacatatggacccaatctgaaatgagctaataaggtgactgactaatggcattttttcttagttgtaccatgaaaatttttattttgtcatagtgtcattatgtatcataggataaattgtgacgtttcatatctaatgatc

SEQ ID NO: 79826 - DNA, 252 bp, Zea mays
tcgagccgaagcatcttctactttgaacgaagccatcagctcagaaagtggaagtgagttcacccgaggtgggcgccaatgttggggacttgttctcaaatgctatgaattaagaacaaggcaacataaaatgttaaatattaatgcccttcatccgttgaaacattatctccccaaggatttaatgagcttcagatgaaggccatgagcaaaataccacgaaggtcacaccttcgtggttaaacttgtaaa

SEQ ID NO: 79827 - DNA, 248 bp, Zea mays
tggcatacagctgactatcttgtagcctctgaaggactttcctcaaatgttcctcatgctcttgctcattctgggaatatacgagaatatcatcaatgaacactactacgaacttgtcgaggtagtccatgaacacactattcatcaggtacatgaagtaagctggcgcatttgtcaatctgaatgacataaccatgaactcatatagtccatacttggtgatgaatgtggtcttcgatatgtctgaa

SEQ ID NO: 79828 - DNA, 249 bp, Zea mays
tagccagaagcatcgttaaatagattcatgacccagatctgggtaaatggcgggcggaaaatggcaggcgacgaagctcgaagccatcttaagccggtaaaaaacttatgtttgttacttttaccttctcctttgaaatttgtacctttcttactgtgctgtttgatatatacaggatgacgaagctgaagattgacagtgctgaagtttgacaaaactgaagacgaagccttagctgaagcttaaaat

SEQ ID NO: 79829 - DNA, 248 bp, Zea mays
tcggcatctgaaaggtaattgcctttgaggaaagagattatttcggttctctagtcttcactgtgtactggagagatactaagtactgctctttccatgagctcaaccgaaggtgcttttattgtttcaaaaaatacttccgaaggtaaggggagcccctgagccgctgacttggctagcaaatctgcatgctcattttcacctcttgggatattcttgacagaaaaaccttcgaaggaggcttccaa

SEQ ID NO: 79830 - DNA, 394 bp, Zea mays
  unsure (1)..(394): unsure at all n locations
atggtctgacctggagaagaactttttatacctgtctggtgaaagaggtggagaacggttcacagaattatccataatatgaaaaagctcaacacggcaaaagagttatgcagaccgacgacgaccacccttatgctttctggtagacgattatgtctacttgaaggtctcaccaatgaagggtgtatcgcgtttcggagtaaaggaaaacttgcaccacgatatattggtccttttcttattctggaaagatatgggccagtggcgtatcgacttcagcttcncgaaacattgtctgctggcacaatgtgtccacgtgcacaataaagaaatgtttcggttcttgacgaccgtgagtgctgatgtgtcttgaccgactacatactgacatctt

SEQ ID NO: 79831 - DNA, 225 bp, Zea mays
actcttgttgaaattgtacaagctgataaagatagagctgcacatacccataaggaaccaactaatgagacagaaatttagcaacaaattaaattgaaagctcctgtcatgcttgctactaaatctgatcttcttgaaactcatgctactgatgcctggtgctatgccttgtgttgcaaagatgctttcttttctattgatggtattgctagcactcttgctgca

SEQ ID NO: 79832 - DNA, 320 bp, Zea mays
gagctctctgggacggtctgctgttggctctttgttctggaaccttctcttgatgtgccctctttcttcctcttttgctctctccacttgaatagctctgttggaaaggtgagagaagctgtggaagtcctggctggcgaggatggtcttaagctcgggtcttaaccctctcagaaaacgagccatctttctggcctcggtgctgacattctcgggcgcgtaacgggccaactctgtgaacttgtgcacatattcactgactggtctttcggcttgggttagcttccggaactcatcttccttgagttgcactcatccct

SEQ ID NO: 79833 - DNA, 440 bp, Zea mays
  unsure (1)..(440): unsure at all n locations
tcctagaatcaagaatattgagctcatgcctaagtctggtaaaagaatgttcatcaagtggctnggtaaagatatcggctaattgatctttagtattaatgtaagacatctncgatatccccttttgttggtgatccctaagaaaatgataccgaatggctatgtgcttagtgcggctatgctcgacgggattgtcggccattntaattgcactctcattatcacatagcanacggactttggttaatttgtaaccgtagtcccgcaggggttgcctcatccaaagcaattgcgcgcaacaatgtcctgcggcaatgtactcggcttccgcggtggaaagagcgacccgaatttgcttctttgaagcccaagacaccaatgatcttcccaagaactggcaagtccccgatgtgctctttctattgattttgcacccgccc

SEQ ID NO: 79834 - DNA, 211 bp, Zea mays
ttaagcatgtgacgaggtcaggtctatcaaaatctaacaagtatagctgaccctctaacacacccttaaatgctattgaatcatcacttcttctaaagacagtgacacctacatcagtaaatagacagttgtagcccatttgacataattgggatacgcgaagcacattggaatctaaagaatctacaagaaaaacattggaaatagtatg

SEQ ID NO: 79835 - DNA, 343 bp, Zea mays
  unsure (1)..(343): unsure at all n locations
actgcaatatatatgacgaatatccactgggtaataggtgatgacaccacaacatagagaaagaaagtgtaactttctatcanggaccagactatccgcgctaggggggactatccgtaccagggggccagactgtccgcgccatcccggcggacggtccgcgaccgtccaggggcgaattttagaaccctagtcgccccatccattcaatcatcaatacaacagaaaataaccatccaaatccgttcaaatttttgcagcatattcacaatgtgtaatactacaaatttcaccaattaaaaatgtaattccactggccaatttcagatcagagagaaaaccc

SEQ ID NO: 79836 - DNA, 295 bp, Zea mays
  unsure (1)..(295): unsure at all n locations
aagcttatgaagattcttcatccaacatgtgctagacggcgatgccagagccagcccatgttagtcttatttttaagcaagtgtcgagattagctctatcaaaattcactaagtatagctgaccctctaacactctcttaaatgctattgaatcatcacttcttctaaagacagtgacacctacatcagtgaatagacagttgtagcccatattgcataattgagatacagaaagcagattgttatctaaagaatctacaagaaaaacatnggaaatggaatggtcaggggatat

SEQ ID NO: 79837 - DNA, 324 bp, Zea mays
  unsure (1)..(324): unsure at all n locations
gcttactcggatcatacttgacaagtcttagntttaagctcttagcacttagattcttacttactatgccantgatgcgtcttgagagatgcatgangtactgcacttatgatgagtattcaaaactcagatcactcatgaaaacccctagtgcaaggccaaaatgcatatttcaccatttgcctatattctctcaaaattatctagcctatggcaaaatatctggaatatatgagaaatatatgagggtgcaatacctgtcccaacagtgtattttgtgcattataagttgggatatggntcgttgaaactatatagaaaatc

SEQ ID NO: 79838 - DNA, 328 bp, Zea mays
  unsure (1)..(328): unsure at all n locations
gaagcagatgatcttcctaagaagaagatcatggtgggaatgcctgcaacacagtggataagtgtctataatggcagagtacctatgaaacaaaggtactcttataagaactgagagttatttaaattgtaacgtaccatgtgtctttgtggctgagccaaagtaattcaacgaattcactgggtactgcaggtaccactacaatggttcagaatcaagaagtggacagcacatcgaanaagggaatgccgatggactggttatcacgtgcataacatcttgntccgatctatgggctctaatcatggatgctggaactggnttcaca

SEQ ID NO: 79839 - DNA, 344 bp, Zea mays
  unsure (1)..(344): unsure at all n locations
cggatgtccgactttcaagaggcatcgcacaggtatcatccaattattcagcacaatggtgtttgntattgtatctgaaggaactttgcttaataaatattnttagtaacatctaaaagcttgctgaggctgtattttgaatgcttgtttatgactgcagaaaacacacattacaaccaattagctacatttgtttattcaaaatgattntactctcacaaaatatatggaaggtgctgacaatatatagaaggagatgctcttattattatattgatcatatattggtgaaatacatattctcacgtaaatgaaggaagatatgaccaggcgatatccatttt

SEQ ID NO: 79840 - DNA, 341 bp, Zea mays
  unsure (1)..(341): unsure at all n locations
tatgggctctagaccgagtgctataactatgagagactgtcttcttcatactctgtagatgggtatgtactctannatataaagaaatgctctgtcttcttatttcagcagcgtcttttacactacttatttcagcagcagcgtcttttaaacagtcatttatgatatgnttggttcgaggaatngagtgatccatcttcttctcacttctcacatctttattcggcttaacgaatagaatgacgtgattcatcatcatcctattacttcttagtaagctaataatagcatatatatgaggagtgggttgttccaccaaaattgatggaatgaactaatga

SEQ ID NO: 79841 - DNA, 257 bp, Zea mays
  unsure (1)..(257): unsure at all n locations
atacccgaagggggcattagtgttcaatggctgtggggaagaagattttttgtactgtctcccggataataaagagatatccgtctgtcgggagatacgtagaagcttctgatatccgaagctggaagatggcctttcagtattatcaaaggatgattggctaacagtttagcatataatagcataaaggtataaaagttaattctgtatttgagaacgaagtatttcatttgcttatatntaatcttggcctcctc

SEQ ID NO: 79842 - DNA, 194 bp, Zea mays
taatatgcgaatagactcaagcctagctacaggttcttatgtttcaccaaaatccaaaccttcgacttgtgaatacctcttggccacgagtcgagctttgtccttgtaccacaccatgctcgtcttgtttggtgtggaagacccatctggttcctacaacatattggttatgacgtggaactaaatgacatacc

SEQ ID NO: 79843 - DNA, 351 bp, Zea mays
  unsure (1)..(351): unsure at all n locations
ctcgttgtgcgctcggtcgcgcgacnagtcgtttatttcttaattcgatttagagtgctatgccgcgcgtctcgccgcgcgacaatccttttaatatatcttcatctgcttataatgagtagacatgaaacatgactttactttatgctaaacatagtgtctacattaatgcctttcaattgagcgagtggtttaattcataataatgtaacgtgatcggttctcgactgtcttttcctctttctctcttaaccgtaattgcgagcccgcgtggaacgtctgtttacttactgcattctattggatggcgtactgntcttttgtattaaatatgtggatgtatgctatgtt

SEQ ID NO: 79844 - DNA, 361 bp, Zea mays
  unsure (1)..(361): unsure at all n locations
tcattagatgagaaatcaacaagatanagattttcatgtctaaaacctttaaatntaagaatgctaccgtcaacactagagataataacatcttcaactgtngaaatgcaacacaatcctaaatcacataattgagctacggaaagtaaattaaagttcaaagactcaaccaatagcacatttgatatagaatgatcatttgaaatagcaattntacccaaacctttaacctttcctttacgattatctccaaatgtgatactatcataatttgagcaatcttcctcactcatttgggtaaacatcttcatatccccggtcatggtgtgagtacatccactatccaacacccaatgattcc

SEQ ID NO: 79845 - DNA, 374 bp, Zea mays
ctgatgggaagcagtggcaagatttctatgagaaccaccgagactttgtcgatgaaccaagagatgttaggttcgcactgagtactgatggaatgaatccatttgctgagaggagcaacaagcatagcacatggccagtgatcctcaccatatacaacctttcttcatggttgatgccgaaacggaagtacattttgctaaccatgcttatttctggacctacacaacctggagttgatatggatgtatttctagagcccttaatggaggatatgaacatattgtgggtaacgggtgttcatatgttggatgagtatcataaagattcattcacgctgagagcaatctatatttgtacgatcaacgattaccct

SEQ ID NO: 79846 - DNA, 306 bp, Zea mays
  unsure (1)..(306): unsure at all n locations
tttcatctcgaaatcgctcgatagaaaatttttaacttcctcaatcacattgagatntgatccaaagatcaagatgtcatcaacataaaggcacagcataacagactcacccncaccataccgatagtatacacacgtgtcagattcatttacaacaaagccagctggtgtaagagtattatcaaacttttcatgccattgcttaggtgcttgttntangccatacaatgattntatcaacctgcacaccttggtctcttgaccatccgcaatgaacccttctggctgatccatatagatctcctc

SEQ ID NO: 79847 - DNA, 199 bp, Zea mays
catcattcacacaagaacatcatgacgaccgacaggccgctcgagctactccacatggacctatatcggccgatcgcttacataagcatcgacgggagtaagtactgtctagttattgtggacgattattctcgcttcacttgggtgttctttttgcaggaaaaatcttatacccaagagaccttaaaggaattcttga

SEQ ID NO: 79848 - DNA, 235 bp, Zea mays
  unsure (1)..(235): unsure at all n locations
tagctagctctcatatatgatgctggatagtccgcttctttcgccttctggcatcttcctgacttccatgaatagcaataggcccttggtccgaatgtatattcatgcagagataagctgggtgaagaattgcttcaaaagcatttatggtaccacgaccaatgatggcgttgtangggtattccatgtcaacaatatcaaacacaatttgctcagtccttgtgttattaacaaa

SEQ ID NO: 79849 - DNA, 298 bp, Zea mays
  unsure (1)..(298): unsure at all n locations
tccgagcccgcatctgaccgtggtgaccgtcacatgttttgtgtcttctgcagtccgaatccagcatgttcaaatcctcttccctttcggtctctctcctgattcctaagcaaaacaagagtgcacgggtctccatggtctaaatatgatggacatgaactcaagagtgtaatcacctgatggntgagttgacgagcacgagcgcgagtaatgggacccagaaatggtacttgtattggtatagatgcatcagtagtgtggatgtcttcatcattctccccttcttgcattttgagtc

SEQ ID NO: 79850 - DNA, 363 bp, Zea mays
  unsure (1)..(363): unsure at all n locations
ctcagctctatgtcagtgcacgtctcagagttaactgagaattctcgctgacnacaattacggttctttattggagctgctntagatgcttagtcaagtcatatcttttgaaaaaataattcacagcaattaagtatggtaacaggtaacttccacttatctcaatatcaaggttttatgctgcataatcatcctaatatatagaacagttctcagaattctttctagattcataaatataaacaacagtgaaacagttcaagtcaaagaagcggtttgtacaaccaacaatgtgactaattgctatgtcganttgactaanaagtgtaatcacctcagcacggaatcacttnttcactactt

SEQ ID NO: 79851 - DNA, 446 bp, Zea mays
  unsure (1)..(446): unsure at all n locations
attctctaattgtatgttactttctggaagtatgaagtacctatttctgtggtgcagacgaataggtgacattgtaaatggaagttcttcaatgatattcatcagtaacatgacatctttgaacacattgtatggataactctgtcatcaattaatgaatcanactatgtcttgatattttatatagtgcaatcaaggtactaattcaaatactcttggcatgcttcattgcagaaattngaggaattgcaggatatctgatagcctggcatcagtgaactcttcacagtttgcaaagtaaacttattgaaggcattttggttgtacaaactccagtcaagtgtgatttgtcaatgatgcttaacgaactgcatggatatgctctgttaattacnttacttctctngtctctgtttcctgtacagggattgagtttaacatatcac

SEQ ID NO: 79852 - DNA, 360 bp, Zea mays
  unsure (1)..(360): unsure at all n locations
tcgttaatcgactgcgtatgtaagatagntctctggttattactctttataggttctaccttgggcctttataaataaatgttaattaacgtgattaatggcaaccaanatacttgttattaatatatttgttcgtgtttgcgcgcgacatcgtttgcgcatcatcgtgttgttcgtacgcgtgtccactcgtcgttcgcacactgtcgtgttgtttcgtgcgtcgtccgcgcgctgtcgcgcgtgtcgttcgcaagctggcatgctcgttcgcgcatcgtaaactcgcctcgcttagaatctctcgtggtaattatattacgtatttatttgatagctggtagcatagcagatttaatc

SEQ ID NO: 79853 - DNA, 239 bp, Zea mays
  unsure (1)..(239): unsure at all n locations
tgttcattttgagaaagacagggattgtatctcatgccaagcacggaagcaagttggcactcatcattcgcataagaacataatgacgaccgacaggccactggagctcctacacatggatctattcggcccgatcgcttacataagcatcggcgggagtaagtactgtctagttattggggatgattattctcgcttcacttgggtattctttttacaggaaaaatctcanacccaag

SEQ ID NO: 79854 - DNA, 120 bp, Zea mays
agcttcaataggtccatacatgcatgcgcagagtttgccggccggacttgggatggaagaattatcatttgtggtttttatacagaaatgtagcttgtgaactattaataaaggtatata

SEQ ID NO: 79855 - DNA, 353 bp, Zea mays
  unsure (1)..(353): unsure at all n locations
ctaagcttcgtcccttgacgcacgagccaattcgacaggcagcatgggctctattcattncaatcttcgcttcatacccatacgcataggaggacatgccactgttctgtgcacgatgcggtaatagctgtggggacgttcttaatacattcttttgctgcgacgctatttccttccaagaccctcggaccatgataacaaaaagaaagcatccccactacattaccttgcaataaattagtagaccgtattaacaagtagtgacccgtcgatcccacccacgccaggccaaaatctcggctcgtcactatgtaagtgttcccaatatagaaggaacaaaaagagggggcaaa

SEQ ID NO: 79856 - DNA, 276 bp, Zea mays
  unsure (1)..(276): unsure at all n locations
gatagtgagtatcctaaccatgtttataaactctttaaggcgctttatgggctcaagcaagccccaagagcatggtatgaatgcctaagagattntcttatcgctaatggcttcaaagtcggaaaagccgatcctacactctttactaanacaattgcaaatgatttgtttgtatgccaaatttatggtgatgatatcatatttgggtctactaacaaatctacttgtgaagaagttagtaggatcatgattcaaaaatatgagatgtctatgatg

SEQ ID NO: 79857 - DNA, 197 bp, Zea mays
  unsure (1)..(197): unsure at all n locations
gagttcagctctattaatatcaactaagtatagctgaccttctaacactcccttaaatgctattgaatcatcacttcttctaaagacagtaacacctatatgcgtaaaaagacaatcgtaagcccatttgcataattgagaaacaaaaagcanattgtaatctaatgaatctacaagaanaacattggaaatagaat

SEQ ID NO: 79858 - DNA, 251 bp, Zea mays
  unsure (1)..(251): unsure at all n locations
acacgtgataggtttgactaacgtgcaattcgaataagatagaccttgtgtatcttgtcaagcangtaaacaagtgggaggagcacatcacagcaagaatgtgatgaccacctcaagacccctggagctgctacatatggacctcttcggacccgtcgcctatctaagcataggaggaagtaagtacgggctagttattggtgatgacttttcccgcttcacttgggtgttctttttgcaggataagtctg

SEQ ID NO: 79859 - DNA, 352 bp, Zea mays
agcatacgctaataatatacgaattgactcgagcctagctacgggtgtatactgttcaccgaaatccaaaccttcgacttgggagtattcttaggccacaagtcgcgctttgtttcttgtaccacaccatgctcgtcttgcttagtgcggaaaacccacttgggtcctacaacattttgaataggacgcggaacctaatgccatacctcattcctagtgaagttggtgagctcatcttgcatcgccaccacccaatccgaatattgtagtgcttcctctaccctgtgtggctcaatagaggaaacaaaagagtaatgctcacataaatgtgcaacacgagatctagtagtta

SEQ ID NO: 79860 - DNA, 433 bp, Zea mays
  unsure (1)..(433): unsure at all n locations
ctcagcttcggagtangagcggtagatntttcaggaaanatttgttctatagcttcttnctgtgctgtcttttctccaatttctgaagatttctctttggtgggctctgaaggcgccagttcagcatcggcctggctcattgtagcttcggcttcggtcaactttgtctcgggttccacctgtgttttcaagccttggaatttttctggataacttgagttttatcgctcaccattaacacataccatcttttctttggngtgctgcagacttttgatcttcgccctcactctaccgaaggcttaaattctgatgtttgctcttggtctcgccttaatttgcagcttcgatgagcgctttatcttacgaggcagcttggtaagcgaagctacgcaattagctaaccgcatgacgcgcgagaaacctactttct

SEQ ID NO: 79861 - DNA, 366 bp, Zea mays
  unsure (1)..(366): unsure at all n locations
tactcagctgtgaggctcttcatnccacatgtgctaaacggcgatgccacagccagcccatgctagtcttagcaattaagcatgcatctagaccggcctcctcttttgcaaaatcaactaaataaagttggtcgctagtacacctttaaaagctaatgaaccatcacttcttctaaagacagacacatctacatttgtgaataaacagctatatcccatattacaaagttgactcacagacaacaagttatatccaagcgactcaactaagaacacattagaaatagagtgctcggatgaaatagcaatctttcctaaccctttcaccttgccttggttcccatcaccgaatatgaatgaatcttg

SEQ ID NO: 79862 - DNA, 280 bp, Zea mays
  unsure (1)..(280): unsure at all n locations
tatttgttggatcttttatgggcttggcccatttattgaataaactctaaggtgtgaatggtggagaataccaatagtaccacattggaagtccaagggtcttttgccttgacttatatggtgggaattattccacttaacttgagaagtcaagaaatggacaagggcatgccacacacgcgcgcgcgcttgtcgcggcagccgggccgggcgtggcgaggcangcangcaagcgggcgtgggtgtggtgtgttaattnttaacactcactaaccgcgta

SEQ ID NO: 79863 - DNA, 157 bp, Zea mays
  unsure (1)..(157): unsure at all n locations
gcgagaattgtatatttaaaaaattacaatttttgaatcattcttttattcttatactaantcttggtatacatggcttaatattgagcaacgcgctgagagcacaaaagaatgccgaagaccagagctatgacattgctttcaataatctacgatc

SEQ ID NO: 79864 - DNA, 269 bp, Zea mays
tcatccacacaagaacatcatgacaactgacagatcactcgagctactccacatggatctatttggtccgatcgcttacataagcatcgacaggagtaagtactgtctagtcattggggatgattattctcgcttcacttaggtgttctttttttaggataaatctcaaacccaagagaccttaaagggattcttaagacgagctcaaaacgaagttggtttaaggataataagatagaagcaacacgggacggagtcaagactcacaa

SEQ ID NO: 79865 - DNA, 224 bp, Zea mays
gacaactacatggctgatgtacaagacagcactaatcgtatgacgaaacatgtggtgaaagcagatttgaaacattgttatcgtgaggaatggcaacacactgggaaacgtgtcaacatggcctagccctaataatagcccaagattgcagagatgtacgcatggaacattttgttgacgattattactctgttgaaagattcacgatagcatattcaagaatg

SEQ ID NO: 79866 - DNA, 164 bp, Zea mays
gctgaaagggaaacgtgcccttgggccatttctaagtattttggtgaatgagtgccaactcaagtgcttaaatgcgaacttatgccatggatgaatagagcgcaaatcaagagcaaaagtatgtttctaagtcttagtacatatggtttgtggactaatatact

SEQ ID NO: 79867 - DNA, 406 bp, Zea mays
  unsure (1)..(406): unsure at all n locations
actgcgcgacgaccaccaccgcaccggactttttcacagaggagcagtccgcgcgcgttcgccgggctcggtcagagaagagcagagagaaacgcagttgaaccacgagatagagacgaacgattgtaagtagaaacccagggcaggggcaattntgactcttagatgataaatacatgggaacaaattataaaaaggaataatacacattaaatggtagtataatcaattagaatatatttatagtcccctttttacgaagaanatctttcgaatggcatttgtgcgaagcgtaatggttagagtcccaaatatgcaattatctccaatacaataggtgacatatcatggactcatttaggtaactttgcttcttggatttcgatggtgtgatccagtggatcat

SEQ ID NO: 79868 - DNA, 412 bp, Zea mays
  unsure (1)..(412): unsure at all n locations
ctcagctatgaaattcttattccacatgggctagtcggcggtgccaaagccaacccaagttagtcttattaactaagcaagtgtcgagttcagctctttcaaaatctaccaagtatagctgaccctctaacactctcttaaaagctattgaatcgtcacttcttctaaagacagtaacaccagtatcagtaaaaagacagttgtagcccatattacataattgggatacggaaagcaaattgtaatctaaagaatctacaagaaaaacattggaaatagtatgggcaggtgagtatagcaatttacccaaacctttgaccaaaccttgatttccatccccgaatgtgatagctcggtggggatcttgtgttttctcatatgaagagaacanntcttttctccctggcatatg

SEQ ID NO: 79869 - DNA, 368 bp, Zea mays
  unsure (1)..(368): unsure at all n locations
tcttcattcacacgtgggctagtcggcgatgccagagccaacccaagttagtcttatcaaccaagcaagtgtcgagttcagctctatcaaaatctaccaagtatagctgaccctctaacactctcttgaatgctattgaatcatcacttcttctaaagacagtaacacctacatcagtaaacagacagttgtagcccatttgacataattgggatacggaaagcacaatgtaatctaaagaatctacaagaaaaacattggaaatagtatggtcaggtgatatagcaattttacccaatcctttgaccaaaccttgatntccatccctgaatgtgatagctcggtggggatcttggtttttctcatat

SEQ ID NO: 79870 - DNA, 321 bp, Zea mays
  unsure (1)..(321): unsure at all n locations
tcttgaaagcgcacagatcctcgatggtggaatcctcggtcgatagcagtngtccaagtctcttaacttcatcttgngatacctgcatctcatggcggtgatgatctatgtcagacatggtgaagcggtggctcctctccaagatggtcaaggagttactggcatcacgtacaaccgtctatattgtcacgagaggcaacaagtgctcgcttctcctcctacanatagaaaacaacatttagtaccaaggcaacaataacatgacagagtcagcccagggaagttacctcatgcgccatcttttcagagtcaagctgggca

SEQ ID NO: 79871 - DNA, 416 bp, Zea mays
  unsure (1)..(416): unsure at all n locations
taaccttgatcaccttctataccctgggatacctaataacccttaatggaaccctggaaaaccctaataccaaaccctatggacctacgtgcagaatgagtccacttttggactaaagtgcaaaacaaccaagttaaataggtatctntagtcatttgggtcacatatatgtgaatttgcaagccaaaccctaagttttggaccaaaaatgcaaaaatcacctcttaaagcactatagaggctaagtctgaaattaagtgttgagggctcaactttggagcattggatctcttaaattattgagaaattgccctaattcaccacatcaatattgaagatctatcagaggagaacaacntttgttaagaattcaagcgcatgtcttatgagaaatgtggagaatatctcaacccaag

SEQ ID NO: 79872 - DNA, 257 bp, Zea mays
  unsure (1)..(257): unsure at all n locations
tactcagcttgactgctgctggttcattctgnaatcagctnttagtgtacanggtccancttgagtgtgaattaaaccttgatccagtgctcannataagttaatccctatagtncgattgtagctggtatgtagcactacaactcttgatgcagagaccgcggngatgttgccatagaaacttgggagaanaaggagctccaaggtgctctatcagtcgttctaaataggtctcgccatggtacaatgctctattg

SEQ ID NO: 79873 - DNA, 157 bp, Zea mays
  unsure (1)..(157): unsure at all n locations
cgggatagtcttgatagaatgtgatcagtgggttgctctctacttnctctactcaagtgctgctaaatggtactcctggaaacttcatatctcattggcggngcctaagacaagggaaccctttgtcgcccaagctcttcattattgtggacaccct

SEQ ID NO: 79874 - DNA, 149 bp, Zea mays
  unsure (1)..(149): unsure at all n locations
actgaattaatttgctcttaaggcagctatcagtctgtcactgtttaccatttatctgtagttctctgttccagttgggttgatggtgactcatgtacctgtgctgntctgaccgtgacaacattaaaaggtggaaaactgctattatc

SEQ ID NO: 79875 - DNA, 300 bp, Zea mays
  unsure (1)..(300): unsure at all n locations
atgaagattcttcattccacatgggctaatcggcggtgccagagccaacccatattagtcttatctattaagcaagtgtcgagttcagctctatcaaaatctaccaagtatatctgaccctctaacactcccttaaatgttattgaatcatcacttcttctaaagacagtgacacctacatcagtaaatagacagttgtagcccatttgacataattgagatacggaaagcaaattgtaatctaatgaatctacnagaaaaacattggaaatggaatggtcaggagatatatgctattta

SEQ ID NO: 79876 - DNA, 320 bp, Zea mays
  unsure (1)..(320): unsure at all n locations
gctataacacgacgatagaggcaagagctcgaccatatgttataatataaggcgagctgtacatgtatgtagtctgttctccattactcaagtgtttatccagagccgaaggtatataatngatgaaggagatacacacaggcctatgtggatctcacattggatctatgcctttgcttggaaaagattttcgtcaacgattntattgtgcaaaggcagcttcggatgcagcggagttagtccaaaagtgcgaaggctgtcagaaatgtgcaaaagatcaaaaacaaccttcgtctctaacccaagtaatacaacccact

SEQ ID NO: 79877 - DNA, 328 bp, Zea mays
  unsure (1)..(328): unsure at all n locations
gtctaacctagttaagataactttcagcatagcgagtgagaaagcttaattcacgctcaaacttgacaagatctagctcttaagctcttggtacttataatntcatttactatgcaattgtgtgttcttgagatatgcatgtggtactgcacttatggggagtattcacaactcaattcatacatgaaacctctagtgcaatacccgaacgccaaatctcaccattngcctatattctctaanaactatctagtatatggcacaatattttgaaaactatgtgagaatatgtgagggtgccaataactgtcccaacaagtgttctttt

SEQ ID NO: 79878 - DNA, 290 bp, Zea mays
tgctgagagctgtttctatcttctgttgtgccacgctctattttcatacctcaaagcatctggtctatgcttatgcagattaagttggacaaagagaagagaatcctctccattccggatatgggtattggtatgaccaacgaagatcttattaagaaccttggaacgattgcttaatctggcactttacgtactgcctcttcatctttccagctgagtactgcactcataatatttgtctatgagtgcacgaacaggaacttgtctagtctcttgtcaaagctgataca

SEQ ID NO: 79879 - DNA, 266 bp, Zea mays
  unsure (1)..(266): unsure at all n locations
acttctcacctacccgtctcgttatatagtgccgcaggtgggaaggtgaatcaacaaggtctctagcacctaacanacagccacccgcactcactgaacggggggccacaaggtccgagaaggtgaatcgctaacgcgtgtaattggtgcaagatggggcgcgcgcgacgattattntaatcgtttctcgccaacaagctcacggaacggtgtttttggatcttcggctgtccgaagcctataagactttttcacggatcaagctc

SEQ ID NO: 79880 - DNA, 247 bp, Zea mays
  unsure (1)..(247): unsure at all n locations
agcatgttggagctcatcatncacacaagaacatcatgacgatcgagagtccacttgagctacttccatggatctattcgacctgattgcttacataagcatcgacaagagtaagtattgtcttgtaattgtggatgaatattctcgcttcacttgggtgttcttttgtaagaaaaatcacaaaccccagagacccttaagaaattcttgagacaggctcaaaatgaattcggattgagaataaaaa

SEQ ID NO: 79881 - DNA, 163 bp, Zea mays
  unsure (1)..(163): unsure at all n locations
gatcatgaatgaaatggaaggactcaatgagatgcccctagcgggtcgagcccnctagtgggactactcgccaatacctaaccctacaggaagggcgatcagatctcacttggataacacgtctatagctcggcggcctcctttcccacgccaactaggtcgg

SEQ ID NO: 79882 - DNA, 307 bp, Zea mays
  unsure (1)..(307): unsure at all n locations
caccccctttccatcncgctaatcttttnnnnnnnggagggatgagctccaggccccaactactagccagcacacgaccggggcaagggtgatgctttctcgcgacttgcgatgggcgaagactcccgactagacgggtgcggaggatgcggcaaaagcccccggagctaagccgcgcactgcagctggcccgcgactacacccggcacccaccgtggcacttgctccacacgcaaagggccgcgcgccactggcggtgcctatcactgtctcctgcaggacaaactttctccacacacactgggag

SEQ ID NO: 79883 - DNA, 238 bp, Zea mays
  unsure (1)..(238): unsure at all n locations
catttgagaaagacanggattgtagtgcatgccaagcanggaagcaaagtggtgctcatcatccacataagaacatcatgacgactgacaggccactggagcttctacacatggacctattcggcctgatagcttatataagcatcggcgggagtaagtactggctaagtattgtggatgattattctcgcttcacttgggtattctttttgcangaaaaatctcatacccaagatac

SEQ ID NO: 79884 - DNA, 302 bp, Zea mays
  unsure (1)..(302): unsure at all n locations
tctttttgctcgcatcatcatatggtgaactacaacagtcagcctcaanatcatatgaggtctagtctctcccatcgncatattcattcaaggcattgagatanggttcattgtagctctcaatctgcattagtgcgagaacgaccagatcagttgagaaaaaagagagatgggcacagaaaagagaaacagcatgtgctcacaaaacaagcagcttaatgacttatacagaacagtgaaagaaacaatatgcagtgaatgagcacgcaacctatatgaatgatgtgaaatacaatgtcatg

SEQ ID NO: 79885 - DNA, 217 bp, Zea mays
  unsure (1)..(217): unsure at all n locations
acttcgtcaaaagacaagaaattctatcatcagatggttagggtacgctcaacagctatagttactcgcgacggagaggaagccgaatgtgccgaaaccgctccaatttatgaagtgatgaaacacgcacggctggtagtatcggaagatgcacctggcgcttaagctgagcanggtgatgctgaggaaattgaatctgaagatgattaccacgtcg

SEQ ID NO: 79886 - DNA, 418 bp, Zea mays
actcagcttgctcgaaccctcagttcagcttctaggtcaagtaattctgtctccctttctggtagcaagtcatttaacttctcaattgcttcctggtcatgatcagcctgctcttccatcatccgaagatactgcagtgcttccatgtgcattgaagccttttcctcttgcaacctgttgatcatagccattgcttcacttactgccaccgctgaagcacttcgttctgcctcgagctccttataaagcatacccatctttttcttgttaaacttagcctgcttcttcaagtgttccaaagaactttcaccttcatcttcactagttgtgttggcatcaaatgaatctagaattgagttgctcctatcaagaaatggtgtcatacccagagcatcatggtgtccgtagtcatcaatat

SEQ ID NO: 79887 - DNA, 234 bp, Zea mays
  unsure (1)..(234): unsure at all n locations
acaagtgggaggagcacatcacagcaagaatgtgatgaccacttcaagacctctggagctgctgcatatggacctcttcggacccgtcgcctatctgagcatangaggaagtaagtatggtctagttattgttgatgacttttcccgcttcacttgggtattctttttgcaggataaatctgaaacccaagggaccctcaagcgcttcctccggagagctcacaatgagtttga

SEQ ID NO: 79888 - DNA, 465 bp, Zea mays
  unsure (1)..(465): unsure at all n locations
aatggctgagatgtttataacatgctttcataagtgcataaactgtcatgagcatcacacttatactatgacaatgcacttcacattctctatgatatagaattgttctcagtaacctaactatgtgcaactggcatttaaggccaaaatatgttctcatcttaatgcatatatttagggggagcaatctatgttatatagaactatgatcatgcttaatgtgatatatatcatttgatcatatctcttttatgtctatgactaatgtgtnttcaagaatattctcatgcttagtcatagaattgaaagggaaatggagtattcggcaaagacgacgcttccactncaactcttccgtattattcaccctttgtcggtattccgcatgatctttactttgtataatcttactcacatatcttacaaaggggaaacagattacacgcttaaattcactcaatatcg

SEQ ID NO: 79889 - DNA, 312 bp, Zea mays
  unsure (1)..(312): unsure at all n locations
tcagctggtgaccaatactatttgacatttagaataatgttagaagcaatacctaacatatgtttatgactattatgctctatgggtcttgtgtatactttattatggattttctagtcaaaataggtgcagcttcacacgtttttatcaaaagaanaagtattcttttaccctggtaggactaatataatgttagcctaaacactgagcattattggtcaagcatcagtgatgtaattaaatggaccgtacacttatcataaaaacagatgaaaaatggatacacacttatcataagaggcgaaatggaca

SEQ ID NO: 79890 - DNA, 222 bp, Zea mays
  unsure (1)..(222): unsure at all n locations
acttggaagtctcgtgttctaacccctcnggcgtgatagcgtcgcagagactgctgataccgtgccgagtgtaataaggccatgttccgagcctccttcagcttgtccagtgagtcttctcggctggtctggttgctttggtcgtcgtacgccctcatcctcagggaaccgtattctaagtctatgggcaagatagcctccgccccatagactagaaagaac

SEQ ID NO: 79891 - DNA, 392 bp, Zea mays
  unsure (1)..(392): unsure at all n locations
ggcattcccacatctcanatcacttagcataagaaagcagaacagaaaatcattccacanactctacttgattaacttagcctgcattcccatatctcaattcacttagcataaagaaagcagaacanaaaatcattccacaaacactcacatcgatgcagcccttattaagatgctccctncagaaccacctncacccttctcattgctatccncaccggtggcgagaactgtgccattcatgaccaggtcctcagcaaacagccacacgatgccaccaccggcaccaccatagtccttctcaacgctggtcgagccccctntgctcacgtagcttcaggggtgttcgaggtcagaccatgcatangcatccngcgcccatgaaatcctct

SEQ ID NO: 79892 - DNA, 439 bp, Zea mays
  unsure (1)..(439): unsure at all n locations
tctaatggcgagagcacatttgtgactaacaaatgttcatttgagaagacaaggttgtttctcttgtaagcacgaaaggaagttggctgtcaccatccacacaagaacataatgacaacggacatgccactggagttactccacatggatctattcgacccgatagcttatataagcatcggcgggagtaagtactgtctagtaattatggatgaccattctcgcttcacttgggtgttcttttacaggaaaaatcacaaacccaagagactntaaagggattcttgagatgggctcaaaatgaagtcggatcgagaatcaaaaagacaagaagcgactacgggacgaagttcaagaactctcaaatcgaaggctntcttgacganganggcatcangcatgagttctcntctccctacacacctcaacaaaatggtgt

SEQ ID NO: 79893 - DNA, 135 bp, Zea mays
taagctatgacacactagttttcttagaacatacatgctgtcaggttgaatattactttttcttgctaacttctcacttgagtaccggaatatgcttacctgtgagcttcttgtgagatctcatttaaaagccct

SEQ ID NO: 79894 - DNA, 216 bp, Zea mays
  unsure (1)..(216): unsure at all n locations
aagatagacctttgtgtatgcttgtcaagcaggtnaacaggtgggaggagcgcatcacagcaagaatgtgatgaccacttcaagacctctggagctgctgcatatggacctcttcggacccgtctgctatctcagcatatggggaaagtagtatggtctaattattgtcgatgacctttcccgcttcacttgggtgttctttttgtaagataagtc

SEQ ID NO: 79895 - DNA, 210 bp, Zea mays
tgcggtgagaacaaaggccataccaccaggatgtgccatgttaccatccaaaagcaaaaggaaatagccgaagccgcagcacaacaagctcagccgaagcaggtcatgcatactgcttcgtatcattcgccttacatcccagaatatgtgggcaaccaccctgcagtttctggtgcttcggcgagtcaaccccaagcttcttggaacaag

SEQ ID NO: 79896 - DNA, 327 bp, Zea mays
  unsure (1)..(327): unsure at all n locations
cagatgttcattttgagaaagacaggatntgtatcgcatgtcatgcacggaagcaagtnggtattcatcatccacacaagaacatcatgatgactgataggccactcgagctcctacacatggatctattcggcccgatagcttacataagcatcgacgagagtaagtactgtctagttattgtggatgattattctcgcttcacttgggtgttctttttgcaggaaaaatctcatacccaagagaccttaaagggattcttgagacgggctcaaaatgagttcggcttaaggatcaaaaagattagaagcgacaacgggacggagt

SEQ ID NO: 79897 - DNA, 217 bp, Zea mays
tctttcttcatcaaattactctcgaagctataatcagaatgagtattttcgttcggccgtgagaagccaatggctggaaccaagcgcgaagtgtttctgcaacatgaatgaactactgtacgagacaaaggccactggcatagagcagtatcacaacaacttcgggtggtatggcttcattcctcgctctgatgtaagctacccagttctaacattt

SEQ ID NO: 79898 - DNA, 298 bp, Zea mays
  unsure (1)..(298): unsure at all n locations
gtccctgaactgccttcgagaactcccccaggcccatgttctttaggttctctcaaaagcatgttgaattcaaatattgtgaaatatcagtacacggacctggtccaagaattcttggccttcaaaggttttactagcgtaaaagagtgggaaatgtcgatactggagggagagaagacaaaaggtgaactttgacgtctgccttactacttcatatntagaaaatactctagaactcccttgcaagagtggctggatacgattaaagtgatgtgcaacgagatacttggcaattatt

SEQ ID NO: 79899 - DNA, 281 bp, Zea mays
  unsure (1)..(281): unsure at all n locations
gggctcgatggagaggagcanggccggtggaggtacgacccaagctcgagcagagggggagctcggcctacagctgggcggcatcaatggtgaagaaactcctacgcacagcggtggtcgagcgggagaggggcgctggcttcttgctggccgagcagaggcgtcngggcctgngcgttccctggccacgggcagggaagagcanggggaggtggttggtgtgcagaagtggccgaccatgggcgacagcgagttcactgctcgagctatgggccggtctg

SEQ ID NO: 79900 - DNA, 164 bp, Zea mays
tggcactcatcatccgcataagaacatcatgtccaccgacaggccgcttgagctacttcacatggatctattcggcccgattgcttacataagcatcggcgggaagtagtactggctaattattgtggatgattattctcgctttacttgggtattctttttac

SEQ ID NO: 79901 - DNA, 233 bp, Zea mays
atgctcattaatcttagcactacagttgagtatgtgatcattttgctgtttaattaaagctaggtgatcatgaatagcatcaacattaatatctctacatctagtgcacatggtaacatgctcaatggtagatgtagaggggttgcaaacatttagttcatcaatcttagcatgtaaaatagcattctcattcttaagaatggaaataacatcattgcaaacatttaaatctt

SEQ ID NO: 79902 - DNA, 152 bp, Zea mays
cttcactcccaaattggcaggaatgtgtttacatgtgtcgatgacatcatagtgaaaagcacaaagcaagaatatcatgttactgatttgcaagagaccgttggcaatttcagacaagctagtctcaagtgaaatccagagaaatgtgtctt

SEQ ID NO: 79903 - DNA, 229 bp, Zea mays
  unsure (1)..(229): unsure at all n locations
ccgacgacaacatatcgtcngtagttgggtntattccaactctaaggtataattcttataataaagcaacactttattgtttgcttgttcttacgaatgaagttgcagatgaagggtctatttgtatagagtatgctgctgagcaaagcgctgcaaatgcaacaagacctcgaggataaaaagaacgaaattataatcgacggtctagagagcagaatcaaagaatacg

SEQ ID NO: 79904 - DNA, 281 bp, Zea mays
  unsure (1)..(281): unsure at all n locations
ctcagcttaagtcgtcctanggatgccagcttaagactccaagacatctctatgtgattcttagtcttgcgattccagcgtgggcgtgtgtgtgtgttcggcataaccatcatattgcatcatatcatcgcaccattccgcataacattacatcatacatcacatcgcatcaacagcaaagattgggtacgaagcangtcttcngcaataatttgttgcatgataatgtgctgaggcacgaagcacaccttcggccaatacacatttatcacacaatatat

SEQ ID NO: 79905 - DNA, 305 bp, Zea mays
  unsure (1)..(305): unsure at all n locations
ctcagcttgcacttacgaaccaaaccgcacccacatttcatatacattcaaaggctcaacaatagtggttatgtcaatgtaaccaagnnggtacgaattaattttgctacttggtcatatcgcgatggtcgtgactgtgatgttgtgcctatggatgcttgtaatattctgctatgtagaccatggcaatttgattcagattgtatgcatcatggtagatcaaatcaatattctctcatacaccatgataangaaaatattntgcttnccatgntccctgaggctattgtgcgtgatgatgttgc

SEQ ID NO: 79906 - DNA, 321 bp, Zea mays
  unsure (1)..(321): unsure at all n locations
ctcggtagagcaagagaattcagaatgtcaaatatatcgcatgcatctgatatgacacagcgaatgctgtcaatgcgagttcctatntatatgcctagcgcctcacgattnggtgggtcatacgtgtcagtgtcttttgctattctagcgaatggaaggtgttttttcggacctttggctaaaggccttcgttcacgtcgcagtataatttgttacaaacaaattaatactgcgaggggctactnggtggggccttcctcttctgaaggtcctaanaaacgtgactaatcatatgttttcagtatgacatagaactgtaca

SEQ ID NO: 79907 - DNA, 284 bp, Zea mays
  unsure (1)..(284): unsure at all n locations
tctanagggagaacacgtgataggtttgactaacgtaccaattcgaaaagatagaccttgtgcagcttgtcaggcangtaaacaggtgggaggagcgcatcacaacaagaatgtgatgaccacatcaagacccctggagctgctacatatggacctcttcggacccatcgcctatctaagcataggaggaagtaagtatgggttagttattggtgatgacttttcccgcttcacttgggtgttctttttgcaggataagtctgaaacccaagggaccctcaagc

SEQ ID NO: 79908 - DNA, 326 bp, Zea mays
  unsure (1)..(326): unsure at all n locations
ctcagctgagaatatctcgaatagtccgaagaatggaagcctctttcgaaggcttctctgtatagaatattctaagaggagaaatgaacatgcagacctattagccaagtcagcggcatatgggctcccattaccttcggaagtatnttttaaaacaataaaagcaccttcagccgaactcatggagtgagtcgtgcttacaatctcaccagtacaccgtgaagaatggaggactgagatagtatctttcttacaaggcaattaactttcggacaacgaagcttatataataagaatggaagcctggacaaggccttacttgatca

SEQ ID NO: 79909 - DNA, 262 bp, Zea mays
  unsure (1)..(262): unsure at all n locations
actcagcttgcttatcgaatatgaaatcttcgatccgtcaacttcttcgtctctggagcttctgactccatgttacaatgggctctgtccgagtatcttatgctgagtatgtctggtggagattgcttcaaggcattgacatccctcgactaatgntgcattgatgggactcctataacaatataaagacaactgtctgccttgtgtgtaacgtatcgaagtgactgcattgtatcttaccaagtgccacaatctgtcttct

SEQ ID NO: 79910 - DNA, 266 bp, Zea mays
  unsure (1)..(266): unsure at all n locations
ttattgactatagatgacanaggacgcagtcctncaagtagatgatttcagacattttttgtgtaaatgcagaaattaagcctcaatggngtatcttttggctntatcataaatcaattntntttctaaaatttctgcatttcgaaggagcctaaacatataaaactaccatgtaattaatccacatttttccttctgcgtttttttcatgtgaactaaacaacgttttcgagtaaaatttctatgtgaactatattcacgttttt

SEQ ID NO: 79911 - DNA, 226 bp, Zea mays
  unsure (1)..(226): unsure at all n locations
ctcagctgagagtcacaatcaccataaaagtgttgctttactacaaacagatataccgtttgctgactacaaatagaaataaataatgtatgctttactatcaagattcttccagcataataacttgctatcgtatttgctgcttcangggtgatttgacttttacttttaaatatatctgcaaatctaataaatgatgangtacagaagtatatctattataaat

SEQ ID NO: 79912 - DNA, 268 bp, Zea mays
  unsure (1)..(268): unsure at all n locations
tcagctccatatctntggtacctgcaaaacctattaagtattatttggtacccatctcatgatgggtccatcaaggttagccaataaggacttatgcacccaaatagccttggtcctagaatgtggtgaactcatcacctttctagcacaagagtcaaatttgggtctcctaagcaaatctgaatgtattgacaatntangcttangagttntaccctctggacaaaccttgaatagatgacctcttttacgacaattatagcaaatg

SEQ ID NO: 79913 - DNA, 491 bp, Zea mays
  unsure (1)..(491): unsure at all n locations
gtccaaaaaagtcaaagctganagaatctttgacaagtcttcagaatatatgtctggaattcagcaatcgatgcgttcaacggctgaagcaggtgttctattantgttgaagccagcagcgagaagattactccttcggctgaagacctgcctggtgctttcgagcatattgaaggtgaaattaatgatcttgacgaagctatagctggacatggtgacttctgtgccctggtagcttcttggggcacagctgttgcctttctgaagtccgggtgtgaacacgggaagattatcagtagacccaacttcagcttgtcatagcagactagataatatctccacccttgccgagtatgcgaatagattataaaatagtatgacaaaggtggacaacatactgggacaactcgaccacctaagccgaacnaatctatctatgctacttnntcttgattgattactatatacttatcagatgcaaccgactgact

SEQ ID NO: 79914 - DNA, 208 bp, Zea mays
atggacacaagaacacgcaagagtttatagtgattcgggccgctggagcgtaataccctactccactgtgagttgtattgctcgtgagcttgagttgtgtattggatgacttgggtctgagagtctgagtgagtgtgtcttgtaacatagtgtgccctcccttttatagtccaaggggggcacatacaaggatactgagttccgacat

SEQ ID NO: 79915 - DNA, 329 bp, Zea mays
  unsure (1)..(329): unsure at all n locations
taagctactcgatctcttgtatggcgtactgcttgtcctctaattctaacggatggatgtatatatgtctgcactcgcatagagaactatcgcggtgaagaaccccaatacctcgcaggagaagcccctgagcactaactggatggtggaggcacgngaccctttgcctatctctagtctatacatgttttaattcacctcccgcattacacatttatacctaatgattgactagcttttgttatccatgtccttgttacctatttggttggattataatcgctatcttatgcaatggctcactttatcaatgaacatgatgagaatga

SEQ ID NO: 79916 - DNA, 418 bp, Zea mays
  unsure (1)..(418): unsure at all n locations
ggggacattattactaattaaatggtctcgtgttgtccgaaggacacactttatgtcatcatatggatgcaccacggatccatatcaagcgttaaatgtccatacaatctctataatggaccacacacgttcttttgaaaacaattcatagaacttaaccaattcagattagattttatgataagagggacttaanatctcattcccgatgatactcatccagtatccatcttatgggaaaacatgaccaatagaaatatccataacttttcatttcatcccaacaattgaatgaccattntcatcttacccagcatggtaagcatcatcacatgaaaagtataacanatacaacacattgtatgggaagatgtatgtacatacaatcataaaatgttccgaaaacacatgcatatca

SEQ ID NO: 79917 - DNA, 346 bp, Zea mays
atggatacaacacgatgacgctaccctacgcttttaatgtaagatggacaacttcttattatgaagtaggctcaattcaacttttattatcaacttttattatttatagggtcactttcaagtactaaccagcaccctgacaactacacaggctgggctgatgcccgctgactaggaacttcttactgcggctacgctacccaacgcctgatgcatattcatgctaaattgatgtagccaatagaagatggtgtgctcgatatataggaccaaatcttactctacactactgcaaattaacgtccagcactgtatacatgcaaccgcaatgtaattctgcactgct

SEQ ID NO: 79918 - DNA, 116 bp, Zea mays
  unsure (1)..(116): unsure at all n locations
tgagcttcggatgtagatggatcatcaagctcgntgatcttcctcgagccttcgatcatgcactcaaaacttacaaaatgcccgattacttccttcggggtcattntagtatatct

SEQ ID NO: 79919 - DNA, 172 bp, Zea mays
gggaagcaagtatgcactcatcatccacacaagaacatcatgactagtgacaggccactggagcttctacacatggacctattctgcccgatcgcttacataagcatcgacgggagtaagtactgtctagatattggggatgattattctcgcttcatttgggtgttctttt

SEQ ID NO: 79920 - DNA, 93 bp, Zea mays
tcagcttcaaatacatgggtgctctctccagtcagtttgataatctttctacaactgacaacatgcatgatatcagtcagatgcagcagcagc

SEQ ID NO: 79921 - DNA, 482 bp, Zea mays
  unsure (1)..(482): unsure at all n locations
ctcagcttagaacatagactgaatggcgattggccttgactatttgtctttggttgtagacaggggactaccttaagtgttgtcatttaatagcccatcgctcggaattgttctcaaggcaagatcatgatcaacttggttgttcaatacccttgtctaactgttgtgaggaatggaactggatttcaccatcggngcctcatctgcatatctacataaggtttagtaagtnaggatgaaccataagggtaggaatatatgcacaacgaagtacctcgaagctacaataagcttggtcaggacaattggacaactggtttcttggtacagatttaaaacttagaaacacaacgtgaacacatgatgcgccttgattctttgcatggggaccaaccagggactacataaaggcgctatttatacccatgacacctcattgggtataattcttttatgctaccaatcaggtaccttattcttta

SEQ ID NO: 79922 - DNA, 224 bp, Zea mays
taagaattaccaatctgcttttgaaccataacacacctttctcatcctggcggaaacaattatacttctcaaccttctgatggagattcttcttgataatctgcactcccttgtcactgagctgggccatgataatctggtcttgcacagctggctcaacagaaatgtgagacacagaaccagaagaaatcacttcaatgtgcatcttgctcaactcatcacac

SEQ ID NO: 79923 - DNA, 295 bp, Zea mays
  unsure (1)..(295): unsure at all n locations
tgctctcctcactntcttgggcctgataaccgtgatttccttgatcctgggggagtacctgcaatgaaatatgcagtgcagtcccanattgctgaattattccgagnttgaagnttcaagcatttatcatgcgtggtaagtgaccgtaacgtatctaattaaattgttaatcattactgaaaaacagaactgcaggtaaccacataactgggaaaaaaggtattttccatctgctgaaaacatagaataacacattaacagtcataatagatagcttagttcatttgcatacaca

SEQ ID NO: 79924 - DNA, 284 bp, Zea mays
  unsure (1)..(284): unsure at all n locations
acgagagcatccncacncttatcacattcaatggtttaacaacatcggtaagttcaaggtaacaaagacagcaagggtgcattcttctattggctcttaccatgactntgctgatttcgatgtgatgagtatggatgctcgctctcttctactgggacgtccttgggaagttgatactgatgctattcaccatggtagatctaataaatatactttcatgcataagggaaagaanattgtgttgcttcctatgactcccacttgaaatgtccactttgaacatg

SEQ ID NO: 79925 - DNA, 314 bp, Zea mays
  unsure (1)..(314): unsure at all n locations
gctatacaggattnttttttgagttntngagaaatatggcagtacccttctgcatctgtcctctgaatagggttgtaactggccttcnttacctgtttgcttattttcttctanatgggaattggntntgtatcagatgatgctctacacaatggagctattcatgtgtttattcagtaactgaccttcgttgntcaatattntatatatatacaatagcaaccctagtattgccagatgtcatctaccctaatttcttcttgatttcacaagcaactgggtttgtatgttggctggcaagcctacaacaactc

SEQ ID NO: 79926 - DNA, 227 bp, Zea mays
ctgggtgctattaacgtctatgaactacagactctcgttggggcctgcaattgggcaataacactattaaaaaaatccatttcagtactaggtttcaatgccagccacacaacaacaagggtacggagtcgaaactggaacctcaatttacggactatacggctacagatgcaggcccataaatggaaggcattaagacatatcttgtcacaatggcattaattact

SEQ ID NO: 79927 - DNA, 325 bp, Zea mays
  unsure (1)..(325): unsure at all n locations
cgctgtgagccagagttcctcgctcctgctgaagccacagtgtgatcagccgaagaactaattctgaagacaacaacggaacagagagaagccaaaatagtcgatgtgtcctgccgaagcanaggcaaaaacgaccgaagagctagaattgatgaaatcggcagaggtatcanaaattcctgtagtaactccaaagaggaggagaatggccagcgtactatacgctgtcatggagtcgacaagggtaccaactcctgcctctatagaagtgcccaacatgagtgaganaaatatcaaggagaaccgtgaagatgtacaactcgtg

SEQ ID NO: 79928 - DNA, 314 bp, Zea mays
  unsure (1)..(314): unsure at all n locations
tcagctggcatttatgctactgccgatatgaagtgccggaaaggggacaatgatagaataaatgcctactgaagccaaggcgaacacatatcggaaggagtgggatcggactgctctnctccgactccgacaatgaaggactcgccgccaccgccttcaacaagtcatctctctttcccaacgagcgtcatacgtgccttatgggcagggaaaagaaggtgagtactcgagataccacttatgtttcttctagtgataatgaatctagtgatgaagatgaaattgattattcatgcttgtttaaaggtctagat

SEQ ID NO: 79929 - DNA, 237 bp, Zea mays
  unsure (1)..(237): unsure at all n locations
tggtctcgtgttgtccgaaggacacactctangtcatcatatggatgctccacggatccatatcaagcgttaaatgtccatacaatctctataatggaccacacacgttcttttgaaaacaattcanagaacttaaccaattcagattagaatttaggataagagggactctaaatctcattcccgatgatactcattcagtatccatcttatgggaaaacatgaccaatagaaata

SEQ ID NO: 79930 - DNA, 268 bp, Zea mays
  unsure (1)..(268): unsure at all n locations
ctcggatatggcagtaggaattaaagagaggatatcttggactcttgtgataacgagcgatattaggagtacaaggattcgcacatgtttttattgacttaaacaagtctatgataaaatacctacaaatctcatgtggtggacattggatnagcataaaagcccaataaagtatgttacactcatcaagaacatgtatgatanggttgtgactagcgtctcaacaactgatggtgatataaatatcttgtcgattaacatatgacta

SEQ ID NO: 79931 - DNA, 310 bp, Zea mays
  unsure (1)..(310): unsure at all n locations
cttcatggcttcatcactgaaagatacttgcttcttggactatcgcttcttcgattcgcggctccttgtgcttctgaaaagcttctcaggtatggcctaatggactcagcttgacaggcgaggattcagtcattaccttcaaaatttcctccacatcggtggtagacggtgatgcagcagttttttcttcttcatcaattgctgtntgcttcggagtcgaagcttatctcttctttgaaacacctgctcttggctcatgttccagctctttcttctctggatgntcttcatcagctntattcggaacatc

SEQ ID NO: 79932 - DNA, 177 bp, Zea mays
taaaagggaaggagcacagagaacaaaccaaaaaagcagacaaaagaaagtcaagtaggcaaaacctcaaaatcaagaaggcggcagaaatgaaaacaaaaatagatggaaaagaacacaaggagaacaaaaagaagaacccaaagaagaagagaaggaaaaacaaaaaaaggaaac

SEQ ID NO: 79933 - DNA, 319 bp, Zea mays
tcttctcgagccgactccgcctctgtccacgctgacaccactgcctccggctccggctcatcgcagagcagctgagggttctataactgagcaagagaagccttgggtggcaaggccgaccgagccgagggactcctacgcctccgggatacggatacctcactcgtcaccatccgcacagggcaactcacactcggttaagcggttcagctagccgacaggcgagtcctggtgctcgaaatgaggaagaaacacggtattacactcaaataccttgatgttcaggcctcgacagccacaatgaacaaacaccgacact

SEQ ID NO: 79934 - DNA, 132 bp, Zea mays
aaacctcaagtcaaaatttacacagtagatctcccctgggatagagcattttatactgcagatcaagacggtaaccaagaaaatgtattaacccccttaactcaaaaagtccatatcatagcacaagttata

SEQ ID NO: 79935 - DNA, 137 bp, Zea mays
  unsure (1)..(137): unsure at all n locations
tatgcanacagcttcagccgaggaccacttctttctataagaccttcggcgactaagcatagacccaacagtagcccctttcgcggtgctagatcgattntcgtaacgagccttgattctgtgataaaatgtctctt

SEQ ID NO: 79936 - DNA, 198 bp, Zea mays
  unsure (1)..(198): unsure at all n locations
catgcatctagaccggccttctgtgttgcaaaatcaactaagtaaagtgtgcgcgctaatacaccctctaaagctagtgaaccatcacttcttctaacgatagacacatctacatttgtgaatagacaattatattccatattgcataattgactaacagataacaaattatattcaagagactcaactaanaacaca

SEQ ID NO: 79937 - DNA, 507 bp, Zea mays
  unsure (1)..(507): unsure at all n locations
ctcagcttatgccgggtgtaacaagtacgtgtgctacgaaaccacccaactattgattattgttattagacgagatctattttatttgaatattaatcgctgttaagccaattatttaattacatattgtgccaaaaaagttatatgtagcattatctatgtattttcgattaaatttttagccggatgaataattttagtgtatatccggcctatactagaaaatcctggctccgcgctgagatgaccaaatacccccttggtgcacataaagaagggaagtttgaccacacgttctgcgaagaaaataacgaaatacacaatgcnctattagattctatgatcatgtgatagagcttaaagatctaatgtanttcatatgaagtngacatcgccttgtcctataatangggatttngatgtcgttatatatctaaaagatgaatgtagacattgtaataagggaaataataaggtgataatatgttcatagcatgttcttatata

SEQ ID NO: 79938 - DNA, 276 bp, Zea mays
ttaggcctaatcgcatttggccatgaggcttgaaatactgtccccactagggcttttgagcccttctgcaattctgttagctttatctaaaactagtaaaagactttctttgaacaaggtgcttgaaaactaagctgggcccactatagtacgcactcttataaaagttgcgatacctagacatctggactagtcctgaaattaataatgagtcaataagtataattatttcgtaaacatcgtagtgtggagataagttagcttattagaaataag

SEQ ID NO: 79939 - DNA, 317 bp, Zea mays
  unsure (1)..(317): unsure at all n locations
tctanagggagaacacgtgataggtctaaccaatgttcattctcgaaaagatagaccttgtgcagcttgtctagcaggtgaacaagtgggaggagcacatcacagcaagaatgtgatgaccacgtcaagacctctggagctgctgcatatggacctcttcggacccgtcgcctatctgagcataggaggaagtaagtatggtctagttattgttgatgactcttcccgcttcacttgngtgttctttttgtaggataagtctgaaacccaagggaccctcaagcgcttcctaaggagagctcacaatgagtttgagc

SEQ ID NO: 79940 - DNA, 303 bp, Zea mays
  unsure (1)..(303): unsure at all n locations
ctcagcttcgcataatgaatgtatatgganatntgcagaatacaatttggattctaatgggtcatgttaagacgagagaaatcaaggacgccacggattaagggagatatggaagaccgagaccgctgagaagaaaaggaacataaattacggactcatgggtatcctctgtcgggacagtgaccncatgacaaatncgccaagaacacagcttcctcggtggaaggactctgatggacactatgtggagaaggtctggctcggagacaacagacatgtggttacctgcgaaaggcaactgac

SEQ ID NO: 79941 - DNA, 296 bp, Zea mays
  unsure (1)..(296): unsure at all n locations
tgacgctctcccggtcgagctcgacctcaagggtagggtcgtcngcaatctgcagatatacgtctaccatgtccttggcgaacaagcctttcccctcgcgaagccgncgctggttgtgctcctcgacgacgtgctccaggaaccgatcgaacatcttgctgagcttcttcatccgcttgatgtacccctgcaagtccatccagtcgagccacgggatggagtcgccgatgttgagcacgccgttgagcaggaacagctcgtcgagcattcacttgaactcctcggnggtggcactg

SEQ ID NO: 79942 - DNA, 113 bp, Zea mays
cctaatataactcttatatatgacatatgtatagtaatacaatgccgagcttgtgtgtattgtggggttttattggggtataaaagttatatgcattcttctcgtatatattg

SEQ ID NO: 79943 - DNA, 144 bp, Zea mays
  unsure (1)..(144): unsure at all n locations
tcatccacacaagaacatctngacgaccgacaggccgctngagctactccacatggatctattcggcccgagtgcttacataagcatcagcgggagtaagtattgtctcgtaatagtggatggctattctcgcttcacttgggt

SEQ ID NO: 79944 - DNA, 305 bp, Zea mays
  unsure (1)..(305): unsure at all n locations
tggatcaagtngngtgctcgataatgaatgtttaatcattctggatatatttctacggtggtaacaactgaatctcaagtgcatattattttcaatcttatctttntgtgacttgtgtagccactaaggaacaagaagcactcgaggatatacatcagatgtcgattatgaaataaaggtctaattggaagttgaatgaatattatcatatggtgaacaatccacaattatgtgacgtattctctatctaagtaacttggaattgatcttctatattagacacccaccacaatagtggataaatc

SEQ ID NO: 79945 - DNA, 358 bp, Zea mays
  unsure (1)..(358): unsure at all n locations
ctcagcttcgaatacaaccacctaaagtnaatgaactttagtcctaagtgttctagttgtttgtgtanactcttatgaggggcctgattgtaattcctcacaggctgtgtcttgtgcctataaatagtgaacagcattcctttactgttcacgcattcctgtaattgcaatcgcatcactcgggaatcaatctttgccaaggcagaggtataaatgtatctaatatttgaatacattaagttgatataatatgaaagtgatgttgctcatttataatttattcgtctgtgatgcttcatatcttgtattatgttatataatctattagatgtcaattacgaagaattaaccttcataa

SEQ ID NO: 79946 - DNA, 313 bp, Zea mays
  unsure (1)..(313): unsure at all n locations
ctcaagcttctctttatcatcatcaaccttaacatanaacccattccgattccaccctgctgcccatttgcttcgatagctaatcacaggacactntgaagttttccgataagcagaattatagcaaccaaagttgtcatgtaatccatcctttctagcctntgtctgatagtgcagttcatgaactcggcaaaagctgtccgcaaacgggtccaccgcctggcttcggagtgcccaaatataaacattaagcctaacgatagcgttaggggttagctggtgaaaatagattccaaaattattcaatatctct

SEQ ID NO: 79947 - DNA, 399 bp, Zea mays
  unsure (1)..(399): unsure at all n locations
cttcatccctacatgtgctaagcggtgatgccacagccagtccatgctagtcttagcaattaagcatgcatctagaccggcctgctcttttgcaaaatcaactaagtaaagttgtcgtctaatacacccttaanagctagtgaaccatcacttcttctaaagacagacacatctacatttgtgaatagacaattatatcccatatggcataattgactaacagataacaaattatatccaagagactcaactaanacacattagatatagagtgctcatttgatattggcaattttcctaagcctntcaccttgccttggattccatcaccgaatatgaatgagtctgggggatcccttgtcttgacgtngganggaaacatcttcttctcccctgcat

SEQ ID NO: 79948 - DNA, 258 bp, Zea mays
  unsure (1)..(258): unsure at all n locations
cctgcagcttgatgctcattcaccaattggcttgtttttgagcaacangcgttaccacatggcgatatattatctaaatgagcccgtgtgcgagaatgaggttcacatgaatctaagtttcgaattaccacctcatgagcaacatccagcatgatatggtcatcaactaattcattatgagaataagatagcatatcatactttgcacttagagcaagttggtctaaanttatcatttctactcgactcttaagcata

SEQ ID NO: 79949 - DNA, 303 bp, Zea mays
  unsure (1)..(303): unsure at all n locations
ggtgaagattcttcatcccaacatgtgctagtcggcgatgccagagccagcccatgtttgtcttaacanataagcaagtgtcgagtgtagctttattgaaatcaactaagtatagctgacccttctaacactccttaaatgctactaaatcatcacttcttctaaagacagtgacacctacatcagtaaatagacacgtgtagcccattttacatnagtgagaaacataaagcanatngtaatctaatgaatcaacaagaaaaacattggaaatggaatggtcaggtgaatatagcaatttac

SEQ ID NO: 79950 - DNA, 301 bp, Zea mays
cgtgctaagtgagcttctcagcgtaatcttgtgtgcttcctagtattgttttaaaagacgcctgcttttctgaatgcttgttttataagtaatgtcctggcctgcactgcacaaacattggaaccttgtaagtcagggtgaccttataaggggccgggcacaatatctcaatgccacaaggtaaggcggactatatgagctatatatcgtgtcgggaaagtcgtgactacctaccaatctgcgctgaggccgcctcacacaccaatgctgaaatgtggcatgctgaggtatacgcttgctg

SEQ ID NO: 79951 - DNA, 303 bp, Zea mays
  unsure (1)..(303): unsure at all n locations
acaggaganatagtaagaactgctctnttcagtaactctactgaaggtgcctttatttgttcgaagaatacatncgaanggagcggcagcccctgtgctgcagacctggctaacatatcagcatgttcattttgccctcgngggatattcttaacagaatatccttcgaacgaagcttcgatccttcggactgtgtctatgtatttctcaagcttcaggtctttagccgtgccacttttgtcaatatgacccgaaacaatctgagaatcagttttagggatcgccctcctgatcccatcgcct

SEQ ID NO: 79952 - DNA, 109 bp, Zea mays
  unsure (1)..(109): unsure at all n locations
agatggaggaagctggaatgagataataaagaaggggttgagtttagtctcattttgttgagagagcgcaganaaagcgtggatggacctgtgaagaaaaagaacggga

SEQ ID NO: 79953 - DNA, 314 bp, Zea mays
  unsure (1)..(314): unsure at all n locations
tctccttgtcctcatcaaccttgacatagaaccattctgatttccagcctgccggccatctgcttctgtagctaattacaggaaactatgcggttttccggtaggcaaaattgtagcaaccgaagttttcatgaagcccatcttttctggcctttgtttgataatgcaattcatgaactcgacagaaactgtcagcaaaaggctccactgcttggcttcggagggcccaaatataaacgctaagcctaacgatagcgttaggagttaactgatgaaggtagatgccaaacctcttcaatatctncgcaacaatc

SEQ ID NO: 79954 - DNA, 440 bp, Zea mays
  unsure (1)..(440): unsure at all n locations
ctcagcttcgtctaaccctgctctatatatccgcgacctgactccgaaggggcatgttcacatattacactcgtgaaacattggcaaactatgggtttgaggaccttctggagccgaaggccccaacacatatcataatacataattntcaatatttcttctaacanatcattatttcacaaatggagtttttgatcacacaatttgaacccaaaggttggttctacaaattagtcaaacaaaatgtgtgcatcgacatgagtgcatcanacacttaacaaaatgtgtgcatcgacatgaatgcatcagacacttaacanaattntatctaatcangaaatcatcatttcattattttgaaacatattttttttctgtctgctagaaataataatataaactaagttatttcaattngacggatanggtgtacaaaatct

SEQ ID NO: 79955 - DNA, 202 bp, Zea mays
  unsure (1)..(202): unsure at all n locations
cactgagaataaatgagaaggaagaatgaatccacgcgacaagagcttcataagaatacaaacgatcctctcataatcccttaagcactagcgtngattntgggaactctgagtgaatngattgctctgattgtgtcttggagtattgcactctgctcttgcaatgaatgagaaactaagaatgcttggatagctctgaatg

SEQ ID NO: 79956 - DNA, 224 bp, Zea mays
  unsure (1)..(224): unsure at all n locations
cctggatccaagtncatagaccaacatatatatatcccattatcaagatgaatacaatcaattcctgagctcgcgcgagtgctatgaaaatcactcgacttctaccgagatcctgattagcaagcagctactcgacctatcatactagtattcatctcaaaaaggaatcctcagttcatgcaactagagggttcaagcaacttctacacttaagtgcacatcac

SEQ ID NO: 79957 - DNA, 373 bp, Zea mays
ttatgtatccaggggtagattaggaaagtagaataaccctgtatgaatagtaggggatggttggttgtgtagctatctcttttagcgatttcttccactcgctttagactagactctctcttgtaatatctctagtttctatgttggagatccttaggcgcttttgaatcgtgacgtatatgactatgactttttgaggaagtgtggctataactacacttagtcctcatggtttcactcattgtgtcaaatctgagtgtgatgagttcttgttttgcttattctctcctcaacccctctagttgatattttggctgatctttgatttctcatgtttgggtgttgtgtttaggtttctctctatgttagaacg

SEQ ID NO: 79958 - DNA, 388 bp, Zea mays
tgaccttagaaactcagcttgcaatgaggagatggcgctcgtcatcaagagcttccgccaaatcctcaaacaaaggagggggaaagactacaagtcccgctccaagaaggtttgctacaaatgtggtaagcccggtcattttattgctaaatgtcctatgtctagtgacagtgaccgaggcgacgacaagaaggggagaagaaaggagaagaagaggtactacaggaagaagggcggcgatgcccatgtttgtcgcgagtgggactccgacgagagctcaagcgactcctccgacgacgaggacgccgccaacatcgccgtcaccaagggacttctcttccccaacgtcggccacaagtgcctcatggcaaaggacggcaaaacgaag

SEQ ID NO: 79959 - DNA, 375 bp, Zea mays
tttcgcatcaggttccaagccttgtctcctcacttgcccacacgttgatattcatccttatgattgcttcgggggtaagttggtgaaggtagatttcaaatatcttcagcacctctacaacaaagctgcttatgggaaatcgtagtccagctttcaagaagcttcggaataccacgacttcattttcctcaggagttggacaagtcttctctccttcatcagcccttacaacagacaagtcccgaaaatatctacccctcatgttgacaagatgattttctttaatacttgatttgccaaaaaccgcatggcttggtcaccaaggtcgatcttcggagtcttcaccaccactatccacatcatagctgtcgctgt

SEQ ID NO: 79960 - DNA, 375 bp, Zea mays
tctaaagggagaacacgtgataggtttgactaacgtgcaattcgaaaaagatagaccttgtgcagcttgtcaagcaggtaaacaagtgggaggagcacatcacagcaagaatgtgatgaccacctcaagacctctggagctgctgcatatggacctcttcggacccgtcgcttatctaagcataggtggaagtaagtatggtttagtcattgtggatgattttttccgcttcacttgggtattctttttacgggataagtctgagacccaaggaaccctcaagcgcttcctaaggagagctcaaaacgagtttgagctcaaggtgaagaagataaggagcgacaatggatccgagttcaagaaccttcaagtgga

SEQ ID NO: 79961 - DNA, 367 bp, Zea mays
  unsure (1)..(367): unsure at all n locations
ntgagctctttattcatctacccttcaccgtgtgtatgctatctatggccagcatatagtggcagtaccgtatgaatatgcgtgcatgccagacaaccacggtattgggtggtatacgtatacctctcagtctgccggcgcagcggaacgcggcgagcgcagcagactagcacttccagcaggaggcggcaatgacgggcttccccttccagccgaggacgaggcaccccttctcctcagcaaccgtgtacccgccgccgccggcgttctcctccagccactcccgcgccctggccgccatcctgatcggcatggactggaacccggcgcggctcatgcggcggcgccactggtcagcgcgctcgtg

SEQ ID NO: 79962 - DNA, 367 bp, Zea mays
tagaagcactctcgtttttattccttccgacatgatcgtgcctcacgcgggtaagcgttagaacgaggattaggcttcgataccaattgaaagttgcctagaggggggtgaataggcaagttaaaactttttcaacaaaaactagaagcaaactgggtaaaactgaattgatctcgaaattcacccagttaactttggaaatgagatgttctaaatgatccacagggttcaaagtagtagatctgagaagggcacttctcaaaatccacacaccaaaaagatataaacaaatcttccacgcaatggtgagagaacgaagaacactaacaaacacaatgagcaagaatacaagatacataagatttat

SEQ ID NO: 79963 - DNA, 366 bp, Zea mays
tctaaagggagaacacattttaggattaacaaatgttcattttgagaaagacaggatttgtagcgcatgccaggccgggaagcaagttggcactcatcatccacacaagaacatcatgactagtgacaggccactggagctcctacacatggatctattcggcccgatcgcttacataagcatcggcgggagtaagtactgtctggttattgtggatgattattctcgcttcacttgggtattctttttacaggaaaaatcccaaacccaagagaccttaaagggattcttgagacgggctcaaaatgagttcggcttaaggatcaagaaaataagaagcgacaacgggactgagttcaagaactc

SEQ ID NO: 79964 - DNA, 368 bp, Zea mays
tcggattcccgactctagaagatgtgctttcggtgctatcgaaagatgaactatcggacagcttatcatataatagcttaaaggtatgagaatgaattttttgtattaaaaaaccaagatttgttttatttgcttacacctattaccacacttctttcgcacagccacattcttagcaacgcccacagggcgcaaaaaagtgtcgaagatgaagaatgcactatagctttgaacaaccttcgttccgaagtaattgaactaaggaacgaaggtcttgaaaaagataagattttaaagtcattgttgaacaaaatacaagaagacgaggctacttccaaagcccaggctgaagcccagagatgcgaaat

SEQ ID NO: 79965 - DNA, 368 bp, Zea mays
tttatgatctgtatttatgtgacatatatttcccagcagatagtgacaccaaatttttagggcatgaaccacagcagctagctccagatcatgagttgggtaatgctcctcatgtcggcgcaactgccttgaagcatatgcaattactcggccttcttgcattagcacacagccgagtccactgcctgatgcatcacaatatacatcaaagggcttggttatgtccggttgagccaataccggagcagtggttaataacgtcttcaattgttcaaaagcttcatcacactttgaagaccaattgaacttaatatcattcttcaataaacttgtgattggcttcacaagcttcgaaaaatcgggtatga

SEQ ID NO: 79966 - DNA, 358 bp, Zea mays
tcatgaatctgatgttctttgatatggtgcctataatttttgcaccaacacgattgcggatgcatcctataacttctttgtccaccccaccaaagagcatggaccccgactagtagccgcagttgatagcaaaatccttcaactctgccatatcctcttcggaaagctgctggccacccaggtgccgtaggtcgaagtctgcctctttcgaagagatttctttagcctccttccccttgtctgaaacttctgcggccacctccttctccacagccacgtctgatataattttgtcaatatcggacatggtagctgtgagatcccgccttcagttacagtggtagcttcagcatcagta

SEQ ID NO: 79967 - DNA, 358 bp, Zea mays
  unsure (1)..(358): unsure at all n locations
tgaggctattagttgttgaattntacaggatcacctattcacccccctctaggtgctctcaaatccatcgtggctgtgatggcttcaacatctgaaaagatgtacctctgccaggtaacaaactttgggttttaaataataaagctgagaccagacgggtgacttgcacgagaaggaagtatcggtgtactgtctccgtctgattcgattaaggactataccgatgtaagcttgatgattaaggaccttttaactggccacatgcctcgtcatgggtaagctttgcctcgggcagaccaataccagaaaggccaacacataatgggagtggagagatggcgagagtatcatgtaccct

SEQ ID NO: 79968 - DNA, 357 bp, Zea mays
  unsure (1)..(357): unsure at all n locations
tctttctcacacgcttgccgcacacttctctctcaggtgcccctcgtctcctctcggccacagtcggcttcatccactccggtcatgatcctctcccagtgaatctccctgctcgcctccatggccctggtcgtcgagctgccgggccgagtctgcttggccgccggccatctccagtgcatctcggtccctctccgttccctgcttcttggttccgaccgccgtgtacctagctccttgctcgttcatggcgctcgacgtttagatttcctgccggtcgcggcttaccttctgccaagtcccgcatctccatggcgtggacgtctgcgtnctcccatctctgctcctccctgcccc

SEQ ID NO: 79969 - DNA, 375 bp, Zea mays
ttggaccagggagtcgctttagagggcagcgtccccgctgaccaagttttgggctctgttgatggcactgagttggttcctgctggttcgttgcaagctgcttcgggtggcggccttacgcccggtcatcaattgatctctcatgatttgggggccccttcgttcttttccaacctccaggtactgtgatatactttagcttgatttttacaccgcatgaactgttgtcattacactcatctgttctccttatcaggctttggtggacgggatggctagccagctgaggttacagggtgcttctgttccaaaagtagcttcgtctcttgcacgttggaatctagtgttacttcaacatcgtgtctctgacttgga

SEQ ID NO: 79970 - DNA, 360 bp, Zea mays
  unsure (1)..(360): unsure at all n locations
tgaaatacccttttaagngtttcctaantattngctatttgggatgtcaagtacgaccgccacttcgccaccaagtacgagctggggaaggaggtgggccgcgaccattttggccacacctgctcgcacgcgcccgcaagggagacatgagaggccaggtcatggctatcaaggtcatctccaaagccaaggtcttgctattcgtgatctcacagtgctcttttattggacgcacgacacgatcttacctgtttcaatcggctcggttcctccaccggatcatgaacaaactatgtgggatgacataattgccatcctgttgtgatcttttttaactctcttttagtaaatcagtatctc

SEQ ID NO: 79971 - DNA, 373 bp, Zea mays
  unsure (1)..(373): unsure at all n locations
tattttcggggtcgtgcccgggcctcatttntttgtccgtgcgccatgggcgaacccctcattttcggcccatacgcaaggccgaacagccatgccgcccgtcgccttgcgcctccgtgccgttttccctccgttccgccatgcccttcacccaagacatacatattaccttcggtgtctttccacacgcttggacttagcttatttccggggccatgcccgaacctcggttttccgcccctgcgccatgggcgaacccctcgttttcggcccaaacgcaaggccgaacagccatgccgccccgtcgccatcctgccctttacccaaggcatacgtcgcagctttggtgtccttgcacacgcttggacttggc

SEQ ID NO: 79972 - DNA, 374 bp, Zea mays
ttatcaaatggacgtgaaaagtgccttcctcaatggaccaatcaaggaagaggtctatgttgagcaacctcccggctttgaagacagtgagtatcctaaccatgtctataagctctctaaggcgctttatgggctcaagcaagccccaagagcatggtatgaatgacttagagattttcttattgcaaatggattcaaagtcggaaaggccgatcctacgctctttaccaaaactcttaaaaatgacttgtttgtatgccaaatttacgttgatgatattatatttgggtctactaacgagtctacatgtgaagagtttagtaggatcatgacacaaaagttcgagatgtctatgatgggggagttgaagtatt

SEQ ID NO: 79973 - DNA, 377 bp, Zea mays
aaatactaagctctataacttcccaggtgagcatcttataactcttttcttagtttacccttattctcatcgccaccaacaataacaacattgtcgtcgccagaactatcgccggcaggagcaaactctgggtcttgttcatcatcactttcttcatcttgaataggagacaaggggactttcaaccttaacctcttccttctttccttcaattcatttttatctaattcctttctcttgttttgtacacgaggagagcgacggacagtgtcagcgcctttctggcctgtgacattctgttcttgatccattataaaaaccactgaaaaaatgggaatgaaaaaaacgtgagggcacaagcacatggtacagatctc

SEQ ID NO: 79974 - DNA, 376 bp, Zea mays
  unsure (1)..(376): unsure at all n locations
actcaagcttcttcaccatgtgatcactgttattttgagaaggnngagcaatgcgcttcccttttagttgtgtcaagctcatatttagcctctcattttcttctttgagcttttgatatgtatcatcttttgttcctgcaaattctagctcaaaggaggatttgcttgtcgacggacaacaagcattagcacatggtaatatagtttcaatttgaatacatgtgcatgaatgaggttgttgggattttaagttttctattacaacctcatgagcaatgtttaatatgatatgatcatccataagattttcatgagaatatagaagcatatcatatttttcttgaaaagctagattttcaacttttagcttttctac

SEQ ID NO: 79975 - DNA, 359 bp, Zea mays
tggtgttctgctccatgcgcctatgggtcccttttatagccccaaggcagctaggagccgttggagatcaacttggaaagcaaatcttgccttctgtcgactggtgcaccggatagtccgatgcaacaccggacaagaatagttcctatccggtgcgcgatccctttccttttctggtgaagccgaccgttggatcttcggatctgttggcgcaacggacactattcagtgcacaccggacagtccagtgcgactatccgaccgttggctcggccacgtgtcgcccgttgatcgcgcagatgaccgttggccgcaggcacctatggttcaccagacagtccggtgcaccgccggacagt

SEQ ID NO: 79976 - DNA, 362 bp, Zea mays
  unsure (1)..(362): unsure at all n locations
tcgngaaaatatttttctaagcttttcttccgaagatcaatagtgtatctccttgtgtcttaacatgatttttcccctttttcaaaacattcttctgaagatcgatattgtgtccgcctcttgtgccatatgcagcatgatgtatgatgcttatgctatgcgaaatgatgctatgatgttatgttatgtaagatggtgcttattccgaagatacacccacatccctgcgataaaacacacataatctttttgaattagcgttgcctttttgctataagcctcccttatgagcttcttcgccttttacttcagcggaatcagcgtttatttttcgctgtaagcctcccttatgagcttcttcg

SEQ ID NO: 79977 - DNA, 362 bp, Zea mays
ttaatactatcaatctatataacgtgtatctaactatctgtgtggccgccttctagttaaggcacgagaatccacgacattcaattcactcctaagaaagcaaaatctattctcatcgaggggctttgcgaagatatcagctagttgattttctgtgtttacatgacataattcgatatctccttttgcttcgtggtccctcacaaaatggggtcttatatctatgtgtttggttctagaatgttgcacaggattgttggctagtttaatggcgctctcattgtcacatattagtgggattcttttaaaatcacagccaaaatctctcaaggtttgcttcatccatagcaactgagcacaac

SEQ ID NO: 79978 - DNA, 361 bp, Zea mays
  unsure (1)..(361): unsure at all n locations
ttgagaatccgacactctttgacatgtttcctataattnttgcaccagcacgatcgcggatgcatcccatgatttcttcatcgaccccgtcagagagtaccgacctaggctggtaaccacacgagatcgcaaattcccttaactctgatttgtcctcttcagagagttgttggtcgcccaggtgtcgttggtcgaaattcattccctctgaagaggtttcatcaatctcttttcccttgtctgaaatggttgcgaccacctccttctccacagccacatctgatatcagcttgtcgatctcgaacggagtggttgcaagttttcaccttcggctgtagcagtggcttcgacatcagtcagt

SEQ ID NO: 79979 - DNA, 357 bp, Zea mays
taaccttgtaacaatgataagctatctttgttccaaaggtggaggttccttaagtttccttgaaccattaagggtaaattcatcaaatgtttataacatgcttttgtcagtgcatagtctgtcatgagcatcacatttatattatgacgcatgcacttcactatttctatgatatagacatgttctcattaacctcattatgtgcatttggcatttaaggccaatatatgtattcctctcaaggcacatacttagggggaacaatctatattatagaactataataaagagtaactgacatatcttttgattttatatatctctttcaattagtaattgctcttaattcacattttt

SEQ ID NO: 79980 - DNA, 356 bp, Zea mays
tgttcaaagcccgctggaattaatcttcggagaaacccgacctcgctgcgacatgacacccgaaggtccaacacaacaagcaatgagtgaattcagaattattgcagagcatatcagcacaagggacctggttcaagagtttttagcattcaaagtttttcccagtttgaaagaatgggaaatgccgaagctacagggggaaaagaaagaaggtgaactcgtacgtttaccttactatttcaagtttaaaaagtactttaaagcaccttgccaagagtggctagatacgattgaagcaatgtgtaatgaaatacttggcaattattccaaaaaagaagatcaattgatgaccgcag

SEQ ID NO: 79981 - DNA, 384 bp, Zea mays
ctcaagcttggttatgctcaaacttaggaaaattaagaaaagtgattaaaatttgaaactagagggcaaccatatttttcctagcatgcctaagtcatgtagttcacaagaaaaatctattaacccatagtctagtggaaggaaattacactctcaattaatcatgaaaaatagagaaaactttaaaaagtcctacgaaaataatcctaaggtgaaaacaccccaaaccttgggataattaatgttttgttattaagaacataggaaaaatatgaaatctgctgtttgacattttcaaataacaaggtagtagaaagtgtctttttgacattaaactttagaaaatcacaactaaataaccaccaattaactttctgtgcgttt

SEQ ID NO: 79982 - DNA, 347 bp, Zea mays
  unsure (1)..(347): unsure at all n locations
aagggagaacacntgatangttttactaatttgctatncgaaaaagataggccttgtgcagcttgtcaagcaggtaaacaagtgggaggagcacatcacagcaagaatgtgatgaccacttcaagacctctggagctgctgcatatggacctcttcggacccgtcgcctatctgagcataggaggaagtaagtatggtctagttattgttgatgacttttcccgcttcacttgggtgttctttttgcaggataagtctgaaacccaagggaccctcaagcgcttcctcaggagagctcaaaatgagtttgagctcaaggtaaagaagataaggagcgacaaccggtc

SEQ ID NO: 79983 - DNA, 371 bp, Zea mays
tcgaagggtgccatcttaatgctttcttgatagctattattatatgagaactccgctaaaggtaaataatcatcccatttatgtgggaattccagaacacatgctcgcatcatatcttcaagtattttatttaccctctcagtctgcccactggtttgaggatgataggccgaactatggagcaacttattacccaaggatttgtgaagttcttcccagaatttggatacgaattgcggtccatgatccgacactatggtcttcggaacaccgtgcaaactgaggatgcgagcaatatacagttccgcatgtgcgattactggatattttactttgactgggagaaaatgggcgatcttggtaagtcgatc

SEQ ID NO: 79984 - DNA, 363 bp, Zea mays
acatgaggaaatggcgctcgttataagagctcttccaattcctcaagcaggggataggaaaagactacaagtcccgctccaagaaggtttgctacaaatgtggtaagcccggtcactttattgctaaatgtccattatcaagtgatagtgacaggggcgacgacaagaaggggagaagaaaggagaagaagaggtactacaagaagaagggcggcgatgcccatgtttgtcgggagtgggactccgacgaaagctctagcgactcctccgacgacgaggacgccgccaacatcgccgtcaccaaggggctcctctttcccaacgtcggccacaagtgtctcatggcaaaggacggcaaacgaa

SEQ ID NO: 79985 - DNA, 225 bp, Zea mays
ccatttaaccacatagctgatagcggacaactcgagcatatctaccaacaagaccatgtttcgacccacattatttgactagaacaactttgatcattgactcataagactaagagatctttgatgaggcacatgctgacctttaatggcaccgctttcaagtaaacttaaagacgtccacccaaactgagccgcacattcattaaagggtagactccacttaga

SEQ ID NO: 79986 - DNA, 368 bp, Zea mays
ttatcaaatggacgtgaaaagtgctttcctcaacggaccaatcaaggaagaggtctatgttgagcaacctcccggctttgaagacagtgagtatcctaaccatgtttataggctctctaaggcgctttatgggctcaagcaagccccaagagcatggtatgaatgcctaagagatttccttattgctaatggcttcaaagtcggcaaggccgatcctacactctttactaaaactcttgaaaatgacttgtttgtatgccaaatttatgttgatgatattatatttgggtctactaacgagtctacatgtgaagagtttagtaggatcatgacacggaaattcgagatgtcgatgatgggggagttgg

SEQ ID NO: 79987 - DNA, 365 bp, Zea mays
tgagtcagtcctccttcaaagaattatcgacgcacaaagaaatgataagggtatgaaacacattcatgagaaaatagaggtcggtaaagccaactgcttcagaagagatgatcaaggtattgtatggtttaacaaccgcatagttgtgcccaataatgatgaaatccgccagcaaattttagatgaagcacatcttagtcgctattctattcatcccggaagcactaagatgtatcatgatctaaaacaacattattggtggacaaaaatgaatattgaaattgcacgctatgtggcgagatgtgacacttgcagacgtgtcaaagccatacatatgaaaactgttggtccattgcaatctttac

SEQ ID NO: 79988 - DNA, 360 bp, Zea mays
  unsure (1)..(360): unsure at all n locations
ncatctccatctatgttatggatttctttagagttagtccaattgcctccagcccttctggcagcttcctgacttccatggatagcgatgggtccttggtccgaaggtatcttcatgcatagataggcaagatgaaggattgcttcgaaggcattgagggtaccacgaccaataattgcattgtaagggtattccatgtcaacaatgtcaaacacaacttgctcagttctagtgttgttgatgaacccgaaagtcactgacatggtgatcttgcccagtgctacaatctgtcttcctccgaagccacagaaaggatgtgtaccatcatgaatcttatcttctggctcttgcatttgtctg

SEQ ID NO: 79989 - DNA, 361 bp, Zea mays
tcacccacaaccttcattcccttttattaactgaaatctctttgccgcttatttttcggtgtaagttctgcattcactaaggaacgccttttgaacttcttcgccttctatttcgacggtattcgtgttgacttttcacgcttcgccttatatttcgaaggtatttggctctgcattcccttaggaacgacttttgagcagaaaacttacgctgcgctcccttagaaacgactttttgcaacttcgtcatgctctgcatccccttagggacgacttccgagcttctccctgttttttctttttctctgcactcgatggtgcatgctcagattttacatttacatattttgggggattttgc

SEQ ID NO: 79990 - DNA, 359 bp, Zea mays
tgacattatctccctgatggaagctctatgccatccttcatgccagggcatctcccattatagagcatgcttctagcaaatttaaaattttcattttctatctcatgctcattaattttactagttagttgtgctatgtgatcattttgttctttaattaaagcaaggtgatcatgaataacatcaacattaatatctctatatctagtacaaatagagacatgattaacactagatgtagagggtttgcaaacatttaattcatcaatcttagcatgtaaaataacattttcatttctaagattggaaatagaagcattgcaaacatttaaatctttagccttagcaattaatttatc

SEQ ID NO: 79991 - DNA, 356 bp, Zea mays
tcttaagggagaacacgtgatatgtctaaccaatgttcatttcgaaaaagatagaccttgtgcagcttgtcaagcagggaaacaagtgggaggctctcatcacaccaaaaatgtgatgacaacatcaagacctctggagctgctacatatggacctcttcggacccatcgcctatctgagcataggaggaagtaagtatggtctagttatcgttgatgacttttcccgcttcacttgggtgttctttttgcaggataagtctgagacccaaggaaccctcaagcgcttcctaaggagagctcaaaatgagtttgagctcaaagtgaagaagatcaggagcgacaatgggttcgagt

SEQ ID NO: 79992 - DNA, 372 bp, Zea mays
tgagttcgccccttggggaggagtgctgtgcatttatgaaacctaacgggtggctacagccccagggaatctttgtaaaggctacgtagtgatgccctgctgggtcaccttggtagtgatcaatggagagtcatgatctccgggcagaaagggaatcacggcttgtgggtaaagtgcacaacctctgcagagtgtttgaaaactgatatatcagccgtgctcgcggttatgagcggccaagggagctccagtgattagtggtacttgatcagagacattttggtttacaggtggcaatgagattgatggttctggttatgactatggtgctggtaagtggtattctttccgtttggaaagggtacatcgggc

SEQ ID NO: 79993 - DNA, 374 bp, Zea mays
  unsure (1)..(374): unsure at all n locations
tcccgctcccngggccttagnnnctttctatacttccactnacccacacattttcctgatcgtggaactcatagaaaaatctctaattgtcatactataccagactcgtccataccagtggacacggactattcgaataggtttcaactctgcgcagaggtgtacactttacccactagcccggtttctgcgatcccaccatcacaggacccgagtgccggatctctttccttcctcgtacgtcctaaccttaacggttatccggaaggagtcaggccaccaccatgtccaaaccggacaaaactttccccctccttatcctttcggtgctccccagccttcttaaccctatggttggaccgcacgagttcgga

SEQ ID NO: 79994 - DNA, 370 bp, Zea mays
  unsure (1)..(370): unsure at all n locations
tggaaattgaaactaggtgtncacttcttgcattattgncaatgtctttacacctagtacaaatttcaacatgttctacacaagaattggatttgtttgctacttctaatttagcatttaaatcattgttgacacctttcaaagtagaaatggtttcatgacaagtagatagttcaaaagaaagcatttcatttctcttaacttctaaagcataggatttttgtgcctcaacaaatttatcatgctcttcatacaacaaatcctcttgcttttctaaaagtatattcttttcattcaaggcatcaattaattcattaattttgtctatcttaaatctatctaagcccttgaacaaacatgaataatctac

SEQ ID NO: 79995 - DNA, 371 bp, Zea mays
tttgaggaacagagagcatgttcttgagatgttgaagcttaagatcaaggaggaagctcttagaacctatctttcatcatactcgtcttcctacaagtcgttgagccttaaccagctcaccaccatgtttgatctcagcgagcagcatgcccacagtattgttagcaaaatgatgatgcatgaagagcttcaggctagctggcaccagccaacaaagtgcaccgtgtttcacagcctggatcaaaccaggcttcaggagctactcttccaggttgcagaaaaaatatcggtcctggtggagacaaacgagagggcatacgagttaagaactggtggtactcttgaggggctaccgcccatgcgcaggggcg

SEQ ID NO: 79996 - DNA, 371 bp, Zea mays
  unsure (1)..(371): unsure at all n locations
tttangggaatantcataaaatgttttcttaatgaatgngaattttatttatacccctgagataccaaaaccccatttgaaccatggaaaaccctaaatgtaaaccctaggggcctatgtgcaaaaactgtgcacatttggactaaagtgtcaaaagtactatgtttaagcatataaagtcacatggttcacatttgggaagatttacaagccaaaccctaagttttggattcatttgcaaaaaggaccccaattgagatttcactctaagtctgaatttcagattggtgggctcaactttggggctttgtaactttcaaactctagggtctttgccctatgtcaccacatcaaagctgtagaccaatcat

SEQ ID NO: 79997 - DNA, 379 bp, Zea mays
  unsure (1)..(379): unsure at all n locations
tgacctataaatctcatctacctgaaccnctcttactttataatannagagacccactccgcatatctgtaaggcctaataaagttagcttccaagagctgatgaatttcgtccttaatcctagggagtaagtctagacaaaatgaccttggcttttgtttaaagggcctgaaaccaggcttaatgggtaaacgatgctcttctagctctcgacttaatcctagaatctcaatgtagctccaagcaaagcaatcaaaatattcttttaataagccgattatttcatgcataggatcagcttccagtgtcttgtatacaaaagtcgaactaggatttttaccatcccctatgtcaatctcctccaaaggatcggccgatg

SEQ ID NO: 79998 - DNA, 368 bp, Zea mays
tgtgaaggttcttcatccccacatgtgctaagcggcgatgccacagccagcccatgctagtcttagcaattaagcatgcatctagaccggcctcctcttttgcaaaatcaactaagtaaagtttgccgtctaatacacccttaaaagctagtgaaccatcacttcttctaaagacagacacatctacatttgtgaatagacaattatatcccatattgcataattgacttacagataacaaattatatccaagagattcaattaaaacacattagatatagagtgctcggatgaaatagcaattttacctaacccttttaccttgccttgattcccatcaccgaatattattgaatcttgggaatcct

SEQ ID NO: 79999 - DNA, 356 bp, Zea mays
tcttcctccaaacattcatggcatttgtcacctttagtcgaagcctgccttcgtcaatgaccctacaacacacaaagattaaggcaaggaatagttaccgagttagtcttttgaggaccttcggaaaaagaaggccccaacagtagccccttcacgatgctgactcgttttttataatgggctcaacactagtacacagaagttctatagtggcggttctaaacctatttacactggcgtttttcagtaccgccagtgctaggggccagtggaaatcagcatttccactggcggttattttggaaccgccagtgaaaaatgcatttccatggcggctgaataaaaaataaattttt

SEQ ID NO: 80000 - DNA, 363 bp, Zea mays
  unsure (1)..(363): unsure at all n locations
ttctccagctgccaccacctcagctccgacggngacgtccacctgcccaccaacaccgcgggcgccggccgccccaaagcgcaccggcaggtcctcactcccgtcctcgccacgaaaacaagaatgggaccgtcccagaacatgagtaccgccctcacggcatacgacgtattgggagacccccggtgcggctggccaccgtcgcccggacaaaggtcggaatgttgcaccctggctgggcagcaacagttcgccttccccggcatggctggagggcgcctcctccgcagagctggaggatggtttccacccccagaagctggaggaagaagcgggacgccggcccacgtgaatgcaggcccc

SEQ ID NO: 80001 - DNA, 362 bp, Zea mays
  unsure (1)..(362): unsure at all n locations
tgttaacgagccanaatttgagctttttgttattgaaataactgggattgattaccaaaaatatattcagattccacagcacgccgcggattaacattacttttacttacttaacaccagtcccaaaatataggaaaaaaagtttcaaagtaaaggaatacaacataagatattggaataattacatgatccaatttaatcaaccaatgactctcttcacctccaaacagaaaatgatgcatgatgagacacagagctgttcgccggaatcaacctaaccctgctccctgaaaagatcacaatcacagggtggtcttggaggccctcctgacgagcacagcccagcacaagatcctgtagag

SEQ ID NO: 80002 - DNA, 358 bp, Zea mays
  unsure (1)..(358): unsure at all n locations
tctatgtatgtacatacatgtnctttagcaacaaaaagtatatatactccaaatacatgaaaaaacacatacttagcccatgcagtcttttatacatccttggattggaattgcaagacacttccaacaagaatggatacatactcaacacatacaatctttaactttaatatattaataaatcaatctgcaaatactcaaagttctcatgggactgcataaataaaacatataataattagagacaaatcctctcttagtctattatcatggtcttataccgtgtcttggcaactcttctaggataaaaggggtaaaaattggttataactgcatattcaactccagaggggccact

SEQ ID NO: 80003 - DNA, 355 bp, Zea mays
  unsure (1)..(355): unsure at all n locations
ntacctagttgattttgcaaaagatgaggccggtctagatgcatgcttaatggctaagacttgcatgggctggctgtggcatcgccgcttagcacatgtggggatgaagaacctccacaagcttctaaagggagaacatgtgataggtctaactaatgttcatttcgaaaaagatagaccttgtgcagcttgtcaagcagggaaacaagtgggaggctctcatcacaccaaaaatgtgatgacaacatcaagacccctggagctgctacatatggacctcttcggacccgtcgcctatctgagcataggaggaagtaagtatggtctagttattgttgatgacttttcccgcttc

SEQ ID NO: 80004 - DNA, 371 bp, Zea mays
tctaaagggagaacacattttaggactaacaaatgttcattttgagaaagacaggatttgtagcgtatgtcaagcagggaagcaagttggagtccatcatccacacaagaacatcatgatgaccgacaggccgcttgagctactccacatggaactattcggctcgatcgcttatattagcatcgttgggagtaagtattgtcttgtaattatggatgattattctcgcttcacttgggtattctttttgcaggaaaaatctcaaacccaagagaccttaaagagattcttgagacgagctcaaaatgagttcggattaagaataaagaagattagaagcgacaatgggacggagttcaagaactctcaaa

SEQ ID NO: 80005 - DNA, 373 bp, Zea mays
tgaccgtcgattcctcggagttcgtaaatgaatttcgatctgatcacaacgcgaagtgacgacgaataggcacaagcaaacaaacatatatatatatatatatgtgtgtgtgtgcgcgcgcgcgcgcataagaacattacaccattcaaggaaaaacataataaagcatgtaaaacgaaatagaaatagagcgcgctactatggtcacgcgaggaaaaagaaacgcgacaggcggagctacgatcgagaagctatcgcgtctacactaaaggagtattaatcataacatttagtttgatctgactatattaatcgatatttatttaaaacgaaactaaagctatcgcacaagcttaattagctgaccgcacta

SEQ ID NO: 80006 - DNA, 370 bp, Zea mays
  unsure (1)..(370): unsure at all n locations
ntacaagcctccaaaactttggagtgtttgttcaattggagtcaatactccacgcacaaatgaacgcaagatgtagcacacactttctcgcaatgaatctcacaaggcactagagctaaactcacacgagaggctttcttttgcttgctctctcttttgtggcacttgtgttggttgtagtggtctaaatcttgtgtataggatgaatcaatgaatagaggtggttggaagggcttggatatgtcaactatatgacttggaatgttgcttgggctccccatttttgaagtggccggttggggtggtatttatagccaccaaccaaattgtagtcgttggagaaagctgctggcgatgggcgaaccggaca

SEQ ID NO: 80007 - DNA, 270 bp, Zea mays
  unsure (1)..(270): unsure at all n locations
tgcattgcttctctaaatggcgagtcttgcctttcctgcangngaaacccacttcagatatccacccaccccgtgaagcctcatgcctaccaagggcttaacctagacaggtcttcattgctaacatcttacgacttagcatttcacttgactcgcgcttgacacatctcgttacctccctgatgcactgccacgtggggtaaatataacctctcacatctccaccaatacacatgctcacccccacgatgaaaatatgccgttgggata

SEQ ID NO: 80008 - DNA, 380 bp, Zea mays
agaaactcaagcttagaatgggacaatactgctatcttgtgctattttttggaaattttttatgagtccaataaacttctctcgaggtcttattatccaatagcaaacttgttcttttctaaattttgtgaaatcaacatcaagattattgagtggctgaaaagcagtgatggtttcattgcttccatggcacaatcgatgaaagataaatttgacaagtattgggagaagagaaatactgctctagtttttccatgtttcttagatccaaggtacaagatgaaagtggttgaattttattacactgagatgtcatatgactatggattcgatgctatgtatgaattcaaaaaagttctgcaaaagctatatgattctta

SEQ ID NO: 80009 - DNA, 367 bp, Zea mays
  unsure (1)..(367): unsure at all n locations
tgggaaggggctnctttctcacatttgctaagcggcgatgccacagccagcccatgccagtcttagctattaagcatgcatctagaccggcctcttcttttgcaaaatcaactaaataaagtttgccgtctaatacacccttaaaagctagtgaaccatcacttcttctaaagacagacacatctacatttgtaaatagacagttatatcccatattgcataattgactaaccgatagtaaattatatccaagagactctactaaaaacacattagagatagagtgctcattagaaattgcaattttacctaacccttttaccttgccctgattcccatcaccgaatataattgaatcttgggaatc

SEQ ID NO: 80010 - DNA, 365 bp, Zea mays
gggagaccacctagacctatccgttctcttgggatttccgatggggcggagatcggagaagtggggggcaggcaagtgaaggaagggaggtgcgtggcggcaacgcgcgtccctagttgattcgccactcgtcttggatagataatgatcttgtttcttggcaataattaattcacgaccgtttaacttttcatctaccttaagctgaactatatattctcgttgtttagcctcgtgggactttgcaaaatgctgttagtcaaaaacaaaagaaaagaaaatgcatgtttacgcatcttaaatcgtcgtgcccgagctttcttgagcttttcgagcgcacggatttgaggccaccacctcctcct

SEQ ID NO: 80011 - DNA, 363 bp, Zea mays
  unsure (1)..(363): unsure at all n locations
ttgaaataggagaattctgttaatttgctactttaacaangaaagcaacaatccttgataagagtgacattattttaacaatttggattgacatgtagtagcatacttcatgagaaacttattctcatacaagagactatatgagattactaggataaagcgatagtcttgatatgatcaggatatggaaataggctccccctagatatacacatcaaagaatttgaaatgaaaggaatcaatgcattcaactttagagacaaatagggagaagcaccatacatcttagtcaaggcttacaagattagcaataaacattttatgcctagtattctcataatgaaaaagacttagaatgcttac

SEQ ID NO: 80012 - DNA, 364 bp, Zea mays
  unsure (1)..(364): unsure at all n locations
tgccatcttggcgacttccattcttgctagaatagtcnncaaagaaatctccataacgagatgaattactagaggttccatcaaaaagtcccatgaaaagaggtatttatttagtttagtcagcaatttcaggtaacacatatatgcttttgttatcaccactattaaaatttatggtcctaataatatgaaaaaataataatttagcatcccaggtatataaaaacaaaggaacccatatatactaacataacttaggaaactaagaaggctgtgcaaagctggcactgttccaaattactgcaaatagcctctctcctctgccaaccaaaggaacccatgtatactaacataacttaggaaa

SEQ ID NO: 80013 - DNA, 361 bp, Zea mays
tattgccggggtcgtcgacggcggtttctacgttgccctcccggccgtgttcgtcgggggcaggctcctcggcggcctcgaccggctcatggccgtgcacatctccggcgacctcgtgcccatactcaaggacgccggcgcgctgtggctctgatgagaggaccaaggcgttcgtagtctcgctcccccgtccatccttccttggcctctccatcgtcgtcagctccccttgtccatgttatttttaacttgttatttttactctattaaatagaccagataggcatgcatataggacttttaactctttcggtagaaacagaatattaggtagttagaacaatggagtacgtgtgttaag

SEQ ID NO: 80014 - DNA, 357 bp, Zea mays
  unsure (1)..(357): unsure at all n locations
tcttcaccatgtgatcacggntattttgagaaggttgagcaatgcacttccctttaagttgtgtcaagcttatctttagcctctcattttcttatttgagcttttgatatgtatcatcttttgttcctgcaaattctagctcaaaggaagatttgcttgttgacgagcaacaagcattagcacatggtaatatagtttcaatttgattacatgtgcatgagtgaggttgttggaattttaagttttctatcacaacctcatgagcaatgtataacatgatatggtcatccataagattttcatgagaacatagaagcatatcatgtttttcttgaaaagctatattttcaattttta

SEQ ID NO: 80015 - DNA, 356 bp, Zea mays
  unsure (1)..(356): unsure at all n locations
cngatttttggaccttttgaaagggtttgagngcaatccttgaccgaaggaggtcaccacaacatggagtatgcattggccgaaccataaaataaaatcaccgtgtcacttgcgcatctttttctatggttgttttcttccatagagttctcatatattcacttgcgctattgttcctaagttcaatacatatcgtaaaggaacaatcaaatgaagagttctctcctctctatccatatcatcttggttttgatctcactaacatttattataaaccaagtttgtgttggttaaactttatttttacaggatcacctattcacccccctctagatgctctcacaaggatatgcggc

SEQ ID NO: 80016 - DNA, 371 bp, Zea mays
tgctacatgccttcttctttttcttcatgcaggaaccttactgttatactaccccacttaaaaagaatgagggtagatctcttgaatcttggggatttgaactccttgaagtacctcataacaagggtgttacgggaccttcttctgctgttgctgcttgagcaggctgcggagatatgactgacacagggttgattttgggagaaccttcttctcatcttctcttcactatcttcttttctcttctcacttttcacttttcactgcctctttctttctctttgctcttcccactcgaggattctatcaaagagtattactatcatacactggaggaaaccaaagactatgaaccatgtgcaacagtcttc

SEQ ID NO: 80017 - DNA, 373 bp, Zea mays
  unsure (1)..(373): unsure at all n locations
tctccctgtttttccttttctcttttcactcgattgtgcatgctcagntnttacatttacatcttcgggggatattgctcttgtagagctaatataagaaaaagagaaattacatgctatggccccattaaaaacctttctccccctttggaaagaaaaagggtgccataggaaaggataaaaaagattacatcaggctacacataataccgccgaagctcatccgcattccaagatctaggaatgtcgttgccgtccttatccttcaacctgtaggaaccgggtcttgacgaagatactaccagaaaaggtccttcccacttcaactgtagcttgcatactgtatctgggttggcaactcttcgaagtacca

SEQ ID NO: 80018 - DNA, 366 bp, Zea mays
tgccaatacttgtcaaagcaacaattcttgccttcacagcaactgcataccataccggtgacttggcctttcgcatgctggggactggatatgattggacctttcaagaaagctcaagggggatacactcatgtattggtagcaatcgataaattcaccaaatgggtagagatcaagcccattgcttctttaacctctgctaaggtcgtggaattcatacaagacataatattcagattcgggataccaaacagcatcataactgacttaggatccaacttcacaagttcagagttcttcgacttctgcgagcaaaagaacattcagatcaagtatgcatccgtagcacatccacgagccaatggg

SEQ ID NO: 80019 - DNA, 368 bp, Zea mays
tgatgtagcaacctcatgtgatgatttgattcatgatgagcaaactagtctacatgctgaattgactgaaaaagttgaagtcctgactttagacaaccaaaaattgaagaattacttgactgatgcaactactagaggaaaagttgctattgagaacaatgatttcaacaatgagttggcagtggataatcaaaggcttaagaatgaggtcaagaaactaaaaagtgaaaatgaacatcttgcaacaagcgtgcaaaagttcgacaagggtcaatacctccaaaatgagctgcttatgaacactgttatgaaaaataacaagagtggtattggatacaatgcttttgtgcaaaaaaaagctatcactc

SEQ ID NO: 80020 - DNA, 374 bp, Zea mays
  unsure (1)..(374): unsure at all n locations
actaangctgccaatcgcttaaggtcatacttccaagaggttttcatgtggnaangccttgtcttgaattgcttgcaatgtgcattgcttcggatccttgctattcttatgtggattacgcttgcagatattgaagtgcctatgcaatgcaattgtaccattgacatacggatctgtcttaatgggacgactacaatacttacacttttccttcttcaagacaccttggtcatccttattcttgatgaagtgctgccacatttcagacctcggagccatttcttttcttcatgtttcagttgtgttcttaccatcctcattcgcatccttatctttgtcttgtctaccaacagtttggaccacctcatcctcac

SEQ ID NO: 80021 - DNA, 367 bp, Zea mays
  unsure (1)..(367): unsure at all n locations
tgggaagggtctncttctttacatttgctaagcggcgatgccatagccagcccatgctagtcttatctattaagcatgcatctagaccggcctcttcttttgcaaaatcaactaaataaagtttgccgtctaatactcccttaaaagctagtgaaccatcacttcttctaaagacagacacatctacatttgtaaatagacagttatatcccatattgcataattgactcacagatagcagattatatccaagagactcaactaaaaacacattagatatggagtgctcattagaaattgcaattttacctaaaccttttaccttgccttgattcccatcaccgaatataattgaatcttgggaatc

SEQ ID NO: 80022 - DNA, 367 bp, Zea mays
tgttcgcagtagaactcaaacacttctgtaacatagacaatgtgagaaaatactacttgtaagccaactttgctcagtagggcccccattgtgcccttgtaacatttgtatatacaatttagcaatcaagtccgtactcttttactcgcaaagggggaaggttttcaataaggcgtagccttataataataaagctgaaatccgcctttgaaccccatcatccatgaaaaaggctcactaggagcctaaacattagacaaaccgtgaagtcaccacaatagtacttaataaaaacctgttgtgtgtgacaactaaaaatccacgcaaaagtcatctaagggtgcagttggattagaacaaaaatgta

SEQ ID NO: 80023 - DNA, 361 bp, Zea mays
  unsure (1)..(361): unsure at all n locations
tctaaagggagagctcattttggttctaacaaatgttaannntgagaaagatagggtttgtagcgcatgtcaagcaggaaagcaagttggtgtccaccatccacacaagaacatcatgacaacagacaggccactggagttactccatatggatctattcggcccaatagcttacataagcatcgacgagagtaagtactgtctagtaattgtggactattattctcgcttcacttgggtattctttttgcaggaaaaatctcaaatccaagagaccttaaaaggattcttgagacaggctcaaaatgagttcggattaaggatcaagaagataagaagcgacaacagaacagagttcaag

SEQ ID NO: 80024 - DNA, 363 bp, Zea mays
tttctcggtgtgctttctcattttttgttgtggaagtacttgtatcattgtcgccctgggatggccgggggacaacatcagttggttgggggtgccagcttggagatgcgccgcgggaggaagactgagtatctcgagatccctctcaaagacagtatcaagggatggcgcttggagtggttcatagttgagaattatggaaactctctcccccccggtcgggaagacagccggatgttcgcaccccaagctagaccgagtcttccacagatcaggaggtagctgaggcaggtgcgttgctagctgaagttggactgctgaaagagaggggtctgactgctgaagctgtggttactgattttg

SEQ ID NO: 80025 - DNA, 360 bp, Zea mays
tgtcactgaaggaggagccaccgttttacaggatggtgctcatcgcagatgaaggaactgcctttagataggaggagcagatgccaatgggtgccataaaggaggaaggaggggtcaacgtataacaaaagaggaggagaggacgtaaatgtacaagctacaatagtggtgtcggaggtggaaaatcctccgatcgagtggcagaatgcaaccgccctgatcactccatgtgatgccgcgggggatctgaatgttttgccgaaggagatgaatgaacacaaagtacacacagatttagagtggttcgggccaccggagcgtaataccctgcatccacttgtgagttgtattgcttgagcg

SEQ ID NO: 80026 - DNA, 359 bp, Zea mays
tgactacaccattttacatttcacttaaaatttctgagatcaagaatatttagttcattcctcaacatgcaaaagcgggtcttatcaagtggcttagtgaaaatatccgctaattgatcttccgacctcactccttctaaaatgatatctcctttagcaacatgatctctaaggaagtgatgacggatatcaatgtgcttggtgcgagagtgttgtacaggattattagcaattttaacagcactctcattatcacacaacaaaggtactttttctagaactacgccatagtctagaagagtttgcttcatatataaaatctgtgtgcaacaagcacctgcggcaatgtattccgcttc

SEQ ID NO: 80027 - DNA, 354 bp, Zea mays
tgttcttagtccactcgaactaatcttcggagaaacccgacctcgctgcaacatgacacccgaaggtccaacacaacaagcaatgaatgaattcagaattattgcagagcatatcagtacaagggacctggttcaggagtttttggctttcaaagtttttcccagtttgaaagaatgggaaatgccgaagctaaagggggagaagaaagaaggtgaacttgtacgtttaccttactatttcaagtttaaaaagtactttaaaacaccttgccaagagtggctagatacaattgaagtaatgtgcaatgaaatacttggcaattattccaaaaaagaagatcagttgatgaccgc

SEQ ID NO: 80028 - DNA, 375 bp, Zea mays
ttgattaatagaataaagctaattgctagaccactcttgcagagttgtaacctacccaacacatgttggggccatgccatcctgcacgcagcaacacttatcaatttccgtccatcagcatacaacattcactcaccaatgcaactagtgcaaggagtcatcccaaaaatctctcacctaagaaaatttggatgcatggtatatgtacctataccacctccacagcgaagtgcaatgggtcctctccggaaaatagggatatatgttggatatgagagtgcatccataattagacaccttgacccaatgaccggagaattgcatacggcccgattcgccgactgtatttttgacgaggataatttcccatcatta

SEQ ID NO: 80029 - DNA, 367 bp, Zea mays
tcctcgactaagtcggagacagggtctcatggattggtgaaggtacgcgtaagcggcaaggccgaccgagccgagggactcctacgcccccgggatacggatacctcactcatcaccttccgcgagaagcagctctcgcccgcacaaacatccctgttaccgacggaaagtccagaggctcggaataaggggaaaagagacacagctttgcaagcgcagcgagggtgtgttttctggcctcagcggccgcagaaggcacacgctacaagacgatctgatcctgcaggctcaagtcttcacgctgaagggggccgtagcaccctcggcgtcgacgacgtcttcagcaaggtccgacccagcctcggac

SEQ ID NO: 80030 - DNA, 369 bp, Zea mays
  unsure (1)..(369): unsure at all n locations
tttagttgtaaaccatgtccagtttttatcanatatgatgattctgatgatgaaataggtgcattaccctacaaggatgctatacgaggagagcgaatattagtttgtaaccgatcgaaccctattatgaaggttggtagtttatacaaggatatgaaagaatttagactggctataaggcaatacgcgattaacaatgagtttgagttaggaattgagtcaagcgctccattcagatatcgtggttactgtaaaggtggtgattgcccttggagaattaatgcgagacccgaagttgctggttcccccactatagttgtgagtattttttagtacttgtttttttgatcattgaactttctttggacc

SEQ ID NO: 80031 - DNA, 361 bp, Zea mays
tatttacaaatgggcccatgtcattcatttggttatacatttccacggacaccgggtaattcttaaactagaggttttgttgaatcttggttcaaacagtttgattggttagagtacagtgtacagaaagatgcagcttattgcttttattgctttttatttaagcctccaagaaccaacaactttggtaaagatacattcactaaagttggatttaagaattggaaaaaagcaaatgatgtattcaaggaacatgtccaagcaattaatggttctcatagttatgcgaggaaacgtgccctcgattttgcaaatcggagacaaagtgtagctcatgtatggtcatcgacaagtgcagccg

SEQ ID NO: 80032 - DNA, 379 bp, Zea mays
  unsure (1)..(379): unsure at all n locations
actcaagcnncggcgacggttaaaaattntggcttcaaaacagtggttctagcaatgaatgctggggtaacttcacacctactcgtttgtttatatagtgctgcaggtaagaaggcgaagcgccagaatttttacaccaggcggacacccgctcgcactcgctgcgtggtggaccgcagagaccgaacagtaactctgcaaggtggggccgctacacgttgggagattgcatcgtttctcgacaacgagctcagggaaggtgttttttagaccttcggcgctccgaagcttaagagacttttttcacggatcaagctcgttacgaaaaacgatctagcaccgcgaaaggggctactgttgggactatgcttcgtcgccg

SEQ ID NO: 80033 - DNA, 366 bp, Zea mays
tctttaatgctctttttattgaatcatccacctgtactgaacaggaccaccgaccttagcctcatatggaagatgtacaaagagatgctgcataggattgaagaaacccggtggaaatatttttcaaatttgcacaaaagcatcggtgcctctttctccagctgttccatcacatctcttctgatttctttagcacacaactgtctgtagaaatagctaacttcagctaacgttttccacacagcttcggaaatgtacccacgaaacattacaggcatgagcctctccataattatgtggaagtcatggctcttcagtccattcatcttcattgtcttcaagttcacagatcttctaaaaccagcg

SEQ ID NO: 80034 - DNA, 365 bp, Zea mays
tatatgccataaattctactaaacttgtgccatcttgtgaaacaactctatatcatatctgtgttcaagctgttgtgtactatgttcaagaactaaacaaatttacatctgtttgtattctgttaacatgagttaaaaatgaccaagagtttgaagagaacaacatatatgttgtccaggttttacctaagccttaggaagactcattctaggttgatccatacagcacaatctgcatgagaaaatgtggcatgtcttctttagttctttccaatttgagatggacaagtaactcatttgtaggaaggcatttaataaagcaaaaaaactgaaagtgttaacatggttctcaatactccctccat

SEQ ID NO: 80035 - DNA, 361 bp, Zea mays
  unsure (1)..(361): unsure at all n locations
tcttcatagntctcttttaaggtttttgaggtgatcttatcattactcatcagctgcttttgagtcagcatgccttcttattattttattttcacatggaacattgattaatgcctgccaattgctgaagtaaactacaatatatgagtgggtaggctaacggtgaagcacatgaatgcaggactacaataggaatgcttttctggaggctgacttgcaatgttctaataaagttcagaacatggaatcaaaggtgcgagcagcatgtaaccgttcgaatgcaaaattagatgacatagtcagggtaagacaacaaaaaacttctctgctgctgtaattaatcgacaagaaccttatcctt

SEQ ID NO: 80036 - DNA, 359 bp, Zea mays
tggagatggatcctttttattcttatcgcgaatcgaagacgaacaaacacaagcgagctaacacatatatgcataagaacattacaccatacaaatacaaacataatagaacatgcagaacgaaatagagcgcgttactacggtcacgcaaggaaaaagaaacgcgattgtcagggctacggtcgagaagtcatcgcatttacactaaataagtattaatcgacataatcatattaattataactactattgagtttcaattaatctgctacactaacagatgtcagttaagtaagtaatttaattaacacgagagaatctaaacggggcgaaattaacgacacacgacaagatgcgcg

SEQ ID NO: 80037 - DNA, 353 bp, Zea mays
tgagacgggagaatctctcagcatgtgttaaactccataagaaggatgttcctaaagcaataaatgaagaaatcaacatgaaaaaggaaaaaggtaaaaaatcaattagtcatgttgtttgcactgatcatctctctatgtcatccaagagcaaaaagggaagaggaaaaaggaggtgcttcaagtgcaaggaattaggtcacttcattgcgtcttgtccacacaaagacaaggatgaaggaatgaggagatgttttggatgtaatgataaggaccatatgatcacttcatgtccgctcatgaagaatcaaagacatgtaccctccaagatgaccctcactaagaaaaaagac

SEQ ID NO: 80038 - DNA, 359 bp, Zea mays
tgccttcgcctcagtgtaccaccttctatccaacggagtcgtggaacgcgccaatggtaaaattttcacagccatcaagaaaatgctcctcgatgacaagaaaggcaagtgggccgacctgttacctgaagcgatctgggcgctgaacacgactgagtgcagggcgactgggttcacccctttccgccttctatatggatcggaggccatgaccccacaagaaataaaacatgggtcaccgcggacagtcacttcagtcgtccccgacgtagacgagcctacttcaaaggacctcatcgacggagaccgcgtcttcgccctacaggccctaaacaaataccaagctcaaacaaaagcat

SEQ ID NO: 80039 - DNA, 350 bp, Zea mays
tgtgtagagtattgtggcctttgctgctgactccctcgatcatcagtttgggcagagctatgaattgacctaacgtgcctcgggtgaaatcttcctccgaagcccctggtcatttcagagaacctgaatgcttcctccctcctttggcggaagtcattgtcagctcgaatgtattcgtccatcttctggagcagcttctctaacgtttgtggtggtttcctggcaaagtacagcgctgaaggtcccgaccgaagccccttaatcatggcctcaatgacaatttcattgggcactgttggcgcttgtgccctcagacgcagaaaccttcggacgtacgcctggaggtattc

SEQ ID NO: 80040 - DNA, 376 bp, Zea mays
tcaagtattatatatacattttgtctctgggcccacatgtcggggcccagtccctttgtgcatgcccccttcaactataaaaggggagacacgcgacgctacggggggtcactcagacctaactttaggcagacactcacaagttcatacaggctcccaagcaatacatcacacaatggagtaaggtattatgctccggcggcccgaaccactctaaaccctcgcgtgctctcgtgtgttgatccactagtctcgtagcaagcaaaacgcttaggcccctcctctctttaggatttagggcaggtgcgatccgccacccggccggggagatttcctctccgacagaacgtattataaatattgttaaccaatcact

SEQ ID NO: 80041 - DNA, 375 bp, Zea mays
tatgaagattcttcatcccaacatgttctagtcggcgatgccagagccagcccatgttagtcttagcaattaagcaagtgtcgagttcagctctatcaaaattcactaagtatagctgaccctctaacactcccttaaatgctattgaatcatcacttcttctaaagacagtgacacctacatcagtgaataaacagttgtagcccattttgcataattgagatacagaaagcaaattgtaatctaatgaatctacaagaaaaacattggaaatagaatggtcaggagatatagcaattttacccaaacccttgaccaaaccttggtttccatctccgaatgtgatagctcgttggggatcctggtttttctcgt

SEQ ID NO: 80042 - DNA, 377 bp, Zea mays
aactcaagcttaacttgcgaactggcttctttgttcttcagatgttcacgacgttttgatacaattcttgaggatctcgtggacctatgggttaggatccacacacgcttctgctgcaccactctgatcttgttggttaatgttggtcgcattgtcttcgttgcggttagcggctaacccccttaacaggagcgttgatatgcacttggtgaagatgctgtcgactctgatcttgaccgattaaaagaggttgtaggatgtcaactggacaggtgcaaaaggaaagagtatagatagaaaaggtaagcatagatggattaaagagagaaaagggagagcacccagctaccttaccttatggcaatcagctatgtaac

SEQ ID NO: 80043 - DNA, 366 bp, Zea mays
tctagaaacttggttgtgcttattatattacaattgtttaagtgaggttttccttgcatattttcaataggaaagttatggccatgaggaaggttgtcttaatcgatgctaaggtcataacttctagagtttaagaacgacttcgagagagggaggaagaggtcgaagatcatggcatgctcacctatggcacaaatcgacgatgatggcttgctctccggtttgaagagtaagacatgtgttgtttgaacgtgggggcggcaatgagatggtggatgtagtgtgaggttccacgtttaagggcatcagtatttataggcggaggaatgacgtactgcacgtacaagttcccttatgggtttagta

SEQ ID NO: 80044 - DNA, 351 bp, Zea mays
tctcctatgtttgttggggtttcttatcaaaatattgagccataagtcctggtcgaagccccttgatcatggcctcaatcacaatttcgttgggcacggtaggcgcttgtgctcttaaacgtaggaaccttcggacatacgcctaaagatactcctcatggtcttgcgtgcactgaaacaaagcctgggtagtgactggcttcgtctgaaagccttggaagctagtgattagcatgtccttgagcttctgccatgaagtgattatccctggccggagagacgagtaccaagtctgtgctacacttttgactgccatgacgaaggatttcgtcatgactgcagtattgcccc

SEQ ID NO: 80045 - DNA, 362 bp, Zea mays
tgctgaaacagatgtcttttaattttaatcaataaagggaaggaatcagcatggaagtttgtttattttctttctggagaactgctttcactatctgtaacatacaatgagccatggtttaagaacaccagatacttttggataggccctggtgaccagatctggcctgatcaaatgataaagtaagaaagcaggtcttcccttcctctttcaaatttagttttccccaagaagatccagtttcaacgtttaattttccttcttccagaatgaagctcaaagctgtctacatgtatgctgctggattctacacatattcaattttcgctcttctgttctgggaaacaaggcgttcggacttt

SEQ ID NO: 80046 - DNA, 365 bp, Zea mays
tctacccgctttcctagtgatcggttaagcatgtttgaatagctctctgataagtcgctcctgcgttcttgagaccgaatggcatggaggtatagcagaaagctccaaacagggtaatgaatgcggtttttcctcatcttcttttgctaagctgatctgatggtatccagaatagcagtccaggaaggacaacatagaacatccagcggtcgaatcaaccacctgatctatcctagggatctcgaaggggtccttcagacagtgtttgttgagatctgtatagtcgacacacatgcgctgtgatggaacctcccaagttattatgcccacctacagttgtccttgtccagcggaccttggacaac

SEQ ID NO: 80047 - DNA, 347 bp, Zea mays
ttcatgagaacatgattacgaagttgaattttagtacggcttatcaccctcagactgatggacagactgaaaggacaaatcaagttttggaagatatgttgagagcatgtgcccttcagcatggaggaagttgggataagagtctgccttatgctgagttctcgtataataatagttaccaggccagcctgaagatgtcaccttttgaagctttatatgggaggaagtgcaggactcctttgtattgggatcagactggagagagacaattctttgggcctgaattgattcaagaagcagaagaacaagtccgtataattcaggagaatttgagggtagctcaaacc

SEQ ID NO: 80048 - DNA, 354 bp, Zea mays
tggaggcgtctattgtttgtcgacttgtggtggtctcctccttcttttcctccgtcgccttgaatgcgacgggttgagcttcggatgtagatggatcatcaagctcgttgatcttcctcgagcctttgatcatgcactcaaaacttacaaaatgcccgattacttcctcgggggtcattttagtatatctaggatttccacgaattaattgaacttgagtaggattaaggaaaataagagatcttagaataactttaaccacttcatggtcatcccactttacgctcccgaggttgcgtacttggttcaccaaggtcttgagccggttgtacatgtgttgtggctcctcccctt

SEQ ID NO: 80049 - DNA, 342 bp, Zea mays
tctgtaacattcattatttattattctagacgaagccctggggaaaggagcaatatcacaacaactttgggtgctacagattcggcgcgcgccccgggtcaagctgccctgtgccgacctttcggaagaggtggcccggagcctggatgacggaatggttttatgtgaagaatgacctatcagatcaagagaatgtgaagaatatcattatgcgaccaatctggcaacgcttcggtcttcgaaggccgaaggtcgaaatgaacgaagctgccgaagaatgccaaagggccttcggagtagtctgctcgtttattgggacaagggacttggtccaagaacata

SEQ ID NO: 80050 - DNA, 359 bp, Zea mays
tgacaacatactcctggacggtgctatgaagccgaagattgcggattttggtctgtcgagattcatgggcgcgcaagaaaccacccggatcacgagaaacattgtagggacgttgtaagtttttttttctcgctctctctctatatatagcgcgctatggctataaatacttttaatttacatgaagagctattttggaaaccctattttttcaaaaaatttcaattttcttaagaggcagtagttcattttcccttaaaaaatagaaatcccttggaaaaaatgaattttccaaactagtccgaaatataggataagtggtgaaactaaataatagagctttgacatgacccacgtac

SEQ ID NO: 80051 - DNA, 352 bp, Zea mays
tggttgaaaaaaaattggcatatgtttaatagtaactctctccccctggcagatggcttcggataaaaccacgcctaccgcctccgggattggagcagggtttcccctaagagctgaaactgaaggcggtggagaagggagtgagacccacctacccgcacctccaaagctacccttagatttagcccaagttctagccaaccaaacccgactcattgaggtcctcactagaagtctggagaatcaacgcccgaatggtggaagaccacaagacaggatgggagattttctaaggctcaagcctcccacattcgctagatctagcaatcccctcgatgctgatgactggcta

SEQ ID NO: 80052 - DNA, 212 bp, Zea mays
  unsure (1)..(212): unsure at all n locations
gatcaatagtgtatctccttacgacttattatgattntccctctntcaaaacattcttctgaaaatcgatattgtgtccccttcttgcgccatatgcagcatgatgtatgatgcttatgctatgcgaaatgatgtgatgatggtatgctatgtaagatggtatttattccgaagatacacgcacattcctgcgataaaacacataatctttt

SEQ ID NO: 80053 - DNA, 230 bp, Zea mays
  unsure (1)..(230): unsure at all n locations
ggagaaggtactgtatgctgtcttaatggccgtcaggaagcttctgcactatttccaagcttacaacataatgggtccttcttcacaacctctgaaggatattatgaggaaccgagaagctactggaaggattggaaaatgggctgcagagctcaatgaattntgcattgacatatgtcatagatcttcgattcagtcccaggcgttagcagacttcattgctgactgga

SEQ ID NO: 80054 - DNA, 211 bp, Zea mays
tagaactgatttgtgcacatgatactcttcctatctgcttgggatttgttgtgaatcacagtagggttgtcatcttgtgtgtcttagggctgtgatccctggcgattacaatgccagtgcaacttgacacttagtcaactgggatctgctgtgtatgcgtggtacggctctacatcgtgtgcctaactgacgctatgttcttgggctgatg

SEQ ID NO: 80055 - DNA, 278 bp, Zea mays
atccctttgtgggtcctaaaagaacgaggttggttatgcgttctcacgatggcgctttatgcttattatctacaaggatttgtattgtaccgatccgaggttgctatcaagcatgccgcaaatgctggaatgatcgctcggtgaaaacacgattgttttgagcaaaacagattcctactgagtccatggttctatgattgccgcatcgctcatacagaataagtgtccagtcaaccaataggtagcaattaatcttcgcgaggatctagcgatgattc

SEQ ID NO: 80056 - DNA, 302 bp, Zea mays
  unsure (1)..(302): unsure at all n locations
agtaccgaagattatttcttactggttcaagatgacttccggcttcgtcttcagctttctctcgaccggcctttgtccataccatcnttataaatctatntgagatacttcgggcgaggtcgggcatatcatccaggatngatgaagataatgggnnaatgggcctggtgacaacctttccatgttcgcagccgactttcagaaatgcagcagcggtaccctgagaagctacccaggcacagaagtcgccgtgcccggctatgacttcgtcaagctcttcgatntcagctttcatatgatcg

SEQ ID NO: 80057 - DNA, 255 bp, Zea mays
  unsure (1)..(255): unsure at all n locations
catgtgttaaactctctaaggcgctttatgggcttaagctggccccaagagcatggtatgaatgcctaagagattccttaccactaatggcttctaagtcagccaagttgatcctactctatttactaagacacatgnnaatgaattgtttgtatgtcaaatttatggtgatgatatcatacttgggtctactaacaaatctacttgtgaacaaattaataggatcatgattcataaactcgagatgtctatgat

SEQ ID NO: 80058 - DNA, 217 bp, Zea mays
  unsure (1)..(217): unsure at all n locations
tcctcaagcataggagagggaaagactacaagtcccgctccaagaaagtttgctacaagtgtggtaagcccggtcactntattgcanaatgtccattatcaagtgacagtgacagggataacgacnagaagggaaagaggagagaaaagaataggtactacaaaaagaagggcggcgatgcccatgnttgtcgggagtgggattccgacgaaagctc

SEQ ID NO: 80059 - DNA, 198 bp, Zea mays
ctcagctttaagggagaccatttatgattacaatgttatttgagaaaaaggattgttcgctgccagccggaagcaagtggacccccatcacacagaactatgacaccgcatgccgcttgactactcacatggatctattcgccgatgcttactaagcatcgggggagaaatattgcttgaatagggatgatattctcc

SEQ ID NO: 80060 - DNA, 163 bp, Zea mays
  unsure (1)..(163): unsure at all n locations
atatgaattcttggtgatgtctnttgggctgactaatgcaccagcatacttcttggatctgatgaantctgttatcatgcctgatctggccaagctcgtagcggttttcatcgatgatatcttggtgtaatgaagaacgaagaagacatgtcggcatttgatg

SEQ ID NO: 80061 - DNA, 361 bp, Zea mays
gccttgaactcagctgacctcgcgctgagaccaacccctcgtcgccggcggcggttccacgctgtactgatctgagctcttgcagtgtgctgtggctactccccgacgagaagagaccactaggagaaaccattggtgatgagactctaatttggaacaacaagcacggtgctgtgggtggtgctctattggccagtcagatcaacggcgggaaagcaccctcgatgacgtaaaatttgttggaactgtcctgaattagacaattgactgtgatataaatagctacttaatgggaaataattctagggaatgactgtgacacacctctggcctttatgctacttgctactgagctctgacc

SEQ ID NO: 80062 - DNA, 449 bp, Zea mays
  unsure (1)..(449): unsure at all n locations
ggacctatgaaactcagcttgtggagaggagatggatgaagccttgggtgcttgacggagntaattcaattcttatctactcaagctatcaatcttcaaaggatctacatattctagagtgaccaaaggttacttcaatntattgtattcacaacccatatcatctcggggaagatattgatgttgtaggaattgaagaatcatcatatgcggaaaatcaaggcctacaacatggaggactgtcgaaggatggtaacacttatgctcttaagtgcaagtaccctaaattatcatttcttatgtgtcttgtgtagtcacatagaanaaggaagcacttaagatgttttaaatttatgtcaccttctttgaagaaattccttcatatggntgattgatattctcattttatattatgaaatctacatgcttaaaaatgtgcttttccatgg

SEQ ID NO: 80063 - DNA, 371 bp, Zea mays
  unsure (1)..(371): unsure at all n locations
ctcattacctttctagcacaagctgcaattttgggttgcctagntacatgtgaaataattgacaagctagaagtgggatagttaccaatgggataatccttgcattgatgtcccttctttcggcatatgtagcataggcgatcttcaagtcttgaagatttatagttccttggttcttgcttgctacatggctagctaatactttcttttctaacactatgccctcttagttcacatagggacaagacttaattaagtgtcccttctctgagcatttgaaacacagcttatcatccttgttaataatcaagccattctctatatanggacatgacctaatcgagtgtcccttctcatagcattcactacac

SEQ ID NO: 80064 - DNA, 239 bp, Zea mays
  unsure (1)..(239): unsure at all n locations
caatgtcatttgagaagacggattgtttgtatgccatgctggaagccaagtggtgttcatcatcctcactagaacatcatgacgaccgacaggccactggagcttctacacatggatctattcggcccgantacttacataaacatcggcgggagtaaatactggctacctattgtggatgattattctcgcttcactagggtattctttctgcangaaaaatctcatatccaagaaac

SEQ ID NO: 80065 - DNA, 235 bp, Zea mays
  unsure (1)..(235): unsure at all n locations
gcatgctgtgggctggacatgatcggacccttcaagaaagctcaagaaggatatactcatgtgctggttgccattgacannatcacaaaatggatagagtataagcctattgcctctttaacctcngccaacgcagtggaattcatacaagacataatattcangttcgggataccaaatagcatcataactgacctaggatccaatttcaccatatctgaattctttgacttct

SEQ ID NO: 80066 - DNA, 182 bp, Zea mays
aaagcaactataatgcaagcaaacaaatggtatataaccaaaaaaatacaatcatttgtgaccctgaaaaggagaaactttcacagtaacacttactctttatatcagctataatgctggtgattatgatctgctttcatttgatactcatgctatgctggtggccccaccattcaccctat

SEQ ID NO: 80067 - DNA, 282 bp, Zea mays
  unsure (1)..(282): unsure at all n locations
ctccatgcttgtataactacncttcaattattacataatgtcttgttcttgcttncattctcttggtgtaagcttcgtcgtctgagagataattgccttggaagaaggatattattccggtccttcagtcttcactatgtacaggtgagattgtgagcactgctctttccatgagctcgatngaaggtgcttttattgtgtcanaataaatcttccaaaggcaaagggagcccctgtgccgctgactcacctaataaatatacatgctcattntctcccctt

SEQ ID NO: 80068 - DNA, 277 bp, Zea mays
  unsure (1)..(277): unsure at all n locations
aagcatgcatctagactagcttcttcttttgcagaatcaactaagtaaagttgccgtctaatacacctttaanagctagtgaaccatcacttcttctaaagacagacacatctacatttgtaaatagacagttatatcccatattgcataattgactaactgatagtaaatatatcctagagactctactaataacacattagagatagagtgctcattagaaattgcaattntacctaacccttntaccttgcctttgattccatcaccgaatata

SEQ ID NO: 80069 - DNA, 421 bp, Zea mays
  unsure (1)..(421): unsure at all n locations
acacagcggctgctcctgctctgaaggctccncaagatccatcgcagaatactgtccaaacttcgacatctntactcgtttcttctacctgagcccctggcgttggtggagttagtgctgctaggtctatcaaatattgcttcagctcttcgaaggctctctgctgaactggtccccattgaaaaacttctgctgacttcagcactctcaanaatgggaaatntctctctgctgatctagatatgaatctngtgagagatgccattctttctgtcaatctttgagcccacttctttgtactggtggtccattctaggatagctcgatttatttggataagctcatccctttggtgaactacgcagcaagaaattttcttcttacttcgagaccattttgtggattcaacttaactggctgc

SEQ ID NO: 80070 - DNA, 185 bp, Zea mays
  unsure (1)..(185): unsure at all n locations
cttacatccattgtgctcctgggcccacatgtcggggctcatctctcttgtacatcgcccccttgtgctataaaaggaggagcatgcaacgctaccaaggggctcaatctttatgcttatacccaagtcatccaagacaactcaagctctcaagcaacacaacacacaatggagtanggtattac

SEQ ID NO: 80071 - DNA, 267 bp, Zea mays
  unsure (1)..(267): unsure at all n locations
tatgtgcaaaacataataacatgtgtaggttctgtgaatgattttgctgnggtgcttgttgatggcttatgtgatgtggatctaccattgtgcaatactaattaaatatgtatatctatgtgattatgtgtatacaaaatggggagttgcgatgcttctgtatatataacagctgctgaatgctaattaatgggatattatcattattaacgactataactaggggcacactttttgtggttgcttaaagtatagtacaacgactca

SEQ ID NO: 80072 - DNA, 274 bp, Zea mays
cagaggcctatccacaaactatgcacgcagcgtgactctcacatgacatcgccatgtactactcgcgagtagacgcagtatgggagaattccttattggttctttcagaaaattaaccagaactaaagatctgaacggtaaagatttgtcagataaataaacaccgacgataaacttatgagtttagagagtactattttctcccccaaggtgagaaaatctgctgaactctaatcaatcatgttggcaggcaacgtgtcctacgtgttacatc

SEQ ID NO: 80073 - DNA, 391 bp, Zea mays
ctcagcttggcctgaccagcagattgcaccttgcccaattagtaaaattatttcatgctcagcctgtgggaataagtaatctggcagatgtaagtgatattatgtttcctactgcaccagcctataatgccactggccgcagagctactggccagaagcccgacccggttcattataacgcccactcgttaatagtgaagggtggatgttttataagggaactttcgagtgctcataaccaaactattacttgaccacgttgcaagtaacaagttgactttcagatgtgacttgattgcactcgttgatttgtgcaacttctttgtcaaccttatttgacatttcctaacacattcgtgagttgacgacctatgctgacaaaatttttaaa

SEQ ID NO: 80074 - DNA, 276 bp, Zea mays
gtatctctgactgagaaaaagtcagctgattatatcctacatgatccttcccctcaattctcctatctgatacgttcccaaactcataagacatatcagtctggaccacttcatccccatcacaaggctccatcatatggacctcaacaacctttggggacagacgaatctccaggatatcactcatttgtggactcaacgcttcagtaatggggcgaaaggggcgcccgctcttgtcttgtgaacccacacacatgacgccatcttcgaaccacc

SEQ ID NO: 80075 - DNA, 221 bp, Zea mays
  unsure (1)..(221): unsure at all n locations
gcttgacgaaagttatagagaagactattcagtcttaacatctacccgaacaacgaaattttgattatatataccgccatggatgtaatgatgctcattngatatcacaaacgttatagattctctataagctatagtcaacgcggttctaactgcttctaccatttatcatgctattgccctcgagcttcctaaatgggtaatcaaggtcactgataaat

SEQ ID NO: 80076 - DNA, 277 bp, Zea mays
actcgcgaccgagaggaatctcaatgtgcccatactgctccatctctaagtgatgaagcgtcaggctgtgtatcgagatgaccgcgtgaactacagctgatgctgagagtgacaaaatgatcgtgatgcactaaccaccactggagttggaatcaccattcgagggacatccaactgatgaattggctttcatgaacaaaagactggtcattcgcggagaatactcaccagaagatagagtgcttaaactcttaagtgttagatctttacaatatgt

SEQ ID NO: 80077 - DNA, 402 bp, Zea mays
  unsure (1)..(402): unsure at all n locations
tttgtgctagcacttggtaaactcattacctntctagcacaacgtgcagtattgggttgcctagntacatatggattaattgacaagctaggagcacgatagttaccaatgggacaatccttgcattgatgtcccttcttttggcatatgtagcaaaggcgatcttctaagtttgaagatttcttcttttcttggttcttgctcgctacatggntcagtgaatatttcttttctaaagctatgccttnttgttacatatggggacaagacttaactaaatgtnccttcttagagcatttaaaacaaaagttatcatcccttgtaataatcacgccattttctttaatatagggacatgacctaatcaagtggcccttttcaagcatttcactacacttctac

SEQ ID NO: 80078 - DNA, 344 bp, Zea mays
  unsure (1)..(344): unsure at all n locations
tctatcacttattatttgtttggaagcaaaatatttcaatactatgggtgtaaatgtcatggcacaatcatatagtattatttacatcactcccagcaatacttggtgtgagataatatatttcaaaccatatagtataagagtggacatatgctaacagtagtcatagagaaaaatggtgggttagagtggagttccaatacgccaanatatcatagtaccactaatcatgtactcaaannagttttaaaggtgaccaagatctctagcaaaaatgacatagatttaattctatacatggttttctaaactccaaatacttgtttaacatgtctagtttatct

SEQ ID NO: 80079 - DNA, 316 bp, Zea mays
  unsure (1)..(316): unsure at all n locations
atacacagtcgagtccactccctgatgcatcacaatatacatcacaaggcttggtgatggtccggtgagccaataccggagcagagggtaataacgtcttcaattgtcagaagcttattacactagaagaccaataattaatataattttaataacctgtgatgggcttacaagctagaaaatctggatgaatctggaaatatcagtagtcaagaaactcggactgggacagggtgnggttcactcagatatctcgattgtagactacgcatccttgaataacagcccaaatgattctcagcaaacccactgtaat

SEQ ID NO: 80080 - DNA, 273 bp, Zea mays
atatggcagtcgcaccaacaggatgtgctcgctcaatgggtgcagtatcccaacccccatcagctcgcatcgtcaagatggatattcttccacctgaagatgcacaggcaaggcaaagcccaacctcataccgagcccatgcaatggagttgacagatgacttgttgtcactgaacacatggacttgagaccaattgcctcgtgcatcctctttccaaataatgacacggccatcataactgcaccgaagcaggatagcgccatactttggat

SEQ ID NO: 80081 - DNA, 219 bp, Zea mays
  unsure (1)..(219): unsure at all n locations
acgactggtatgaagaattccatcatggaaactntgctttcatgatgcttctcctctctcaacagaattgtaggctacaccatggccccagtcttacaagccaccccagcttcctatgtatgacggtcatacagacccgtagcaattcctgatgagctatgaagcaaccatatcttcgtatggtggcaatacggcagtcatggccaaatcttttgtcat

SEQ ID NO: 80082 - DNA, 283 bp, Zea mays
  unsure (1)..(283): unsure at all n locations
cagcttagcngcttggttatttcttcttcttgagcccctggcgtccaatctgcgatgaagtctgccaacgcctatgactgaattgaggatctatggacatagtcaatggtgaattcgttaagttctgcagcccattttccaatccttccagtagcttctctatttctcatgatgtccttcagaggctgtgatgaaggaacaattatgcgatatgcttgaaaataatgccgaagctttctggaggccattaacacagcatacaacaccttctccaaatctatat

SEQ ID NO: 80083 - DNA, 139 bp, Zea mays
  unsure (1)..(139): unsure at all n locations
cttgatgcgatgtcttcgcgatattattgtactgatgaatcttttttattntctatacacctttctttangaggagaaagtttacgggcatagttgatttatatattacctatcatcaggccaaatcccaaatgacatg

SEQ ID NO: 80084 - DNA, 223 bp, Zea mays
  unsure (1)..(223): unsure at all n locations
tctcatatttatggtattcgggtgtatatgctcatatttgagaaagggaagcccgctctctaaatttgagaagaaatgtgatgatggctntcttcttggatattcatcaaatagtaaggcttatagaggtttcaacaaaactcatggtattattgaagaagcatatgatgttgagtttgatgaaactaatgggtctcaagatgaaagtgataatcttgatgat

SEQ ID NO: 80085 - DNA, 328 bp, Zea mays
  unsure (1)..(328): unsure at all n locations
acatgtgctaagcggcgatgccacagccagcccatgctagtcttagctattaagcatgcatctagaccggcttcttcttttgcanaatcaactaaatacagnttgccgtctaatacacccttaaaagctagtgaaccatcacttcttctaaagacagacacatctacatttgtaaacagacagttatatcccatattgcataattgactcacagatagcagaatatatccaagagactcaactaanaacacattagatatggagtgctcattagagatggcaagtttacctaaccctnttaccttgcctttgattccatcaccgaata

SEQ ID NO: 80086 - DNA, 242 bp, Zea mays
  unsure (1)..(242): unsure at all n locations
acttaagcaagaacatatgatgatgtcaatggacagcanggtgttaaggaggaaaaacgactatcaaaaatcccccttacttattgaacatatgcactatcaacattaaggtaagatacatatatgcaaaaagaataatactctctttngtacctttaacatagtgtagtgtacttcccatcttgaaagtatntaatctctcgagagcttctncacacttgtgcctgattctntatcctaac

SEQ ID NO: 80087 - DNA, 338 bp, Zea mays
  unsure (1)..(338): unsure at all n locations
nttctacagaggatngcgcatctgngaagcagtcatcgacgagctcatggcataagggatgtgcactgcagaacaggttagctgagctatttattgatcatgtcatcgatcacgtgtcactgtcgtaacctggcaacagcatttgagatgggcagatcccacgtccaatttttcaggccttgctggcaggttgctctgctggtggtctcgctgcactgctgcactgcgacagttttcgtgcgcgctaccctncggaggtctcagtaaaatgcctttcggatgctgggttctttcttgatgtgtatggccctagacatcctttggacgtatttcttaat

SEQ ID NO: 80088 - DNA, 172 bp, Zea mays
  unsure (1)..(172): unsure at all n locations
attgatacaagtgggcacgaaccgagatcacatnttttttaaattctaataaatcaactctcggaatctagcgaagctacatctcatcgacttgtctgggatttacaaccgattttaactccaatcggcgatctggatatcgaaatcagaggttaagttaaatgaattcgac

SEQ ID NO: 80089 - DNA, 281 bp, Zea mays
  unsure (1)..(281): unsure at all n locations
tacagacgaagccagtcatagctcaggcctttgttcaatgtacggaagatcatgaggagtacctccaggcatatgtccgaaggttcttgtgtcttatagcacaagcgcctacaatgcccacatgaaatgtcattgaggccatgatcatggggctntgtccaggaccaactgcccagtantttgctagaaagcccccatagactatggagaagctgctccagaagatagatgagtacatccgagctgacaatgacttcctctaaagaanggaggaagcatac

SEQ ID NO: 80090 - DNA, 244 bp, Zea mays
  unsure (1)..(244): unsure at all n locations
gagctctttattntcttgtgtgatagaaatatcactaattcctgaaatttctagctcaatggaagattggctttcttgagagcaacatttggtagcacatgataatatagtttctatttgagtacatgtgcatatgtgagggtggtatgatttcaaattagttaacacaacctcatgagccatttttaacatgatatgtgaatccataaatttattatgagagcacataaacatatcatggttt

SEQ ID NO: 80091 - DNA, 111 bp, Zea mays
tcagctgagcggacgcttgtgacctggacgggacgcatctccttgtttatgatgtcggcaaaaggacagggggccatctgcgctgcaaaactgctacgcgttgcgctagaa

SEQ ID NO: 80092 - DNA, 170 bp, Zea mays
  unsure (1)..(170): unsure at all n locations
gagttcgcctgcgcagaagaaatcgccgatgggttagtggtgagggccacctgaatggtttctcataaacattctgtggnngcctggaagtcagcgcgcacagtaatgattccttgtggtcctggcatctttaatatcatatatgtataatgtggaatggccatgaattt

SEQ ID NO: 80093 - DNA, 248 bp, Zea mays
  unsure (1)..(248): unsure at all n locations
tagaatcatgctatatttctatgtagttttaaactaanattattctaaggacttaaacagctagtaaagaanaatttgaatcgtgatccattatcacccctactcgggaggtaactaagtcgtctcttttatcttggctgactggctgtgttgacactaatgcatttatggactaatcgtatgtatatatcatataaaacacatattagtctacatatattgtcactcaatcactgaaagtaaactat

SEQ ID NO: 80094 - DNA, 226 bp, Zea mays
ctaagctgagctactcttgtggagagaaccaaacagggatgagaactcgtctggtctagtggtgttgagagtgctcttaatcgaacaacgcagtggtcgatgtcgcttctaatcactactaatagactacatggaatacgtgtgagacaatatgcaaagagtagtgcatactcttcttctttcctcctcctctcctatcctttttctctctttccttagcctttct

SEQ ID NO: 80095 - DNA, 196 bp, Zea mays
  unsure (1)..(196): unsure at all n locations
cttctcattatccttaatatanaactactcactcttctagccagctggccacttggtgcgatagctgaggaccggtgcctttgtatccttgcgatacacgaagntatgacaaccaaaattttcatgtagcccatcttctctggccttcgtttggtaatgcagctcatgcactcggtagaaagcttcagcatttggg

SEQ ID NO: 80096 - DNA, 407 bp, Zea mays
  unsure (1)..(407): unsure at all n locations
agcacacaattaaaccactactactccaactattgtggcctgtctccttgtaggctggaggtagaggaaaaacaagtactattggaaaagagggaaaaaagggggaacccanatacgactcataaagatgggcgaagatggctatatgcatgatggagttgagaatgagatggatgaattcaatttggtaataatacagganatccctgannattggaagtcagaaggccaaacatacgcanaanatgangaaagactaccatttggtcgacatcagaaatgtggaagggatcttcgcctanaaagtgtccaacaacttatcacctacaataatattntgtattgaggctacattatttgtagagagagttaaatatanggacgacgatgggtaactgatcatttta

SEQ ID NO: 80097 - DNA, 249 bp, Zea mays
  unsure (1)..(249): unsure at all n locations
gtgagtattctaaccgtgtgtacaaactctctaaggcgctttatgggcttaagcaagccccaagaacatggtatgaatgcctaagagattntcttatcactaatggcttcaaagtcggtaaagtcgatcctacgctctntactaaaaccattgcaaatgatttgtttgaatgccaaatttatgttgatgacatcatatttgggtctactaaccaatctacatgtgaagagtttagtaggaatatgattc

SEQ ID NO: 80098 - DNA, 198 bp, Zea mays
  unsure (1)..(198): unsure at all n locations
attcatcatcccattaatcaatacaaccatatttttactctntgtgattccattcatgacttaccatgagtggtcggagggtagagtcttcatgaccgaggagcaacgacgattcgaaccgattatacccagctggggatccctaaccacacgacatatgtagcacgtaacccttgcatatgtcaatcattcccacag

SEQ ID NO: 80099 - DNA, 227 bp, Zea mays
atgctagtcttatctattaagcatgcatctagaccggcctcttcttttgcaaaatcaactaaataaagttggccgctaatacacccttaaaagctagtgaaccatcacttcttctaaagacagacacatctacatttgtaaatagacaagtataccccatggtgcataattgactaacagatagcaaattatatccgagagactctactaaaaacacattagatatg

SEQ ID NO: 80100 - DNA, 268 bp, Zea mays
  unsure (1)..(268): unsure at all n locations
gagtatcctaaccatgtntataagctctcaaaggcgctttatgggctcaagcaagccccaagagcatggtatgaatgcctaagagactttcttatcactaatggcttcaaagtcggaaaggctgatcctactctcttcaccaaaactgttgcaaaagacttgttatatgccaaatctatgttgatgatgtatatttgggtctactaacaagtcaactcgtgaagaagttagtaggatcatgatacagaaaatcgagatgtctatgatg

SEQ ID NO: 80101 - DNA, 470 bp, Zea mays
  unsure (1)..(470): unsure at all n locations
ctcagcttctggacctccactcttnatcctacgtcanagcatctatntanatcatcttatgaatcattcaactgggtgtccaaaggctcattctcaccatcgaanagattgcaaaatatctccgccatcttgttgatgtcttgcctttaccaagagttgtccatctcaccttaatgcattaacttggtgaggcccttgcttcttcttccttctttgacttagcttcggaaagatatcaatgctcacccttggctactcacagtactntgagctttttgcacctatcctctctatgtgaccgtgctttgcatggaacaagcttgaacatctttttctcttattgccttgacgtcctcgctaccaccagatcttaggtcacctcgtccttgtcactcaacactctgcccacctctatcagtgcatcttacactgtgtcgatttctcgaccaccctacaaaccttctaaattt

SEQ ID NO: 80102 - DNA, 354 bp, Zea mays
  unsure (1)..(354): unsure at all n locations
acttaaaatttcgtcaaaagctttgggggcttcccgctgatccactagacaactncatcanggtcgccgtggatgaatctctgctcagaggaatatgccccagccctagcacagctgtcctttaatttcttggacattccaaggatatttcataacacctttctttggaggcacgaagctcatcagcattcttttgtgctcttgatctttcgatctcgcaaatctcatgcttcattaccctcaactcaatnttttgggtggnntcagcaaccttctttntagttctttcacttcggctttatgagcttcgacttgtgcagtaagttaagcctcgtagatctcagcctatccact

SEQ ID NO: 80103 - DNA, 285 bp, Zea mays
  unsure (1)..(285): unsure at all n locations
tctaaggggagaacacgtgatnaggtngactaacgtgcaattcgaaaaagatagaccttgttcatcttgtcaagcacggaaacaggtgggaggctctcatcacacacaanatgtgatgacaacatcaagacccttggagatgctgcatatggaccttttcggacccgtcgcctatctgagcatatgaggaagtaagtatggtatagttattggtgatgacttttcccgcttcacttgggtgttctttttgcaggataagtctgaaacccaagggacactcaagcg

SEQ ID NO: 80104 - DNA, 285 bp, Zea mays
  unsure (1)..(285): unsure at all n locations
ctcagctttcttgcgcataacctgcataaacactcgattcagctgtgccatttgttctgagctgatacaggaaactctgtgggtttctgataagcaaaattataaccaaaattgtcatgcaatccatcttttctagccttcgtctgatagtgcagctcgtgaactcgacaaaagctgtccgcaaacggctccatcgcttggcttcggagggcccagatataaacactaagcctaacgatagcattagaagtcaactgatgaaagtagataccanacctcttcagt

SEQ ID NO: 80105 - DNA, 192 bp, Zea mays
  unsure (1)..(192): unsure at all n locations
gaatacttcttgactatacaaacattgntgagaaacagactaatacagacattggtgatcttgcacttgcatgcctctatgtaataagctaaactaagcagcattgtacaggatactggtacttttgcacttgcactgcctcttcttgctatgtagagtcctaccccatagtctggaactagaagaattctg

SEQ ID NO: 80106 - DNA, 297 bp, Zea mays
  unsure (1)..(297): unsure at all n locations
gatatgagggttgatctttaataataattgtagaacctgtgttatacaacacaatttatatntaaacaaagccttgattcaatctctaagtatctcaaacagtgccatcaagacagaataaaaatctgattttatgattcgaattcttttaagtctgaaatcaggatcgttcgagttgacgtctcgggttcccaacgttttggtgaacaactccagttttcccaaatataanaattggtaataattaatagaggcacaacatattataagatagcattcatccgatcccgttgacat

SEQ ID NO: 80107 - DNA, 112 bp, Zea mays
  unsure (1)..(112): unsure at all n locations
acaaaaactagaagcaaactaggtaaaactgaattgatctcgaaattcacccaagtaactttggaaatgagatgntctaaatgatccactgggtttaaaggagtagatctga

SEQ ID NO: 80108 - DNA, 295 bp, Zea mays
  unsure (1)..(295): unsure at all n locations
aagcggcaagaccgaccgagccgagggattcccacgcctctgggatacagatacctcactcgtnccttncgcgaanagcaactctcgctcacacaaacatncctggtaccgacagagtccagatgctcgaaacaagaggaanaaaggcgcagcttcgcaagcgtggcgagggtggtgtttttctggcctcggcggccgcagaaagcacacgctacaagatgatctgatcctgcaggctcgggtcttcacgctgaagggagccgtagcaccctcggcatcgacgacgtcttcagca

SEQ ID NO: 80109 - DNA, 287 bp, Zea mays
  unsure (1)..(287): unsure at all n locations
ctgagatcaagaatatntagttcattcctcaacatgttataacgggtcttatcaagtggcttagtgaaaatatccgctaattgatcttccgacctcactccttctaaaatgatatcttctttagcaacatgatctctaaggaagtgatgacggatatcaatgtgcttggtgcgagagtggtgacaggattattagcaattntaacggcactctcattatcacacaacaaaggtaccttttctagaactacgccatagtctagaagagttngttcatatataaaatct

SEQ ID NO: 80110 - DNA, 319 bp, Zea mays
  unsure (1)..(319): unsure at all n locations
ctgtgtaataaagaagtgacccccacatcacccctgccttgtaccagaaataattgaataaaagtatgccgcgtttctttttccattacttaccctatgactcttaatctcgggacgagattcttntatggngggaaggatgtaacacccctggtggtactggtactaaaacttaagcatagcatcataagcattggcattgcatatgtttgatacacctagagtgcattcactangtaaaaattttagacaagttgtatttgtttgatgtcttgcanatagaaccctgngaacttaaccctaaatagggagtacaggg

SEQ ID NO: 80111 - DNA, 317 bp, Zea mays
  unsure (1)..(317): unsure at all n locations
cactactgaattaccnatatacttcaacggngattgtttgtcttgtattcagaatgatatccataaaggatatgatgaatctgtgatagattcanaaatttcagatcattaatgaacatcagtaatgaattgtcatttccaactgtgttatggtggagtcacggaagtttgcatgctcctgacttgtgattaactgcatgtactggatgtacaagttcccctatggttttaatacgtgaaanatcgtgaaagaattcccatgcgtacattgggtatgttcccaatctcaccaccgcagcgtacatatatgggcacac

SEQ ID NO: 80112 - DNA, 267 bp, Zea mays
  unsure (1)..(267): unsure at all n locations
ctcagctgatgtcaaatcaaaacttcagtgcaactttgaaaatgcaagaacatcaatgccttatcttatgtttngaatctaagtctagctcaaatgataattcttgcaaacattgtgccaaatatcatgcttcttggtgtctaactaaccatgcaaggaagaatagcccacangtgaaggtcaaagaaattttgaaaagatgctctatcaatgatgggttaaagaaaagtgaacccaagtacaagtcccttaagcccaacaatggaa

SEQ ID NO: 80113 - DNA, 256 bp, Zea mays
  unsure (1)..(256): unsure at all n locations
tcataattaaatggccagagtccgctctaccgccagggttgagcgcggggggaggaactgaagcttcngagaccgtccctatctccgaagccatgcaacgatcccggctagtgacttcggaaaagattcctattgatgatgcagaacaagccatcgctgaagcagaaggagaagatgctgaggaaactgactccgaagatgattatcaccttgccacaccaagcaaacccagtcatttggacttcgggaaatctac

SEQ ID NO: 80114 - DNA, 274 bp, Zea mays
  unsure (1)..(274): unsure at all n locations
accctcatcacatttcttctcaaattagaatgtcggctttcctttctcaaaatataacattggcaagcgaatactcctaaatatgagatatttggctctctaccaatgagcaattcatatggagttttcttcaagagcttgtgacaatatagtctatttgatgaatgacaagcggtatttattgcctcggcccaataagaatccgatatactatattgcgctaacatagacctagccatatncaatgagagtctattctttctttcaacaatac

SEQ ID NO: 80115 - DNA, 485 bp, Zea mays
  unsure (1)..(485): unsure at all n locations
taggccttgaactcgctgtctgttcttgccaaatcatcgtatagaaagtgtgactggtcgttgtatgatgagcaacgagcacgactgatcaagccccactattctaccaccaccacttcaaacgggagatngtttcatataatataanaaaacacagggtgatagagactacatcatatgctgtgttttatcccataatggatatctctgcctagagaccatgattntagcagcaagtcacattgcctatcactgagagatctacatcatactaatgatgattacctacacatgtttaactcacaataattattggatacttggtctacttgattcaatgaagatacccttatcatatatattagaaaatatgataatagaggatatatgacatctctaagtatctaaaactttgaatattnttcaaaatntaaatctcactctatttaccgttacaacattntcatactattaagaatatgata

SEQ ID NO: 80116 - DNA, 228 bp, Zea mays
  unsure (1)..(228): unsure at all n locations
tagctcagcttgattatcattaaagtccactaaatatagctgacccatctaacactccttaaatgctatngaatcatcacttcttctaaagacagtaacacctatatcagtaaaaagacagttgtagcccattttgcataattaagaaacagaaagcanattgtatataaagaatatacaagaaaaacattggaaatagaatggtcaggagaatatagctatttaccc

SEQ ID NO: 80117 - DNA, 240 bp, Zea mays
  unsure (1)..(240): unsure at all n locations
agaagcagcttcgcagatcaccgaacctatctttatgtttgacatacaacagaagtgctgtaggctctaactatccgaaagccgaaaaaccttgataagggtttgntcaataacaaagatgtttttgcatggtcagccaatgatctatgcgaagttaatatggatgttattgagcactcgctcaatatcgatccatccttcagacccagaaagcaaaggcttcggaaaatgtcagatgat

SEQ ID NO: 80118 - DNA, 285 bp, Zea mays
  unsure (1)..(285): unsure at all n locations
tctanagggagaacacgtgataggttngactaacgttcaattctaanaagatagaccttgtgcatctngtcaagcaggtaaacaagtgggaggagcgcatcacagcaagaatgtgatgaccacttcaagacccctggangtgtgcatatggatctcttcggacccgtcgcctatctaagcataggaggaagtaagtatgggctagttattggtgatgactnttcccgcttcacttgggtgttctttttgcaggataagtctgaaacccaagggaccctcaagcgc

SEQ ID NO: 80119 - DNA, 254 bp, Zea mays
  unsure (1)..(254): unsure at all n locations
tcttctcatttatcacctacaaatcattatcaattccaaaggtgtactccctcacttgcctttaaaaatgatgtacgatgcctttgggcgaagtgtagcagacctctaccatcctcattctcactccctgtacctgccatggntagcttgcagcaaacaaagtcacaagaagttgcctaccaactaaaggaaataggtggtggcacactatatgttcactcacacttgtccatttcagttcttacatggtctta

SEQ ID NO: 80120 - DNA, 97 bp, Zea mays
actgctggaatatcttttttgtgagccctttttgttttaaatgtctgtttttcacttaacgttgtgctaactatttccaaaataaagtcgatgtcgc

SEQ ID NO: 80121 - DNA, 211 bp, Zea mays
  unsure (1)..(211): unsure at all n locations
acataacaaacatcatagaatatgttatatcatgccccacaatgagcaaacaaaattgcaatatatgtacataagagaaactctttacttacaaggacaacaatngagcatccgtatatagtcgtggagacgttngtggtgcttcggttatgccacttcttcgcagcttcacaaaggtcattaaaaataagctggcaccaatcggtctcat

SEQ ID NO: 80122 - DNA, 318 bp, Zea mays
  unsure (1)..(318): unsure at all n locations
gcttctanagggagaacacgtgataggtctaaccaatgttcatttcgataaagaaagaccttgtgcagcttttcttcatggaaacaggngggaggctctcatcacaccaaaaatgtgatgacaacatcaagacctctggagctgctacatatggacctcttcggacccgtcgcctatctgagcatatgagggagtaagtaccggctagttattgttgatgagttntcccgcttcacttgggtgttctttctgcaagataagtctgaaacccaagggaccctcaagcgcttcctcacgagagctcataatgagtttgag

SEQ ID NO: 80123 - DNA, 224 bp, Zea mays
tgttgctgtgttctttttttgccctgtttgagaaggctttttatatcgcgctaatggcactgtagacgctctgtttggctaacaggtggtgtaagactcagctgcagactgctctaatatccgtacaattcagacttgcaattggccggattcaatatacagagaaacgtagatactgcgcagctgccgctgggtcgatctatgtaaggtacgtgtgtgtgtct

SEQ ID NO: 80124 - DNA, 320 bp, Zea mays
  unsure (1)..(320): unsure at all n locations
tgcgtcctctgtctgacactatcttctttggcacaccatgaagacnaacgatccgagacatatacaactctgccaatgctgcactgctgtagntggtcttgacaggtatgaagtgggctgacttggtcaaacggtccactactacccaaatggaatcgtagccggctcgagtgcgaggcaatccgactatgaagtccataccaatttcatcccatttccactganggatctgcaacggttgcaacaatccaacaagtctatggtgctctgccttaattcttcggcaactatcgcacatagccacatgctctgcgatttcc

SEQ ID NO: 80125 - DNA, 117 bp, Zea mays
  unsure (1)..(117): unsure at all n locations
cttttgaattccataaccgctattctatggggtttgggtccatgaaatctatagagacttggtagaccttggactaatgagcangttctattaatggtgatttccctgttcttaatc

SEQ ID NO: 80126 - DNA, 264 bp, Zea mays
tcatctcgctgtatatacgctgttattatcaaacttcagagatagactggctttaatggtttcaactgaactaacaccctcttaatatcataagtgtgtaaaattatgtgatgcttgtttactttcagtgacatctgagtaaataaattccacctaaaagggaaaaaacaagctaacactcatattaattattctcataagatctggtggatgcaagtactcctactgccatgtgtgcgaacaccactaaataccctgacaatg

SEQ ID NO: 80127 - DNA, 253 bp, Zea mays
  unsure (1)..(253): unsure at all n locations
actcagctatcaatcatcaaacaattggatcagagaagctagaactgaattcgaagcttanagccgaagttcatatcatctcataaatgaagaaagcattaacaagccttcaagacanatgcttgaactttggaataattgtattggacgattaaagaagatattttacttctgttggagccagcagtgggacatttaacccttcggcggagaattaccccangccttcgatcatattgaagctganatcgaa

SEQ ID NO: 80128 - DNA, 234 bp, Zea mays
tgccttgattgattcagagggcgatatcatattgacttggcaataataagaccatgagaatattttgacataagcatactagaagtaataaatggctgctataacattaaccggagttgtacattgatgaacacatctactgatacagagcgatgtacaagagatcagaactgctgagaactatccatttcctttaaaaatcacatatctataggggaatggcaaatctacctg

SEQ ID NO: 80129 - DNA, 238 bp, Zea mays
  unsure (1)..(238): unsure at all n locations
tatgtagagagcctgtgcgttgcaagataagtatgcatgggagaagaggctaccttatgaggaattctgctacaacaacagttaccaggccagtttgaagatgtcactatttcaggcactctatgggaggagttgcagaactccattgcattgggatcagcctatagaanagcaagtgtttgggcctgacattttcctcgaagccgaagagaatatcaagatggttcgggagaatttg

SEQ ID NO: 80130 - DNA, 463 bp, Zea mays
  unsure (1)..(463): unsure at all n locations
atgagtgcgccaaagcttgtaacataccattaacacatgatcaagtatttttcattggaacttgcacccaaatggtcaattctcggtaaagtctctttatctggcccttatcaaagaagaggtaccgaacctaaataagagactatggagaataaaagcacccctcanaatcaagaattttctatggtatcttcgtaggggagtgctcctcaccaaagacaacctagcttaacgaaattggaaggaagttagcatgaatttctgtcatgcaataaacaatcagcacttgttntcgatgccgattgctcgatggtatggacatgatgtttgggcgtangagtccaaaccaacttcactcaatatgtcgggatggctttcacattgacaaaaataaaaattaccctatngagagcacattgtggcacttggtatangatgactggtntcaaagaaatatatgctc

SEQ ID NO: 80131 - DNA, 163 bp, Zea mays
  unsure (1)..(163): unsure at all n locations
ctactaagtatagctgatcctctaacacttccttaaatgctactgaatcatcacttcttctaaagacagtaacacatgtattcgtaaaaagacagntgtaacccaatntacataattgcgaaactggaagcaagttataatctatagaatctatgagaaaaac

SEQ ID NO: 80132 - DNA, 272 bp, Zea mays
  unsure (1)..(272): unsure at all n locations
tctaaagggagagcacattntaggactaacaaatgttcattttgagaaagacatgatttgtagcgcatgccaagcagggaagcaagttggtgcccaccatccacacaagaacatcatgacaaccgacatgccactggagcttctacacatggatctattcggcccgatagcttacataagcatcggcgggagtaagtactggctagntattgtggatgattattctcgcttcacttgngtgttctttttgcaggagaaatctcatacccaag

SEQ ID NO: 80133 - DNA, 252 bp, Zea mays
ctaagtgttatgaagtctttgagcaactaaagacactattgaccactgcttcggtattggctcaaccggacatactaaaccttttgacgtatattgtgatgcatctggcagtgggctcggctgtgtactgatgcaagagggccgagtgattgcgtatgctttaagggcagtgcgccgacatgaggagcattatccaactcatgatctggagctagctggtgtggttcatgccctaaagatttggcgtcacta

SEQ ID NO: 80134 - DNA, 361 bp, Zea mays
  unsure (1)..(361): unsure at all n locations
ctcagcttatagaacaatttaaggcttgcttagaaatcaatatggttctncttgggacttggcatgatttgccccctttttcacagcgttttcccgaagattaatgtcatatctctttcttatgccacatgcattatgatgtatgatgcttatgttatgcaaggatgtgtgatgatgttatgctatgtaaggtgatattccgaagatacacgcatanttgcgcgataaaacacaantcttttgtgaatcagcattgtcttttcgctatatagcctccttaggagcttcttcgccttttactctcagcggaatcagcgtgacttttcgctgtaagctctgcatttccttangaacgtctttg

SEQ ID NO: 80135 - DNA, 334 bp, Zea mays
  unsure (1)..(334): unsure at all n locations
attcttcatcccaacatgggctagtcngcggtgccagagccattccatgttagtcttagcanataagcaagtgtcgagttcagctctatcgaaatctaccaagtatagctgaccctctaacactcccttaaatgctactgaatcatcacttcttctaaagacagtgacacctacatcagtgaaaagaacagtgtagcccatttgacataattgcganatgganagcacnatgtaatctaatgaatctacaagaaaaacattggaaatagaatggtcaagagatatagcaatattacccaatcctttgaccaaacctttgatgttcatcccgaat

SEQ ID NO: 80136 - DNA, 305 bp, Zea mays
  unsure (1)..(305): unsure at all n locations
ttgacaaagtattatcagcgcgaatgtattcatccatcttctgaacaatttttccaggtctgangnnggtttctggtgaaagattgggccaaaggtcttggacgaagccccttgatcatggcctcgatgacaatctcattgggcactgttggcgcttgtgccctcanacgcaagaaccttcgaacatagcctgaagatattcctcgtgatcctgcgtgcactggaacanagcttgagcagtaaccgacttcgtctgaaacccttggaaactagtgatcagcatgtccttcagcttctgccatgat

SEQ ID NO: 80137 - DNA, 536 bp, Zea mays
  unsure (1)..(536): unsure at all n locations
tactcagcttacatncgaggcccatgtcaggaagcctggccattcttcaggtgtcattagtgccatcacctaagagtccgacctagacagaagctgcaacaacgatggtgggcatgatcgtggagactcctacccctgaaccctcgtccacggggcagtggagtaatcctgtctaatangagcttcattgtcatgatgttcagtgtcagcgtggcatagacctattgaccttgngaagtgaccacaactcttcttggtgtctctgtcatctcatcattgngttgtcgtcagtgttgtcatggtcataagactaaccgtcctaattcctgaagtctaccatganaataatctggtctcccaaagcaatttgagtggtgtcagagttcgagtcagagatagcccgaatcaggtggtgtcgcatggagttaagatgaatgcacatcgatctataaatcttgataagaatgtcaagcgctgggtttagggaaagctgaatctaaggtctagcatgaacctaaggtcaatatattctctct

SEQ ID NO: 80138 - DNA, 256 bp, Zea mays
  unsure (1)..(256): unsure at all n locations
gaaagcagcttcagcagatcagccgaagcctatgctcttatgtgaggacatagcagagcagaagggtgctgtaggctctcaattatccgaagagcangagaaaactctgataagggttttggtcaataacaaagatagttttgcatggtcggccaatgatctctgcggagtcaatagagatgttattgagcactcgctcaatgtcgatccatccttcagacccagaaagcagaggcttcggaaaatgtcagacgat

SEQ ID NO: 80139 - DNA, 401 bp, Zea mays
  unsure (1)..(401): unsure at all n locations
atcgtcgaagcttatgagtttctggatgagaagtggtcacccatgntttggtgatgaagcaccagaagaccaatcaaggaaggaatccatgtggaagttcgtaagagaaagggttgcgtgttggcatcaatgcttactcaataagctagctgccaagcgaaagctgaagcctgaagatgatctttgagtagccagaatcagcatttgcaatcgacaaccagatgcttctcanaggtcagattttgntgaagttccatcttctcgaagagtctgcanagtgaagatatgtagctgaagtaaagctatacccataacccttctaagccgaatctcgaggacgagattccttntaagtgggggtagattgtagcatcccaaaaattcaaatcttgaaatttctc

SEQ ID NO: 80140 - DNA, 213 bp, Zea mays
  unsure (1)..(213): unsure at all n locations
gtcagcttatcaaatcaccaagttagctgccctctacacttccttaatgctatngaatcatcacttcttctanagacagtgacacctacatcagtanaaagacagttgtagcccatttgacatagttgagatacgggaagcaaattgtaatctatagaatctacaagaaaaacattagaaatgggatggtcacgtgatatatgcaatttaccc

SEQ ID NO: 80141 - DNA, 389 bp, Zea mays
  unsure (1)..(389): unsure at all n locations
ctcagctataggtactgctcactagatagacaaacgctcggatcaatatgccactgccacttcacttcttgcangccacttagtcctgtccatgatctatctgactatctgtatagctcanggagacgatagcctgtcattactatcttatctgcanacattntgccagtctttggcataatgtgccagtgcattggcaagttgaattcctgccctttagattggttccctgtantcaataataagaaatcattaataaccattcaatgccatctctgaagaatcgtgtgttgcagtacataatatttnnttgtggtagtngcaaagtacaacgtatactcatcgatcgaaataatgaacagaacatagacccatatanacttatccta

SEQ ID NO: 80142 - DNA, 162 bp, Zea mays
tggattttagaaataaccaaactaggttgacatatgatgtagcaaataacacagcggtaacttaatagtttggtagctactattttctactacatggagagaatcacttgctgagcactgaacaataacgttgcagcgaacgtgtcctacgttttccactaa

SEQ ID NO: 80143 - DNA, 243 bp, Zea mays
  unsure (1)..(243): unsure at all n locations
tgtattaaaatgggcttatgatactttattggtaagatttggacgtgtttgaataattatctcatttanataagatttaactatgtgatatagccatagcgacgagctacccaactaagatcgactacaaccgaggacaacccacccatctacgttcgcttggggacaatcgatattcacatttgtattcacaatctcaatgtatcttaatataatggatggatctcaatggatggtaataaa

SEQ ID NO: 80144 - DNA, 233 bp, Zea mays
tcctggcacagaagaaaattctgtctcttcacacctcagtacctatatcaactgctgaatttagcgaagtcattatgcttggtggctacagacattttgtggtgcataagtgtgtgactgaatcaactttttaagcatgatcactactgttaactcactgtacaactatcattttttacaacagggagcgacattgtactgattagtcgcgcttaagactgtttttaactctt

SEQ ID NO: 80145 - DNA, 251 bp, Zea mays
  unsure (1)..(251): unsure at all n locations
agatagtgagtaccctaatcatngttacaaactctctaaggcactttatgggctcaagcaagccccaagagcatggtatgaatgcctaagagatttccttatcactaatggcttcaaagtcggaagagtcgatcctacactctctactaanaccattgcaaatgatcntgttgtatgccannnattatgtgatgatatcatatntgggtctactaacaaatctacatgtgaagagttagtaggatatgatc

SEQ ID NO: 80146 - DNA, 188 bp, Zea mays
actcgagtcacggacggggcttatggccgcataattcacagtgagaagcctccaattgtgtagcctccatctatacccgtgtatcaatccgtgcctgtcgtaactgtcgacttgtcacagaaagattcctcaccagagttcaactgtgtcgtggatccgatgctcgccgtggacaacacgagacatta

SEQ ID NO: 80147 - DNA, 269 bp, Zea mays
actaactggcgcccatgtgcgctacttgtgtaacgacagggtcccttcgatctgggacgactcttgtgatctagaacaggctctccaagaacgatgggataatggcaatttcttttactcagactaatggctcggtgggttcaggtgtctgatgcatgcatgggtacatcaaggctacctggaaatgatcacaggaggatcacctgttgctctatcatggagaatactgctacttgctgccgttgaaactattaaataattgtttttat

SEQ ID NO: 80148 - DNA, 315 bp, Zea mays
  unsure (1)..(315): unsure at all n locations
cttaactactttcttttacacggtgctccaggatactgcatatcttgtcccttgcatgttcattcctcgggggtcggagcttgaatgtacgttcgtcactatgcattatgtccgccgtgattctgcattctcagaaaacactgctactccaaccacaaatctttacagtactctctacaagccatatcgtgatctgctagaattacacagctttagtggacaatcagttgcgtctctatctgtatacatcagcgtcccataatctccttatctnatagatgcgttaattcttctgaatgcctaatatgtgtcatt

SEQ ID NO: 80149 - DNA, 193 bp, Zea mays
tggctctctggtaagtcgctccatctgtttttagaccgaacgacatggaggtatagcagaaagctccatacggggtgatgaatgctcgtttttcctcgtcttcctttgccaggatgatctggtgatacccggagtagcaatccaagaaggacaacacagaacacccggcggtcgagtctaccacctggtctat

SEQ ID NO: 80150 - DNA, 310 bp, Zea mays
  unsure (1)..(310): unsure at all n locations
gctgttcagtgcgtctgctgacgcactcaccgtcaatccgncttcggtcacgctaactgccatatccgtccctgctgctaactgacccgcgccccccacgtttgggtggtttatcgggccacacatgaggcgccacgttgatgctgcattggtttaaaatattaccttntgtcttccgcagcggccctaaagaggcgcactacangcgcgcgcgacggttcgctctttccgcacccgaagtccagcacacaaaccgtatgacttgtggacccgggcccncatgtcatagactangtttgtcttctacatc

SEQ ID NO: 80151 - DNA, 320 bp, Zea mays
  unsure (1)..(320): unsure at all n locations
tcgacggaacacttgaatcgtcctggatgcgctgtcccgtggcagagtatttgcatatagcttgcattgatgagggaatggcgtcaggttgaattgtgtcaacaaaggaaactatcttgctatttggcagacaactcgcggactcgnctgttgcgtcaccgtcggatcgcggtgtaagaataaagggagggctattcaatgcaggacacagaacaactgcgactttcaagcttcaatacagggcccgtaaaactgtacgcggccttcgctgctaggcgctcgccattgactaaaagagacttcctttctttctttctttc

SEQ ID NO: 80152 - DNA, 387 bp, Zea mays
actcagctctatctgtatttcatgattgcagctgcaaagaatgacctatacagattgttgtaagctattcggtaagtgaagcatatcagactcagctttcaaaaacagctgcagcggatgctgacattgttgaaccgactgtcacatgataaactttcacctgtcacattctggatgagcccagatcccaagtatgtatagtgacccgcttctttataaaggaaacttctactacatggacgatctgtatcatgacactccagtgatataggatccaaccactatgtgtgccctgttgttatgcaacgggaattgattgatcacattgctcattgactttcagtatctattgccactaccgacacgtttactagctcgtcttctaac

SEQ ID NO: 80153 - DNA, 354 bp, Zea mays
  unsure (1)..(354): unsure at all n locations
gagttcagctctatcacaatctactaagtatagctgccctctacactccttaatgctttgatcatacttctgtaagacggaccctcatagtaataacagtgagccattgactattgaatcaaagcaatgtattaatgaacacaaaaaatggaaggaacgcagaaatactattttccacattgacaactggtccatccaatgatactgtgggactggttttatagagaaactnttctcctgatgggtggaccgttcagacactgacccgagctaacacaatagtagctactagacaatgttggctcctaaaagactggacaacagctgcctggtgccactatgacactgcgtgat

SEQ ID NO: 80154 - DNA, 356 bp, Zea mays
  unsure (1)..(356): unsure at all n locations
ctaagcttaacacttttcgggatacttcggatattggtgtgatacatggtaattcttcttcacgatacatgattagataggaagggtgttttttcgccactcanaaacggtacgtatgtaacgnttcatgcatcgtanagaactgaaccataaagaaaaataagacatatatattacatacaggattacaagatattacacatngtacatctaagatgttttacaatagcatntagtcctccctaagtaccacttctgcagcttcgntcaacagtcgatcgacaacttcatccataatagcttcgggcatctntntaatntcatcatcacccctaggccgagcacncggagatact

SEQ ID NO: 80155 - DNA, 288 bp, Zea mays
  unsure (1)..(288): unsure at all n locations
gcttagtatatnttgtctctgaagttcttagtttatcaaagataaactatacagagttggagaanggtgtgtatgctgtgctaatggcctncacgaagcttcggcattattttcaagcatatcacataattgttccttcatcacagactttgaaggatattatgagaaacagagaagctactggaagggatggaaagtgggccatggagcttaatgaattcagtattgactatgtgcatangtccctcaattagtcctanggcgtagcagacttcattactgattgga

SEQ ID NO: 80156 - DNA, 247 bp, Zea mays
  unsure (1)..(247): unsure at all n locations
aaaactggctgacgtacgggacttcgcaaggtacctaactgcgtttgacttgacccgctttatgagaatgcgaataattcgtctggattttggaacaacagactaccttagaataaantataggaaaagaaccgcataactagggtctaggagaaacattctcaccccaaagggaaagaacgacttacgagcattgaataaccacttgtgactaccgtgactacgtacttgttaaacttacatacga

SEQ ID NO: 80157 - DNA, 369 bp, Zea mays
  unsure (1)..(369): unsure at all n locations
ctaagcttcactacctattcctagcgttggaaactctgtggctaagattcctgactagatctctagtntccatatgttcggacacaattctaaactcatacacagcatctangcatggtgtccctggcgtcatgtngcactaaagcctagtcagcctgaaggttagctccagcgggctctgtactagcttcttctttttctcatcaatcttaacatanaaccattcagatntccagtcggtcggccatttagagcgatagctgaccactggtgtcttcatgtcnttgcgataagaaaaaatgtagcagccganaatctcatgcagtccgtcttccctagccttcgtctgataaatgaagtcatgtactc

SEQ ID NO: 80158 - DNA, 195 bp, Zea mays
gaggctttatgcaattgagcagactctctggctatagcagctcaacctggatcaataccgttacttaagttagcgtatgattgtttttctgcataagtacgcagagatagctgctgaagcgactctgggcaaaaggacctgccaattctgaagttaaactttattttacggcatcaaactacacacaaaactgac

SEQ ID NO: 80159 - DNA, 340 bp, Zea mays
  unsure (1)..(340): unsure at all n locations
ctttatctatagcatacagaatttgatctttgcatagcanattgtaacaccaaattattgtgagccatctgaggcctaccttcatctatagtgagctatgatattaaagctagataggctgtctggttgacaacatattaacacagctacaggattgagtagtgagctgaattatcttttacactatattacctccatacaatgagctgccaaaaactttgaacacactcattctgactatgatgcctctcgaaatacaatttatttactacctatttcaactcgaatagttaagggcgccatatgactgttaggcaagtattctttcatgatactcaac

SEQ ID NO: 80160 - DNA, 171 bp, Zea mays
  unsure (1)..(171): unsure at all n locations
cgcccatcatccacacaagaacattatgacgaccgacaggccgcttgagctactccacatggatctatttggcccgatcgcttacattaacatcggcgggagtaaagattgtctagntattgtggatgattattctcgcttcacttgggtgtgtcttttacaggaaaaatc

SEQ ID NO: 80161 - DNA, 282 bp, Zea mays
  unsure (1)..(282): unsure at all n locations
agcctctgctcctgtatgcaagctctcaaccatcatctctgtcgcatctgacgaaggtgacaaagacacctcagcaacagactggtgtctggccatttctatatgaaaagtgtgntcttcaactggctaacgctggtttgaaggtggaaaacgctcgaaacaagctctcaaggcagagtgtgctctaacagcaacaagcgcaaacaacaaatgttgtgtcaatgctcgtatgcagtcgttcctttatatttgtagaattnntgaattaaccattatactcac

SEQ ID NO: 80162 - DNA, 83 bp, Zea mays
  unsure (1)..(83): unsure at all n locations
ctggagcttctgagactgctcccatctnccaagctatgcaacgatccggactattggttcctgaagagatccctactgaagat

SEQ ID NO: 80163 - DNA, 204 bp, Zea mays
cccatctagcttacaagatgagcagacagactattgtattaaggatggtaacttatttttacactctaagtataaaatcaaggtgattatgaaaaactccgatggtgtctcatggatagcctatgaaagttcgccggattttgcgaggactcgatgcgaaatgccaaatcaagcgcaaatccaggacaacactctttatatatc

SEQ ID NO: 80164 - DNA, 97 bp, Zea mays
gaatgaaagtgagatgtgatttagcttcagcaagagaacaagagagaggggagaggaagaacccaatcacaattagttaagatcaaataccaagaac

SEQ ID NO: 80165 - DNA, 180 bp, Zea mays
  unsure (1)..(180): unsure at all n locations
gagcgagatttatctttcatttctttccctctttttcttttatgntttaaggtangtttgaactacaagttatcttataaaatttccaaanagtctattaaaattataatgtcttcttactggtgtataattctctattatcaaaatttgggcttaaaaagtgaatagntctctctggat

SEQ ID NO: 80166 - DNA, 321 bp, Zea mays
  unsure (1)..(321): unsure at all n locations
tgtcaaggttggctctattgaaatcaactaagtatagctgaccctctaatactcccttaaatgctacttaatcatcacttcttctaaagacaataacacctaaaatccgtaaaagacagttgtagcccactttgcataatngagatacagaatacanattgtaatctaaagaatctacaagaaaaacattggaaatggaatggtcanggtgatatagcattttaccaagtcccttgaccaaaccttgattacatccncaatgtatagcgtgttgggaatctcgttttctcataggnggaaacattctttctcccctgcatg

SEQ ID NO: 80167 - DNA, 303 bp, Zea mays
  unsure (1)..(303): unsure at all n locations
ttctntatcctattgcaatcctagatcatccggaactgtctttactttctttgatgagtcgacttanggattgtctntgatctgntngatgagtcgattggctgagccacaaccatgtactcattccttttgtacccttgctctttatcttcgtcatgagctctcgtctgatcggtaatatacattcattttctatttatatatataccagaggactnntcaagcgtacaactgtaactcttcctcttttctttnttattaaatatagctttctctctcttcttccatanagtctctctcact

SEQ ID NO: 80168 - DNA, 253 bp, Zea mays
  unsure (1)..(253): unsure at all n locations
tctacaaatagcaaaggaagcattgcaagaataataaattgtagaagggtcattcattactttcctatgagcatgaacaatatttcttctatgcatatgatgaacacacattttcctagccacatttctatcatgcataatagaagaactagaagcaatcatggtatgagaatcanaagcatcataacttctattaacattcctagaatgtctctatcatgatacatganagcatggntcttttgagcactac

SEQ ID NO: 80169 - DNA, 272 bp, Zea mays
  unsure (1)..(272): unsure at all n locations
tcatggacgggtgaaagtacgcgtaagcggcaaggccgaccgagccgagggattcccacgcctctgggatatggatacctcactcgtnccttncgcgaaaagcaactctcgctcacacaaacatccctggtaccgacagagtccagatgctcggaacaggaggaanaaagatgcagcttcgcgagcgcggcgagggcgtgttcttcttgcctcggcgggcgcagaaagcacacgctacaagatgatctgatcctgcaggctcgggtcttcac

SEQ ID NO: 80170 - DNA, 213 bp, Zea mays
  unsure (1)..(213): unsure at all n locations
acacccacgtaacacaggtatagttttgtagtatatctactctcatttacaattataatcatgcatcgtttatatggtataggggtctgagaacggaccatgtaacccacagatggacattcagtggtcgatgccctctagaggacagattctttctnctncacaaccaggtatgggatattggccaccaccaccatggngatatcctacaca

SEQ ID NO: 80171 - DNA, 177 bp, Zea mays
  unsure (1)..(177): unsure at all n locations
gtggagtccatcatccacacaagaacatcatgacgaccgataggccgcttgagctactccacatggatctattctgcccgatcgcttacataagcatcggcgggagtaagtattggcttgtaatagtggatgaatattctcgcttcacttgggtattctttctacaggannaatctc

SEQ ID NO: 80172 - DNA, 281 bp, Zea mays
gctgacatgcttcctgtggaaccagggtgcatgctacaacctgcgacgggtgtgttgtttgttttctatgggacacacccacatactaaaatctcagtgtgctgacggacagctctattcagtaactcagcattgctttattggtaaggatatgtacactaaaaccagtcttgattacctaactattaaccatgaccctttcaacggtagaaaccattacagcccatatcataccatacctcatctctgtccctgtaaccacagttctatcaagactctat

SEQ ID NO: 80173 - DNA, 348 bp, Zea mays
  unsure (1)..(348): unsure at all n locations
tcngcgcgatggcagaaggggaaccgacttatagatgataagacttcggtggcctcgacagattttcataatccgttaacaaatgtaatggacatggatgntaatttacgtgggctgcgtcccgcgtctataaatagatgaacagtactcccgtactgttcacgctgacttggcatttgcttttgcgtcacacttgtattttcatctccttccaagccgaaggtacattcataattcaatattggttctatttctctatgatgagntaatanagttaaatgaataatgttatatgaatattcacgctatctcttatgtntcatatgcttcgtctcttactaatgtata

SEQ ID NO: 80174 - DNA, 283 bp, Zea mays
  unsure (1)..(283): unsure at all n locations
ngaagctgannatatgcgctatgacgaaggacgatctgcggatagtcttgcatacaacagcctgattgtatgggaattaagcgtttggaaatcttataattcgcaactcactctcttattcttataccaactctntntcatatagggcttaattctaagcaacgcattgagagcacanaagaatgccgaagacgaaagctatgaaattgcgttcaacaacctacgatcagaagtactaaactgagaaacgaggctctgganaaggataaaattctgcttacat

SEQ ID NO: 80175 - DNA, 340 bp, Zea mays
  unsure (1)..(340): unsure at all n locations
ntgtcgagtgtcgagtccggtagtgcaacaccaccccctgcgcacccgccttnctgttcgctagtgcacacgcnctcaccgnccgccctgcgcaagctcgccagcgtgcacgctctctgcgtcgctacctgcaccacccactcgccgtagtcgggcacaccatnctagctcggctatcgccgccctgtgccggccctacctcgtcgtctcaactcatccacacacaacgacccagcttcgacgcagtgccactggctacagcgccacctacatctcggtggtccagctncagcaccgtctacgtcttggtgtccagtcctcgttacgccccctcataact

SEQ ID NO: 80176 - DNA, 66 bp, Zea mays
actaacatatgcttgcaaacatcttgtaaacactaatatatatatataatgcatatatgtactaaa

SEQ ID NO: 80177 - DNA, 188 bp, Zea mays
  unsure (1)..(188): unsure at all n locations
aaactccctccgacagctatcacacnaaaggtcttagtggaggatccttctcctccgcacttcattcttgcttatcttcattangaaccaccttggtacagaagcaacagaactctgctggcttcttcacctaaaacaacaaagggataaaccctgagtatggaattactcagcaagtcttacccgac

SEQ ID NO: 80178 - DNA, 242 bp, Zea mays
  unsure (1)..(242): unsure at all n locations
aactcggtcaaacttgacaagtcttagttntaagctcttagcacttaaattcttactttntatgcaattggtggntcttgacatatgtatgaagtactgcacttaaggggagtattcaaactcanatactcatgannaccctagtgaagccaaatgcaatatcaccattgctatntctctaaaatatctacctatgcaaatatttaanagatatanggtgcaatcctgtccacaatgtattt

SEQ ID NO: 80179 - DNA, 234 bp, Zea mays
  unsure (1)..(234): unsure at all n locations
gtgtcgagttcagctctatcaaagtctaacaagtatagctgaccctctaacacttccttaaatgctactgaatcatcacttcttctaaagacagtaacacctatatccgtgaaaagacaggtatagcccatattgcattattgagaaacggtaagcacatggaatctaaagagtctacaagaaaaacattgganatggaatggtcaggtgatatagcaantntacccaatcctt

SEQ ID NO: 80180 - DNA, 309 bp, Zea mays
  unsure (1)..(309): unsure at all n locations
cagcttcggaaacattctgcgagcttactccgagatgaaactgtgctncttgcgacttaacatctatttcactctntcaaagcatacttncgaagatcaatattgtgtccccttcttgtgccatatgcaacatgatgtatgatgcttatgctatgcanaatgatgtgatgaatgtatgttacgtagatgacatnttgttcgaaagatacacacatattcccacacaatagttttgtatcagcgctgattcttcgctgtaagctctgcacttccttaagaacgtctttggagcttcttctgcttttactt

SEQ ID NO: 80181 - DNA, 327 bp, Zea mays
cgctgggcgtcaagagatggatgggatacggagattccctggttgtcatcagccagactaacaaggaatgggactgttcaagtgattcaatgggacagtactgcgcggccgtctgaaagttggaagatatattcgaatgactggaatttcatcatgtagaaagagatctgaacacggcagccgatgtacttgtcaagctcggatccagtcgaactcaggtcccacccagagtcttcgtgcaagaaattcttcagccgagtatctcaatggatcaaacagaagagtgcaacatcatagatcaacccgagtcaaattccgatgactgga

SEQ ID NO: 80182 - DNA, 233 bp, Zea mays
  unsure (1)..(233): unsure at all n locations
taatgaagactctatggagaagcctcgtattgagaccctggccattcacctcggaagtgaatacnggtctagctaacccaggctagaagggaatcgcgactcatgggtaaagatgcgccacctctgcagagtgtaaaactgatatatcagccgtgctcacggttatgagcagcctggacttctcacatgataattgaacttgaagatggaaataaatcgagatccgatgatct

SEQ ID NO: 80183 - DNA, 306 bp, Zea mays
  unsure (1)..(306): unsure at all n locations
gtccactcgaattaatcttcggagaaacccgacctcgctgcaatatgacacccgattgtcctacacaacaagcaatgaatgaattcagaattattgcagagcatatcagcacaagggacctggttcaggagtttttggctttcaaagttnttcctagtgtaaaggagtgggaaatgccgaagctgaacgcggagaagaaagaaagtgaactcgtgcgcttaccttactacnttcaagttaagaaatacttcacaacaccttgccaagagtggctggatacaattgaagtgatgtgcaatgagatac

SEQ ID NO: 80184 - DNA, 322 bp, Zea mays
tctagctgaaggttctctattttgttgcagccctactcttcggataaaaaatggcctttacttatgtatgacatccgggttaagttgtcaatcctaccaggtatctgggtcctcaaagatgagtgtatctctgcaactgagggctgactactaggaactggaaggaatggcaaactttcgtagatcacttcatgctatgatgactccattacatccgactctaagaactgtactctaaaactacgcagacgctagacaatgtccatgtagcaactctcgacttaaaacaaatgttgctggtgattgagttcaggccttttat

SEQ ID NO: 80185 - DNA, 375 bp, Zea mays
  unsure (1)..(375): unsure at all n locations
tatgaagcacggatatgcatggatatgctntctcttccttttaaacaagatatgtcaagagagtatagaatagggagacttaggtacaagtntaagtgaaaggagatagttttacctttttgtacctntacataaggacgctctcttcattgtgctctgtccatagtctttagatgcttaagacctatactcaatgacaatatatggaaatatcttgcacaagagagagttntacaactagtgatcccttttccaagtattgaagcatatatanatggatcaccaatgataatgaatatgattctcttttactattgctatcagaaatgtgatgaagtatgagactacagcatgtgtatgaagtttcatgtcaac

SEQ ID NO: 80186 - DNA, 297 bp, Zea mays
  unsure (1)..(297): unsure at all n locations
ttctaatcaactcaagctatcaatcttcanatgatctacatattcaagaatgacccaaggttacttcaatttattgtattcaaaacccatatcatctcggngaagatattaatgntgtaggaaataaagaatcatcatgtgcggaanatcaaggcctacaacatggaggaacgtcacaggatggtaacacttatgctnttaaagtgcaagtatcttaaattatcatttcttatgtgtctggtgtagcacatagaanaaaggancacttaagatgtcttaaaaatatgtcaccattct

SEQ ID NO: 80187 - DNA, 160 bp, Zea mays
ctaccactggtggatggacatacacctatcatcgcaacctcccttgtctctcgacccgccgacctggtggacatttgctctgccaatctcaactggagactgtcaagcttcccggaactttaggccatactggcctggactctggatctcactgcgcaca

SEQ ID NO: 80188 - DNA, 314 bp, Zea mays
  unsure (1)..(314): unsure at all n locations
tctaaacaatcgcggggatgtctgcacgttctncggtgcaagaggaattcatttattctggagaaggtgggttgcgatcatgtcaaaaccctggcccatgccgaagctgccttctncgtggatgatacanaagatccctcggctgaagcaagtttagtgggcgggaaaatttacactaacatctgtgaaaatggcggccgagaaatggctcacgaaataatgaagaanagtgaataagatattcatgacgctcgagaagcagcgaaaaaagctgatganactacagaacgcgagagacggatagggtattgtta

SEQ ID NO: 80189 - DNA, 231 bp, Zea mays
  unsure (1)..(231): unsure at all n locations
catattctggaatgtanggcgaatgatacgaagctgtatgcatgacctgcttcggctgagcttggtgtgctgctgcttcagctatttccttttgcttctgaatagtaacatggcacatcctggtagtatggcctttgttctcaccgcagaataagcaaaagattcttctcgngtgatcgccaaatcttcctccaaagccccttgcgcctctgcctcttggagctggtggtc

SEQ ID NO: 80190 - DNA, 331 bp, Zea mays
  unsure (1)..(331): unsure at all n locations
acatgtgctaagcggcgatgccacagccagcccatgcaagtcttatccattaagcatgcatctagaccggcctcttcttttgcanaatcaactaaataaagtatgccgtctaatacacccttanaagctagtgaaccatcacttcttctatagacagacacatctacatttggtaataaacaattatatcccattngacantaatgactgacagatagcanattatatncaagactctccactaagaatacattngatatagaatgctcattagaaantgcaattgtacctagcccttntaccttgccttgattcccatcaccgaatataa

SEQ ID NO: 80191 - DNA, 370 bp, Zea mays
tctcattgtggttcatcaggttggtcacttcttctgacaatgccttcaattcgacaccagcagctgaagccaatccttttgcatatgtactttcctccagtagcttttgattgcgatcctcaagttgagctttgatttccatgagttcagacaccttttgcttcagctcattgatttcaacggactgaagaccatagtgccaataagatggaaaagttagctacaaaaaaacgaaaatataaaaatgctactccctccattttgacgtttatgacaagttaattatttcacatttaactaattaattagcttgaccttcacgtcctatacttacaaactaggggataaacactgcaacatagaatgcaaa

SEQ ID NO: 80192 - DNA, 366 bp, Zea mays
tcatcctaagagatgagctgagttgaatctcgctcttcttcttcatggtgacgtcgtacatttcggcgtctgtttcaccatcatcgcgcatcacgctaagggggctcctccccagcacggggggttcgtcgttggaaattggaaacgtttctagtctcccctaaatgaaaaggatgtttgggaagaagggcatgagaatagtggtgcgttccttcccgttctcccttgaaggcggagcaatcggtacgatagtctgcaacgcttccctacccttatttggagcattcatctccttttgtcgagtgattcgtgtccacaccttattgggcgaggtggacgatggaattcgccgaattggggaggcca

SEQ ID NO: 80193 - DNA, 368 bp, Zea mays
tcatcatcagttggttgtgtgccttttatgaacaatatgatctctattcttcagccttcggtgtgtgttgttgaaattgccaaaacaacccttttcatgaagtctaccggatgtgcttttagtaattcaaagaagacatcgggtggtaaaggaagcctttgggcaactgatttagctaccgtgtcatcatattcattatttgcccttggtatattttttatagaaaaactttcgaaagatccctcaattctttggatggtatcaagatatcttttcaattctagatttctagctccgctacttttgtcaacatggcctataaatacttgagaatcaaatttaaagattgcccttttgacacccatggt

SEQ ID NO: 80194 - DNA, 142 bp, Zea mays
ctgggggtattgaccatatacctcttggaattgggggaaaaaaaaccgctgccggtgccgtgaacaccaccaccggtaaaagggaagaaccgcttggagaaacctttggagaaaaaaaattttaattttcaaaaattacttg

SEQ ID NO: 80195 - DNA, 366 bp, Zea mays
tggaaacgaatcgtgatctaatcgcaacgcgaagcgtagacgaacaagtacaagcaaacaaacatatgtatatgcataagaacattacactatacaagttaaaatgttataaaagcgagcaatataaaatagagagcgcttcaacggttacacgaggaaataagcgctgaaatcgaaactatggttgagacggtacggttttcggaaggtttgcataataaacgcataacctatgttctaggtcgattttaattaatatgaatcatttgcggaacactagtagaaaagagctcaaagcctgcggcacgttcaacttttcactggcggtttccgttatcaaacgtcattgaaagaaacaggtgggcc

SEQ ID NO: 80196 - DNA, 364 bp, Zea mays
tccctccaaaaagcaaacttgagatgaagatgtatatgcatgtacataacagccagccatatatacaaatctagagaaaagaactgcagctcctcttttcagctggcttcatctatccacaaccacaaaggctgtaggagctttctgtagcagtttcttcagctatccgataacttgaagatctcgtccacataatcctcgacgtcccagaggaaggaaccgaatgcgatggcttcaagcagtagtcttttcaaggatgaaggatcaagtataaccgcttcatcattctcctgggagagttccatgtcgcccccaaaaagagcccagctgtgcctctcgatgagattagaagcttccgatgagc

SEQ ID NO: 80197 - DNA, 364 bp, Zea mays
tggtgaggagtagtatgggctatcaacatgtcaacatcctctctctcttgtgtacctcaacgaacacaactcaactcttgtttgagtgacatctaggatcttctatgataactaaaatcctttggagtaactaataagcgttgattcatatatcattgttgtttatagattcatcggtctttataggatgctctagtccgatctagattagagtagcacactagtacacagaggctctatagtggcggttctagagctgtttgcactggcgtttttcagtgccgccaatgctaggggccagtggaaatcgccatttccactggcggttattctagaaccgtctgtgaaaatatcatttccactg

SEQ ID NO: 80198 - DNA, 360 bp, Zea mays
  unsure (1)..(360): unsure at all n locations
tgtaccccggtattgtaataaccttatttaaactctgttctatttgaagnaaggaatgtgtttactagcctcctgggactagtaatttgtatcacatttgagtcccaaaggatcgggacgcttcacttgcgcatagctttggagcaacaacagccttcatcacgaccatgcttttcacatcgtgtatggttttaacccgagtccgaagggacctgttcatatgttacacttggaaaacattattaaatcatgtttttgaggaccttcggaagacgaaggcccccaacagtagcccctcacagtattaatttgttaagataacgaattcagactgcgacatggacgaaggccttaagccga

SEQ ID NO: 80199 - DNA, 367 bp, Zea mays
tgtttggcggagaagactggcgacaattccgatccatcacgaagtcggtctcctggtggtaatctgcggccacggaaataggcagcggtctggctttttgagtccggaagaagctatttttgagtaccacggaaatagcaaataagatatgtgataggtgaaactgctcgagatagccttatgtagtatgcatgtctgaaccctgatcactgtgaagcaacaacaatcacacaacatgcgtgtggctgaacacagcatcaggtcataacatatttacagacttacagtagtacgtaacaattacacacattgttaagatctcccttctaccgatctatcgtgttgtatgtacaacaaaggaacttta

SEQ ID NO: 80200 - DNA, 358 bp, Zea mays
  unsure (1)..(358): unsure at all n locations
taatgccccaaagaaattgtctaatnttttttatggttaggctcccatggctcacgataacgagggctatattttatatcctgttggttatcccgagtataagattaagagaattcacgctcggaaacctcataatgtttcacaccatgcttttatgtataaaaatgaggcttctggctctaggcaatcaacccatgttaaattgcctaaaaagaaatctcttgttgcatcaaatgaacctaatgtttcattaaaaacttttgatgcttcttatgtgcttactaacaaatcaggcaaagtagttgccaaatatgttgggggcaaacacaaaggctccaagacttgtgtttgggtaccc

SEQ ID NO: 80201 - DNA, 358 bp, Zea mays
tctaaagggagaacacgtaataggtctaacaaatgttactttcgaaaaagatagaccttgtgcagcttgtcaagcaggtaaacaggtgggaagctctcatcatacaaaaaatgtggggaccacatcaagacctttggagttacttcatatggacctcttcggacccgtcgcctatctaagcataggaggaagtaagtatggtcttgttatagtagatgtttttcccgcttcacttgggtattctttttgcaggataaatctgaaacccaagggaccctcaagcgcttcctaaggagagctcaaaacgagtttgagctcaaggtgaaaaagataaggagcgacaatgggtccgagttca

SEQ ID NO: 80202 - DNA, 370 bp, Zea mays
  unsure (1)..(370): unsure at all n locations
tatgcaacatcgnttgagatggtttggacatatccttcgaagatctgaggaggcaccagtgcatatcggaataattaggcgtcccgagaatgtgaagaaaggtagaagtcgaccaaccttgacgtggacagaagctgtgaaaaaggacctgaaggagtggaatattgataaagagctcgccatggataggaaggggtggaagtgtgcaattcacgtgccagaaccttgatttatagtttcgcttttcctctttaatcgtttgaccttttcttgtgcccatttagatattgctggttcttgtgggttttatctcttttatgtgtttccctgtttcgtcgtttttcggttctcctttgcctttatttcccct

SEQ ID NO: 80203 - DNA, 366 bp, Zea mays
tgtgaaggttcttcatccctacatgtgctaagcggcgatgccacagccagcccatgctagtcttagctattaagcatgcatctagaccggcctcctcttttgcaaaatctactaaataaagtttgtcgtctaatacactcttaaaagctaatgaaccatcacttcttctaaagacagacacatctacatttgtaaataaacagttatatcccatattacataattgactaacagatagtaaattatatccaagactctccactaaaaacacattagagatagaatgctcatttgatattgcaatcttgcctgaacctttcaccttgccttggttcccatcactgaatatgattgaatcttgggaat

SEQ ID NO: 80204 - DNA, 368 bp, Zea mays
tctaaagggagaacacattttaggattgacaaatgttcattttgagaaagacaggatttgtagcgcatgccaagcaggaaagcaagttggcactcatcatccgcataagaacataatgacaaccgacaggccactggagctcctacacatggatctattcggcccgattgcttacataagcatcggcgggagtaagtactgtctagttattgtggatgattattctcgcttcacttgggtattctttttacaggaaaaatctcaaacccaagaaaccttaaagggattcttgagacgggctcaaaatgagttcggcttaaggatcaagaaaataagaagcgacaacgggacggagttcaagaactctc

SEQ ID NO: 80205 - DNA, 372 bp, Zea mays
tgtgattgtcccccaagtcatcaaccttcatagaagaagcttacagcatctgcagtattgcgtggatcctttggctgtgacgagggtgtgatatatctagaagctctaagatttttttgtcttgtgcaggtcctgcaattaataaatgatttgaaccaaagtgttcgagatactgttctcttgtattgaggttagttaattccatatttgatactctataggcctactttagttgacattttgcttttttccacacccataatgactggtgtgatctctatttccattgatcttgtgtattacagccatgctcctacttagagtcactgttctccagtatcttgcttgtgtcaattgtctttctttcgcatt

SEQ ID NO: 80206 - DNA, 361 bp, Zea mays
tcggcacagtgacatgtctcaagacgaaggtgtgttccgacttaaatatgaaatgacctaaagacctatgatattctgtgtcattattgtagttgattgtaaagggcataaatgtaattatacataggctgcgccctgtgcctataaataagtgaacagtacccctgtactgttcacgcaatcttgtaatcgctgacacattacgctagatttattgctttctgccaaggcaaaggtataaatgtacctaaatattatgttttaatatttaggtttgtataataaaatatgtgactaatcttatgtgtttttgatatatcattccctaatgttttatattttctatatttcattctacatt

SEQ ID NO: 80207 - DNA, 366 bp, Zea mays
tcttgtaactattaataatcatgctgaaaatatatggtttggcacgtttttgaggaccttcgaaagaggaaggcccccaacagtagcccctcgcagtattaatttgtttccttgtaacaaatttagactgcgacgtgaacgaaggcctttagccgaaggtccgaaaaaacaccttcccttcgctagaatagcgaacgacactgacatgccggacccaccaaatcatggagctctaggcatataaataggagctcgtattgaaagcatttcttgtaccattttagctgcttacactgtgctcgcattttaaactttcttgctttgtcgagttttggtcggagtttaagcttcggcatttcaacaagg

SEQ ID NO: 80208 - DNA, 365 bp, Zea mays
tctcctcttcggttagcttcgtctcagcaactttcttcttgtcttgagacatcttatcttcggaaatgacgaaaacatgcccttcaaaccaaagctaaaaagcttaagaagctatcaagcgctagtaagcacaagttaacaaattgagaaaataaggcaaatggcgcaagcagtgtatcaaatgcaggcggtttgacatcctatttatacgcccagcacgctccaagttggagggccccgtctgtcattgactgttgatattctagcaaagggaaggtgtttttcggaccttcaccttatggccttcgtccatgtcgcaatctgaattcgttattctaacaaattaatattgtgaggggctactg

SEQ ID NO: 80209 - DNA, 382 bp, Zea mays
ggacctataaaactaagcttgtataggttttagagtgatgaatgattcacatactggttctgcaattgctaagcatattcttggggtagttaatgcttttggtataagcaataagattatgtctattactcttgataatgcttcctcaaatacaaatgcaattgaatccctatcccctcatctgcattcatatatagatggttatgttgtccaccaaagatgtgtgtgccacattattaatttggttgttcaggatggcataacagttgttagcaaacatttggataatgttcgtgctactgttcgtttcataacaagtacccctcaaatgattacaaaatttggtgagtattgcaaggcaaataatatgaaacaaaggaaa

SEQ ID NO: 80210 - DNA, 366 bp, Zea mays
taatgcccctaaaagattgtccaattttgttaagggctatgctcccatggcacaggataacgagggttacattttatatcctgctggttatcctgaacataagattagaagaattcatgcaaagaagtctcattctgtttctcaccatgcatttatgtataagaatgaagcttctagctctagccattctacccatgttaaaatgcctaaaaagaaattgtcggtgtttcggacccggggggtccctggaccgacgagtaaatttgtcgctgcgtgcccctgcccagatgggttggcgcaagatggaacacaagggagaaacgcgactcgtattatctcgcaccagggggtgtgcttgtagtagtg

SEQ ID NO: 80211 - DNA, 357 bp, Zea mays
  unsure (1)..(357): unsure at all n locations
tgagaagatatttccacccggcttcttctatccaattcatcattngattcttcatctcccctatgatgcaccaatggggggccccctgcaaggacgttggtgctatccaatccagaaatgtctaaagactattcgaaagaaatgtagaaataaatgcaaaatcgaggcttccattgcagaagcatacattctagatgaagtctcaaacttcacaacaacttattatggtgacaaactgccgagcgtgcataatccaccccctcgttacaatgatggcgacaatgaatcgaaccttatcatatttcgaggccaactcggaagcgcaagtggctcgaccaccaagaccctgaatcatga

SEQ ID NO: 80212 - DNA, 358 bp, Zea mays
tgtctgcaagagcgttgctgggatcaccatgaccttccctgcgtctgccttccatgtccctgagaatgcggcggcggcggaggatgtgaaagtggactgtgccatggcgccgcccgccacaccggtgctcgtcctcatggacagatcaggagctccaccagttgttaagaacaactgatgcttgcgtgcttacgaacgaaagcgaaccatgcatgaccccccaaccaagttcatttcatcctttcatgcatgtactatgtatgtagctctacatatatatatattgctactactatcaagcatgtatgtcgccgttgtggagacacatctattgatctatacatgagcttgtggaagc

SEQ ID NO: 80213 - DNA, 369 bp, Zea mays
  unsure (1)..(369): unsure at all n locations
ntttggcctcagcttccaccgccactaccattgtagcctaccttttcccgaaaccagcagccaaaagggcgccagcactcccaacaacaacgtgacttcagggaggagtccgaagctcgtacagtcaatagtactgtaccagaatcgaagcacatatactgagcaatatcctacttcttaaatacctttatattctaggctattctgttttttgaataaggaacaagcaatgaaaacttagttttaatttcttgtaatgattttgcttctatcagaatgaaatatatcttcttcacagatttacgaagctcaaaagtcgttcctaagggaatgcagagccaaaattgccgaagctacaaaaagtcgttc

SEQ ID NO: 80214 - DNA, 367 bp, Zea mays
tctcctggacaagtgctgcacttaccgctgagtgcgtatctgccacatataataacaaaggagcccctggcgttggtggagttaatgttgttaaatctatcagatattgcttcagttcctcgaaagctttttgttgacttggtccccattgaaagacttcggctgatttcagcacttcgaagaatggtaaatttctttctgctgatctggatataaatctattaagagatgccaaccttcctgttaatctttgggcccccttttttgtagtcggtggctccattcgaagtatagcttcaattttacttggattagcttcaattccctttattgaaaccaagcatccaagaaatttccccttctttac

SEQ ID NO: 80215 - DNA, 365 bp, Zea mays
tcaggctgtggagaatatcaatgaatatcaagccgtttctattttatggtgtgacagaaacgtccggttaaaaaatatcaagccaaggcacttggtacttcggagagttgctaacccagatacaataggcaagctacagttcaagtgggaaggaccttttctggtagtatcttcgtcaagacccggttcttacagattgaaggatatggacgacaacgacattcctagatcttggaatgcggatgagctttggcgatatcatgtgtagtttgatgtaatcatttttattctttttcctatggcacccttttcctttccaaagggggagaaaggtttttaatggggccatagtatgtaatttctct

SEQ ID NO: 80216 - DNA, 370 bp, Zea mays
tcgtcatttgaaaggaaattgccctgaagaaaagacatgatctcagttctccaatcttcggtataaataggagatatattgagcacttctctttcaacaaggtcaaccgaaggtgcttttattgtttcaaagaatacttctgaaggtaatggcagcccctgtgccactgacttggctagtagatcagcgtgttcattttctcctcgtggaatattcttgacagaaaacccttcgaaggaagcttcaagtctttgaactgtatccaaatatttctcaagcttcggatctcttgctttgcaacttttgtcaacatggccagaaataacttgggagtcagttttgagaaccgcccttcttatccccattgcct

SEQ ID NO: 80217 - DNA, 370 bp, Zea mays
agcggggcaggcaagcagagagagatctaccggccttcggctgcgcacgcgcgtgccttggggtgggtgacgcactctgggaagaccatagccctgttttctgcaacgagatgggatgggatggggtcatcaaagagctgccatacgtactgaatactagataaactacacgcatgattttccacatgagacaaagaaggggccttgaactagtaatgagcagagaagctcaataaaaaactactagcgcttctaatactatatatagtagcttggatcagccccgagaaaaccgccctgctaatatatcagagccaattgttaattatgcactaccgtcgtcgcgctctttgtcttcctacgtatatat

SEQ ID NO: 80218 - DNA, 361 bp, Zea mays
tctaaagggagagcacatcttatgactaacaaatgttcattttgagaaagacaggatttgtagcgcacgccaagcagggaagcaagttggtgttcatcatccacataagaacatcatgacgactgacaggccactggagctcctacacatggatctattcggcccaattgcttacataagcgtcggcgggagtaagtactgtctagttattgtggatgattattctcgcttcacttgggtattctttttgcaggaaaaatctcaaacccaagagaccttaaagggattcttgagacgggctcaaaatgagtttggcttaaggatcaagaaaataagaagcgacaatgggacggagttcaag

SEQ ID NO: 80219 - DNA, 366 bp, Zea mays
tgaatgttcaaaatcaagaacttcaagtgcatcttgttaattgcaagaacatcaatgcctcatctttagtatttgaatctaagtctagctcaaatgataattcttgcaaacattgtgccaaatatcatgcttcttgttgtctaactaaccatgcaaggaagaatagcccacaggtgaaggtcaaagaaattttgaaaagatgctctagcaatgatgggttaaagaaagttgaacccaagtacaagtcccttaagcccaacaatggaagaagggggcttgggttcaactcatccaaggaaaaccctagcacagtgcataaggggtggagatcccccaagttcatagagggaaccaccctatatgatg

SEQ ID NO: 80220 - DNA, 365 bp, Zea mays
taatgggcagaaaattttgcactgacatctgggcgtatggtggccgagaaatagctcaggaaattatgaagaagagtgaaaaagatattcatgacgcccgagtggaagcgaaacaagctgaaaaagctgcagcacgtgaaagacgtataagtattgtttcgcagcacttagcctcgacatttgtttttgtggatttggactgattaattttttccactgtagctgaattatctccgccactggaaccgtttgaccccctggctgatccagaaacgaagaaagcactggatatcatcaatatggctgaatctattgttgacgaagtcgtcaataaattgctgaatgaagttgcagagaaggtcctg

SEQ ID NO: 80221 - DNA, 369 bp, Zea mays
tctaaagggagaacacgtgataggtctaactaatgttcaattcgaaaaagatagaccttgtgcagcttgtcaagtagggaaacaggtgggaggctctcatcacaccaaaaatgtgatgacgacatcaagacccttggagatgctgcatatggacctttttggacccgtcgcctatctgagcataggaggaagtaagtatggtttagttattgttgatgacttttcccgcttcacttgggtgttctttttgcaggaaaagtccgaaacccaagggaccctcaaacgcttcctcaggagagctcaaaatgagtttgagctcaaagtgaagaagataaggagcgacaacggatccgagttcaagaaccttca

SEQ ID NO: 80222 - DNA, 360 bp, Zea mays
tttgatcttattaaagactatttatcttcggctcctgtgttgaaagcaccaaagattggaataccttttagattatatatcgctaccgaaggtaaagttattggagttgttctgactcagatggttgaaggaaatgagcatgttgtgacatacttgagttggagattggtggatgctgaaacgaagtaaacttttattgagaaatcatgcatatgcttgttttatgcatgcaccaaagttagatgttgtctactgtgtagttcttgcatcatttcttgtcaaaccgatgtgattaaatataagttgcaaaccccaatcatgagcggttgaattggaaaatgggcttatgcacttataaaa

SEQ ID NO: 80223 - DNA, 363 bp, Zea mays
ttaacagccagtcaagcggtctctagctcttgcgctacaagtttcttggaagcgcgcaaatccttgatggtggaatccttggtcgatagcagttgtccaagtcacagaacttcatcatcggatacctgcagctcatggcggtgatgatccaggttagacatagtgaagcggtggctcctctccaagatggtcaaggagttactggcatcacggtacaacctgtctagattgtcatgagaggcaaaaagtgctcgcttctcctcctacaaataggaaacaacattcagtaccaaggcaacaataacatggcaaggtcagccaaggaagtttacctcatgtgccatcttttcagagtcaagtcgg

SEQ ID NO: 80224 - DNA, 351 bp, Zea mays
  unsure (1)..(351): unsure at all n locations
tgctgaagggccgcaggcttggaacatctagattttgntttgctagggggagcgctatgtgtgagtacagctagctactcatttcgtaggacatgctatgaaggggaatgtttgaactcacatctttttgcaagagggtgggcaggttgctcaggtcaagtgggttcacggttgcgagcttcatggagagactatcgagagcaggtttctttattttcatgggaaaagtacatgtttctattgtgccttcgtacattcatagttgaggtttaatgtacctgccttctctattggattttagntaagatactcaagcaacaatgcctgaaagctcttactgaattactcgct

SEQ ID NO: 80225 - DNA, 366 bp, Zea mays
tctaaagggagagcacattttaggattaaccaatgttcattttgagaaagacagggtttgtagcgcatgctaagcaagaaagcaggttggtgcccatcatccacacaagaacatcatgacgaccgacaggccactggagctcctacacatggacctattcggcccgatcgcttacataagcatcggcgggagtaagtactatctagtaattgtggatgattattctcgcttcacttgggtgttctttttgcaggaaaaatctcatacccaagagaccttaaagggattcttgagacgggctcaaaatgagttcgccttaaggatcaagaaaattagaagtgacaacgggacggagttcaagaactc

SEQ ID NO: 80226 - DNA, 366 bp, Zea mays
tgtgaagattcttcatcccaacatgggctagtcggcgatgccagagccaactcatattagtcttagcaattaagcaagtatcgagttcagctttgttaaaatcaactaagtatagttgaccctctaatactcccttaaatgctactgaatcatcacttcttctaaagacagtaacacctacatctgtaaatagacagttgtagcccattttgcataattgagatacagaaagcaagttataatctatagaatctacaagaaaaacattggaaatagaatggtcaggtgatatagcaattttaccaagtcctttgaccaaaccttgatttccatctccgaatgtgatagctctttggggatcttcgt

SEQ ID NO: 80227 - DNA, 368 bp, Zea mays
tgagttaggttattacagaccagactaaagtgagtgcatatgagtaatattatacaaaccagggaggcacaaactcctcccgagaagttataaacaaagatcctaagtggaggaccgagtcctcccgcacctcagtcttctttttcctcatttggtaccaccttggagcagaagcaacaaaagtttgtcgcttcctcacctaaaaacaacaaagggataaaccctgagtatggaatactcagcaagtcttacccgactaaggaaaagactctcaagggtatgctggataaataggagtcaaggagaggctttagcaaaaatcaacttatatttttgcagaagtagcttactaaagtgagtccttactt

SEQ ID NO: 80228 - DNA, 372 bp, Zea mays
tgcttcgaccgaggggtcttttgtatcttcaatagataagacagcttcgttttgcgccaaagattttacatgttcacaacctatcttctccaagatagctgcaactccccttgcgccagagaaggcgcagacgtctccacggccatttaaaatttcctcgaaagcatcggcttcgctgctgatccattcaattgggccctcagaatcgcctcttacaaagttgtcctcgctggagtatgcgccaacgttggcgaagctagtctttatttttcccacacattctatggatttttcataacatctttcttttgaagaccgaagttctacaactgttttctcccaataatttttctagtaatcactggcgtctcg

SEQ ID NO: 80229 - DNA, 364 bp, Zea mays
  unsure (1)..(364): unsure at all n locations
ngagtgatgctcttatgtcattaacaatcttgattttcacatggtctccaaggttcttatgttctcctcaagtttctaccacatgtgatcacagtcatcagtgcatagatgtgctctagccatggtaacacctaaggtgttacaggcctccccccttaaaggaatctcgtcccgagattttaggcagagtcctctatagggtgctacgagggcacgttgatgggctactctttcttatactcaagtttctctagttaactgctcttcgaatgtcattctctttgcaacttcagaaggaagccttttttaagttaaattcacaacttagactatccttgttacctaagtttttcttataattgta

SEQ ID NO: 80230 - DNA, 361 bp, Zea mays
tagaacttcggagacgaagtatactggagcttgtattttgacttgaccatcttgcttctcctgtaccagcgtcgcactaactgcagagtgagaagctgctacatacaggagtaacggagcccctgacgaaggtggagttagagttgttaagtctatcaagtattgctttaactctttgaaagccttttgctgagccggaccccattggaaaactttggctgactttaatatttcaaagaatggtagattcctttctgctgatcttgatataaatctatttaacgataccagccttcctgccaaccgttgagcccccttctttgaatttggtggctccatccgaaggatagcttcgatctta

SEQ ID NO: 80231 - DNA, 364 bp, Zea mays
tgcttaataaaaaattatacagatatacagataattcctcaagatactgcctattccaggataaaaaaaattagaagcatggttcataacatgtaaaatcacttgggcaaagcaaaagttcagtgattgcacaataatggacaggattaggcacaacacaaaacagaagctcaaccatccatgctaattttaattcaatcaattgcatcaccaactgtgtgagaagcagttcaccgtccctacactaacctaaaaggcagtaggcagcgggcagctagtatagcaatcgggtgtaagaggcatactccaaatatttgcacttagtggaagcatcgaagcaggaataatactataccaccatggc

SEQ ID NO: 80232 - DNA, 364 bp, Zea mays
tagcgacacacacctctttcggctcatcctctgagctattactgtcatgatgctcatcgtgacaagtcgggtctttgttttggcttacacaagccaaagactgtcctaggccagacacacttgttgggggtctccttatgccgaaggtcctcaaaacaaactaattgatttaattcatttaacaagcgtactgcatgactaaatgcctaaggtaaaatatcgaagcgagggatgcaagggacgtgacaaagcttcggcaatcattatgattgtagctttgactcaagctaatcctgaaggtctcactgcaagccaattcaagagtagaatgacaactttatcctcagcgtttgcattacagcga

SEQ ID NO: 80233 - DNA, 366 bp, Zea mays
taagagagacttttttcacggatcaagctcgttactaataacgatctagcaccgcgaaaggggctactgttgggtttatgcttcgtcgccgaaggtcttctatgaagaagcggtttttggctgaagctgtttgtatgagatggccgaaggttcctcttcatgaagcttcggtattacaacccgacttaaagtagaatgaccttttagtccataaaggtctgaatcaacgttgtaaacttttatgaggggcataattgtaattcctcacaggttgtgtcctgtgcctataaatagtgaacagtattcctttactgttcaggcattcggttaattgctatcgcatctttcgggaaccaacctttgtca

SEQ ID NO: 80234 - DNA, 359 bp, Zea mays
ttggatctttcttggtgatttcaatatgattagattccctgaaaaccacaacaaaccgggaggagaccctactagaatgctcaattttaatttggcaatcagctagttgggcctacaagaaattcctctcaaggggcaagccttcacttggtcaaatatgcaacgtcatcctttgcttgaaaagctggactggtgttttgtctcacagacttggtctaccaactttcctgctactgctgctcattctctggctcgggtagcttcggaccacgtcccttgggtgatcaacgtccaaatcaacgtacccaaaccgcccattttcaggtttgaaaattactggttacaactcgaagactttc

SEQ ID NO: 80235 - DNA, 361 bp, Zea mays
tagaaaaatccagaatgaatcggcggtaataaccatccagcccaaggaaacttcggacttgatgtacagtggttgggggtttccactccaaaatatccttgactttgctgggatccaccgcaatccccttggcagataatacatgtcccagaaattgaatttcttccagccagaacgcgcatttactgaacttagcatacaattgatgttcccttaagcgcgtcaatacgatccgcaagtgctgagcatgctcctcttcattcttggactatattaagatatcatcgatgaagaccaccacaaacttgtccaattcgggcataaatactgagttcatcagataagtgaagtgggcaagagc

SEQ ID NO: 80236 - DNA, 367 bp, Zea mays
ttagtgactagtgggagagatttgcttgtgttctttcgagctcttgcgcttggattgctttcttctttcttgattccttattgcgatcaaactcacttgtaattgaggcaagagacaccaatcttgtggtggtccttgtaggaactttgtgttccaagtgattgagaagagaaagctcactcgatccaagggaccgtttgagagagggaaagggttgaaagagacccggtctttgtgaccacctcaacggggagtaggtttgcaagaaccgaacctcggtaaaacaaatccttgcgtctcatcgctacactcgcttgcgattttttttgcaccctctcttgcggactcgattatatttctaacgcta

SEQ ID NO: 80237 - DNA, 366 bp, Zea mays
taatgccggaattgccataaaggaagctccctcacttttctcatccccccattgtctcatggcaaagggagatgctaaggtaaaaatcatcaccgatttaaatgatataaaagatgatgatgatatcgatgatgttgatgatgatggctattcatatgatgatcttgttagaatgttaggtgaagccgatgactacatgcacaaagaaaaagaaaaatttaagaccttgaaggaattgtataaaaaccttcaagtgtcttttgaggagctcaagacctctcacaatgacctaaaagaaaattgtgagaagcttgcggatgctcaaaaatcatctattgtgcatgaagttaaggtggtcactaagga

SEQ ID NO: 80238 - DNA, 363 bp, Zea mays
  unsure (1)..(363): unsure at all n locations
cttcgcgttatgatcatcaagacaggcttactgcacgtgattctattgtaaggttccctgtgcttaattttggtgacatgtaatttggcaacccaaaatacactggcttttcttactattgctcaatatttggcgctaagtatactcctacatttttctaatggatgtctccatctctgaaaaaaaaagtaattcgagtcttcaccatatcctgattgttgtgcatgctgctctgtttaaacaacgtttcagaagtacggattatatatatgatgaaagattttagattgtatttacttggaggtctaaattgcaatgccttgccttattctcttcttatacttgacgctnttatattcttgc

SEQ ID NO: 80239 - DNA, 367 bp, Zea mays
  unsure (1)..(367): unsure at all n locations
ntacatggtcagcgttctgaattacaattgtaaaataaattgcatcccaaagcaaaagagcctacagagacctaaatccaggataaatattaggcgatggattgtacaacaggcagttattttatgttgtgcatgcgttcatgcagtgtttacatggcaccagctctgtcaccgacgggcatggcaccaacgtagcttgcttgatgctggttagcagcatacaagttccttcgcccacgattgtgcccgtctgttcccatcaaacgaaaaaggacgtcagaagcttcgcaggaatcaacaagattaaaatgtttacctcatgccacttgtggccatgcaaaagatgaccgcgtgcatatttcattta

SEQ ID NO: 80240 - DNA, 337 bp, Zea mays
  unsure (1)..(337): unsure at all n locations
ttgtgtggagttgggagaggatttgatctcttttgtgtgttctttgcaatgaatgctagctcttgtatagtggttggaagctggaaaacttggatgcaatgaatggtggggtggncnnccccnttctttttctccttctccttcatttcctcctctctcctcctcttctctcttacctttttcaacccctcctttctctcttctgcctctttttttccttatattgtcttccatcaactcttcctacacttttttatcgtgctcttattgttctttcctcacatgtctgttccctattttcctatctttttcgaccctgtcttccctttcctgttca

SEQ ID NO: 80241 - DNA, 363 bp, Zea mays
  unsure (1)..(363): unsure at all n locations
ntgatagttgctacaatattctttcctgcaaaaattctggagagacttttgtaatatcattatggaaaaactcatgtaaatttgtacataccttgtaatatattttgtttccgctatctgtgtacaatcggctttgctgtggacgaaacttcttttttgagctgaaggcgaaaaacaccttcccttctttttgtacacaacgaagcataaaatttttttcctttttcgaagtctttcctcattgccgaagcacctatcttttttgtgtggtatgatgatgattctatatatgtctaaatgaatgtttatgaatgcaaatgacatgatgaaatgtattgtgcaggtgaatattgggacacatgt

SEQ ID NO: 80242 - DNA, 362 bp, Zea mays
tcctctcgtcgtcgatgagcgacgctaacgcgagtgcctcctgctcatggtatttgtttggggtttcaagtaataaacatggattcatgcttggcgttggtttatgaaaatgactcacaagtctaatccatggaaaaatattacaaagaaaaatatcacgcatgcaaaaaaaggaaatttaagtataatacattattcaaacaaaagaaattacatgcaaagctcttctttaaataatattacctccatccaaaaatataattcaagaatctcagtgatacttatctactactacgcattgtgcaaaggtagcaagtgaatttggtgagagatgtagtagatgtgtttcctgtgatagatgt

SEQ ID NO: 80243 - DNA, 361 bp, Zea mays
tgaagccatggtaagtagcataggctaataatatgcgaattgactcaagcctagctacgggtgcataggtttcaccaaaatccaaaccttcgacttgtgaataccctttggccatgagtcgagctttgttccttgtcaccacaccatgctcatcttgcttgttgcggaagacccatttggttcctacaacattttggttaggacgtggaactaaatgccatacctcattccttgtgaaattgttgagctcctcttgcatcgccaccacccaatccgaatcttggagagcttcctctaccctgtgtggctcaatagaggaaacaaacgagtaatgttcacaaaaatgtgcaacccgagatcg

SEQ ID NO: 80244 - DNA, 364 bp, Zea mays
tcacgggctactggcggagctagccgaagcactgtcttgcccagaggatggctggggtgggctggccacggtggccgaagctctggcggcaatggcgggcggaattaagctcgccggagctaagggaaaggggctggccggtgagggtgagtgcggggcgaagtggggcgcgcctgggaaggctttatatgcgcggcgcggtgcacgggcggtcgtggaccggcgagtgcgcgcgggcgtgcactgggaaggtgcggtgcgcgaacgggcgtgaaccatgggtgtcagccgcggtcgaacacgtgttcccgttgcctctgcccctgttcaagcgccgattgggagcaaatctttgcgaatttgg

SEQ ID NO: 80245 - DNA, 369 bp, Zea mays
tcatatcttggtacccaatttgaattgggtcctttgatattagtagtaagagccttgagtacccacacaatccttattgtggcctttctctttgtgtaggcattcacatatacttgacaaccatcttacatggtttcaagtcaatatttaatcacacaaaaaaactagagttaagaataggagccttttctccttttcttgatacatcattgtgttgccttcttgatgatgaacctagcttgaccttgggtgcacctagcttatcaaagttagtcgcacaagcattcatatcataaagacaagttatgtatggaatttacaacttagtgatccaattgaatgtgaagcatatggataccgattgaagta

SEQ ID NO: 80246 - DNA, 360 bp, Zea mays
tcttgtagctgctgccaaaaatgagatgtgaactgcgttcctcgatctgacactatcttcttcggtacaccatgaaggcagactattcgtgacatgtataactcagctaacgttgctccggtgtatgtcgtcttcacaggtatgaagtgggccacctttgttaagcggtccacaaccacccagatggaatcgtagccggcccaggtacgaggtaggccaactatgaaatccatcccgatctcatcccacttccactgaggaatccgcaatggctgcaacaatccggcgggtctctgatgctctgccttggttctctgacagctatcacagatggcgacatattctgcgatctcccttttc

SEQ ID NO: 80247 - DNA, 361 bp, Zea mays
tgaagacgtggatggcgacgaagaatcggtctcgtattagaccaccttcttcatcttcttcttcttgtcgcctttttgatgcgtcttattgaaggaagaggattccttcttatgtttgtggctggactctcttgaggtgttctccccgagcttgcgggcttgtcgccggtcacgatctccctcttaccgtgatctcccgacatcacttcgagttgttagactcttaatgaagtataggctctgataccaattgaaagtcgcctagagggggagtgaataggcggaatatgaaatttataaacttaagcacacactacaagccggggttagtgttagcacttaaataaagtccgggagagag

SEQ ID NO: 80248 - DNA, 367 bp, Zea mays
tctaaagggagaacacgtgataggtctaaccaatgttcaattcgaaaaagatagaccttgtgcagcttgtcaagcagggaaacaggtgggaggagcgcatcacagcaagaatgtgatgaccacttcaagacccctggagctgctgcatatggacctcttcggacccgtcgcctatctaagcatagggggaagtaagtatggtctagttattgtagatgatttttcccgcttcacttgggtgttctttttgcaggataagtctgaaacccaagggaccctcaagcgctttctcaggagagctcaaaatgagtttgagctcaaggtgaagaagataaggagcgacaacgggtccgagttcaagaacctt

SEQ ID NO: 80249 - DNA, 367 bp, Zea mays
tgacaatgaggaaatggcgctcgtcatcaagagcttccgtcaaatcctcaagcaaaggagagggaaagactacaagtcccgctccaagaaagtttgctacaagtgtggtaagcccggtcactttattgccaaatgtccattatcaagtgacagtgacagggataacgacaagaagggcaagaggagagaaaagaagaggtactacaaaaagaagggcggcaatgcccatgtttgtcgggaatgggattccgacgaaagctcaagcgactcctccgacgacgaggacgccgccaacatcgccgtcaccaagggactcctcttccccaacgtcggccacaagtgcctcatggcaaaggacggcaaacgg

SEQ ID NO: 80250 - DNA, 367 bp, Zea mays
  unsure (1)..(367): unsure at all n locations
tctaaagggagaacacattntaggattaacaaatgttcattttgagaaagacagggtttgtagcgcatgccaggcgggaaagcaagttggagtccatcatccacacaagaacatcatgacgaccgacatgccgcttgagctactccacatggatctattcggcccgattgcttacataagcatcggcgggagtaagtattgtcttgtaattgtggatgattattctcgcttcacttgggtattctttttacaggaaaaatctcaaacccaagagaccttaaagggattcttgagacgggctcaaaatgagttcggctcaaggatcaagaaaataagaagcgacaacggaacggagttcaagaactct

SEQ ID NO: 80251 - DNA, 366 bp, Zea mays
tgaaggaggaatgcacgatggataacttatggtgctcccctgccattacactttcaatggacgtttcatatggccctgcctgaattcgcttgatacatgtgtggtcatgtgctactgaatactctgaatttcctctttccaattatatcaagcgatgaccgacgccctcgatacgcgctctgtgcgatagctgtacccaatgacgtgtgacataaggaacgaatcttctgaatactatgctgatggaccatggttcctaatgccgtatataggtctatagttactaatgctcttgttttagtcgatgaagatctatcatggttataaactcccgatcctggagcgataactattgctgtggacaat

SEQ ID NO: 80252 - DNA, 373 bp, Zea mays
tgaagttggcctctgtgccatgacaaaggacgatctcgtttattgtcttgcatacaacagcctgaaggtacaaaaattgtgaattttgaagcttatggactctgtaatggagtctttttattcttatgttaatcctttattctgtcttgtagggcttaatacttagcaacgccctaagggcgcaaaagaatgctgaagatgagagttgcactatagctctcaataaccttcgatcagaagttatcaggcggagaaacgaagccacagaaaaagacaagattctactttcattggtggataaagtaaaggaggatgaagctagcttcaaaaatcaatccgaggcccaaaaaattgagattgaagaccttcagaa

SEQ ID NO: 80253 - DNA, 361 bp, Zea mays
tatgaagattcttcatcccaacataggctagtcggtggtgccagagccaacccatgttagtcttaacaattaagcaagtgtctagtttagtttgattaaaatcaactaagtatagctgaccctctagcactcccttaaaagctattgaatcatcacttcttataaagacagtaacacctatatcagtgaaaagacaattgtagcccattttacataattgagaaacagaaagcaaattgtaatctaaagaatctacaagaaaaacattggaaatagaatggtcaggagatatagcaattttacccaaacctttgaccaaaccttgatttccatccctgaatgtgatagctcattggggatc

SEQ ID NO: 80254 - DNA, 364 bp, Zea mays
tgacaacaccatttgacattttacataaagtttctgagatcaaggatatttagttcattcctcaacatgcaaaagcgggtcttatcaagaggcttagtgaaaatatccgctaattgatcttccgacctcactccttctaaaatgatatctcctttagcaacatgatctctaaggaagtgatgacggatatcaatgtgcttggtgcgagagtgttgtacagggttattagcaattttaacagcactctcattatcacacaacaaaggtaccttttctagaactacgccatagtctagaagagtttgtttcatatataaaatttatgtgcaacaagcacctgcggcaatgtattccgcttcggcag

SEQ ID NO: 80255 - DNA, 364 bp, Zea mays
tagcctcggctggaccaataccagaaaggccggcccgcaatgggagtggagtgatggcgagagtatcgtgtatccacctggcaagaggctggatggtggggtactgagctcggttggcggggacccgttctggtcttgagaaaaccgtgggcgagttgacatatgcaagggttaagtgctacatatgtcgtgtggttggagatccccagctgggtattaatcgattttgatcgccgaacttctcggatatgaagactggatcttcgaccttcagcgtagataacaagtgaaactaaagtggataaaatgaagctagtattggacaagtgaatgctctagatcaggcaaatctagattcaggaaa

SEQ ID NO: 80256 - DNA, 364 bp, Zea mays
tgtgaaggttcttcatccccacatgtgctaatcggcgatgccacagccagcccatgctagtcttagaaattaagcatgcatctagactggcctcttcttttgcaaaatcaactaaataaagcttgccgtctaatacacctttaaaagctaatgaaccatcacttcttctaaagacagacacatctacatttgtaaatagacaattatatcccatattgcataattgactaacagatagcaagttatatccaagagactcaactaaaacacattagatatagagtgctcatttgaaatagcaattttacctaatccttttaccttgccttgattcccatcaccgaatattattgaatcttgggaa

SEQ ID NO: 80257 - DNA, 367 bp, Zea mays
tgtgaggagcactgtggtctttgctgctggcttcccctatcatcactttgggtagagttgtgaattgacctgacgtgccttggatagaatctacctccgaagcccctggtcatttcagagaacctgaaagcctcctcccttctttgacgaaaatcattatcggcccgaatatactcgtccatcttttggagcagcttctccaaagtttgagggggcttcctagcaaagtactgagctgaaggtcctggccgaagccccttgatcatggcctcaatgacaatttcgtttggcactgttggtgcctgcgccctcaaacgcaagaacctccggacgtacgcctgaaggtattcttcatgatcctgggtgc

SEQ ID NO: 80258 - DNA, 362 bp, Zea mays
tctaaagggagaacacgtgataggattaactaacgtgcaattcgaaaaagatagaccttgtgcagcttgtcaggcaggtaaacaagtgggaggagcacatcacagcaagaatgtgatgaccacatcaagatccctatagctgctacatatggacctcttcggacccgtcgcctatctaagcataggaggaagtaagtatgggttagttattgttgatgatttttcccgcttcacttgggtgttctttttgcaggataagtctgaaacccaagggaccctcaagcgcttcctaaggagagctcaaaacgagtttgagctcaaggtaaagaagataaggagcgacaatgggtccgaattcaaga

SEQ ID NO: 80259 - DNA, 367 bp, Zea mays
tctaaagggagaacacattttaggactaacaaatgttcattttgagaaagacaggatttgtagcgcatgccaagcaggaaagcaagttggagctcatcatccgcataagaacataatgacgaccgacaggccactggagctcctacacatggatctattcggcccgatcgcttacataagcatcggcgggagtaagtactgtctagttattgtggatgattattctcgcttcacttgggtattctttttacaggaaaaatctcaaacccaagagaccttaaagggattcttgagacgggctcaaaatgagttcggcttaaggatcaagaaaattagaagcgacaacgggacggagttcaagaactca

SEQ ID NO: 80260 - DNA, 174 bp, Zea mays
tttttttttaacccaatcaagtacaccctgggtaactcatcttggccttgtacaagttggaggagcacatcacagcaagaatgtgatgaccacatcaagatccctatagctgctacatatggaccctcttcagaccccgcgcctaatttttccttttattgttgtataactagc

SEQ ID NO: 80261 - DNA, 367 bp, Zea mays
ctaattgtgtcaaagttctgtgttgtatcatacctatgttcaacttttccatttcttgacatagggtgatgtcaggggtccttattgtaagacaatgacaggaagctttgcgacttaatgcatctgccaccacattggatttccatgccataatccttaattagctcaagccatcttctctgcctcatgttcagttctgactgggtaaagatatatttcagacttttgtgatccgtatatacatgacatatatttcccagcagataatgacgccatatcttgagggcatgaacgactgcagctagttccaaatcgtgagttggatagtgctcctcatgctggcgtagttgccgtgaagcataagcta

SEQ ID NO: 80262 - DNA, 371 bp, Zea mays
ttatagtcgatagcttcggcgctgctttggagaggatctgttcgaagtgttcatttctttaggatcttcggctacgaagcatacccccaacaccaacaaaggcagttgtcttctctagtgataccaatgcagacgctgggattagtgacatccaatgggatgagatcaatgatgatgattgagcttgtgtacctctcttatttctctctctctctctctcttttggtgtttgttgccaaaagggagaaattgagggggtgacatatttttcctaccaaggatggttagagatacatgtttgtaacaacctaattttacttgttacaaatattcattaaacacaataacaacacactaaatttttaagggga

SEQ ID NO: 80263 - DNA, 365 bp, Zea mays
tgggttatgtctatccacaatggaccctccgcccctatgtatcttagtcacggtaaaaatcaattacataataaatattcaaaactaactaaattaaaaaaaacttaacatcatgatttacagcgtcgaggcttggtgttgcagaccatggtgccaagctctgtcagccagggccggtcttagtatttttagggccccaagcgaaagcaaatatagaggcccctctcatcttcttatgtgtgtatatatacatatataatatgtacttatatatggaaagttatcaaagaatagttgcagatctcaaattgtttttcaataatttagttttaaaatgctttttctaacagatggaacagtcacag

SEQ ID NO: 80264 - DNA, 365 bp, Zea mays
tgataattactgcaatattctttcctgcaaaaattctggaaagacttttgtaatattattatggaaaaactcatgtaaatttgtacataccttgtaatatattttgtttccgctatctgtgtacaatctgctttgttgtggacgaaacttcttctttgagccgaaagcgaaaaacaccttcccttcttttcgttcataacgaagcataaatttttttcctttttcaaagtctctcctcattgccgaatgtgtgatgtgatgatgattctatatatgtataaatgaatgtttatgaatgcaaatgacatgatgaaatgtattatggagatgaatattgagaatgatccaaatcttttcacttttca

SEQ ID NO: 80265 - DNA, 365 bp, Zea mays
taatacaaatattttagcaattagcatgtcagatcttactgagggcattcccactctccaccagtcagcatcttctttggccgctgctcattgcactcaagacacctaacatttcttgcaaagttcatgaagctacatctgcaagttgcaaagcaattttcatacaaaaaaaatgagtagcagatgaaagaacatacggagtatattatagaaaaagcaagtagaaagttacaggttaatgtgaccatagtatcaggttggaaaaattgggtacgcattttagatacaccatatctagtagcaaaatgaataatagggtaggttcatacttcaatacaaggcattgagcggagcacaaatgttaa

SEQ ID NO: 80266 - DNA, 265 bp, Zea mays
tttgcaaaatcaactaaataaagttagccgtctattacacccttaaaagctagtgaaccatcacttcttctaaagacagacacatctacatttgtaaatagacagttataccccatgttgcataattgactaacagatagcatattatatcccaaggactcaactaaaaacacattagaaattgagtgctcatttgagattgcaattttacctaatccttttaccttgccttgattcccatcaccgaatataattgaatcttggg

SEQ ID NO: 80267 - DNA, 359 bp, Zea mays
taaagccatggtaagtagcataggctaataatatgcgaattgactcaagcctagctacgggtgcataggtttcaccgaaatccaaaccttcgacttgggagtatcccttggccacaagtcgagctttgttccttgtcaccacaccatgctcatcttgcttgttgcggaagacccatttggttcctacaacattttggttaggacgtggaactaaatgccatacctcattcctagtgaagttgttgagctcctcttgcattgccaccacccaatccgaatcttggagtgcttcctccaccctgtgaggctcaatagaggaaacaaacgagtaatgttcacaaaaatgtgcaacacgagat

SEQ ID NO: 80268 - DNA, 362 bp, Zea mays
tatcatctttcatagcaaaagaattatactcattctagactaggcaatgtttttgctcacggacattggatgtgccatcatggagctcatgcaattttagccaaatctcattagcagttctcaaggtaaatacttgattaaaaatatccatgctaagagattcatacaagcaatttttggctctagcatttaaatgaatttctttttcctcactcgtggtgggtttctcgggattcttgagaggtttcatcccgtcacgagtgactctccaaacacctagatcaacggcctctatgtaacaagccattctagcactataatatgggaagttagtgccgtcgaagtgtggtggcctatgggta

SEQ ID NO: 80269 - DNA, 290 bp, Zea mays
  unsure (1)..(290): unsure at all n locations
tacccatgatggngcatgtgaccagttaaaaggtcctcaatcatcaagcctacatcgacacggtccttaatcgacgcagacggagacactacaccgagactctcttctcgtgcaagtcagccgcccagtctcagctttatcatttaaaaacccaaagtttggtacctggcagaggtacatcttttccgatgttgaacccatcatggccatgatggatccaccatcaagttctatttttgaaaacatcccatcccacttggagcatcatcttttgtcaaaacaaagcattt

SEQ ID NO: 80270 - DNA, 368 bp, Zea mays
taagcaccaacaattagagattctgctcttgctatactcgttttggccactctttcaagggcaatgagtcaaagacaatgcacgtaacacaccggaacacccgcctcaagggcagtggccacagaactaccagaacaggcaaacttcaaactttccaagtcggtacaacctgacaactcgaaatcttagtagcaatcagcccataaagttccaaaaatggttccatggaaaattttcaatacaacacatgatcctcgcatccaatgcccttgaagcatctgacttaaccatgacaatgaagatgtacatatattaggggggaaaaaagatgcagtatggtccagagaatgtaagtagaaacatacacg

SEQ ID NO: 80271 - DNA, 369 bp, Zea mays
ttaccaaatggacgtgaaaagtgccttcctcaatggaccaatctaggaagaggtctatgttgagcaacctcccggctttgaagatagtgagtaccctaaccatgtgtataaactctctaaagcgctctatgggcttaagcaagccccaagagcatggtatgaatgcattagggattttcttatcactaatgggttcaaagtcggaaaagccgatcctactttattcactaaaactcttgaaaatgacttgtttgtatgccaaatttatgttgatgatattatttttgggtctactaacgagtctacatgtgaagaatttagtaggatcatgacacaaaaattcgagatgtctatgatgggggagttgaa

SEQ ID NO: 80272 - DNA, 367 bp, Zea mays
tgtataacttgacttcatatacaatttttggtttttgatttacattaaaactagaaaacccccaaatttttaccataatcatagtagtatcatagtaaatttgaggctttagacttattaaagccttttcttggtacttgatcaacaccaaccctacatgactttgttgtagaagtcatttagatgctattaagcataaaagcaaggtttgcttgataactcatgttctcgttcacttaacaaaacaattctagaaagatctaacttaccattccatgttacttttaaattccaaacttcctaatccttctccaataatcaagatagacaaagatttatgttaggcatatagaagagaaccgaccca

SEQ ID NO: 80273 - DNA, 366 bp, Zea mays
ttgaatgtgtgtgtttgggcattcatttgcacgattcattacatcatacattgcattcataaacattcatttagacatacataggatcatcatcatcatcatatcatacagatatagacagttgctttggccctaagtatatagcttgaaaagcatattcatgcttcgttgtgtacgaaaagaagggaaggtgtttttcgccttcggctcaaaaaatacaagtttcgtccacatcaaagcatttcatacatcgatggaagggtaaaaatatattacatggtatggacaaatttacagagtagaatctgattcttaagttacaatattctttataaaggttaatacaagagtcttattggaattttt

SEQ ID NO: 80274 - DNA, 364 bp, Zea mays
tcttcttcattctgatgaaaaccaagccctttgatctcttcatcaaaacgaatgttccaactccgagatgcttgcttcaacccataaatggatttctgaagtttgcatatctttccagcattgatcggatcgacaaaaccctcgggctgtatcatatacacgtcctcatctaggtttccattaaggaaagctgttttgacatccatctgccaaatctcataatcgaaatatgcggcaatagctagaatgatccgaatagatttaagcatcgctactggcgagaatgtctcgtcatagtcaactccttgaacttgtcgaaaaccctttgcaacaagtcgagccttatagatgtgaacatttccat

SEQ ID NO: 80275 - DNA, 364 bp, Zea mays
ttgatacacggattaaacatcgccatatcactgggtgtctagagactgatggtgtacggagattctttggtagtcatcagtcagataaacaaggaatgggattgttcaagtgattcaatgggaagatactgcgctgccgtccgaaagctagaagataaattcgaaggtctggagtttcatcatatagaaagagatcggaacacggcggctgatgtactgtccaagctcggatccggtcggactcaagtcccgcccggggtcttcgtgcaagaaattctccagccgagcatctcgacggatcaaatagaagagtgcattatcatagatcaacccgagtcagactctgatgactggaggcaaccga

SEQ ID NO: 80276 - DNA, 366 bp, Zea mays
tgaagccgaagctcaaagaaattcggaactgtaagtatctttgaaaaatcttcagaataagtgcttggagttcagcactcgatgcattcatcagttaaagcaagtgttccattttgttggagccagtagtgaagagtttactccttcggctgaagacctgcctggtgccttcgagcacattgaaggtgaaattaatgatcttgacgaagttatagctgggcatagcgacttctgtgccctggcagcttcttggggcacagttgttgcctttttgaagtctagctgtgaacatggcaagattgttaatagacccaacttcagcctgtcaccagcagacctagataatattcccaatctggctcggag

SEQ ID NO: 80277 - DNA, 361 bp, Zea mays
ttgattgtgtcttggaatggattgctagctcttgtattgaatgtgaaaggttggaatgcttggatgtggtcaatggaggtggttggggttgtatttatagccctcgaccacttcctagccgttggtcctttcctgccgaccgcggacgatccgcgcccctggtccgaacggtccgcccctgcacatcaacatctacaatcgcaacggtcagcagtaacagctatatcaacggctactatgcattaaatgtgttgtcagatgtcagataaaggcagtcgcggacggtccggttgtgcaccccggacggtccgcgaggacgctataattcattttaccgaacctgtcaccttcgggtttttcg

SEQ ID NO: 80278 - DNA, 363 bp, Zea mays
tcaattgggcgaagggggtgtctatcatctaatctcggccgcaacaaaaggatccgacagctacaaacctgtcttccccaaccgagccccgttgcagcggcgccgccaggccgtgcggtggtgccatggccggtatggcgatttcgcaacctagcagcccaaaccgaacgagccaagacctacgtgatgtccagcgagaggtgaaactaagcatgggtcacttaccaggggtggagatgcagctacggagatccacgacgcggcgcggattacgggcgctcgcccgctccggtgaggaattctcagtaccgcggttatccttagcgtgattgcttccatcccgagcttcgccaacctccgacg

SEQ ID NO: 80279 - DNA, 300 bp, Zea mays
  unsure (1)..(300): unsure at all n locations
ctttttcaaacaccacatcctttaatcctctaaccatatctttcttcaataccttcttgagtgtgctcattccaacatgtgcaagcctcctatgccaaagccatccaagagaagctttggtgaagaggtaagnnnntaagtctgcatcttctgaagtgaaatccactaagtagatgttgttgtatctaaatcccttgaataccattgattcatcatctatttttgttacaataacctctgatggagtgaataagcattgaagtccaagatcacagagttgtcccactgataataaattga

SEQ ID NO: 80280 - DNA, 362 bp, Zea mays
tctcctcaattggcgccactcctactctctcccgtatatcatcattccggactcgatctctccttgtgtggccacatagccagcgcaacatacacatctctgccacacttagttgttggacatgtcgtcttttagtggaccaacattctgctccatacaacatatccggccggattgctgtcctgtagaatttgccttttagtttgtgtggcacccgggggtcgcataagacacccgcagcttgctgccacttcaaccatccagctttaattctatgactgacatcctcatcgatgtctccctccttctgaagcattgatcctaagtaacgaaaagtgtctttcttgggtaccacttgccca

SEQ ID NO: 80281 - DNA, 277 bp, Zea mays
  unsure (1)..(277): unsure at all n locations
gcaccagtctccacttggatgtctcagagctgaactccctcggcgtggtagcatcgcagagactgctgatatcgcgtcgagtgtagcaaagccacgccctgagcttctttcagctggtccagcgagtcttctcggctggtctggttgcttaggtcgtcgtacgcacttgtcctcggngaatcgtattctaagtctgtgggaaagacagcctctgccccatagactagaaagaacagtgagaaacccgtggctcggcttggcgtcgtcctcaaactct

SEQ ID NO: 80282 - DNA, 411 bp, Zea mays
  unsure (1)..(411): unsure at all n locations
atctctttatatgctatgactaatgcgntctcaaggttatntcacaccaagtcatatgtatattgaaacgggaatggagtcttctgcgaagaccaaggcttccactccgtaactcatacttcgccaccactccgagcaactctatcttcttcggnggagaaatgagcatcaaggaagagggctctaatgattccgttnttggcgattcatgccananagggngaganatgagcccaaagcataaggaccgcaccaccaccacataattcatatacttagtgctntccanaagtctntatcattnggtatcctattggtgtcaaaatgtggagacagtagtacttcaatatagtatatcataaccctctcgacactaagaggtggatctctttaggggagtcttgttagtca

SEQ ID NO: 80283 - DNA, 276 bp, Zea mays
  unsure (1)..(276): unsure at all n locations
tgagcaagtcngcgatgctagagctagcccatattattcttatcaattaagcgagtgtctagtttagcattattattgtcggcgtttcgacccccgggggtccctggaccgacgagtgaattgtcgccgcgtgccccagcccagatgggtcggcgcgaggcggaacgcgaantggggaagaagccggatggagacatgcgtgggaggtggaacccgtggccttcgtgttagccccgcgcccaggtcgggtgcacttgcagtangggggtacaagcg

SEQ ID NO: 80284 - DNA, 173 bp, Zea mays
aaacctaaccatcttatgaacacactcgacacctttcccgtcatctctagcgattccctttctagagcccctcagccatccacaaagaaagccccctccacaaacaaaatccacccaagagagaggtgaggtaccatcgtgagtattgtgagagggatgggcatctagcttca

SEQ ID NO: 80285 - DNA, 352 bp, Zea mays
tcagcttctggagccacaacttcttgtggcgggatattggtagatacagcttgtcgagtcacgagacttcatcctgagatgctcgcagctcctcacgatggtggtccacatcagacatggtaaagcgatggctcctctccagaatggtcagggaggtgctggcatcgtggtacaacctatccagattatcatgagatgcaacgagtggctcgtttttccttctgcaagcaagaacaacgctaagcattgaagcaaggggagcacagcaggagcagccaagagagtttacctcatggaccatcttctcgaagtctagttgtgcattcagagaggagttcaaggagcgagcacc

SEQ ID NO: 80286 - DNA, 226 bp, Zea mays
  unsure (1)..(226): unsure at all n locations
cttcttcatggtagggcttcgggtccctctacatgacatgatangcagaagtttaaagaaatttgagatataccttcatcagttaacacctaatgcaatagttagactcagtggttacatatgggctctccaacgccagggtatgagtgctaatgccgaagctntctgtcnggtgcatgagctgcactactagacgaaggccagagcagatggtcttcataagaac

SEQ ID NO: 80287 - DNA, 407 bp, Zea mays
  unsure (1)..(407): unsure at all n locations
tgtcaaacagcagatttcatattnttcctatgtttttaataacacattattaattactcgcaagggtttggggtcgtttcatcatggngntatntatctatgctttttctaagttntcctagtgaactaatanagttnttctagtgaactaatacaaggtattccaattatgttatactacaccagcgtataataaatntttctagtgaactatactgaataagtagactaaccanaccatggtctccctggtctttaatanacctcataatatatcttaacttagctaaaagattaatagaacctcctactggatacaaggttatatcttaacaagtataagaatacgtctctcaatntatacctagctacaggaactattttctctattattactttgcaatata

SEQ ID NO: 80288 - DNA, 339 bp, Zea mays
  unsure (1)..(339): unsure at all n locations
atcccactgtgagacaatgacaagaggctntacgacttagagcatccgccaccacattagcctttcctgngtgaataatgaattttaggtcataatccttgattagctcgagccaccttctctgtctcatngttaactccgactgggtgaaaatgtactttanactcttgtgatctatatatatatatgacatatattcccagtagataatgatngccaaatttaagggcatgaactacttcggccagttccaaatcatgtgtngngtaatgttcctcatgccggcgcagctgccttgaagcatatgctattactcgtgcttcttgattataacacacc

SEQ ID NO: 80289 - DNA, 352 bp, Zea mays
  unsure (1)..(352): unsure at all n locations
taacgtacctacatgatatgcataatgcatatgaatgaataccacacganaagcgggagatagatatntacaccagagaggataaatacatagcatagcatcataacttctatgagcacacattagataattatgattccgcaataatcataatctttgagataatcagacttaactcanacatcatacaataataattaaacacaagcctcgaactatagcataacactgatacatcataacacttatactttggtaccctcgacattcanacttggaataagaatagaaagtgttaaatagctttctnagtggttctctatgtaagctgttagccaataattacatgaca

SEQ ID NO: 80290 - DNA, 306 bp, Zea mays
  unsure (1)..(306): unsure at all n locations
gcaagggatgcctacacaatcggtagacacccctcaattaaggatggacttggcttcaagagagaagctaagaacttaacaagccataatgctcccattcccgccaatgagaaagggaacgcccctatggctagtaatgtgcaaaagaaccatgctcttatgtattatgatagaagacacactacaaatgcttataggaagtataatgctcttgatgagtntgactcttcatgccatgtctgcttctagttcttctatatgcatggtagaaatatgtctatgagaaatgctactcatcatatgtct

SEQ ID NO: 80291 - DNA, 417 bp, Zea mays
  unsure (1)..(417): unsure at all n locations
cacaatgcgagtggagttatggctagagtagtgtgtaccctccgtggcaagaggctatacggaggtgtatctgtgctctcggntggcgtgaacctgatctggtcttaagaaccccggtggcaaggtgacatatgcatggggtaagtgctacatatgtcatgtgattggagatcctcagctgaatataatcgatntggatcgccgtaccttcgcggttatgaagacttggtcactgccctatacgtagaactcctgtatagagtaagggtggctaagaaattggctagtgtatgtcaagtgattgaactatggtagaaagaactctagtgcangtaagttcacttaacttgccatactaaactggatntttaaggatccgactttagtaagcatttatgcanacagagtncttactta

SEQ ID NO: 80292 - DNA, 309 bp, Zea mays
  unsure (1)..(309): unsure at all n locations
ctagaccacacttacatgggaataacccgtcaatccctcggatctagtccgacacggccactgataggatcaagtaccacaatctcactcaatggtgagtcacagagcanatacaatatagcatataaccatacatgtcagagtattaaattattacatcatcatcatcactcggagttttgcaaagtaaccatcattgttcgaagtgcagcagaaataaactaacggtaaataaatagagagatggggaagcctgtctcatcactcctcatgctcctnctcagccgaggcanggtcccactcgacagt

SEQ ID NO: 80293 - DNA, 328 bp, Zea mays
  unsure (1)..(328): unsure at all n locations
ctcttctgcatattaaaggggaagaaagatagccatagcataactcccattntatactgcaactgattgatacaacaaccacaacaacaacaaaacattttattctacgcatgtttggggctagagttataaacacagtagaactcacaagtcatggttcggacacatggatagttgtttcccatgtacttgtattcaaggctaaattgcaactgattgatttttatttntaaagacatctacaagtcgantaaacttcatggtattactttatagacagaattgacataatgccagaatgtaaacataataacaacnaacagaatct

SEQ ID NO: 80294 - DNA, 333 bp, Zea mays
  unsure (1)..(333): unsure at all n locations
ctttaagctcttgcactcggattgctntcttctttctcattctttgcttgtgatcaaaactcaattgtaaccaaggcaagagacaccaattgtgtggtggtccttgtggngaagttatgttcccggttgatttgagaagagaaagctcactcggtctaagtgaccgtttgagagagggaaagggctgaaagagacccggtctttgtgaccacctcaacggngagtaggttngcaagaaccgaacctcggtaaaacaaatccgcgtgtcaccctcttcatttgcttgcgagtatgttttgcaccctctctcgcggactcgattatatttctaac

SEQ ID NO: 80295 - DNA, 398 bp, Zea mays
  unsure (1)..(398): unsure at all n locations
tttctgacacaatgtgttctcgaaggtcttcgccataagacagtggcangaagtcctacgactcaatgcatctgccaccacattggccttgcctgtgtgataatggatctccagttcatagtctntaatgagctcaagccatcgnctttgcctcatantataactctgatgggtgaagatgtacttcaaacttttatgatctgtatatatgtgacagatatntctcaacagatagtgacgccacatctttatggcatgaaccacaacagctagcttcagatcatgagttggatagtgctcctcatgtcngcgcaactgccttgatgcatacgcgatcacttcggcctcttgcatagtacacnagcgagcccactggcagatgcatcacaatatacatc

SEQ ID NO: 80296 - DNA, 195 bp, Zea mays
  unsure (1)..(195): unsure at all n locations
cgagatcagctctatcaaaatctaccaagtatagctgaccctctaacactcncttaaatgctattgaatcatcacttcttctaaagacagtgacacctacatcagttaaaagacagttgtagcccatctgacataattgagaaacggagagcanantgtaatctatagaatctacaagaacaacattggaaatgg

SEQ ID NO: 80297 - DNA, 401 bp, Zea mays
  unsure (1)..(401): unsure at all n locations
ctcagcttcgatcttagccttgaactcttgtcatatgacccgaacaacctgngaatcagtntaagaatggcccttctgattcccattgcttntagcttccgaagacccanaagcanggcttcatactcggtaatattgtttgtacaactganatcgagtcttgccgcataacaagtttaactttggatgggagaccaacacagcagctgctcctaccccgaaggttccccaagacccatcgcanaacactgtccatacttcggcatctttatttgtttcttcatcctgagcccctggcgtccagtcagcaatgaagtctgctaacgcctgtgactgaatcgaagatctatgcacataatcaatgcanaattcattgagctctgcagcccattttccaatac

SEQ ID NO: 80298 - DNA, 281 bp, Zea mays
  unsure (1)..(281): unsure at all n locations
gaagatagtgagtaccctaaccatgtctataaactctctaaggcgctntatgggctcaagcaagccccaagagcatggtatgaatgcctaagagatntccttatcgctaatggcttcaaagtcgganaagccgatcctactctctntactaaaacacttgcaaatgatntgtttgtatgccagaattatgtngatgatatcatatttgggtctactaacgaatctacatgtgaagagttagtaggatcatgactcanaaattcgagatgtctatgatgggg

SEQ ID NO: 80299 - DNA, 266 bp, Zea mays
  unsure (1)..(266): unsure at all n locations
agtatgggtttccaagacaatgaagttatgagcattatgttccaagaactgactataccagagatgagaaatgcaactcttcttgcacccctcgatctttgtatatatgtacaactgtgtatggactgcactgcattangatggtggcgaatgcaacaagtgagagagatgtggagaaactttttctgtagaaagagaagagatgatgaagaaatgtgagatttataggagtggtagctagcgattcgttcatgagcgtcacctat

SEQ ID NO: 80300 - DNA, 172 bp, Zea mays
  unsure (1)..(172): unsure at all n locations
cggagtccttctggtagtcggatcttcttgccncggctggtgggaggtagtcttcgctcacagcgctggaagttgcgctatttccggctttgctccgactctcctggagagtgctggggaaggcttcttctacggtggatctgcgatgcgatgtagagttccttcttcgtct

SEQ ID NO: 80301 - DNA, 303 bp, Zea mays
  unsure (1)..(303): unsure at all n locations
gctacttgaagggggacctccggtcttttcttctcttcagccacgtggatagccaaccggnttcccctattaagcatcttctctaagccataacccatggttntcttgcngacattctttntgggccctacattgngcaaataataataaaattgtgttattataacagtaacaaatgtagatattaaatgaacaaaccaatgcttggaacatntattggttacctggaactaagtcaccaactgggtctccttcattcnngatacnctctgaagagcagcatcaaatggctcagctgactca

SEQ ID NO: 80302 - DNA, 286 bp, Zea mays
  unsure (1)..(286): unsure at all n locations
ctaagctactggctctacactataaaagattattatctagcaaactgccattactctgttgcatcatgcatagcctactacatatgcagcagtacgtcctcgttagccataaatatttggaccatctgcaagttgctaatcgctgcgtacgggtgaatctattcttgtcgtcacgaggaattatcttaccattatatattccgtaataatggcatggcgatgcacccactgaccatctttacctgcgangatgtctatcttaactggtgagtaatcaattgatacc

SEQ ID NO: 80303 - DNA, 195 bp, Zea mays
cacgtgataggtctaaccatgttactttcgaagaagatagtccttgtgcagcttgtcaagcaggtaaacaagtgggaggagcacatcacagcaagaatgtgatgaccacatcaagaccactggagctgctacatatggacctcttctgacccgtcgcctatctaagcatatgaggaagtaagtatggtctaggta

SEQ ID NO: 80304 - DNA, 408 bp, Zea mays
  unsure (1)..(408): unsure at all n locations
acagcgcatgtcangcangggaagcagttggtacccaccatccacacaagaacatcatgacgaccgacaggccgcttgaactactccacatggatctattcggcctgatcgcttacataagcatcgacgggagtaattattggcttgtaattatggatgagtattctcggttcacttggtatttggtggggacttgttctcanatgctatgagtcaagaacaaggcaacacacagtattaaatggtaatgcccttcgtcctttgaagcattanntttccttangatataacgatcttcgaacgaaggtcatgaaggacgtaccttcatcatcatgatataagaagatganaggcgagacatatganatatganagaatacatgaaccaacatnatatatcattcacat

SEQ ID NO: 80305 - DNA, 280 bp, Zea mays
  unsure (1)..(280): unsure at all n locations
acactacgacttattctcttangggtgtggacaagtcttttnaccttcgtcngccctcacaatggacaaatcctggagataccttccnctcatgttgacaagatgattntctntgataagtgatttgccgaaaacctcatggcttggtcgccaagggcgatcttcggagtcttcaccaccactgtccacatcataactgtcgctgtcaccagtatcttcagacagaccttccagaatctncttggtgattntttctgtgttggtcttcgacatcgctata

SEQ ID NO: 80306 - DNA, 365 bp, Zea mays
  unsure (1)..(365): unsure at all n locations
atctgtgctcaatcgcacattaccaaactnggcttctacaactgataagtctgagataatntagtacgaacagtttgtggaaggttagagtagttagtgccagtgagactagataacctcaagagaagcttatggaaacccctcattntagctctaggatcaagaatganagcanatgagtatagaatgggtatntgcctccagtatttaagaaacttggtttcattgcacaacagcatctctcatgagctcatcattntcataagaactcanatgtctagcaattctaaaaatatgatgcaacattaatggagaggtacgataatatacaccagacaatgcaacagtagattcatgaaacaact

SEQ ID NO: 80307 - DNA, 153 bp, Zea mays
  unsure (1)..(153): unsure at all n locations
atccgagcgcaagtacttatcgcagaaggtgatgagtgaggtatncgtatnccggaggcgtgggagtccctcggctcggtcagcccttggctgcttacgtgtacttcgtcgnnttcaggatccgcttttcgaagtagtcaagaagcacgaaag

SEQ ID NO: 80308 - DNA, 410 bp, Zea mays
  unsure (1)..(410): unsure at all n locations
cgtactggttcgtacggatgcctgaggagctcatgatactctctactaaccttntcacgcctcaccaagaaggtncttgtaaatcaagtaggccgcaatatcttcacttatgtagacgacatcgtcgttgcaagcaaaagcanagcggaccacctggtcgacctcgcagagacattcgccaacatgcgcgacgcatgactncggctcaaccctgagaagtgtgtcttctgagtactccacgggaagaatacttggtacctagtatcacaccgagggatcgaggcaacccaaccaagatccaagtgatcatcaacatggcacccccgcagtccagcacagacgtccagcgactgacaggaagactagcgggcctgaatacattcatctctaagtccaccgagcgaagccta

SEQ ID NO: 80309 - DNA, 222 bp, Zea mays
  unsure (1)..(222): unsure at all n locations
gagaacaacatanaacatttcatcaccacaccttacacactacaacanaatagcgtcactgcgtcagcagcaccataaccaaacaatgacggagatggcaacatgtatattgaagagcaagagtgtgcctagagagttatcgagagaaacaacgtaacacaatggtgtatttgtttaaccatgccccaacaccaagcctcgaaggaagaacaccctanagca

SEQ ID NO: 80310 - DNA, 437 bp, Zea mays
  unsure (1)..(437): unsure at all n locations
atgatcattcctacaaagaatgtcgagaatagtatgcataaattttcaacatgcctttntggatttggttaaatccagtggtctgatcttcgatctacggtgggttgctgaattctagattaatcgtcgtgatggagggtcgaactatggatatgtggatgttgaacaacatcattgttgacatgtcgttatctatganatccatgcctcagcagatngaccggtacttatagaanaacaccactgaatgtgattggcaagtgttggntcccaactgaccacatattcccacgttgttgtggaaagactcccttaaactcacgattatcattggtggagaagatgcattactcactattgagtcactttcttacatgtnagcaactacaaacgacatgtgactctntgcatgagaacttctatatcctcattatcta

SEQ ID NO: 80311 - DNA, 466 bp, Zea mays
  unsure (1)..(466): unsure at all n locations
cacagagaaacgtaatctgngctagtggatcgtctgttctaaagttctactagaaggtctcgtctaattagtgctaatcatggttagttacgatgtctctgttctctcaatggttcagtacaatcttgtctatatcattgcgaatctggtcgaatcccgtctgtctatgttcagctcaatggagtacatgtcaatttaatatgtctaatttcagtgtactgagctcgagtgaatatatatcacacactggtattttgaatacatgtntgagtcttgttangctatatcagctanggtcttgtcaactagggcgagttcttacactttgatcaacgatcataatttagctctactttaacggatagacacagagctgggcttgatagaaagcacattnacccgctaatgtctatgcatgagctcatcagatatatcagctcttcttgcaatgttcactcactcatat

SEQ ID NO: 80312 - DNA, 401 bp, Zea mays
  unsure (1)..(401): unsure at all n locations
tcagctgatgtcaaatcagaacttaagtgcaacttgaagatggcaagaacatcaatgcctccactntcagtattgaatctaagtctaactctaatgataattcctgcaagcattgtgccaaatatcatgcttcttgtngtctaactaaccatgcaaggaagcaaagcccacaggtgaaggtcaaagaaattntgaanagatgctctagcaatgatgggttaaagaaaagtgaacccaagtacaagtcccttaagcccaacaagggtagaagggggcttgngttcaactcatccaangaaaaccctagcacagtgcataaggggtggagaatccccaagttcatagaggggaccactctatatgatgccttggggaggatccactcctcanatgacaagtca

SEQ ID NO: 80313 - DNA, 402 bp, Zea mays
  unsure (1)..(402): unsure at all n locations
catgtgagatagaataagaacactattactgtgtaagtgttttgaggaccatcggaagaggaatgcncccaacagtatcccctttgtgctactagatcggntttataacangcacagtccgtggaagatacaaaggcttntatgctaaaggatacactcatgtactcattggcatcgacaacattaccaagtggatagagtagaaaccaactacctctctgaactcaactatagcagtggagttcatacaagaaataatgttcagaattgngatacctcacagcattatcacggacctgtgatctaacttcaccagctcagagatctttngattatgatagcagagaagcatccaatcaagtaccatcagtgtacatccagagctaacgggaaagcgaacag

SEQ ID NO: 80314 - DNA, 374 bp, Zea mays
  unsure (1)..(374): unsure at all n locations
tttagcaataagcatgtgtcaagntcagctctatcacaatctactaagtatagctgaccctctaacacacccttaaatgctattgaatcatcacttcttctaaagacagagacacctgtatcagtaaaaagacagttgtagcccatttgacataattgggaaacagaaagcatgttgtaatctatagaatcaacaagaacaacattggaaatagaatggtcatgagatataagcaatttaccaagtcctttgaccaaccttgaatccatcccgaatggatagctcgtgggatcttggtttctatataagagaacatcctttctctcggcatgtggttgtgcacncgtgtcagatcacttgaccccgatgctaac

SEQ ID NO: 80315 - DNA, 290 bp, Zea mays
  unsure (1)..(290): unsure at all n locations
ctcgaagccatcttaagccggtaagaaacttatgtttngtacttntaccttctnctttganatttgtacctttcttactctgctgnttggtatatacaggatgacgaagctgaagattgacaatgctgatgtttagcanaactganaacgaagccttagcttgaagcttaaagtgcttataatgtgctttcctgcaaaaattcttggagaaactcttgtatatagatatggaacaactcatggtaaattgacataccttgtatatatactgtctccttatcgattcagct

SEQ ID NO: 80316 - DNA, 452 bp, Zea mays
  unsure (1)..(452): unsure at all n locations
aagaacacacctcatagacagctcggtatcccttgaagtccagttttgatgcagtggaatgaaaattcatctctccttcatgaatgccaacatccacttgaatctatagagcaaggatgtaacttggtggagagctctaaatattgagatttacaaaagggaaacaatgtacacagaaatttaacatgtttcataatcatgctagagaatgagggagatcacatntactatctactataacaccagatgtgttaagacaaaaanatattgatgacaacagctaaatgaagtcataagctgggcctttattcatngatattgaatgaatatagttgacctctgaatacaacttgcttttntatgaagaagctactatctactgaaattattgagcatttccaggcagaagttacagcactgtgactcctcgcttgctctctaccttctctttg

SEQ ID NO: 80317 - DNA, 410 bp, Zea mays
  unsure (1)..(410): unsure at all n locations
ctcagctttaacgctggctaagattcctgtcacgagattgttgcggagatattgaagatggttggcatctaccttcatcagntaactcctaacgctatctgtaggcttagcgtttatanttgggccctccgaagccaagcagtggagcctttngctgacagtttctgtcgagttcatgaattgcattatcaaacaaaggccagaanagatgggcttcatgaanacttcggttgcttacaatttgcctaccggagaaccgcanagtttcctgtaattagctaccgaagcanatggccggcaggctgganatcagaatggttctatgtcaagggtgatgangacaangagaagcttgtgcanagtccactcgagctaactttcggagaaacccgccccactgcaacatgaca

SEQ ID NO: 80318 - DNA, 359 bp, Zea mays
  unsure (1)..(359): unsure at all n locations
tgaattgattcaagaagcggaagaacaagttcgtataattcaagagaatttgatggtggctcanaccangcanaagagttatgctgataatagaagaaagcactggaatttgaaaatgagatatgtgtcctcaagtgtaccactgcgtggatgaggagattaaagtaagggcnattgtccctcgtatattgaccattttgatcttataaaagtgngagatggctacaactcgagtactgctgctatcgatggctaatgngtcatgttctcactgaagagtgctcgtgtgccaggacagtaccctggaaactcatgtcagtgattactaccggataccatcaaattgatcatgctcagtc

SEQ ID NO: 80319 - DNA, 268 bp, Zea mays
  unsure (1)..(268): unsure at all n locations
ctcagctgacgcgtcattggagcctactggngagactccntcttctcttctatcgtcgcattgaatgcaacgggtggcacctncggtgtagaagtggctccttgctccaagntgacaatgtgtttggagtctttgatcattagttcaaagctcacaaacttgccaataacttccttgggagacattagtttatatctaggatccccacgtatttattgaacttgagtaggtttgcgaaatactaaggatctaagaataaccttgacca

SEQ ID NO: 80320 - DNA, 176 bp, Zea mays
  unsure (1)..(176): unsure at all n locations
gtcgttcttccaggaataattgcatgtgaggtcgacctcgcacatccgtagagatggcaacnggtacacacccgtcggggtttgctataccatacccgtacccgcgatacatatctacactcattaacaaacccgtacccatgactcggttgaaatgatgccaaacccgtacccat

SEQ ID NO: 80321 - DNA, 260 bp, Zea mays
  unsure (1)..(260): unsure at all n locations
ggacagactgcaaggactaatcatgtactggaggatatgtngngagcttgtgcacttcancatggaagaacgtgggataaaagtctaccatatgctgaattctcatataataatagttatcagaccagtctgaagatgtcaccattcacagctttatatgggaggaagagcacgactcctctatattgggatcagacttgagatagacagttctctggacctgaacttattcaagaggaagaagaacaagtccgtataat

SEQ ID NO: 80322 - DNA, 289 bp, Zea mays
  unsure (1)..(289): unsure at all n locations
ccctggcgtccagtcagcaatgaagtctgctaacgcctgngactgaatcgaagatctatgaacataatcaatacanaattcattgagctctgcaacccattntncaatccttccagtagcttctcgggttctcataatatccttcagagggtgtgaagaaggaacaattatgttgtaagcttganaatagtgccgaagcttcctggaggccatcaaaacagcatacagtaccttctccaattctgtataattnntctttgataactaagaacctcggatacgaaatata

SEQ ID NO: 80323 - DNA, 427 bp, Zea mays
  unsure (1)..(427): unsure at all n locations
gtcggctcatttgctgatatgtgatgtggtcaacgatataagatacatgctctctntnngttaagttaagcatttttttgtgtcgtcattcttattcattcagtcattaagcacaacctcagattacacagcgaaggcatttctgaatgtcttgatagcttcaaatttatacattgtaatattgtggtaacaccaatttcattaggctgaccattctttttctcgcgagatgctcttttgcctactangaatgctgataactgagcttcccagcctcttctataatcatataccgcgcggtggcaaactagcctcgttcgggactggctntctgtctatancatactggctagtggtcaaccgagaaagctataacaatcttatactaacaactatggctgaaactcgtctcttaaagtgttgtgat

SEQ ID NO: 80324 - DNA, 206 bp, Zea mays
  unsure (1)..(206): unsure at all n locations
tgtgaatacaccttggccacgagtcgagctntgttccttgtcaccacaccatgctcgtcttgcttgttgcggaagacccacttggttcctacaacattttgattatgacgtgaaactaaatgccatacctcattcctcgtganattgttgagctcctcttgcatcgccatcacccaatctgaatcttgtagtgctttctctaccct

SEQ ID NO: 80325 - DNA, 237 bp, Zea mays
gagcccgattgcactcgggtgccggaagtcacggaacgcacttgacgctttaccgggacgcgtggcatgtggcgcgccgggggtcccacgcgtcttggccccccatgtagcctgcaaactgggactgctttgctggtcaacgcgattacactacagcgatttgaaaccttgacgctttctatcttcactttgaggatcaaccaatacgcggaggagatagggaagtgcttgatctgc

SEQ ID NO: 80326 - DNA, 223 bp, Zea mays
  unsure (1)..(223): unsure at all n locations
aagatagaccttgtgcagcttgncaagcanggaaacaagtgggaggctctcatcacaccaaanatgtgatgacaacatcaagacctctggagctgctacatatggacctcttcggacccgtcgcctatctgagcatangaggaagtaagtatggtntacttattgttgatgaattattccgcttcacttgngtattctctttgcacgataagtctgaaaccca

SEQ ID NO: 80327 - DNA, 381 bp, Zea mays
  unsure (1)..(381): unsure at all n locations
ctggcagcttcctgacttncatgaatagcgatgggtccttgatccgaaggtatcttcatgcagagataagcangatgaagaattgcttcgaaagcattganggtgccacgaccaataattgcattgtaagggtattccatgtcaacaatgtcaaacacaacttgctcagttctatgtattgtgatgaacccgaaggtcactgacatggtgatcttgcccagtgctacaatctgtcttccttcgaagccacagagaggatgtgtagcatcatgaatcttatcttctggctcttgcatttgtctgaaggccttagcanatatgatatcagctgcactacctgtgtcaaccaagacattgtgaccagannatctttgatacaca

SEQ ID NO: 80328 - DNA, 148 bp, Zea mays
  unsure (1)..(148): unsure at all n locations
ctaagcttgagctggctctgccttgacaaggacanctgcggtagcctgctattatttctganggatgagaaatgatatttgaaaatctggatatttgaatcattcttttattcttatagtaattctctttcatataggggttaatact

SEQ ID NO: 80329 - DNA, 141 bp, Zea mays
tctctggacacccttggtgggggaaccttaagataacatgatctccacctatactgtataggcttcacctcttgcatgatagctcttttgctggactggcagctctaagttcttctgatgactctgaccttgcctctgcgt

SEQ ID NO: 80330 - DNA, 261 bp, Zea mays
  unsure (1)..(261): unsure at all n locations
caccttccctgagctcgntgtcgagagacgattcatgttccagcgcgtagtggtcccaccttgcagagntactggttgtccctgcggtccaccgtgcagcgagtgcaagcgggtgtccgcctggtgtaaanatcctggcgcttcgccttcttacctgcagtactatataaacagacgagtangtgtgaagttaccacagcattcattgctatttgcactgttctgctgccaaaattttaaccatcgccgaagcttgactct

SEQ ID NO: 80331 - DNA, 263 bp, Zea mays
  unsure (1)..(263): unsure at all n locations
acatccacatctgangataaacaattataacccattccacagagttgtganacggacaacanattatagcttatagaatctaccaataaaacatttgatagtgattggtggtcacagataggaatattaccaataccaatcaccttgctcttgccactatctccaaacacaatttcttgtgcttcttgagttagttgcaatgtatgaaacatgtctnntctcccggtcatgtgatttgacatncactgtcagcacccaactga

SEQ ID NO: 80332 - DNA, 344 bp, Zea mays
  unsure (1)..(344): unsure at all n locations
ctggcgggtcgcggtgaggtcgccggagctaaaggcgagctcggtggagttaggcgtggtacggaggaagcaacggagaaggcagccgggcactgtgacgggctttatagccatggcgcgagcgtggtcactggcggacgcgggcgcgcgtgggttcgcgcacgggcgtgctctgagcgcgcccccgagtgtcagcccgcgtcaaacacgtgngagctcgcttctgccattggtcaacggcagatntgagcaccttagcgtgcgtatcttggcagaaccaatgtgtacgggctcttccctgctccatatcctaaccttttgctgtgagttccaagcaagatatg

SEQ ID NO: 80333 - DNA, 280 bp, Zea mays
  unsure (1)..(280): unsure at all n locations
gggcctcatctcgcggatnntgctcgagtgngtgtcctgaccccccgcanggactgngaccacagctagctcccgcaggatgtcaacgcgaggcgcangcctatggggatcgtcatcctncggcataccaanggtggtgccttcgtcgtgaacccctagatcgacgtggaaacattcgcgactngngccacaaccttcatcgtcaaggctgtggccatcatcggagcaatcggagaggcagtagtcacatgccgtcatgaagtctcgcatggcactggga

SEQ ID NO: 80334 - DNA, 309 bp, Zea mays
gtcctggctgttttgcacattctctatacagaactccttgtaacaccacaaatcgatcttacttcattccaaatgaactgagtgaaaaaatcaaaacttaattatggtcgatgaccttgatagaacattattcacctgggtaaagcaatcactagaaagaatttctacctgggcctcgcttgctacctttttctcttgatgcgacgcactgctcacttctgatcaaagtattgaatcttgatgcttctctagaacatcttcgcggcggccgctcatgcccgtgctgcaaatctctctcgtgctgaatac

SEQ ID NO: 80335 - DNA, 325 bp, Zea mays
  unsure (1)..(325): unsure at all n locations
tgagcgacgaggagaagctctctgaggagaagaatgctgacttcattgaatcaattgctaagacacatactgaanagattacgaacganattctagaaggcttatctgaagataccggtgacagcgacagttatgatgcggagagcggnggcgaggacttcgaagatcgaccatggcgaccaagtcatacggttttcggaaaatcaactattaaacagagccatcttgataacatgagaggaaggtatttcaggacatatctatcgtgagggctgataacagagacagaaacttctctgttcccgaagagaacanagtcgtgatc

SEQ ID NO: 80336 - DNA, 411 bp, Zea mays
  unsure (1)..(411): unsure at all n locations
tggtgtacgctggagtnatggctctgcacttntgttaattatattaggcaacaaactatataagatacctggcctctagcctagctgttcanagataagntggacgacgcgaatagttgcacatgcatatgaccacagaagtaggaataacacggacacgcatgtcgacctcaatcagaaaccagcaatgacgttcttttattatttggcantaacattntatacctcacgatcgtgttatgcactttaattgtgactggacccaatatctgcgaagtggttccaacatatggaccgacagaacagctggaatttgactgccacccgtcaccgagcgacgtaactgaaccctattataattattaccctaacacctcacagtcaacattgtgtggaggacgctctttatcc

SEQ ID NO: 80337 - DNA, 366 bp, Zea mays
  unsure (1)..(366): unsure at all n locations
cagttgtacatggcttgaggtcttgcttggtgagctgatcgccgagcttccctcgatcgttctcgcttgggaatgtgtcacctcatctacttcgtgcacggtcttgagcacgtcccanattttacttggcgctntntaacncttgcaccatattatactcttctcgacttagagaggggacgagtattgtggtggcctgtgagttgaagtgctcgattatgccacctcgtctcatcgaatcttatccctacgatggacctgtcacaaactaacacatccatatctttgtggaggggtaggtattctatcatatactcactagatatcttacgtaacgtgtgttgctatggacgaagatgagatgtt

SEQ ID NO: 80338 - DNA, 255 bp, Zea mays
  unsure (1)..(255): unsure at all n locations
ttttatctaaacactatttgcgtgcttctctaatctaaatctaggatctctcttagatattaaattccactntggactttaatatatttctcgccacattattntatattgtcacaagctatgcacacacaatatatatgtcagcatgatgcattatctaatggtacgtcatttattatctattctgttaaagtgtggcgtncacatgagatgattacacacatatatataaaggagtatcatttcttcttttat

SEQ ID NO: 80339 - DNA, 333 bp, Zea mays
  unsure (1)..(333): unsure at all n locations
gaagataatgagtaccctaaccatgtntataaactctctaaggcgctntatgggctcaagcaagccccaagagcatggtatgagtgccttagagatntctntatcactaatggattcacagtcngaaaggccgatcctactntattcactataactcttgaaaatgacttggttgtatgccacatntatgttgatgatattatatntgngtctactaacgagtctacatgtgaagaattagtaggatcatgacacanaagttcgagatgtctatgatggnnggagtgaagtattcttatgattcaagtaaggaactcaagaagcaccttctag

SEQ ID NO: 80340 - DNA, 52 bp, Zea mays
ttgtggatcgaatatatattcgtatattgtgagcgattctgacgtgattgtc

SEQ ID NO: 80341 - DNA, 428 bp, Zea mays
  unsure (1)..(428): unsure at all n locations
catgctctcgctacgctgtgtagagaccatcaacccacaataatcatgtntaaaaaaagctggtatccaatctttacgaatntcatacattctggaaagactgatgttatcatgtatatggacatcatcaatcagcattgcccaggcagtctcagactcacgtacagttaaaggatgatgtattatagattggaaccttgtttagaaatactcttcctcanatctagcgtacaacgtcgttaaatacggcatatacctgttctgaacatgccacatacacanacgatggattgtgntggaaataccctgctagtgaactggcatgtggatttgatctgaatatatattcacacatatgcaccataccactatattcatcatacatctagtgaacgataatgttagctataacatactgtagcatactc

SEQ ID NO: 80342 - DNA, 317 bp, Zea mays
  unsure (1)..(317): unsure at all n locations
atggctcaaggggcacgcacaangacgctgagccccgacatgtgggcccagggacataacggacgtaatactnggagcaactaatgctagtcactcaggcaatctcctggcgccctgatatccgcggctggcgtagtattggcgtgcangggaagcttccctggccacgtacgagtgatgatgatcgtggcgcatgcgacagtatggtcgtgccgcctgccacgggaatggacaggcacaccgcctgtgggatggtctggtcaccgtccgccagcagagcgacagggcacattaaatgctgatgcggacatcgtctg

SEQ ID NO: 80343 - DNA, 284 bp, Zea mays
  unsure (1)..(284): unsure at all n locations
aacactaccncacttataatgaatgagggtatatctctcgaatcttgtggatntgaactccttgaagtacctcataacaaaggtgtacggngccttcttctcctgatgctgcttgagcacgctgcggagaaatgactcgacacagggtgattctgggacaaccttcttctcatcttctcttcactatcttctcttctcttctcactattcactnttcactgcctctatctgtctctttgctcttcccactcgaggattctatcaaagagtatgaccatcataca

SEQ ID NO: 80344 - DNA, 222 bp, Zea mays
  unsure (1)..(222): unsure at all n locations
atgttagtcttagccaataagcacgtgtcgagttcagctctatcaanatctaccaagtatagttgaccctctaacactctcttanatgctatngaatcatcacttcttctaaagacagtgacacctacatcagtaaatagacagttgtagcccatttgacataattgagatacagaaagcaaattgtaatctatagaatctacaagaaacacattggaaatg

SEQ ID NO: 80345 - DNA, 302 bp, Zea mays
  unsure (1)..(302): unsure at all n locations
ctatgaagattcttcatccaacatgagctagtcggcgatgccagagccaacctatgttatgtcttagcaataagcatgtgtcgagntcagctctatcaaaatctactaagtatagctgaccctctaacacacccttaaatgctattgaatcatcacttcttctaaagacagtgacacctacatcagtaaaaagacagntgtagcccattngacataatngggaagacagaaagcaagtgtagtctaatgaatcaacaagaaaaacattgganatagaatggtcaggagaatatagcaattta

SEQ ID NO: 80346 - DNA, 236 bp, Zea mays
  unsure (1)..(236): unsure at all n locations
tgtgggagttcgcaagagaaagggtttgcgtgtggcatcatgcttncttaataagctaagcgaaacctagaagcctgaagatgatctttgagtaccagaatcagctgttgcaatcagcaaccagatgctcctcanagggctggatgttgtgaagntccatcttctcgaagagtctacanagtgaagatatgtagctgaagtaaagctatacccataacccttctaagccgaatctc

SEQ ID NO: 80347 - DNA, 352 bp, Zea mays
  unsure (1)..(352): unsure at all n locations
gcatgatcaataaagtgcaccaagagaacctcganaaatgctttgtgcaacaatattcgatgatccatcgccttgaaacanacaagttgaggaatgttgccaagctctttgcacattatgtgnngactgatgcactcccttggcatgntttggcttacatcaggctgacagaggaagacacgacatcatcttctcgaagttttataaagatattattccaagaattatcggagcacctgtgcatacgcctactcaatgagaggctgaatgatccctacatgcaaggttccttcgagtctatcttttccaaggatcgtncgaagaatacaagggtctcgatcaacttcttcat

SEQ ID NO: 80348 - DNA, 148 bp, Zea mays
cgacgctacgggtgaacactatcatacctctgaatactcaaagctatgacaacctctaggatgggtgctgcatacagacgttcagcacgggctgcgtcagaggaatctatcaccaacataatcagcatggcacttatctcaacatcac

SEQ ID NO: 80349 - DNA, 263 bp, Zea mays
  unsure (1)..(263): unsure at all n locations
gctactaccgtgtcctatgaatcttntactatgagggtaataagttcttgaatccagatntctntcctaatctagatcaagcacttggcctacactagccatctnttatcacaccctgagtgtacttatcactatggtgtagggcagtgaccaagtattcttgtccgagaaataatggcgatntgattcgattaatacccagctggngatctccagccacagacatatgtagcacttaacccttgcatatgtcaactcgcacc

SEQ ID NO: 80350 - DNA, 308 bp, Zea mays
gccttgatctagctgatctacttggaagagtcgtggctggaccatggagatgtcacgctgggactcctgccgggcggggggactacctgcccggcggacggtgccgcgctgacagcgggagaagcgcgggcgcctgccgtcgcagaaaaccgaaactgaatttaaacccagaataatccggaataaacacaagacatggagagatattgctttatgatattgaacattaaagcatccgaacgtgtatatagaattttgcttttcaaaacttgatggtttcaagccagtaagttaaatcatttgttatc

SEQ ID NO: 80351 - DNA, 279 bp, Zea mays
  unsure (1)..(279): unsure at all n locations
agtatcccttggccacaagtcgggctttgttccttgtcaccacaccatgctcatactngcttgtgcggaagacccatctggtccctacaacattntggttaggacgtggaactaaatgccatacctcattcctagtgaagttgttgagctcctcttgcatcgccaccacccaatccgaatcttggagagcttcctctaccctgtgtggctcaatagaggaaacaaaagagtaatgttcacaataatgagcaacccgagatcgagtagttacccccttat

SEQ ID NO: 80352 - DNA, 327 bp, Zea mays
  unsure (1)..(327): unsure at all n locations
gcagctggattcccccgatattattatatattatattctaacgacgtgctcgcttactcttcatctatcttctgttccttaattcataagtaacacatatatacacacctacgcgcttgttggntgtggctttagctcgtttttttttcaaatcattcaactttctaaacgtatacgatgatctctagatagaataatcttacatgaatcgtacgacgaagtagcacacgagtgtattaaagatacgctatggtgacaactacgcagcagttattaatgataaacaggtggcagaattgtatgtaatgacactataaaactacgtgt

SEQ ID NO: 80353 - DNA, 413 bp, Zea mays
  unsure (1)..(413): unsure at all n locations
cgcgcgagacgatggccggagccgctgtcgcgtgggcccggtggctcagtgagtgcggctatgcacggaagttatgccgaacagcgtgtaatctgagctaggccgagtaaggattcagcccaaccgcgggtaagtccttcactttttttctgtntgttcttaattcaaatcanaattccaattctatattcaaatntcaaatntgaagatgcacaatanaaatttcatcatgaaaatgaaaagatatatatttgctntttggttacttattataattctcttagtaatgctccaaacatataaanagaaaattacttattgggtgttagaataattcatagtggcattaatcaaaatgaaattgttctactacttgagtgaaggaatatataacttatattattacttttatc

SEQ ID NO: 80354 - DNA, 256 bp, Zea mays
cagatctgcttaatcttagttgaccttttaacggccactctgatacgtgtccttgctatgatcgagcatataaatcaaaactaagaggcgaataattccacttgcactggtctccgaggtgcttggactgttttattagaacattttccgatggtggaccttgaacatggccgtgaatcaaatttctattggcaagtggctggtacagatggccacatgacggtccaaatgaattggtgaaacaagtagttgagtg

SEQ ID NO: 80355 - DNA, 252 bp, Zea mays
aatgtctagttttcctcagaagcgtatccctacccgagaggcttgtccgcgcataaattttaaactcgctgcgtgacgcatgactcgattccagcagtgctaatcattcccggtagacagctatgttcccatatggttttacattttttaacgagttggtgtttcatatttcatatgtgcgtgcagtcgatgtactactgctacgtgttgaactattgctcgctagtggctgaatcctttatttacacataa

SEQ ID NO: 80356 - DNA, 190 bp, Zea mays
gacattgcatctcgtgaacagattgatgtgtaatcagaacaaagaactgtctcaaaaatttactgtagcatctgtaacttagctgcatgggaaacttctcttactatccgtgatggcacacaggctgttgaaacgagcctcttcactattcgaattcccttacatacggtaactaggacttctaatcatt

SEQ ID NO: 80357 - DNA, 204 bp, Zea mays
caggaactgcgtcagggcggtcgagactaccccgcttgagctctccaatatgcgtccactactcctactaaagcggccacggtatacgcgccctcaccctcatgatgatgtgaaccagctccatcagctatgcacgaacttcagagcaactacgctgcgcatcacacgaacgagcgcctaccatgaacacacacgatgtcgtac

SEQ ID NO: 80358 - DNA, 323 bp, Zea mays
  unsure (1)..(323): unsure at all n locations
acatgggtggtacacggccatgtgcaggctattgaagaataanatgagactatgaaggtatgaaccggatatgcgagatgtgttgatttgaccggtggcatctgctaccacaagcgcgtggcagggctttgctatctggccattcgactgatacctatactgtgcttttctcttttttcctggctagaatctttaaatctagaaagctcanatgaaccattgtgactcatattctagattataaatatttagtttagtaacagaattgagattaatactaacttctctaattaaatatatactcaatacaactttgtacctat

SEQ ID NO: 80359 - DNA, 417 bp, Zea mays
aaccctggggggagaggcactgatgtggcgccatatgatggtttgatttcttttgtgcctgtggaccgcacatattggtgcccccgtggctgctgcatcagcgcgtgactacgtgctgcgacatgaggtgttgtcatgatttgatggtccttgtatgttgctcacaacgttgatggtgttttattatcaccttagcagtcaatattgtgatgtcattttcttcattgaatgccttcctgtccatattttatttatatgcaatagcggtcaacttgtgttgttatgactcttgatagggttaagtgtgtccgtttttgttagacattataataattttcttttacaggaaattactatgtatgatacgactaaattcactttacgattactttaatactttgaatgccaggtggaatc

SEQ ID NO: 80360 - DNA, 55 bp, Zea mays
cttcttgcttctcttactatcttctttctctttcactcttactgctcttcttctc

SEQ ID NO: 80361 - DNA, 124 bp, Zea mays
ctctatgacacaggagagcttgtgacacctccacttgaataggagcctactatgttacaactttaggccttatggctcaacacccagacaggataatgctaaaattctatatatggttaagcga

SEQ ID NO: 80362 - DNA, 265 bp, Zea mays
ccttatgctcagatgctcatgtgccgtaaatggtttatacaacgttgtagctctctgactaggtgtagggccaaactggtttcaggaacttcaagagcctatgaattcttctttgcgcttgaatcttgggctctctgtttacaatccttaggtttatcttgaggtgcgctttcttctgctggaacatcgttattgcaccccggggcagctctttgtgctaaaaggtgtagacgtgaggctgtatttggtaagactcatgaaatca

SEQ ID NO: 80363 - DNA, 226 bp, Zea mays
acctgcgcggacagtgagctccccaactaacacgcgcgtgctctcctgtatcgcatgtctacatggagaatgtgttggaaattcttatggattttcgaaataacaaactaggttgacataaatcgtagtaaataacaccgcgataacttatagtctagggcactattcttctcccacaggtgagaatacttgctgaactctgacaacgcgtgcacgaacctgccta

SEQ ID NO: 80364 - DNA, 319 bp, Zea mays
gtaaacccatctgcttgccgtaaaacttgtgttacacttttgacctcgttgagaagcgagccgacttatcctgtggctaggtgctgtagcgaactacgtatttcacggcgcactcagatacactgcgcgcaacctgagacttgactaccactggcggaccaacaccggaggcacattacggacgtccataacgtccacataataactagtgtaaagtcatatctttttactccagtgttatagtgcacatgtacaggtgtgtattagacttacactctcagtagaactgtatcggcaatatctaacacttcttatccag

SEQ ID NO: 80365 - DNA, 357 bp, Zea mays
  unsure (1)..(357): unsure at all n locations
ctcagctggacgactcattcttgtgactatacactagctctcatacctatcttgtttataccttgttgtgtcgcttgacctgcgaatgaggctctacaaatgttacttaactatcttaaagctcccttcttaaccagtgaagtgcagtaccatttccttgattcttactttgcactacagttgtgtagtcatcctgaggtgtattgtatacctacctgcgcctcacttgctgaactccttatctttcttaaaanccttctcactatttaagcgattactattagcttgaaaccttctttattgagctagtaatcatctaggacaatctgtctagcatactcttaacatctgcgatac

SEQ ID NO: 80366 - DNA, 97 bp, Zea mays
cactacagactgcactgtcctcgcattacacacagccgatagactgtttacacaccgcgaagaaaaaaaaaaaaaaaaagactcgaacctctctccg

SEQ ID NO: 80367 - DNA, 221 bp, Zea mays
  unsure (1)..(221): unsure at all n locations
atctattctttccgctatgcaggctctcctgatcaatcataacactaatccgtctcaatgatcaataattcaacctccgcaggtaanaatactcactctaccgaatctgatacaacactactcacctattctatattatctcaaagatctaagtatgcactaagttaagcactctacctaaggcacatgaacctcaacatagtgtataagacaatatacat

SEQ ID NO: 80368 - DNA, 319 bp, Zea mays
attactggcactacaatacgggggccgcatatttgatccttagcaaacagacattaagtagtaacgtggctatagaaacagttatatagataaccaatttgttgtacgtaacatatgaaatttgattttagtacataatcgtgcatagtgtagatgcggttcatcgggctgcaaaatgctcgcaccatgtgcagagaaaagggaacgtggacggctgtgtgcagcagctgatggttctcagaaaaactctggcttcccgcctttaaactgctctttaatgagccttatggggctttcggtcaagcactaatccgttaag

SEQ ID NO: 80369 - DNA, 266 bp, Zea mays
taactactgctgctctgtgagggacctaagggggggatagtatcttaaactaactatagccaaaacttgtaatgtacacataatccactgtagaagagctacaacacatccctgagatcatcaaataccatgttatccgggtggcagacacctgctctccgttgggtcacgacaggtgatacctctagcgcaaacccttatacacggttctgttttcatcctgcagattccactgagcttgcttcatgagtacaaaccaacaggga

SEQ ID NO: 80370 - DNA, 376 bp, Zea mays
ttactcctctgtttggaggttttgatgtaataatgactaggagtacttatggacatgttaaaaactctaaaaagaacccagctacatgataccaacaatcaatgtttgataggaagataagtttcaacacgctataatcgggtactacacatgtcgtctgatggacatctaatcactatacctacgtagctcattcctcaaggagaaacatacaatatttaatgctagggccacataagttgaaaacagctccatacttaactcggtttcaggaaactctcatcgtagatggtatatcacacgttttgatgtgccatattgatttgtgtacgacatatctttggacgagaaggcatttacgatgtgtctaggggtg

SEQ ID NO: 80371 - DNA, 207 bp, Zea mays
tgattagctgacaacaccgtactgttcattaaattagtcatgcacatggttataaccttacttaccaaatgatcgaccggcttgctgtaactgaacttttggtcgaggaacaaccacttccctctattttgacagcagaactgagctccccaacacagaagaggaaacttacgactgctattaaattgacatcgctgaacacttttg

SEQ ID NO: 80372 - DNA, 208 bp, Zea mays
tacactatctcacattcttacaacatgtaatatagggtgtcagggagtggacaacacactacacataaaaaactgggtgtttttctttcgctgtggtgttgtgagcctcgtgacaccgtcggacaaccgccacatacagggtgacactaacttatattgcagacatgctctctttatgatttcaaaaatcttagacagccaccatatg

SEQ ID NO: 80373 - DNA, 99 bp, Zea mays
caccgaaaatgcgctacactggaccttagactaaggtcaaggatggagcccgcctaccgttttaccccggaagagctcttgacgcttaagagccatgtc

SEQ ID NO: 80374 - DNA, 138 bp, Zea mays
  unsure (1)..(138): unsure at all n locations
gcttgatggataccttatctattactttaagtatattctaaagataatgagagtatccgtatgatttgtattcttctaaaacattaaatagattcttgaatgatttataactanttctaatgactttttctgatctga

SEQ ID NO: 80375 - DNA, 194 bp, Zea mays
gctctctttgaaatcacaataagttgcgctatcacctatagctatgacatactttttaagacgaccttacttgaataacagttccctatacaaatgctacgatgcaatatatcaactttactaaaacataagaaaatgctctaaatcgcattactacctttactgcttgatcatacgaatatgatctggatcta

SEQ ID NO: 80376 - DNA, 211 bp, Zea mays
tctttcaattttgtgtaatgcaccaatatgctatattgttaaaaatttcaggccagtacacaacatgaaataagaaggtcaacaagacaagatgcgaagcagctgtctacgcacgactgtatgtgcacgacatgtcgtgccaggatcactcaactgcacttcgaattggacgttgttattacgatgcgatacatgatgcgggcacgacacg

SEQ ID NO: 80377 - DNA, 252 bp, Zea mays
ctatacagtctcttgtcaaatgaaaccttgattttagtttgctttatgattaatatcagatacctaactagatagcatatattaaatactagcgatatattggacaagaagatattagtataagatgtgtgtctgatagacgacatgctaatgggattgcggccaatggccatggattcatcatgacgttggatgtggaacggcatgggtatataatgcactggcacctttaagcctcggtatatgtatata

SEQ ID NO: 80378 - DNA, 189 bp, Zea mays
aatcgccgaattcgaacacatctccagttgatttgatatgttgtttcgatgcaagcccactattatgattatgaaatggtcatgacaccttgcagtcgaggggtcatgagattttcgtttcatatgacagagctgagagattgaggaatctcaaggctcaatgctgtgttgcaactcacagtgtagttt

SEQ ID NO: 80379 - DNA, 171 bp, Zea mays
tccttactgactagtactttagattttaactttgggcttctacttatgagtatagatatcacttaattgccagctgcatagtctgcttattataatagtcttgcaacggtgttagttgaaattccttgtctcacgtgctatcaattcctctagctatcattggctccatct

SEQ ID NO: 80380 - DNA, 110 bp, Zea mays
tactcctgtgatgaaacagatctacccattatgtcaacaagttctcaactaccatctaccagcatgtgctgggagcctggctagccccagccatgcagtgctgtgcatca

SEQ ID NO: 80381 - DNA, 163 bp, Zea mays
atggtttttgcgaaataaccaaactaaggttgacgctaagatcgtaaatagaaataacacacgacgatagattcatatgtctagaaggtactatctcttctacccacaagtgttgagaataattttctgagactcttatcaactgacgttgcagcgaacgtgt

SEQ ID NO: 80382 - DNA, 164 bp, Zea mays
tcagcggtgtcttactacccttacaactttcgcacagtatatactccttccgttgtggcggtgccaactcgcttataataaactgttcgacagaatggttttggattatctataagctcatgtattacccgcctaaatattaagttttatacagttcatctcac

SEQ ID NO: 80383 - DNA, 184 bp, Zea mays
tacacatatgctaaggatgactagtttggacatgacttgtactattggtgatatacgtacttatgtgtgtacttacagacatatgaatatcataccgtttctttataagagactggctaaggctaggttaggctcgagacgttgtaactcgaacccactagggagatgctttatataaacgggt

SEQ ID NO: 80384 - DNA, 370 bp, Zea mays
cactgttatccggttgcactcatgttcaataatatgcatatctcgttaacatcgggtacacaatatgtaactatcattggacataatatctagcggagtgctgctaagtaattgtacatagctactctaacgtagataatccagttgacaggataggcgaaggtattattgtcccgcaatatcctattcaatatacttataatgatgtgggacacaatcaagggatcatgctgtatgaactggtctccatatttgattctctacacctgttcacaccagaacaccctaactcactcctctagtagagctcaaagtcttcaacttaagtataatatcttatggtatttaagacataaatttatcattgccc

SEQ ID NO: 80385 - DNA, 259 bp, Zea mays
tcatgactatgtccagctgctacgctgctttcaatggactggagcatatcatactgaaagggctttggctcctcgttacggtaggggggtggtgaagatagctgccatgagcaaaattagcgagaaatgcacattctctgcttattgcaaccaaactactctgacatttgaatacttttgcgccaaccgaaaaaggaactcttgacaaaagtcctgccactgtacttttctaattactgaagaaccatcttagcacata

SEQ ID NO: 80386 - DNA, 334 bp, Zea mays
ccttggcttacactcttacttaattgttattccgtacactttgtacgcggaggcagtctcaccttattttgtaaacaaatgatataggctcacggacttcaatagaagacgtttcgatgacatattaaaaatgtcttggccctaaactggtggagattgagaagatcataggcttcttcagcattgacaagatgactctaatcacaatcatgtactatcaagtcattagaagactataatgcttagtgtgacatctttgagatgattactaaagactttgtgactgctccacttaagtattactttatttatatggtggtgaagattgtacgat

SEQ ID NO: 80387 - DNA, 259 bp, Zea mays
  unsure (1)..(259): unsure at all n locations
tgctgttcngatgtcactgggtcgacccaaggcagaccgttttcgagttaccaggggcaggaatatctcgaacggtggctatgacccaacactgaatccattgccactatccagtggcgctcgacatgagaggactcgctaactgggcagaatgctgaaactacgacgacgcttctcgacgagcctgtgacgctactcagtaccatgcctgagtagttctaaacctcgacggctatgtaataataagcaggaacgcgct

SEQ ID NO: 80388 - DNA, 146 bp, Zea mays
cttgcaatcagtgtcgctatgtgacacccaactcacttaagcgcatgatatatctctgacgccttgagtgccaaaagcaagcgaatctactcagatattaaagctgcgtgttaataatgtgtaactgcgtgaaactgtgagcacga

SEQ ID NO: 80389 - DNA, 313 bp, Zea mays
agacactacacagatggagacattcagacttgactgtcatatgacatcgacccgcattactagagatagatgcagtatgtgaatttcgtactgggtcttgagaaattaaccaggactacctctagaactaaagattactcaggaaaaagaccatggcaatcaattaaggaatctggtggatgtaagctacaacagctaagtaaagctcctaatatctgatcactcgcagctagactcttctcgtcaaacacttgaactaatctgtatatacttctacttttttaaagacttattagctgtgaaaaacagacac

SEQ ID NO: 80390 - DNA, 347 bp, Zea mays
ttaactactgacttggtcttgtgcggtgttagtgaagtataaccatcttgtgatgacagaaactgttgtaatagcttggctaatagaattggtacacggacactctcaacaacatattgtgcatctgaaaaaaggtaagcatacttttgccacctttcatgtaattattgatcgcacactttaacacttgataggtgaatcgatgccatcccatattgtgacactacaaaaagtctgagtgatgattgtaaattagagtgaatcttcatcatcagcgaacatcatatagtgcaaatgactgtttgagtataatctgacacaatactgttctttacataaaggtggtt

SEQ ID NO: 80391 - DNA, 372 bp, Zea mays
cctctgagcctatatgcaattgagcgactcactgctcatatggagctcacacctggacatcacactcgcgtttacctaaagttcagcgtatgaccccttcttactgctaataagctacataagaagacagctgctcgcaagccactcctcgggtagaagggaacccttgtcaatttctcgaaagcttgcgacgcttctgcttcaactcatacaatctaaacacgagaactgacgcagcacagcgagatcatctcaaacgtactatcgactccaaagactactcgatattgtcacagatacctaatttcaacatttgcgtatgcatataactaacaagcatacgagcacacagatctctcgacgtctattact

SEQ ID NO: 80392 - DNA, 116 bp, Zea mays
cggctctatggccacggagagcttgtgacaactccgcttagatatagacctacctggataactttagcctttgctaacacccaagctgataagctaaattctacctatgataagcg

SEQ ID NO: 80393 - DNA, 319 bp, Zea mays
  unsure (1)..(319): unsure at all n locations
tgttacccaatcaacattcagtttgaatatgtctgaagtgacaaacacacaccagttgtaaatcatactctaacatcagctaagtatgaaattacacagcaaatataaagctctcacgtttatacacctaacgatgccatactaacnaacatcatcttgaattgactaatggcgatagtctgattgtgaagacactctaacgacgactatgctgtcaattgacacaagagatataagtatctacactttctacatacgttctatgaaacacattatttattaacaacagacacaaacatgcgcagccaacacactataa

SEQ ID NO: 80394 - DNA, 158 bp, Zea mays
ctgccgctctcggcacggtggaccgcaggaatcttttgtaaagaccccatgaagcatgacgtttttctgaccgccctaccatatgcggcacgttatcttgcttatcgaagagttacccaaataactggccctgcgtcgaacacccagggcacactcag

SEQ ID NO: 80395 - DNA, 294 bp, Zea mays
tttatgtgaatgtttattgttcagttaatatcttggcttgctcaactgtgatctaacttgtatactcttacaacactagtagaatttatgtacgataaacaagaagtgtactgagtgataacacgcacaatgtgctcgacgtgagtgttactcgaacatcttcatagccatactactcactgctcatcgctattatattacccaaagagactgctgacgaactgcggcttagcttattgctgagttgcactattgaaaagtccgcgagctcaattttcttagctggctgttaga

SEQ ID NO: 80396 - DNA, 199 bp, Zea mays
  unsure (1)..(199): unsure at all n locations
tataccaactgtcttaagatctgtcatacttgatatgtctaccttcataatgatgaaaggcttgatgtgacaaactatcttttgaccgaagcgaaaaacaccttccttctttctaccacaatcatanaacactttccttttcgactctctttttctttgcgacagcctatcatgtatgtatctcatatccgatatgtat

SEQ ID NO: 80397 - DNA, 244 bp, Zea mays
  unsure (1)..(244): unsure at all n locations
tctagcttggactatgccgatcatctgctgagccgactatagagctgtaggtgccnncgtctgtcaccacaccagtaccacatagactcctagtattagccagacagaccatatagtctatgtacatgtttccggtgcactcatgtcaatatatcatatctgttaccatggtacacataagaactacattgacatatatctaacagatgatgctaagtagtgacatactactacaagaagatat

SEQ ID NO: 80398 - DNA, 216 bp, Zea mays
cctaccgattgcacactggtgataccaaactccatcgggatgcttaaagctggtttttacctacctcggcggcgcagcaacccctgcatgtaatgcctttgcacacaataacgtcctctatcaagtatgtgtgccgacggctggaaagtacgccggtatctgggaactgagttgctaacacacgaacgtgtgcgaggacgggactggacaatctga

SEQ ID NO: 80399 - DNA, 341 bp, Zea mays
  unsure (1)..(341): unsure at all n locations
gcgacctggatcttacgacctgaaaccagaacctcggctctgagaaggacacgtcaacacctcgctatcataaggacggttagaaagcattacgtctacgatgtcgaggacaccgacgccgtactcttattgaattacacgataatgcatacgtgtgacatctgtgcggcattatcgtgagctgccgacgtcgacaggccgacgtccgcgtgaatgacagtangatgtgagttaatcaccacactcttatgacacctcctctccatcatcaagtcatcatcagacatagtcatttcagtcaatgaaatactatatggatgaagggacgttatggctgtgtg

SEQ ID NO: 80400 - DNA, 189 bp, Zea mays
cgctgctaccagacagtccactgagtggcactctggcggacgccaaactggtctgtcagtaagctgccactttatgcacagttgtgctgttcgccacctgctggactttagtggcaagctgctactagacaaaacggcgtgcctccatcaccggagcttctgtgcatgagctgactgtagttgactcgg

SEQ ID NO: 80401 - DNA, 171 bp, Zea mays
atcaattcatcatgtacttaaacacattaattgtaatgctactcatacaccataaatctagaaacttgcagttatattatttaatgacaagactgtaaatgttatgactattatactatctcatacacaggagactgagaactctctctaaatcgacttcactcactatac

SEQ ID NO: 80402 - DNA, 374 bp, Zea mays
  unsure (1)..(374): unsure at all n locations
atgatgtaatgtatcttgcanatatatgtccaaatacatattcgaagccataatcatagccttcattcccttatgaatgactcatatctctttgccgcttatttntcggcttcaccagttatctttcggtgtatcagcgctgactttcgctgcagcctcctttgacttttcgctttactcagcgaatacgttatttcgtgtagcatcttagactcttcgcttacttggggatcacgtatttcgtgtacccctagagctatgcttactcgcggatacgtattttatgagcctgttcctagacactttactctctgttctttttccttgaccatggctctactttcttcatttggggattgttaatagaaaaaatc

SEQ ID NO: 80403 - DNA, 375 bp, Zea mays
  unsure (1)..(375): unsure at all n locations
gctattaaatatctttcttccanacttcgatttcgagagtatattattacaatcgctggctcgcatgacctcttgttgagaaaagctttttctaaagtttgatctgattctttcaacctatatattatctttatttaatattgtgatctaagtttgtaacatattatcaataactcttaaaactgtttacaaacgtaactggagaacttctaatggataaaactcccaagtgcgcgactgtatgactaactaaaaccatttcaaggtgtattcctgtcactatctcagtttctatccaaaatgtctgtggccgtaatctcgcttcttacgaaattgcattttgaggacttctgaattgatctcttagctgaattt

SEQ ID NO: 80404 - DNA, 257 bp, Zea mays
ggctattattcacattcagcctcctattgttgcacttctctgtaagattattttttggactttatttgccttttttctgttggcattatgcatggacgttccccactaaacacttttattgaagactcttaatgttgacctcttgtgacctctatctataattttgaattctaaataagctgtccatactctattatttctatatacctttctttaatacctaacttacttaacaatgatatttacctttgcaacta

SEQ ID NO: 80405 - DNA, 239 bp, Zea mays
  unsure (1)..(239): unsure at all n locations
atcttagttttcgttcctctcattgtaggtttaactatagattcttaaatgatacaatatatagtgtagatcgtgggttatggactaactggaagtgcatactttgggncttatggacangtacttatatggattgactacaagaacttctctaaaaaaaaataagaattggaaatatatattgctactaaaacttcaaccatctagtgttgcactagtgattttttcactatatcgta

SEQ ID NO: 80406 - DNA, 292 bp, Zea mays
ctaagcttgtcgctcacttctgtcccgtgccacaattgacttgacttcttcaagccggaaacttactctccccttctgtatgagcactagctgccagctctctgggtggggagtcatgctaaacgtcgcatgccacgaatctgaatcatgatttgaggtggccattctggatcaacatggagcgagatctgttatgtgactcccaggggcccggactaactatgtggtatcgggactctcgggcttgtcactttgcgtgtatttgtcacgaccgcgtcgtttccctcaagct

SEQ ID NO: 80407 - DNA, 417 bp, Zea mays
tcagctctacactttctgaattggtggaaagcttagctttcaaacatactgaaggtttatatatccttaaggtctaactttctttctcttgctgtatatcgactcaccaaattaactgacatcattgaataatatcatcattaatcattactctcatatcatcaatatattaatatcatattttacctgcatttcttacatagacatgggaatgaaaaggaagacctctgatgtgagtgacttacttgggaaagcatatatcgactgctcgatcattcatctagctgcatctctggtaattctctctctgtcacatctcttttctctctatggaatattgaggagggacccatcaaactttatatgaagctcttgtatgccttagcactcttatactgcgacttcaagcattatatt

SEQ ID NO: 80408 - DNA, 176 bp, Zea mays
  unsure (1)..(176): unsure at all n locations
gctggacatgatcggacccttcaagatagctcacgataggtatactcatgtgctgtgtgccatttgacaaatcacaaaatggatagagtataagcctattgcctctntaacctcngncaatgcagtggaattcatacaagacataatattcatgttcgggataccaaatagcatca

SEQ ID NO: 80409 - DNA, 411 bp, Zea mays
taagcttgtgcacttcgctcgctagcacaaaataggcggtctgctaatcttgttatgatcatataacaaggaagctcgtcaagctagaagtttctctctgaaatcacacttgacatgatagaactagactaatgcctatgtgattggccaaagatgtactatttcattgacaagaaatgcttacatttatcgtcaattataatagaatacctgctaagacaataaaagcaaaatgaaactacttcagatattattgtcatcttatgaactaagacttcttaaatgcacagtggttaaactaaatccacactctctgcctgttaatgtcattacaggatgtgcgacacaactcttgctaatgagacatgagtttgaagcaaaaagagcaatactgcactagatgtgtactta

SEQ ID NO: 80410 - DNA, 290 bp, Zea mays
  unsure (1)..(290): unsure at all n locations
ctctgcanagactctgntctggtagtggatgattctaatattattactgattctaaatcaatcggtactaatattatttgatggaaactcatttctctaactagtacttgttgtatgttcttaacgacttatcgatggcgtcagcataatttgtatgccgatgggcattgcgcagtttgctcccaatgcgtggcgacggcagaccactcgtcaatngatngcattcgtctattctagtgagataaggctctctccagcagtatccctgatatggatctgtaccctatatt

SEQ ID NO: 80411 - DNA, 102 bp, Zea mays
ttattgctaatcgcatgtctgttatattgcctgttatacatcacacgcgaaagtcacatgcaggatgcttgcttgaatgaatataccgatgtatggatcaag

SEQ ID NO: 80412 - DNA, 176 bp, Zea mays
ttatcctattgttctgtagttggacgatgtaccctggtgagggcttgtcgaagacttgtcttgactgatcatgtactaacactgcttactgagggacatgctgtatgctttgcttcttgctcatatgactgctaatctacacatgtgatgctctgttaatactcgcgatcactctg

SEQ ID NO: 80413 - DNA, 133 bp, Zea mays
  unsure (1)..(133): unsure at all n locations
catatcgtgatgatcgtgactgagatgttgtgcctatggatgcttgtgatatcctgctangtagaccatggcaatttgattcatatngtatgcatcatggtagatcacatacatattctctcatacaccatga

SEQ ID NO: 80414 - DNA, 335 bp, Zea mays
ctatctccgccctacactgcctatcgctgtcctatgatccataaccacacacatgctgtttacgtacacacacaaaacttttctgtttgcatgcacgcaaacaacaaagtgtacgcaacttcgtttttactgagcgctacagatataaacgcatgtcggactaaaatgcagaccgcataagctcggagactgagaagagtgctttttgggcggaagttgactgctgcaagaactatttcttttcgcttgctgcgtttgatgagagacagtatatgacgtcaacaggtatctacatataatgtaaaatgaatttcacgtcattaatcagaattagc

SEQ ID NO: 80415 - DNA, 232 bp, Zea mays
  unsure (1)..(232): unsure at all n locations
tcgtgagtagcatgtacactctatggcaagacgctggatggatgtgtatctgtgctctcgcgtggcgtgaacctgatctggtctaacaacctctgtggcgatgttacatatgcaaggggttaattgctacatatgtcatgtgatcggagatccacagctgggtattaatgcgattggatcgctgttacttctcacacatgaagactnggtcactgacctacacgtatcaatc

SEQ ID NO: 80416 - DNA, 164 bp, Zea mays
cgcatgccaagcacggaagcaagttggtgttcatcatccgcattagaacatcatgacgactgacaggccactggagctcctacacatggacctattcttgccgatatgctacataagcatcggcgggagtaagtactgtctagttattgtggatgaatattctc

SEQ ID NO: 80417 - DNA, 181 bp, Zea mays
ctactatactgcattaacgctttttgaacactatagtgcgctatcactaactagaatgtttttaaaatcttcttgtatacgttacatgatatgatacaaagaatttcaatttaaaaactaaaaaagcataaatgcattactaacttactgctgttcctacgaacatgaattggaacctatt

SEQ ID NO: 80418 - DNA, 204 bp, Zea mays
  unsure (1)..(204): unsure at all n locations
tatatcanaatttccttcaccagattactgccgaagcaattatcaaaatggtgatcttcgtttgggccgtgaggagtcaatgtttggagccaagtgcaaaatgttgttgcatcatgcatggactctcgtatgagacgaaactctgggatgaataacaatatcataacaatttggttgctatagcttcgttgctcgttctggctc

SEQ ID NO: 80419 - DNA, 380 bp, Zea mays
  unsure (1)..(380): unsure at all n locations
ccatcatccactatgcactgacctactctcanaaagaagagtcactactgtaatactcaatactctatgacctgcatcaaatactcgatctaaaacatctttgtgttccattaaatctactatcttctggccccttatccccgccgtacattgcctataagcactcttcaccaaatacacttaaatttcgtatcgttgccaactttgtaacagctaaaatctcttcttttatctaaatattattgctctaatcacacactgccaaatctgatctatttcatctaagtgcggctacttcaacattacaaccttatcattcctcgagcgttgcatttgtcatttcgaaatccataacactcaatctacctttttcatattat

SEQ ID NO: 80420 - DNA, 181 bp, Zea mays
attccaccattgtggtagcactggtatctcatattaagctctatgttccaattaacacaataatcttaccatgaacaataattaaaccaatagtaataatggaacatgatcgtaattcagatataccattaatatcaaaaccatgtataacaataacaagtctacccaatagttcatttgt

SEQ ID NO: 80421 - DNA, 232 bp, Zea mays
  unsure (1)..(232): unsure at all n locations
attggtcgaaaagtgaagctctttcgacgtgatttctgtcataaatatccatcgaagacaatatgagcatgctgattngctatctaattcatcatcacatgtgctgcccttaccttcggatgtgttcttcgtaacaataatagcaccttcngtggaacttcttgataatcagtcctcaatatatctcctatgtatagcgaagattggagaaccgagatcatctcttaccttc

SEQ ID NO: 80422 - DNA, 229 bp, Zea mays
  unsure (1)..(229): unsure at all n locations
agagagagaacaagattgtgtacaagatggccaaaggcgaagcacaccttggaaaggagtgngattcggatggctcttcgtccgactccgacgaatgactcgccgccactgccttcaacatatctgctctcttccccaacgagcatcacacttgcctcatggcaaatgaaaagaaggaatcactcgtaatgctaatacctataattcttctagtgatgatgaatctagt

SEQ ID NO: 80423 - DNA, 291 bp, Zea mays
  unsure (1)..(291): unsure at all n locations
tctttctctcatacacatgtctgttgtcgccttagacccttgcgatattgatgccttctacctaaatgtttactttgaacttatccttgaatagtcttccctttctttcaacccaatatgagagatgcgagttacctttctctgccttgatttcttttcacttcttgtcgccttacaagttgtgngtaattctatcatctgttgggttttatgtgctatcaccatttactttgcatacatcgatcttacactcgatactatatgtatgcttgctctgtgaaaatctcctct

SEQ ID NO: 80424 - DNA, 150 bp, Zea mays
ccatgttatacacacacattattagactcaaaacaactttgttgcatctcgcatagatagacgcgctacgagatcttcttgatgatggacatgctgacgctcttcatggcaccgtctttccgaagtatactcataatgaccgtccaacac

SEQ ID NO: 80425 - DNA, 213 bp, Zea mays
tttatgcaatgaaagctatccagtcaaaccacttcttgttatagacatctgaacggactcatttacagctgcgtaataactacacggtatgacctttgcatgctgtataattacctgcacaattgtgtttaattactcgttaacacttaattcaatgtaaaaaggcctatcactactaaaatattgtctatatcaacccaaatctgattagct

SEQ ID NO: 80426 - DNA, 340 bp, Zea mays
  unsure (1)..(340): unsure at all n locations
tattatataatcgctctcatcgagagtccgttctttgcatggagtcatcactagatcatggcttaacattgatctctcgatcttctacaagaaagcagaaatagaagattattatggccttatggcatcatgaccagacctacattcactgtccaccgtatcatatctcatatcatgcaatcataaatgtacccactcgctntcgtctgatccccttcgtaatcagggattcatcgagaaggggtgagagaatggcgtggcatagaatgagaccnngtctaatttgtcatcactcagactatatactgtacctgtctatgatcatcatcatcagtccgac

SEQ ID NO: 80427 - DNA, 419 bp, Zea mays
  unsure (1)..(419): unsure at all n locations
atcccttctttgtcatggtgcgtcatgggcgtggttataatgtcgatcttgatgcggtcctttgctacctaaccgacacgcactatatctacaatgcagacattcttgacctgaagaaagtgggccacagatgtgatggtcacatcaagcggcgactcgcttactcactcgtggatgaactggtgcaaatgctcactttgtacctgccaacagactacacacaccangtgattatctggtttgtgcaattatctaagaattataatcgttacgtatgaacaagtgctatntctttatctttatatatgcgtagtattcaaatgatggaactacaatggtcaattattgtatagtattatatcgaatattagacatatctaacaacatcgattaatacttatttatattatgaccgatca

SEQ ID NO: 80428 - DNA, 207 bp, Zea mays
tctggtacactggaaactaggacatggggccagcttccctaagaattctccaattggctagctccgggaacaagggaatattgatgggctatggattatatggaacagtttcaagccattcttgacttaagagtctttaatttgtccagttactattctattaaatatattctgaattaatcaaagcagatagggttggtgtatact

SEQ ID NO: 80429 - DNA, 391 bp, Zea mays
tgcattgcatatttaaatatcttgtattgaatctagggcttgtctaacctagttgagataaccgccaataaagcaagtgaaaaagcttatctcgggctcaaacttgacaagtcttagttttaatcttttagtacttaaattcttacttactatgcaattgttgggtcttgagatatgcatgaggcactacacttatggggagtattcaaaactcaaatctttcatgaaacccctagtgcaacgccaaaatgcaaatctcaccatttgcctattttctctaaaaattacatgcctatggcaaaatattttgcaaattatgagaaaatatatgagggtgccaatgtctgtcccaacaagtgttattttgtgtgattataagttgggatttggg

SEQ ID NO: 80430 - DNA, 411 bp, Zea mays
  unsure (1)..(411): unsure at all n locations
cgacactacannaaacatcagcnatactctggctcttaatctatatatgtgcctgctgatttttattcttgaatatatgttggtgaaaaggtttaccaaaaatgagtttcaatgtaataaatacgtaggaacaatacgtggccttttgcacagtggaatggcatccatatgatttgagagataagggcatgtgcggagacacttcggaatctggaaagtgggtgattgggcaccatgcatggcctcatgttgctgccttcttaactgcatgccataagttattgatgtcccgatgctgttatgtcaagagatgtatatatgaatcttaaagtatcaatatgtttaataagaaagcgaactaaatcgctctaaaggctggttaggcggacatgaaaatacaaaggatctata

SEQ ID NO: 80431 - DNA, 389 bp, Zea mays
tgccaaaaattttcacacccgatgcaggacaccttccatctcacgaagctaatcgcccacacatggcctctatagcgttgggccctcgacatagtgggaccactccccaccgcgcagggcaacctcaaatttgcctttatttttgtagagtacttcaccaagtggatcgaagcgggggcagtctccaccataacagcaaaaacaactcaaaaaattctagcaaaacatcgtctgccgtttcgaggtaccctccgaattaacggtagaaaatggaaaacaattcgacaaccaagactttcaggattttgcgcctccttagggacaaaggttgttttcgcatcagtctaccacccacagtccaacagaatcatagagcgcacaaatggaaa

SEQ ID NO: 80432 - DNA, 388 bp, Zea mays
  unsure (1)..(388): unsure at all n locations
tgtgcctgngattaaacatgttgacatcgaggcacacaatcccgaaggacttgctcttagagcagaagttttgtagattacctgtgtacattgcatttgattaacactgttgctggtcgctgccagtttgatttgggtccaccaccattcgataagattgtcttccattggcaatgtaagaatcagatggctgttgttgcgtagcgaggcggtatttttatttggaagaagacgtggtcgcgcctgacatggaaggctttatgttcaaggttggcatcagtatgtatttttgccttgcgatgcagtcccataagtattactccctccattctaatttttataatttgtttaacgttttcaatctcaaatttgaccactcatcttaata

SEQ ID NO: 80433 - DNA, 110 bp, Zea mays
tcctgaggatctctgcgcatgcaacacactgtaacctgtgtgcaaccaagcactgctaatctacatctcaattgctcttgacccaaagtgctcaataactgcttgctttc

SEQ ID NO: 80434 - DNA, 385 bp, Zea mays
tggatggaagaatggttttatgtgaagaatgatttataagcaaggaaagatattaaagaagtcattatgcgccctatctggtcccgcttcagcctccaaagatcgaaggtagagattgatgagacagtcgaagcgtgtcagagggccttcagcactgtttgttcctttattgggacaagagatttaattcaagaacatatagccttcagggtatggctgcttgtggaaagttgggaaatgccgaaggagaccatcattgactctagcgaaggtggcttggttcggctgaagtataccttcaggtttggggataagtttgatgaaccaaatgatggttggctgaagtgtatcaaagatactagcgacgagctacttggggcttatt

SEQ ID NO: 80435 - DNA, 386 bp, Zea mays
tgtgaaggttcttcatcctcacatgtgcgaagcgtttatgccatatacagcccatgcaaggcttagccattaagcatgcatctagaccggcctcttcttttgcaaaatcaactaaataaaggttgccgtctaatacacccttaaaagctagtgaaccatcacttcttctaaagacagacacatctatatttgtaaacagacagtcatatcccatattgcacaattgactaacagatagtaaattatatcctagtgactctactaaaaacacattagagatagagtgctcattacaaattgcaattttacctaacccttttaccttgccttgattcccattaccgaatatgattgaatcttgggaatccttattcttgacgtaggag

SEQ ID NO: 80436 - DNA, 386 bp, Zea mays
tttatgatctgtataaatgtgacatatattacccatctgataatgatgccagatcttcagggcatgaaccactgcagctagctccagatcatgagtgggataatgctcctcatatcggcgcaactgccttgaagcatacgctattactcggccctcttgcattaacacacagccgagaccactgcctgatgcgtcacaatacacatcaaagggcttattgatatccggttgagctaataccggagcagtggttaataatatcatcaattgttcaaaagcttcattacactttgaagaccaattgaatttaatatcattcttcaacagacttgtgattggcttcacaagcttggaaaaatctggtataaatcagcggtaataactaa

SEQ ID NO: 80437 - DNA, 382 bp, Zea mays
tgtccgtcggaatcaaacgaagctcttgtttgaagtctgcttcgtcagaaaaaacttctgaagaaaaaagtattaaatttccacacattcatcattaaatggccagagtgcgttctaccgccagggttgagcgtgaggggggcgaaactgaagcttcggagactgttcccatctctgaagccatgcaacgatccgggctggtgacttctaaaaagatccctagtgatgatgcagaacaagcagaacaagcaattgctgaagcagaaaaaggagatactgaggaaactgattccgaagatgattatcgcactgccatgccaagcaagcccagctacttggacttcgggaaatctactgtttcgaaggctgatctgtccaagat

SEQ ID NO: 80438 - DNA, 351 bp, Zea mays
gccctttagaataataaaggtatgagacacattcgtgagaagttaagagctggaaaagccaaatgtttcaaagaagatgatcaaagcattgtatggtttaataaccgcatagtggtgccgaagaatgaagagctccgccagcaaattcttgacgaagcacatcttagccgctattctattcatcccggaagcactaagatgtaccaagacttgaagcaacattactggtggacaaagatgaagatcgaaattgcacgctatgtggcgagatgtgacacctgcagacgtgtcaaggccatacatttgaaagctgccggtccattgcagtcactaccaataccgacatggaaa

SEQ ID NO: 80439 - DNA, 372 bp, Zea mays
tctaaagggagaacacgtgataggtttgactaacgttttattcgaaaaagatagaccttgtgcagcttgtcaggcaggtaaacaggtgggaggagcgcatcacagcaagaatgtgatgaccacatcaagacccctggagctgctacatatggacctcttcggactcgtcgcctatctaagcataggaggaagtaagtatggtttagttattgttgatgacttttcctgcttcacttgggtgttctttttgcaggataagtctgaaacccaagggaccctcaagcgcttcctcaggagagctcaaaatgagtttgagctcaaggtgaagaagataaggagcgacaacgggtccgagttcaagaaccttcaagt

SEQ ID NO: 80440 - DNA, 387 bp, Zea mays
  unsure (1)..(387): unsure at all n locations
ntaaggccatcgtgtttgccacttggtggcagggattcttcattgcgatcatctgccaaactggactcctgcccaaagagggcaaagtgcacaacgcgctacaggacttcctcatctgcatcgaggtaacgtaccctgtcccggcccgtgatatcttcctcaactcgatcgatcgttcgttcgttacctttctaacccctttctctggtgggtgtagtgtagatggctatcgcagcggtagcgcatgcctacgtcttcaccgtggagccgtaccagcacgtccctgctctacctcctgatcacggggaagtcatgtgtcaggaaagcaaaatggaggtggaggtggatgtcgacgacgatacaagcggtacaccagcttccattgcg

SEQ ID NO: 80441 - DNA, 387 bp, Zea mays
tctaaagggagagcatattttaggattaacaaatgtttattttgagaaagacaggatttgtagcgcatgccaagcagggaagcaagttggtgcccatcatccacacaagaacatcatgacgactaacaggccactagagctcctacacatggatttattcggcccgatagcttatataagcatcggcgggagtaagtactgtctagttattgtggatgattattctcgcttcacttgggtattctttttgcaggaaaaatatcatacccaagaaaccttaaagggattcttgagacgggctcaaaacgagttcggcttaaggatcaagaaaattagaagcgacaacgggacggagttcaagaactcacaaatcgaaggctttcttga

SEQ ID NO: 80442 - DNA, 388 bp, Zea mays
  unsure (1)..(388): unsure at all n locations
ntgggaagccgatactcttcgataaggtaccggcaaccttcgcaccggtttggtctcgtatacagcctaacccttcatcatcaataccaccaaagagaagcgcccccggccgatatccacaagatatagcatactcttttaattcctctttttcagcttcggtcagctctggccaactaagcttcggaagtcaaaagtttcatcgtctgaggtatcttcagttatttctcctttctcgggtttggcagccatggtctcttcggtggctgcagcagtttcttcagcggccatgtttagcagcatgttatctatatcagcggctatgctctctaaattaataccttcgaagttggcatcttcggctctggcctcttctgcggcagcctcc

SEQ ID NO: 80443 - DNA, 390 bp, Zea mays
tctaagggagaacacgtgataggtctaactaatgttactttctaaaaagatagaccttgtgcagcttgtcaagcagggaaacaggtgggaagctctcatcatgccaaaaatgtgatgacaacatcaagacccctggagttacttcatatggacctcttcggacccgtcgcctatctgagcataggaggaagtaagtatggtcttgttatagttgatgatttttcccgcttcacttgggtattctttttgcaggataaatctgaaacccaagggaccctcaagcgcttcctaaggagagctcaaaacgagtttgagctcaaggtgaagaagataaggagcgacaatgggtctgaattcaagaaccttcaagtagaggagtatcttgaggag

SEQ ID NO: 80444 - DNA, 402 bp, Zea mays
acactataaaactcaagcttattacccttgattttgcccctaattacctatttttcacctttctatcctttctacaaattgcaaaggaagcattcaaagcatgatatattgtagaaggttcattaactttcctaggaacattagcaacctttcttctaagcatattatgaacaacatttctcctaccaacatttctatcatgcacataggaagaactagaagcaaacatggcatgagaatcaaaatcatcattataactcctataagcctttctagtttgtctcctatcatggtacataaaagcatggttccttttagcactacttgccatatgggccttccctttctcctttgcggagatgggagccttatggcttgttaagttcttggcttccctcttga

SEQ ID NO: 80445 - DNA, 384 bp, Zea mays
tcaccgcagcgcacaggtatggaaattaatataatttctttttcagtcgattatacttttaccggtgatgatgatcccgtggttgcccagtttgatttaggaaaataatacatgatctttaccaaacccaaggaatcaaagccgctgtttgtgtgtggccacattgatgggacaccaatttctagaatgctaattgatggaggagcaaccgtaaatttaattcctcactcattatatagaaagctaggcaaaaagaataacgagttgatcaggaccaacatgacgctcagtggtgatgggagtgacagttcgatcaaggcaaagggtgtcacgtacgtggaactaaccatcaagacaaagacccccattgtcgcctccttcgtc

SEQ ID NO: 80446 - DNA, 352 bp, Zea mays
ttgaatgtgtctctagaatgaattctttgctcttcttttagtgtggagagtacaaagcttggatgcttctaatggtggtggctgccgcccataatccccccctgcccatatccacaacatataacacactcttttaactcctcttctatatattcagtccactcttgccaactaaacttccgaagtcaacaattcatctcctgagcatctaaaatatttcttctttctcgggtttgcaaccattgtctcttcggtggctgcaccaattcttcaccgccatgttaacaccatttatctatataacggctattcctcttaataaaccctttaaattcattttctactttgcctt

SEQ ID NO: 80447 - DNA, 383 bp, Zea mays
tatgaagattcttcattccaacatgagctagtcagttgtgccagagccaacccatgttagtcttagaaattaagcaagtgtcgagttcagctctatcaaaatctaccaagtatagctgaccctctaacactcccttaaatgctattgaatcatcacttcttctaaagacagtgacacctacatcggtaaatagacagttgtagcccatttgacataattgcgaaatggaaagcaaattgtaatctaaagaatctacaagaaaaacattggaaatggaatggtcaggagatatagctattttatccaaacctttgaccaaaccttggtttccatccccgaatgtgatagctcgttggggatcttggtttttctcgtaggaggag

SEQ ID NO: 80448 - DNA, 399 bp, Zea mays
atagaaactcaagctttaattcagatcatcatcctttagtttattgcctttttgtatgcagtacagcggatatttttgttagtaaagtggatcatatgaaggagcctcatcttgtcactgcaaatactatgctttccatccttgctgttgactatccggttgacaaggtatcttgatgtttgtaatgatggagctgctatactgacttttgatgctctctctgaaacttcagagttcgctagaaaatgggttcctttttgtaagaaatacaacatacatcctagggcccccgaatggtactttgctcagaaaatcaactgcttgaaagacaaagttcaaacttcatttgtgaaagaacaccaagccatgaatgtataattgatacttcgatttatgcat

SEQ ID NO: 80449 - DNA, 381 bp, Zea mays
ttttctttaaatcttcaacctcggctttctgagcttcgacctgtgtgttaagcttggcttcgctggttttcagcctatccactatagagagcagtattttgactttttcaagggcttcattccttagtgtaataacttctgatcgaagatttttaagagctaactggcagctttcatcttctgctttcttctgggcctttaaagccttgctcagaattaagccctacaaaaacaagggatgagcacataatgataaagaaataaggtacgaaaataatcagctttccgataagtatattctcaccttcagactattataggcaaggttgtttgtcagctggtctttcgtcattgcagataagcccagttcaagcttcggat

SEQ ID NO: 80450 - DNA, 380 bp, Zea mays
tgagaaaatatttcctcctgcattttttgatgtcatggtccacttgactatccatttacctgatgaagctatcctgagaggcccagtgcaatatggttggatgtaccccgtcgaaagacggttatttactttgaagcattctgtgaggaacatggcacggcctgaaggctcaattgctgaagcatatgttgctaatgaatgcttgactgcttgttcacggtattttgatgatctcgacacacgacataattgggagggcaggaacagagagcgtgttgatatgagcaagggagatttatctgttttccaacatggagtcgatttactcggagggcataggattacataccaagaaaatatatatgacaagatggtttggt

SEQ ID NO: 80451 - DNA, 387 bp, Zea mays
  unsure (1)..(387): unsure at all n locations
tgcaaatcatccatggcattgacatttcttttagntttctttttccctttttcttcactgtcacacgtagtagcaataaattttcttttttgggtctcactcatctcactaataccaacttgtgtctcctcataacgttgtgtctctctaccagattgttcttcctccaaagctctatattgaccagtgtttatgtcaatattgaacccattttcattgctcaaatcagcaccatcttctaataagtcaaaaatgaactatgcataccattaatagttggactatgtgtacttatctgcacataatcttcttgtccagttttgttggcaaccttgcattctttntctaaagatcgcctacagttctttccttctactattttacttg

SEQ ID NO: 80452 - DNA, 388 bp, Zea mays
tctaaagggagaacacatgataggtctaactaatgtaactttcgaaaaaaatagaccttgtgcagcttgtcaagcaggtaaacaggtgggaagctctcatcatgccaaaaatgtgatgacaacatcaagacccctggagttacttcatatggacctcttcggacccgtcgcctatctaagtataggaggaagtaagtatggtcttgttatagttgatgatttttcccgcttcacttgggtattctttttgcaggataaatctgaaacccaagggaccctcaagcgcttccttaggagagcccaaaacgagtttgagctcaaagtgaagaagataaggagcgacaatgggtccaagttcaagaaccttcaagtggaggagtatcttgag

SEQ ID NO: 80453 - DNA, 388 bp, Zea mays
tgacgacgaaggttgtcttcggtctcccgctgacgtcttgccacttcatggacatctgcagcaatatttcggcacatggagaagaaggccgcaaacccgtgggccaggcgggcacccatcccacggccacgacctcgaccacgaccacgaccacgtggtgtgggagatccgcggccaggggaagagcgcgaggccccagcagcagcagcagcaccagcaccggcagacggaccagcagatgtaggaccacgagaactggagggagctttcctgagacgcccagctggattgttaggatcaatccagaagggagtgtatgactgatgtcgggtgcctttctcaaatctgaattgggtcacgacctcaatcatcttcataatgaatgggg

SEQ ID NO: 80454 - DNA, 387 bp, Zea mays
tggaggcgtcgattggttgtctacttggtgtagactccttcttcttctcctccgttgccttgaatgcaacgggttgggcttcggatgtggtggcatcgtcaagctcgttgatcttcctcgagccttcgatcatgcactcaaaacttacaaaattcccgataacttcctcgggggtcattttggtatatctaggattgccacggattaattgaacttgagtagggttaaggaaaataagtgatcttagaataaccttaaccacctcgtggtcatcccactttacgctcccgaggttgcgcgcttggttcaccaaggtcttgagccgattgtacatgtgttgtggctcctcccctttgcgaagccggaaccgaccgagctccccctcaa

SEQ ID NO: 80455 - DNA, 393 bp, Zea mays
aaactaagctagctatggcaattctatttaatttagtgctaaccaactttttttagtcaaaagggtgaactaacaatcaaataggcactagcagaatttttggacagcaatacatctgctacttgttttaatcataacttttcaaatattaatccaaaaatagcaaactacgactttatggaaagattaaaaagtgaactacaactttgatatttttatcacaacatgattcaacacttaacaaggttgaattgtggaaacacacgagctctatccaggtttggacagattcagacttgcaacttctaaaattcacaactaaagattcagacatccaaacaaattgatcctagactttctggaaaggtaataacattgtctacatatcattta

SEQ ID NO: 80456 - DNA, 386 bp, Zea mays
  unsure (1)..(386): unsure at all n locations
ntgtaggagaaggagatgatgtgaagccttgtagttcttgagagaatccattcaattcttatcactcaagctatcaatcttcaatgatcaatatacatgattgacccaaggttatttttcaactgctatgtcttaaactcatatcatctcgaggaagatattatgtgttgtaggaagtgaagagatatcttatgcgaaaaatcaaggcctacaacatggaggaaagccaaaggatggtaacacttatcttttaagtgcaagtgttttagaatatcatttcttatgtgtcttgtgtagtcacatagaagaattgaagcacttcaaatgcctttgaatttatattaccattctttgaaaaatttcctatcttatggtagattgcatac

SEQ ID NO: 80457 - DNA, 382 bp, Zea mays
tgaaccgaggacccgcgtcaccggaatagcgaaaccgtgctcgccggagttcatcaccccgccggcgcacgtggaccgggtaaatcactgcgccatttttcgattcaatgcatagatagcctctacatcaccccgggaagctcaccgtgccgttggattggactaggtcgccgtggtttggccgacacacccgccgccgacgaggacacccgcctgcgcacgtggaccgagcgattccggccatccccgccgtcgagccatacatcgttgtgaccgccagaacctccccgagccaaccctgcccctcgccggacctctctcgccgcctgtaagccgcgccgtccctttcttctctacggatactgtttacacctgagaggga

SEQ ID NO: 80458 - DNA, 386 bp, Zea mays
  unsure (1)..(386): unsure at all n locations
ntgggtctcttgctttacaactcttgtcaacatgatttgaaataacttgggaatcggttttaaggaccgcccttcttatccccattgcctttaacttccgaagccccaaaagcaaagcttcgtattcagaaatattatttgtgcaactgaaatcaagttttactgcataacatgttataactttggaaggtgcaaccaagatagcagctgcgcctgccccgtcacagaacactatccaagctttggcatctttatttgcttcttcttcctgagcccctggcgtccagtcagcgatgaagtctgttaacgcttgggactggatcgaagatctatgcacataatcaatgctaaattcgttgagttccgcagcccactttccaatcctt

SEQ ID NO: 80459 - DNA, 384 bp, Zea mays
ttataatgatgctacctcgaccaaagtgaaacttttatttatattcaagatatgaggtttgacctctaataaaaattgtagaacctgtgttatacaataaattttatatataaacaaagtcttgattcaaatctaagtatctcaaacagtgccatcaagatagaataaaaatttgatttcaggattcgaattcttctaagtctgaaatcagtgtcgttcgggtcgacgtctcgcgttccctaaaatttgttaaacaacttgagtttcaccaaatataaaagttgttagtaactaatggaggcacatcatatcaaaagatggcattcatccgacccattttgacaaggtttgacattcattctttatgtgaaaataaccctctga

SEQ ID NO: 80460 - DNA, 388 bp, Zea mays
tgccaagccctcggacccgaccggacttcaccggttgttttagatcaccctcaccggacttcggtcttccgccgccgcgcgtggaccgagctatccagtgagtctccgcccaattcctttcgctcatagcttctctggcatcccgtggacctctctgacctatttgattgaactatctcgccgtgaccaggccggtctcctcgccgccgacgagcatccccgcctgcgcgcgtggaccgaccaactccggccatctccgtcgacgttccgcacaccattgtgatccccgcgacctccccttcatcctcgaccacttcaccggaacagtctcgccgccggtaagcccctccgccctttcttcgccgcggctactgtttgaggtagaaga

SEQ ID NO: 80461 - DNA, 381 bp, Zea mays
  unsure (1)..(381): unsure at all n locations
gtntgaattgctacaatgaatggcacatttaatcatatctacacgtagttcatgatataatgagaacaatcatgatttaaatgtaactaatttttaagaatatacttacgtccaaaatagtgggtgttgtgatggaacggattgaagtgtattgtggtatgatccgaagactcgaggcactctagaattaaacatttaaatctctgttacgaatcattataaagcaaaacttggtgacagatgtgtttacaaggcgtaaagacatgtattaccttgtcttctgaaccgcctaaacatagtcccaattattatgccataatcctccttagccaacgcccagcggagtgcatttttgtttagtaggtcaccccaaactttaat

SEQ ID NO: 80462 - DNA, 387 bp, Zea mays
tctccaaaaagattcatgatttttggtgctcaactcttatttctaaaattccaatagtccttccaagagcacccttaattcacttaaaatttgctaactattttaaaaatcccaaaaatatttttacaagagagatcttgattttagacagataacaaaagttgtcccataatcgttggattttttaaaaatttgcgacacaattttcaagttctctcgtaaaagaaaacacaaaattatgatttgttttgggccagaaccagcctagccggcccaacaccgggcaaacctagcccgcggccggggagcccgcgcccgcacgcgcacattttgcaaaaaggaccccgcgcaaagacaaatccagtatgtgcccttgctactattttc

SEQ ID NO: 80463 - DNA, 388 bp, Zea mays
tttgtgcaattatcaccttgggaaggaggggagtttactctagacccctcttgaacccctatctcctaaaaccttggttgaagggggggggggagattaagcaaatgtgcaaatcatgacctaacctttggctaaagttaagtaacatattaatctacaaatatagagaggaaacattgcaaaaagatcccttaagaaaccccaaatccattccttaaatagagagagagctagagctctctaattctctctaagtcaaattttaaccctaatctaaagatcagacgtgttcacttagtaaatggcaccaaaaccatttggtctgaataccaaaaatgtgccaaaccacctaaggtacaccctggaaaaatttgaacccaagtcaaac

SEQ ID NO: 80464 - DNA, 375 bp, Zea mays
tctaaagggagagcacattttatgattaacagatgtttattttgttaaagacatgatttgtagcgcatgccaagcggggaagcaagttggtgcccaccatccacacaagaacatcatgacgaccgacagaccactggagctcctacacatggatctattcggcccgatagcttacataagcatcggcgggagtaagtactgtctagttattgtggatgatcattctcgcttcacttgggtattctttttgcaggaaaaatctcatacccaagagactttaaaaggattcttgagacgggctcaaaatgagttcgacttaaggatcaaaaagattagaagcgacaacgggacggagttcaagaactctcaaattga

SEQ ID NO: 80465 - DNA, 384 bp, Zea mays
tgagaaatatttagacatggtccgaaggattgaggctttctttgaagggttttctgtcaaaaatattcctcgaggagaaaatgaacatgctgatttgctagccaagtcagcagcacaggggctgcccttaccttcggaagtatttttcgaaacaataaaagcaccttcggttgaacttcttgaaagagcagtcctcaacatatctcctgtttatagtgaagacgtactggagaactgagatcatctctttccttcagggtaactttctttcagatgacgaagcttataacaagaggatagaggcaagagctcgaccatatgttataatagaaggggagctgtacaagcatggggtctgttctccactactcaagtgtttatcca

SEQ ID NO: 80466 - DNA, 392 bp, Zea mays
tggaaataggttaactatgattcgtacgcaaatgctttttacacgttcccatcaacgtttcctaatcacagaaatgggttcgtatgtaactgatgtgacattaacctatacaaagtactaatggtttcctgttttcagaggaaccagatccttgtaatttaattgtctgtctagtagctaatatatgagtaatctcattccaactaacgtttgttcatataaatactgtggtgtctgaaaaatgtggtttagtgaagaatgcattgtcttagtgttacaatgtagcttctcttggttgcacatattatgcataattaacagaagaaaaaatggttgccgatgctgcctatcttaggtgaatagatgatgaatcagagagccagagatatgca

SEQ ID NO: 80467 - DNA, 380 bp, Zea mays
tggaggccagatgccaggctccattgcccatcttttgttggagattcaagcactgaacatagggaaaacccgcatctccgggtctattccaccggccatcggcgacctcatcgggctcacaacgttgggcctcgaatccaacctcctcaacggcaccatctcagcagggattgggaacatgaagaacctcacgaagttggcgttgcaggggaaccggttgacgaggccaatcccatcctccatcaacgacctcacccagctactggagcttgatctgagtagtaacgctgagtgggttcatcctcgacactctagccaacctgacatctccagcctcaccaaccttgctcagctagcgctatccgggaacaaattctccg

SEQ ID NO: 80468 - DNA, 381 bp, Zea mays
tgagatgttttccaaatgtgtgaaggattacatggttagtattgaccctttaggtctggtactttgagtgcatcatatgatagaatgaaatgtaagtttctgaaactacagtagatgaagacttatattatgtgtaggttaaccatactagttggatatttttcttagttgagatgttgaatgaagtatagtgacattggttaagcaagtattgtgttgttgttgggctgtcagtgctctatgtagagtttttggcatttcttcgatgaactgtgccgcgcaagatgttattggcttcttgttggcttatttgccccattagttttgtagattttctcccttttggtggggtgcaatgtatgttagattacatgattatct

SEQ ID NO: 80469 - DNA, 335 bp, Zea mays
tccatacgaattttccaatatggaaaatcgttatctttaaaaacgggaggaggtccatccccaccggacatcgttactctagcggttaagctaatctaagagcaacaaggctctgataccaattgaaaggatcatgatgcccaagatggggggtgatttctctttattttaacttctatactgatccatatctttattttcatttaactattatgataatattcttttcatttggaatctataattattcaatggtaacttatttttatatcattaaccttttaatttgatatagttacaatactttcacttatttgattataaaattaagtctt

SEQ ID NO: 80470 - DNA, 386 bp, Zea mays
tgagaaccttattgtggagaaaaagaaagttgcatatgtgagcatttaatctcatgcatatttatcaaggacaaccacttgttagcattattataaataatgacttgttgtgttggtattttctacctttccgcagatgaacaaaaaaactaactaggagccaagatatttttctatcttttcgcgcgcaggtgcaacactgcagctcatgtagagcctcgtcgacctgttctccacccaacctaaccagtaattaataaaatactgcatgaacaattaattcttcttgcgccatcgatatttttgttaaatgcggtggctaaagcatgtttttaaggcatggtgtgtactaacattatttttggcagaggtatttgcattctatg

SEQ ID NO: 80471 - DNA, 379 bp, Zea mays
tcgtcttgaccatgctcttgtatacccgctacctgatttcgaagatacctgctcgcatacttggaaaacattgtcaaatcatgtttttgaggaccttcggaagccgaaggcccccaacaatagcccctcgcaatattaatttgctgtaatgataaattcatattgcgatatggacgaaggccttaagccgaaggtccgaaaaaacaccttctctttgctagaatagcaacagtctttgacaagcgggaccctccagtttttaacacactaggtgtataaataagggctcatcacgagtttatttggcacgctctcttgccaactgctttttctcacccaacttttagcctgcgcgcaacaacacttgcttggcttttta

SEQ ID NO: 80472 - DNA, 380 bp, Zea mays
tgttagaaatatgagggcaaaaaacgacccttggtttgcggagtatttgctacgcgtaggcggtggaactgaggacacaaatagtgacggcgacatctttcttcctaacgaggtatgtgtgccttatagtgggagtgacagcgatcttgacaacctaatagacttcgttttcccaaatctcaacgaaaatatgtctgattcgacctacatcacttcaagggcgatactgtcaacgcggaacgactgggtgtaccatagtttcgatagcgccatggatgatccccataactactaccctcctgagttcctaaacacactgacgcctaatgggctgccaccacatgttttgaagctcaagattggatgccctattatattgc

SEQ ID NO: 80473 - DNA, 387 bp, Zea mays
tgactgaaatagaagacgatcgtgacgaaggatgatacgatcacgaagctatgtgcagaaaagcttcggcatgacagcagaaaaggggaaccgacttaaagatgaaaagccaaattagaccttggagaattactatagagttattgataaaagcaaagggcattaatgtaattttacatgggctgcgtcccgtgcctataaatagatgaacagtactcccatactattcacgctgacttggcattggcatttcgtttgtatccttactttccttcaagccgaaggtacatttgtaatttgttattgtttatataagtaaaataaatagaaataaattaataataatgctcaaagtaatcatgttattttccgtattttatgcataaa

SEQ ID NO: 80474 - DNA, 387 bp, Zea mays
tttccaccaaaaggagccaattttcgagcaaccagttttttctggctgtcctgtaataattgctccaaaccaagttaacccagggaatatcatgattgttgaagaacttgtgtaaaaacttcaggagcaaggctttattgtgagtctctaatcttaccactcctaggcccccatttttttagtctgagtaaccatactccaggcagctagcgcaggtttctttgaattgacgtcgtttcccctccagagacagtgtttccgataagagtcaatcttcttaaccgtggtcaccgggattttcagagtacacatcaaaaaggtcgggagagctgaaaaaaccgagttgacaagctccagcctgccagcctgagagaggagggcagaagt

SEQ ID NO: 80475 - DNA, 388 bp, Zea mays
gatgcatctccatcgccgaaggtcaggaactcctgcaagaaatacactcgggggcttgcggtcatcatgcagcgcctcgagcccttgtcgggaatgctttccggcaaggcttctactggccaacggcggtggctgacgccactagaattgtccgcacctgcgaagggtgccaattctatgcgaagcagacccacctgcccgctcaggctctgcagacgatacccatcacctggccctttgctgtatggggtctggacctcatcggtcccttgcagaaggcgcccgggggctacacgcacctgctggtcgccatcgacaaattctccaagtggatcgaggtccgacccctgaacagcatcaggtccgagcaggcggtggcattcttcac

SEQ ID NO: 80476 - DNA, 384 bp, Zea mays
tgcaactgttgataccattttgtcccttgcgctctttcttaatcgggcgattcaccatttcgatgtcaagaataccttcttgtatggcactcgcactaagacaatctactactcacaactcataggttttgttgatcctacatagtcccatgtgatttgacatctcaacaagtccttgtatagtatgaagcaggcacctctcacttggtatagttgctttgttgtgcacttgctcatttcgggattcattaaggacaagtctgacacctccttgtttatatatcgccataggaccgatagggtatacttactattatatgtggacgtcattttcctcattgcctccaaccaggatctccttcgttgcatagcaataaacttcag

SEQ ID NO: 80477 - DNA, 391 bp, Zea mays
tggcaccaaaaccaagcaactccgactttccccactaaatctaaccaacaacactcgggagagtcccaatagcaacaatcgcacgtcatcgttgttgagcttgttgcaaagggggcaagcagctctgatcgacttgccatgacaagcctcaaccagaacgccaaggcacccgcacctacttccaacaaaattgccgacactccttggcatcaccacatgtaggaagtagctctgactttgcacaagctgtaggatctatgacaccggctagagggggatgaatagacgattttgactaaaatcaaaacactagagaaatttaatcaatatgacaagaggtataaattctctagtgacaacaagttaacaatctatgagaatcaactatggg

SEQ ID NO: 80478 - DNA, 382 bp, Zea mays
ttagtgactagagagagtgatttgtagtgtttattttagctcttgcgcttggatcgcttcttttctttggcattctttcttgtgatcaaacactccattgtaatcaaggcaagaggcaccaattgtgtggtggcccttgcgggaagtttgattcccaagtgatttgagaagagaagctcactcggtccgagggaccgtttgacagagggaagggttgaaagagacccggcctttgtggcctcctcaacggggagtaggtttgcgagaaccgaacctcggtaaaacaaatccgcgtgtcacactctttatttgcttgcgatttgttttgcaccctctctcgcggactcgtttttatttctaacgctaacccggcttgtagttg

SEQ ID NO: 80479 - DNA, 382 bp, Zea mays
ttatcaaatggacgtgaaaaatgccttcctctttgttaccaatcaaagaagagggctatgttgagcaacctcccggctttgaagatagtgagtaccctaaccatgtttataaactctctaaggcgctttatgggctcaagcaagccccaagagcatggtatgaatgccttagagatttccttattgctaatggcttcaaagtcggaaaggccgatcctacgctctttaccaaaacacttgagaatgatttgtttgtatgccaaatttatgttgatgatattatatttgggtctactaacgaatctacatgtgaagagtttagtaggatcatgacacaaaagttcgaaatgtctatgatgggggagttgaaatacttcttagg

SEQ ID NO: 80480 - DNA, 385 bp, Zea mays
tctaaagggagaacacgtgataggtttgacttacgtacaattcgaaaaagatagaccttgtgcagcttgtcaggcaggtaaacaggtgggaggagcgcatcacagcaagaatgtgatgaccacatcaagacccctcgagctgctacatatggacctcttcggacccgtcgcctatctaagcataggaggaagtaagtatggtttagttattgttgatgacttttcccgctacacttgggtgttctttttgcaggataagtctgaaacccaagggaccctcaagcgcttcctcaggagagctcaaaatgagtttgagctcaaggtgaagaagataaagagcgacaacgggtccgagttcaagaaccttcaagtggaggagttcttt

SEQ ID NO: 80481 - DNA, 382 bp, Zea mays
  unsure (1)..(382): unsure at all n locations
ntatagtcgatagcttcggcgctgctttggagaggatctaccgaaggtgtttatttctttaggatcttcggctacgaaacatacccccaacagtagccccttcgcggtgctagatcgtttttcgtaacgagcttgatccgtgaaaaatattctaggcttcgggatgccgaagatccaaaaaacaccttccctgagctcgttggcgagaaacgattaaaataatcgtcgtacgcgcgacccatcttgcactaattacgcgctcgccagcgattcaccttctcgaactatgtggcccaccgttcagtgagtacgggtgactgtttgttcggtgctggagacattgccgattcaccttcccacctgcagcactatataaacagac

SEQ ID NO: 80482 - DNA, 388 bp, Zea mays
tctaaagggagagcacattttaggattaacaaatgtttattttgagaaagacaggatttgtagcgcatgccaagaagggaagcaagttggtgctcataatccacacaagaacatgacaattaacaggccactggaactcctacacacggacctattcgacccgatagcttacataagcatcggcgggagtaagtattgtctagttattgtggatgactattctcgcttcacttgtattctttttgcaggaaaaatctcatacccaagagaccttaaagggattcttgagacgggctcaaaatgagttcggcttaaggatcaagaaaattagaagcgacaacaggacggagttcaagaactcacaaatcgaaggcttccttgaggagga

SEQ ID NO: 80483 - DNA, 378 bp, Zea mays
ttcttggcacttctcatcccacttgtattctctttctttttccaaaagcgatgtcataggcttagcaattttagagaacccttcaataaatctccgataatatcctgcgagtcccaagaactccagacctcaataactatagtgggtatgctccacgccactatctccttggctttagcaggatccactgatattccttcattagaaatgatatgtccaagaaatccaaaactcgcatttactgtttttggcgtagagttgattatctcgtagcttcttgtagcaccaatctcagatgttcctcatgatcactatcactcttggaataagaatatcgtcgatgaaaaccacgacgaatctgtccaaatcatgagcatc

SEQ ID NO: 80484 - DNA, 378 bp, Zea mays
tttactctgagcaacaaggctggaattggaagagaatgatgcccttaagctccaacagcttagaagtcttatatattcaaatattaagtattatatattgaacaattagatttgaaggcatgattttgtccacagttttgtagaattaatactatgttttgtgtgatttgaaggcatgatgttgccatttaatgttgaatattgttgaacctgtgataaaattatgttgggttcgatacatttgttatgctcgtacttattattacgattcaaatgatcatgtctatcgtaatgttaatgggtatgggtacccgctgggtacccgctacctatggtggatatgggtatggcgtaattttgtacccatgatgggtaatg

SEQ ID NO: 80485 - DNA, 386 bp, Zea mays
tcgcatctctgaactaactcagctgcatcactctttgttgttggccaatagaaccctgacctgaagaccttcccgactagtgttctggatgctgcatgtattccacattgcccagcatgaacctcctccagaagtcacttcccagtagatgggggaatgcacttcatgaggacgtctgatgcaccccttttgtacaatgtttccccaatgagtgtgtagtgagccgactgtctggcaatgcgctcggctgaattattgtcgtccggttcctcttcgttccttatatacttgatgattggccttctccagtcatcagagtctgactcgggttgatctataatattacactcttctgtttgatccattgagatgctcggctgtagtat

SEQ ID NO: 80486 - DNA, 381 bp, Zea mays
tggtgccgatggagaaacaaaaatccttgaaatctttgttgtcaaactgcttgccgttgtcaactgttagctcggacggtactccgaagcggcaaacgatgttctgccagaagaatttttgggcagtctttgatgtgattgtggaaacagccctcgcttcaatccatttggtgaagtattcgacggctacgaaggcgaacttaaggttcccctgagcggtgggcaggggcccgacgatgtctaggccccagcgctggagaggccatgtatgggcaatcagctttgtatattgcgaggggttgcctgaccgaggggagaacttctggcaggcttcgcaggacctcgtgacccgatttgcggcgcagatcattgagggccagt

SEQ ID NO: 80487 - DNA, 387 bp, Zea mays
tttgaagaccactacttcatcctttcctggcttcatagtagtctcttccccaccgaaacgaactagctcttttttcgcttcactgaaatagcccaatttcaacatcttaggcagatcatcttcggagatggtggatttcccgaaatccaggtggctgggtttacttggcactgcgctataatcatctttagactcagtcccctcaacatcagcttgctctgtttcagcggcaggtgcttcctccgatgctaccagccctgagcgcttcatcacttcgggcagtctctacaccttcagcttcctcaccgtcgcgtgtaaccctagctgtggaacgcactctggccatctgatgattgagtttcttttttttgaatgaagttgaaaacc

SEQ ID NO: 80488 - DNA, 397 bp, Zea mays
aatactcaagcttctcctggacaagtgctgcacttaccgctgagtgcgaatttgttacatataataacaaaggagcccctggcgttggtggaggtaatgttgttaaatctatcaaatattgcttcagctcctcgaaggctttttgttggcttggtccccattgaaagacttccgctgatttcagcacttcgaagaatggtaaatttctttctgctgatctggatatgaatctattgagagatgccaccctccctgtcaatctttgggcccccttttttgtagttggtggctccattcgaagtatagcttcaattttacttggattagcttcaattccctttgttgaaaccaagcatccaagaaattttcccttctttactccgaaaacacatttttc

SEQ ID NO: 80489 - DNA, 381 bp, Zea mays
ttgctcaacagcatactctgcacgtaaacaattttttttagacatgtcttcattattaaaaacaataaaagtcaagggaaaagtagttcaccttgaaattggaataaaataaactaccaacgatatgttgtcatcggtagcggctaatgtccgtttccagcttcggaaagccgatactctttgacagagtaccgataaccttagctccagtttgatcccggatacagtctaatttttcatcatcaatacctccgaagaggagtgctcctggtttatatccacaagatttggcatactctttaagctcttctatttcggtttttgacaatttgtctccattaaattttgaaacatgaaggcctcgtcctctgaagcttcatc

SEQ ID NO: 80490 - DNA, 385 bp, Zea mays
tgtacttcgcctcatcatggctcgattggtgattgttgcgtcgtttcagtgcgtctgctgacgtactcaccgtcaatccgccttcggtcacgccagctgccatatctgtccccgcggctgactgacccacggcccccacgcctggtggcttcgtcgggccacgcgcgaggtgccttgttgctgttgcattggttaaaatattaccttctgtcttccgcagcagccccgaggaggcgcactactggcgcgtgcggtggttcgctctttcctcacccggtatccggcacccaaggagtatgacccatgggcccggtcccccatgtcatagattgggttgttgtctcttaaaatggcaatgaggaggcgcgctaccgcgcgcggcggt

SEQ ID NO: 80491 - DNA, 386 bp, Zea mays
tatgcccttggaagatgttaatggtaaaatgatgcttcttattgcctgggaggctgctccagctctggagtctgctgaaaggtttgtaatctcccttttcatgcttgtttgtgctttttcctaatttattccatgccttgcttaaagtttttttttctctttcgtcaatgcagatatgatgcattggactatcatggcatcgatgctttggtaggagggggtggaaatgctccttctggtaagaagacaggtagatgtgctgatctttcatccttgggtggggagaatgcttcggaatatgtttcacttgaggaccttgcaccattagctatggaaaagattgaaaccctgtccattgagggtttgaggatacagtctggcatgtc

SEQ ID NO: 80492 - DNA, 375 bp, Zea mays
tctaaagggagaacacgtgataggtctatctaatgtgcatttcgaaagagatagaccttgtgcagcttgtcaagcagggaaacaggtgggaagctctcatcacaccaaaaatgtgatgaccacatcaagacccttggagatgcttcatatggacctcttcggacccgtcgcctatctaagcataggaggaagtaagtatggtcttgttatagttgatgatttttcccgcttcacttgggtattctttttgcaggacaaatctgaaacccaagggaccctcaagcgcttcctcaggagagctcaaaatgagtttgagctcaaggtgaagaagataaagagcgacaatgggtccgagttcaagaaccttcaagtgga

SEQ ID NO: 80493 - DNA, 377 bp, Zea mays
ttcgccggcaatttccagggcacgtacgtgcgccccatgaattcctgggacctccgaagctgccgacagtagccgagagagtcgctccgggactacatccggcgattctcgaagcagcgcaccgagctgtccaacatcaccgactcgaatgtaatcggcgcgttcctcgccggcaccacctgccgcgacctggtgagcaagctgggtcgcaagacccccaccagggcgagcgagctgatggacatcaccaccaagttcgcctccggcctggaggcggtcgaggctatcttccggaaggacaagcagccccagggccgcccatcggaagatgcccccgaggcgtcgactcagcgcggcgccaagaagaatggcaagaa

SEQ ID NO: 80494 - DNA, 382 bp, Zea mays
tgaggctatgtatagattaccgcccacttaacgctgtgtctatcaagaacaaatatcctttgcctcgtattgatgttcttttcgatcagttggttggagccaaagtgttttccaagatagaccttccctccggctatcttcagatcaagatacgagcaactgatattccgaagacttccttctcgaccagatatgggctgtatgaattcttggtgatgtcttttgggctgactaatgcaccagcatacttcatgtatctgatgaactctgttttcatgcctgaattggacaagttcatagtggttttcatcgatgatatcttggtgtactcaaagaacgaagaagaacatgccgggcatttgcatgtagtgcttcaacgtct

SEQ ID NO: 80495 - DNA, 385 bp, Zea mays
ttggcatctttatttgtttcttcttcctgagcccctggtatccaatcggcgatgaagtctgctaatgcctgggactggatcgatgatctatgcacataatcaatgctgaattcgttaagttccgcagcccactttccaatccttccagtagcttctctgttcctcataatatctttcaaaggctgagatgaagggacaattatatggaatgcctgaaagtagtgccgaagcttcctggaggccattaagacaacatacaacatcttctccaattctgtataatttttctttgataagcttagaacttcagagacaaagtatactggggcttgctttttgatttgtccttctaatttctcctgcacaagcgtcgcactcactacag

SEQ ID NO: 80496 - DNA, 397 bp, Zea mays
ttagatactcagctggccaaacaattaaataaaccctagcaagcctctttgtgggagttcattagggaattctgatgttgggggccttcggcttacgaaggtcctcaaaaacaggatttaacagtatttctggagtttaatgtgtgaacaggtatcttcggactcaagtcggtatcacagcagaccagaataatactaaggttgatacagcgccgaaggtgtgagcaggaaagcttcggcgtggtagcaacaaaatgaaaccgacttaaagatgaaaaggctattcagacctcgatagattactatagagttattatcaaatgtaaagggcataaatgtaattttgcataagctgtgtcctgtgcctataaataggtgaacagtacccccgtactgt

SEQ ID NO: 80497 - DNA, 389 bp, Zea mays
tgcattgcatgtataaatgtcttgtattgcatctactgcttgtctaacctagttgagataaccgccaacaaagcgagtgaaaaagcttaactcggatcaaacttgacaagtcttagttttaagcttttagcacttgaattcttactttttatgcgattgttgcttcttgaaatatgcatgaggtactacacttagggggagtattcaaaactcaaatcactcataaaaacccctagtgcaaggccaaaatgtaaattcaccatttgcctattttctctaaaaaattatctagcctatggcaaaatattttgaaaattatgagaaaatatatgagggtgccaatacctgtgccaacaagtgttattttgtgtgattataagtcgggattt

SEQ ID NO: 80498 - DNA, 400 bp, Zea mays
atactcaagcttgggatttatccaatttaaaacaagcaccatctcttaactatttattttctatggataaactcaacacaagagatggaattagtagcacaagcactagtttcttatttagcaacccttttatatgtggaagacaagcatgttgctaaaatagagaaacctcataatatggactagatttcccttgagccctcatgcacaatatattttaaatgacatgaataatatgcatggttgctcaatgaagtctaaagggctgacttaatgcatattatggtgagtgtctaatatagaagaatcaaatccaaattaattagaaagagtacttcacatagttttggattgttcaccatatgataatattcattcatcttgcaattagaccttgatt

SEQ ID NO: 80499 - DNA, 378 bp, Zea mays
  unsure (1)..(378): unsure at all n locations
tcactgtgtaatctgaggaagggtgtccagttttctttccagcttttggttggcttcaatctcagttttgtgtcttgctgaaattttgaagtcatttggttcatgagttcttccctttcttctcttggtgcattttgtgagaatctttgagttcttgtgttgtgggtgttgttggggattgtcttcaaatgaagatcactctttggacctctatgaacatctggttcaagcagattttggttgtgatacgatctgaacttgttttgaaaacccctgtaagaaacggtgaagcctaagaggggggagtgaattangacttttaagaactattctctaaccaaggtgacaattaaattcctagcacaaaacctatgcaaa

SEQ ID NO: 80500 - DNA, 383 bp, Zea mays
  unsure (1)..(383): unsure at all n locations
ntaccaaatggatgtgaaaagtgtcttcctcaatggacccatcaaggaagaggtctatgttgagcaacctcccggctttgaagatagtgagtaccctaaccatgtatataaactctctaaggcgctttatgggctcaagcaagccccaagagcatggtatgaatgcctaaagattttcttatcgctaatggcttcaaagtcggaaaagccgatcctacactatttactaagactattgcaaatgatttgtttgtatgtcaaatttatgttgatgatatcatatttgggtctactaacaaatctacttgtgaagagtttagtaggatcatggtacaaaaattcgagatgtctatgtgggggagttaaagtattttctatgattt

SEQ ID NO: 80501 - DNA, 385 bp, Zea mays
tgcatgacaaaaacgtgaatgccataaatctttcttatcttaaaaattgacagaattcaccagtttattacacacatcatgcagtgataagcggaacaagcctccgcaatcatattctttaccaacaaaggtaccatgtttcgacacaacacatttattagattcaagaacaactttatatccatctcgacatagcatcgaagcgctaacgagattcttcttgatagagggcacatgctgcacgctcttcaatggcaccgtctttcccgaagtaaacttcagaatgatcgtaccaacaccaagaacatgagcacgcgacccattttccatcaactaggcgccagacctcccgacctgataggaagtgaacatagaggcatcagca

SEQ ID NO: 80502 - DNA, 386 bp, Zea mays
tcgtcgtgctctgcatccccttggggacgactttttatcttctccctgcttttttttctttttcctgcactcgatggtgcatgcttagattttacattttacattcttttgggggatttggctctcgtggagctaaataagaaaggaaaaattacaagctatggccccattaaaaatctttctccccctttggaaaggaaaatggtgccataggaaaaatgaaaaatattacatcaaattacacataatatcgtcgaagctcatcctcattccaacatctaggaatgtcattgccgtccatatccttcaatctgtaagaaccaggccttgacgaagataccaccagaaatggtccttcccacttcagttgtagtttacctactgtg

SEQ ID NO: 80503 - DNA, 383 bp, Zea mays
taataggcggaaactcttcactaacatcttggaatatggcggccgaggaatggctcatgaaataataaagaaaagtgaaaaagatactcatgacactagagaagcaacaaaagcagctgaaaaggctgcggagcttgagagacgaataggtattacttaatgatttttaacttttttacttttgtgactttaaactgatttacgttttctaccgcagctgaactatctcctcccccagagcccttcgagtcactggccgaagcagaggcaaaggaatcatcataaattattaacatggccgaaactattatagacgaagtcgttacccaactgctgaccgaagctgcagataaagttttgaaagaagaagaatagctattgta

SEQ ID NO: 80504 - DNA, 379 bp, Zea mays
tctggcacattgggcctgtgcgtcagtgtctccagtgcggaagcaaacaggcgtgagaaaatcggtatgggacgctggtatatggctgaagaacaaataaacaaaggagaaagaaaaaaaacagaagaggatgtgggaggggatatggggcatgcatgtgctggctttggagagcatgcagccaagtgatcacgtcatggctgaggtgaggcttcaccctttatttatttttgtttcctcttcttcttttctttttattatttctctattttctgttttcatattccaatcttaattttaaatcaggtttaaattcaaatttcgaattaaatgtaaatggagttcagacttcaaatctatttagatgcacaaccaaaaa

SEQ ID NO: 80505 - DNA, 375 bp, Zea mays
tctaaagggagagcacattttgggactaaccaatgttcgttttgagaaagacagggtttgtagcgcatgtcaagcagaaaagcaagttggcgctcatcatccacacaagaacataatgacatcgaacaggccactggagttactccacatggatctattcggcccgatagcttacataagcatcggcgggagtaagtactgtctagtaattgtggatgattattctcgcttcacttaggtattctttttgcaggaaaaatctcaaacccaagagaccttaaagggattcttgagacgagctcaaaatgagttcggattgagaatcaaaaagataagaagcgacaacgggacgaagttcaataactctgaaattga

SEQ ID NO: 80506 - DNA, 386 bp, Zea mays
tttctgcaaaatagagtccttgattcttgataagccttaccttgaatccttttaaagctagcatacccttgagagtcttttctttagtcgggtaagtcttgctgagtaattgcgtactcagggttttattccctgttgtttttcagtttataattttgtgctactgatgatggtattaagtgtcggtgggctcggccttcttataagtctaagtatctctcatatacttcttattgaggatggtcacttgagctagcatatatttcaaacttatacttttgtaatcactccgatgaatataatgtaaaatttttgtaacatgtaaaatttggtaatcaggtttccgctgcaaattgttggtgtgtgatttgtgtttacttaatcct

SEQ ID NO: 80507 - DNA, 390 bp, Zea mays
tatgatcggataaaaacaatagaagtaaacgccccttgttttatccccctctggctagctacaaataagcgtctaaggccccgtcgcatctaaccacatgcagccgagaaaggcatcatatggtaacacttcgtcgttcttcctcattccttcgctccaagcctcacgctcgccgccaccactctcaaatgttgtaaggcaggttggctttgtgccttaatgtgttctgttggcttgtattagcgaagatgttgtcctgcagaacattcttgaaagaacacacctatatgagttagactgtccaacatcgcagtctatgagatctaggtgatctctagtaaactcatgaagagaccttggagtacgacgtatatgctccacccgagaagg

SEQ ID NO: 80508 - DNA, 385 bp, Zea mays
tcggcataccccacttcttcagcattaggaacactctgttggctatgtattcctggactaagtccctagacccaatgtgtttagacacaattctaaactcatacacaacatcttggcatggatcccctggtgttatgttgcattgaggtctactcagcccgaagattagcttcagcgggctttgaactagcttctcctcttcttcatcaattttaacataaaaccattcagatttccaaccggtcggccatttagtgcgatagctgaccacctgtgtcttcatatccttccgataagcaaaattataacaaccgaagttctcatgcaacccgtcttctctagccttcgtctgataatgaagttcatgtactggacagaatgcatc

SEQ ID NO: 80509 - DNA, 388 bp, Zea mays
tatcactctcaacattcaatacaagagcaaagaattcactctttaagacacaatcaaagcattcaatcctctccaagttccaaaatcaagtcaagtgatcaaagtgtttagtgacttgagagagggtaacttgtatttcttttgttactcttgttgcttccttcttctcattctaatctttcgaagtgttttataaagcaagcacgagacacctaattgtgtggtgatccttgcggggtcttagtgacccgtgtgattaagaagaagcactcgaccgatctaagtgaccgattgagagagggaaagggttgaaatagacccgacctttgtggcctcctcaacgagcagtaggttcattggaaccaaacctcgggaaacaaatcaccgt

SEQ ID NO: 80510 - DNA, 384 bp, Zea mays
taacagatgatagagcatacaaatctatttatcatttttaccagaacaggagcttaacagatgtcactgaagcttaacacagttcatcaggtgaccatgcatcaacgagatcaaaagcttaacaacagttcatcagttcaccacaccagtgagcaatagatcaagagtaggatatggttacctatgtgttggatgagctggacagggagatggcaccagtgagccgtatatccggagcaccaattccgtcgacgactcgccgtggaattggatggagtcggcgcgcactggttacttacggatccacacacgcacacaacttacaggagcactggagcagggaggtggagcaccggagcactggagcatggaggtggagcactg

SEQ ID NO: 80511 - DNA, 386 bp, Zea mays
tataacaagaggatagaggcaagagctcgaccatattttataatagaaggggagctgtacaagcatggggtctgttctccattactcaaatgtttatccagagccgaaggtatagaattgatgaagaaaatacacgcaggcctgtgtggatctcacattggatctaggcctttgctgggaaaagtttttcgtcaaggattttattgaccaaaggcagcttcggatgcagcagaattagtccaaaagtgcgaaggctgtcagaaatgtgcaagagatcaaaaacaacctttgtctctaacccagttaatacaacccacttggccattgcaaaggtggggtcttgatttgttaggtccgttaccaccagcacaagggaatttaagata

SEQ ID NO: 80512 - DNA, 385 bp, Zea mays
ttagataacccatgttgtccatcatctcacgacattcattaatctccttactgtctgatagacagtaaaggaaatcatcttcgtcgtctactccgtataccaaagacccacgggggtatttcagctccttagcataatgttgcgtttcggtaagttgctcttctgatagcttctttcccgaagcatgtcgaacaatatagttcaaatcaccctgcgaaggtgcatcgggagcaggtgatgtgggcttttctggtagattttctttcaccagctctactggcgcagcccccgaaggccccgcttcaacatgaacaggagatgcgcttgcatcgactactttccttgcatcttcaattttatcatcaataaattcagtagtagttgg

SEQ ID NO: 80513 - DNA, 395 bp, Zea mays
caggaactaagaaactcaagcttagctcttgacaataaagacttattttttttttcagagacgcgctatgcaggaatgaattttgggaaattaaactaggtatgaagcagggataatacatggacatgctttctcttcctttcatacaagatatgcaaagaatgtattaacaaggaagatttagatacaagtttaaatgacaggagatagttttacctttttgtacctttacatagagacgctctcttcattgtgctttgtccttagtcttaaatgcttaagacctattcttaatgacaatattatggaaatattttgcacaagagagagttctacaactagtgaccctttcaagatattgttagcgaatatcaaatggatcacatgtatcatga

SEQ ID NO: 80514 - DNA, 371 bp, Zea mays
ttgaatctattcctgttaattataaaggatttgttgtactcttgctaaaatttctaagaagtctagaacctcatttatttgatatatataactctacttacgactgtgttacgttgcacattgaaatatgtcccaaacctgattaacattgcatcttggtgatgtttgagctagttaactcccaaatcatcttaagatgatcataataaagttgtatataacttccttatcttgattgtgttaaatttcatgactcttagtcacttgttctcaaaagttgtatatcaagaacaaggcaacacaattgttagtcattacagaccttcgtcttccgaagcattatctcctcatgggtataatgcttatcagac

SEQ ID NO: 80515 - DNA, 381 bp, Zea mays
tggtaaacactctacaactttgatattattgtctctatttgactagactcttagcaaagtcgagctgtgcaaaaataataggtctgtccaggttggacagattcagacttgcgacttcaaaaattcacaactacaggttcaggcatccaaactaattgattctagactttctggaaaggtaataaaattgtctacatatcatttataaacatctcaaggtgattcaatttttaactaaggacaaaagacactataaggctttgctgtccagaattgggcagattcagtcttcagactttaaacatccataacttaatcttcagatcaccaaaaagagtgatccaagactttttggaaagctcagcaaaagtactacgcaac

SEQ ID NO: 80516 - DNA, 344 bp, Zea mays
tatcaagtctactttcatatggatcctgatgtatagtcatatctgttctgaggccgccgtaatcattgttttcttaccgagacatttcctgccttttctgcccatggtgctgcgtcaccctattttggcccaatgggtcgtgtatcaagttaggtccattagggacgcatcctagggttgcagcacgaccccaatacccttgtggtcgtcctcccatgtttataaaccccctagccgccaccaagaacagcgggttttgtttagatcaagtttagctctcgctacttgcttgtaagcgcgcgtgctggttcagccgcccgtcttcatgtcttcggaaccccacc

SEQ ID NO: 80517 - DNA, 337 bp, Zea mays
  unsure (1)..(337): unsure at all n locations
ttctttacaaggatttgagacgnctatgttttacttattctgtgcatcgacagggctggcctgtttctctttcacacgccggtctggccataggagaaatgggaggaggagctatcaactcacagttcgcgtggtaacgcatcgtgccggcgcgcgtgcatgaatctgccgacacaatggtgtaactcgtgccggcgtggaacagataagaaaggaagaagcacaacgcacaaatagcggtacgggacaaagggttcgtgcaggccgtgggcgcacgcgtcagtctgcacgctgggtactctatgttggcgtgagtctaggagctcgtggttgtcgc

SEQ ID NO: 80518 - DNA, 345 bp, Zea mays
tcttcctaagatcacccagaccacatttttatatatgagaaatagccactggtgaatagttgataatgccacaacatagagaaagaaagtggaactttctatcagggaccggactgtctgcgccagggggccaaactgtacgcgccatcgtggcggacggtccgcgactgtccaggggcgagttttagaaccctagccacccaatgcattcaatcaacgattcgacagaaaataaccatccaaatcggttcaaatttttgcacaatattcacaatgagtaacactagcaattccaccaatcaaatttgtaactccattgcccaattctagatcagagagaaatcc

SEQ ID NO: 80519 - DNA, 341 bp, Zea mays
tgtgttcggccagcatctcacctcgtcgttcagcatttcttcccaaaaggtgagatccgtctcctgcctggcgagatccatctcccgcctggcaaggtccgcctcccgcctgtccaaggactgttctttcgctttaagtttctcctcggcaagggcggtgtcgctggccttgccctcgagctcttgctgcagcttttgcagcctctccacagccctagtctactggacccgctgctcttccagggtctagtccagggcactcagcttggcccagaactctgttgcgagggcctcccgctgagacatggcctcctccctcctggccaacttcttctccctcc

SEQ ID NO: 80520 - DNA, 343 bp, Zea mays
ttatcaaatggacgtgaaaagtgcctttctcaatggaccaatcaaggaagaggtctatgttgagcaacctcccggctttgaagatagtgagtaccctaaccatgtgtataaactctctaaggcgctatatgggctcaagcaagccccaagagcatggtatgaatgccttagggatttccttatcactaatggattcaaagtcggaaaggctgatcctactttatttactaaaactcttaaaatgacttgtttgtatgccaaatttatgttgatgatattatatttgggtctactaacaagtctacatgtgaagaatttagtaggatcatgacacaaaaattcg

SEQ ID NO: 80521 - DNA, 337 bp, Zea mays
tgtgaacaatacaaattcagatttttattgcagcttcagcagatcagccgaagcccatgctcttatgtgaggatatagcagagcagaaggtgctgttgggatctcagttatccgaagaacaagagaaaaacttgataagatttttgttcaacaacaaagatgtttttgcatggtcagccaatgatctctgtggagttaacagagatgttattgaacactcgctcaatgtcgatccatccttcagacccagaaagcagaggcttcggaaaatgtcagatgataaggccgaaggtgctcgtaacgaagtcaaacgactcctcagtgcaggagttatcag

SEQ ID NO: 80522 - DNA, 341 bp, Zea mays
ttgccacttttgtgcaaaggtgttttttcagaagaaggaagaaccaaaaatagaagtgtgttgctgtggatggtgctaagtgccggtgggctcggccttcttatataagtataccccgtctttatcttcttactgaggatggtcatttgagctagcatatatttcaaacttatactcttgtaatcactccgataaaatattgtaaaatttttgtaacctgtaaaatttggtaataagatttccgctgctaaaatgttgatgtgtgtgatttgtgttacttaataccgcggttctggttgtaagtggtttatccggtgtccttggggcaatcggacggatcc

SEQ ID NO: 80523 - DNA, 340 bp, Zea mays
tctcctggacaagtgctgcacttatttctgagtgcgaagctgccacatataataacaaaggagccccctggcgttggtggagttaatgttgttaaatctatcagatattgcttcagttcctcgaaggctttttgttggctcggtccccattgaaagacttcgactgatttcagcacttcgaagaatggtaaatttctttctgctgatctggatataaatctattaagagatgccaaccttcctgttaatctttgggcccccttttttgtagttggtggctccattcgaagtatagcttcaattttacttggattagcttcaattccctttgttgaaacca

SEQ ID NO: 80524 - DNA, 341 bp, Zea mays
tttatgtcatcaatcttttgacgtttttgcttcctcttgtcaatgatgctggtagtggagtgctctggattttcagagagagtctcatgtagagcattgaacccatctattaatctttgtatttttggcggagctgggttaaaccactccttccaccatttcatagtatcggctatctccgagatcacaatgtctttgttgaaggggcgttcgcgtatacgacgttggaagcgatcaagatccccatgagcatattgcataaagcgtggtgccggaacatctgtaggctcagatatatgcacaggctgccgagcatcaaattcgctataatttggcttctc

SEQ ID NO: 80525 - DNA, 341 bp, Zea mays
  unsure (1)..(341): unsure at all n locations
tctaaagggagaacacgtgtttggactaaccgatgtccgttttgagaaagacagaccttgtgccgcatgccaagcagggaagcaagtgggaggtcctcatccacgcaagaacgtgatgacaacctccagaccactggaactactacacatgtatctattcgaccccgtcgcttatctcagcatcaggggaagtaagtatggtcttgttattgtggatgattattcccgcttcacttgggtgttctttttgcaggaaaaatctgagaccctaagaaccctaaagcgcttcttgaggagagctcanaacgaattcgagctaaagatgaagaagataagaagcg

SEQ ID NO: 80526 - DNA, 330 bp, Zea mays
taagactattgtttattctcttgatagtgttgaccagcaagtcacattctcccatgtgaagtgctcacacctaggctctagcgcttgatctaacacaaactattgggcgctctacacacctacctctactagtgttgctcttctcttgaaaggtgagcatgttatcccttacaaagccttctccagagccatgcacaacttcacatgggattccatggagccacaacttctaaggtgtctaggaggtggcaacctctaggagtaataagtgtcactggcttgcaactcgaccaactagtgccacttgtacaactgttcattgcaatgcac

SEQ ID NO: 80527 - DNA, 326 bp, Zea mays
cgatccgaattcttctacatgatgttcggagaaaagggaaacctagggatggggaattacccgagttgtcgcggtgaggaaagccaattcgcggcgacggcggattcctcaagttcacgcaaggtccggcgagcaattcgggccgcttccccgtccggctccacttggcttgcccgcggacagttccaccgcgaacccgcgacgaccaccgacccgaacctcatttcacatgcggcccgaacgtcgagatggtctagcggccgcctttctcccttcttttctctcggcgcacggcaatggtggttcatgttttgtaccacaagttg

SEQ ID NO: 80528 - DNA, 346 bp, Zea mays
ttgtggcattaaagttcaagtttttatttgatcacctattcacccccccccctctaggtgccctcatattcgtcatgcttcgggaaaggtactatcccaagaagagatgctagaagcgcaacactatgcccaaaaattgaaatatccgaagggggcgttagtgttcaatggtagtggcgaagaagattttctgtactgtctcccggataataaagaaatatccgtttgctgggagataggtaaaagcatcggattcccgaagctggaagacggtctttcgattttgtcgaaggacaaacttgctgatagactagcatacaatagcatagaggtataaaaactaact

SEQ ID NO: 80529 - DNA, 346 bp, Zea mays
ttcctggatccgcaccgcgcttgcgccttttgttagttagggcctcgcgtcgcccccatgctaaggagcgccggctcaccgagggcaccatcggcgtccagcaaaatgccttctacacatgcaacatcctcatatttgaagctgaacaagcgaatccaatcaggttctgcagtcgtcgtcccttcgatgtcggcgcagccgccaccgaaggggagcaacatggacccgcccacacgtaagcgcccttagaagcatatcctaatatacgaacactgataaaaatgaaatcccaatcataaacaaagttcaaatattatcattgttagcagaggctaggagggaaaga

SEQ ID NO: 80530 - DNA, 344 bp, Zea mays
tcagcttcgtcatactttagttttgtcattctgcacatattaaggagcagaataagaaaggtgcaaatttcaaggagaaggtaaaagtaacaaatataagtttcttaccggcttaaggtgacttcgagcttcgtcaccagccatccttcgcccgccatttacccaaatttgggtcataaatctatttccgatgcttcgggctaggctcgggatatcaatcaaatctgatgctgacaagctaaagtttggcctattcacaattttcccatgagtacaaccggccttcagaaaagcggcagctgtgcctcgagaagctaccagggcgcagaaatcgacatgcccac

SEQ ID NO: 80531 - DNA, 347 bp, Zea mays
ttttctgatatccatagccttttctgtctgcttgccttgcatgtagcaattgtttgtagattagcacaagcataacacgcgaaagtagaacacaaatatgacgaagcatgtaccttttcccaattctttatggattcttcgatgcttagctcttttccacccctcctcaagatctcagatagaaatttctttgaccattccaaagcctcaagggttgcgatgcgatttttctgttcagcatttgaagtttgagcctttggacttcggtccggctctcaataaagtctttctccaatatcttaagagatttttgtttttcaacacagtcaaaatgaagcctaaatact

SEQ ID NO: 80532 - DNA, 342 bp, Zea mays
tcaacttcatctatgttatgaatattctttgaattcgtccaactcccttcagctctcttggcagcttcttgactcccatgtaccgcaatgggcccttgttccgaaggtatcttcatgcatagatatgctggatgaagtattgcttcgaaggcattgagcgtccctcgaccaataattgcattgtatggatactccatatcaacaatgtcaaagacaacctgttatgttcttgtgttatggacatagccaaaggtaattggcatgggtatcttgccaagtgccacaatttgtcttcctccaaagccacaaagagggtgtgttgaatcatgtatcttatcctct

SEQ ID NO: 80533 - DNA, 342 bp, Zea mays
tctaaagggagaacacattttgggactaaccaatgttcattttgagaaagacagggtttgtagcgcatgccaactaggaaagcaagttgctgttcatcatccacacaagaacatcatgacgaccgacaggccgcttgagctactccacatggatctattcggcccgatcgcttacataagcatcgacgggagtaagtgttgtcttataattgtggatgattattctcgcttcacttgggtgttctttttgcaggataagtctcaaacccaagagaccttaaagggattcttgagacgggctcaaaatgagttcagcttaaggatcaaaaagattagaagcga

SEQ ID NO: 80534 - DNA, 338 bp, Zea mays
taagtcatagagtgtaatccacttacttctcgtttgttccaggctgtttacgtgcatcttggagattgccggcgagcgcaaccacggatctgaatccattactgatctttggaaataaaggtacacagtttatctttattgtttgccttcatctgtatttctatagttcattagaaaaatgatccttgatggtagcagtgtagtagacgcctagagtatacaaatatggcagaaaattatttgtattaatcagtttttcttttttgtttgccttcatctctatttctatagttcattagaaaaatgatccttgatggtagcagtgtagtagacgccta

SEQ ID NO: 80535 - DNA, 340 bp, Zea mays
tcaacaacttaagcctgtgaggaatatatattttccttatggcaaacaatgaaactattacatgagatttaaaaagtgtcctttattatacagaaaataaaactgaatggaaaagactactatcaaggtaggatatttgtcaataaatgtgcttcgactctggcacagtgctattgattgtgcgagcttcggactgttctctgaagtccttttgttgttgagcatattggcccccttctggctgttggccttgttgcatcggtggtggaggcggaggctgttgccaggaagcttgaggttgactcgccgaagcaacagaaactgcagggtggttgcctac

SEQ ID NO: 80536 - DNA, 345 bp, Zea mays
tggacagtgttctgcgatggttcctggggaaccttcggcgcaggagaggctgctgtcctagtagcaccttctaaagtctgaacatgttatgcagcaaggcttgactttagttgtacaaataatattgctgaatacgaagcacttccgttgtgtctttggaagttaagggcaatgggaataagaagggacatcctgaaaactgattctcaagtaatttctagccatataaacaaaagtagcaaggcaagagacccgaagcttgaaaaatatatggatacagtttgaaggttagaggcttctttcgaaggtttttctgttaagaatattctaagaggagaaaatgag

SEQ ID NO: 80537 - DNA, 330 bp, Zea mays
tgcatgacatttattgaatgccataaatctgactcatcagaaaaatgaacagaattcaccagtttattacacacatcatgcagggataagcggaacaagcctccgcagtcatatcctttaccaacaaaagtaccatgtttcgacacaacacatttattagactcaagaacaactttgtatccatctcgacatagcatagacgcgctaacgagattcttcttgatagagggcacatgctgcacgctcttcaatggcaccgtctttcccgaagtaaacttcagaatgaccgtaccaacaccaagaacatgagcacgcgacccatttcccatt

SEQ ID NO: 80538 - DNA, 327 bp, Zea mays
tgaagccattgttagtagcataagctattaatatgcgaattgactgaagcctaactacgggtgcataggtttcactgaaatccaaaccttcaacttgtgaatatcccttggccacaagtcgggctttgttccttgtcaccacgccatgctcatcttgcttgttgcagaatacccacttggttcctacaacattttggttaggacgtggaacaagatgccatacctcattcctcgtgaagttgttgagttcctcttgcattgccaacacccaatccaaatctcttaatgcatcttccatcctgtatggctcaatagaagacacaaaag

SEQ ID NO: 80539 - DNA, 355 bp, Zea mays
actcaagcttaaagccatggtaagtagcataggctttttatatacgaattgactcaagcctagctacgggtgcataggtttcaccgaaatccaaaccttctgttggtgacttgttctcaaatgctataagttaagaacaaggcaacacaaaaaatgttaaacgttaaagtccttcgtccttcagaacattatttccccttgggatataatgattttcggacgaaggttatgaaagatataccttcatcaacacaacataaaataatgaagaaggaatcatatggaatataacataaacaattatgtataattatcaactcatttctatattatcattatggaaaaatagaaatga

SEQ ID NO: 80540 - DNA, 146 bp, Zea mays
ctgacccgtgtctctgatttattcccgtaggaatgcaagggctccctcgcaagaccctaaagggggcttgggccgctgttcaggagatcggaagtacttcaagtcagaacatgcggggtaaactgtgataatataatcaccgtttc

SEQ ID NO: 80541 - DNA, 344 bp, Zea mays
tctattctaggtcgttcatcccagatcctacggttgtcgccccatcttccacccctccggatcctggccacggcagcgctgccccctgcggcagagggcacgtcggtgaacccctactaccgattccgcgcgccaaactacgattacccaggtgctaagcgaatggaatgaccgcaggaatacaaagggcgggtacacaccggtgatctttcagcaagagcagtgcgacgacgttggagtaggcagattggctgttccgcgaagttcgcgacaaattccagcaagaccagtgcatcaccccgctcgagcaagtcgcgatcacattcctgacgacgggttgaaac

SEQ ID NO: 80542 - DNA, 349 bp, Zea mays
tgtgaaggttcttcatccccacatgtgctatttcggcgatgccacagccagcccatgctagtcttagctattaagcatgcatctagaccggcctcttcttttgcaaaatcaactaaataaagtttgccgtctaatacacccttaaaggctagtgaaccatcacttcttctaaagacagacacatctacattggtgaatagacagttataccccatgttgcataattgactaacagatagcaaattatatccgagagactctactaaaaacacattagatatggagtgctcattagaaattgcaattttacctaacccttttaccttgccttgattcccatcaccgaata

SEQ ID NO: 80543 - DNA, 59 bp, Zea mays
  unsure (1)..(59): unsure at all n locations
ttctttggcggcatgaccaatgactantcttgtcgaaggtggtcgaaaagggttcaccg

SEQ ID NO: 80544 - DNA, 342 bp, Zea mays
ttgccaaataggacgcataattatacctttgatgtcttctcgtgccgataagtcattcttcacataaaaccattctgtcatccaatccccgggccatctcttccgaaaggttggtacgggacagcttgccccggaccgagaaacgaagctgtagcagccaaagttgttatggtactgttctttgccccaaggctttgtttcatataataattcatgaacattacaaaagcttcttgcgtcaggcttcagaccttgactcctcgcggcccacacgaagatatttagccttataattgcctcgggagtaagttgatgaagatagacttcgaagattttcaacac

SEQ ID NO: 80545 - DNA, 343 bp, Zea mays
tgagttattttattacagaccatatttaaaaggcgagtgcagagtagtaatattatacaaaccaagggaggcacaaactcctcctgataagttataaacaaaagatcctatgtggaggaccgagtcctcccgcacttcagtcttgtttttcttcatttggtaccaccttggagcaaaagcaacaaaaatttgtcgcttcctcacctaaaaacaacaaagggataaaccctgagtatggaattactcagcaagtcttacccgactaaggaaaagactctcaagggtatgctggataaataggagtcaaggagaggctttagcaaaaatcaacttatacttttgc

SEQ ID NO: 80546 - DNA, 341 bp, Zea mays
ttaacaccaagtagtaaaatagaaaaacctgcatcctattgccgatgatgcactgacctttgcccatgctaccctcttgtactgattagcgttttgctgcacaatcttacggtgtctctgaatccagtcaccaccgagtatatctttggattctgatctgaggtgagacatagcaaattattgaacagggagaccaccaagacatctgtggatgtggatcttaagcacaaaagaggcgtacttgctaacagacgtaaccatatagtgaaggttgttcataagaaatatgtgatacaatgcaggatccttgtactgcttagctttcccattcaagttattct

SEQ ID NO: 80547 - DNA, 354 bp, Zea mays
  unsure (1)..(354): unsure at all n locations
tactnaagcttgtttgaagagagaggcaaatttattatttatagtgagcacttggtccttgcgaggactaagggggagcgatagcttggacgggtgctccaacgaggactaatggagagtgccgactctcctataccttgagaaaaattttggaggagtcttcttgccctttgctttacattccgcaattactttgagcaatttactttaagtattttcattcctagtattttccatgatgacttagggtttgtttagcaattcctatcttttgtgatctagctaagtagttgggtgaagttgggctcttatttagggtttaatcatttgcaagcaatttagaaaaagcccaat

SEQ ID NO: 80548 - DNA, 330 bp, Zea mays
tctacatctacttgtaatctattcttggtagtgggaattcgtccttcggacatgccttgttgagatctgtgaaatcaatgcacattctccattttccattagctttttcaccatgacagtgttggccagccactctgggtatgttacttctctgataacaccagcacttagaagtctcttcactttatttcgtgcacctttagctttatcatcgaacattttgcgaagcctctactttcttggtctgaaggacgggtccacattaagtgaatgtttaatgatgtctctattgacaccacagagatcattagctgtccaagcaaagacatc

SEQ ID NO: 80549 - DNA, 325 bp, Zea mays
tgttgatcttgagatggttgtgttatgactccacaccactttgattaactcgtctggccactttccccttggctgattgaagattgatttcattattcttgtcattatgatcccattggctctttcaacaagtccatttgattctgggtgtcggactgatgcaaaatggatcttcgtgccgatttgattacaaaattctttgaaggcttcagaatcaaattgtgtcacattatccacagtgatagccttcggtactccgaagcgacaaacaatgttctgccagaaaaacttttgaatagtaaacgaagttattgtggctaaaggt

SEQ ID NO: 80550 - DNA, 345 bp, Zea mays
ttaaccccccccgcgagaccttttctcgtttctttctaaccataatgaatgcgacatcgaatgtcatacttgatgcatatccactttatttgttcccttgtatgatgtactgtttgcttcccaatttgaatggatgtatgtatgtatgcttgcaatcgcatagagaacgatccggttgaagagcccgaggaactcgcaggagaagcccctgagcagcagtcggttggtggaggcaagtgtcccttgacctatctatgtcctattcattatttaattcacctcccgctgtatacatttatgcctaaggattgactagttttgttatccctgtccttgcttacctat

SEQ ID NO: 80551 - DNA, 344 bp, Zea mays
tgaagctggcctttgcgccatgacgttttattatcttgtggatagccttgcatacaatagtctgaaggtacaaaaattgtgaattttgaagtttatgaattttgaattagtcttttgttcttatgttaatccattcattcttttgaatagggcttaatactcagcaatgccttaagggcacaaaagaatgctgaagatgagagctgcactattgctctcaacaacctttgaacagaggttatcaggctaagaaacgaagccttggaaaaggacaaaattctgcttacattggtggataagataaaggaagacgaagctagttctaaagctcaagccgaagctca

SEQ ID NO: 80552 - DNA, 342 bp, Zea mays
tatgaagattcttcatcccaacatgtttctattcggcggtgccagagccaacccatgttagtcttagcaattaagcatgtgtcaagttcagctttatcaaaatctactaagtatagctgaccctctaacacacccttgaatgctattgaatcatcacttcttctaaagacagtgacacatgtatcagtaaaaagacagttgtagcccatttgacataattgggaaacagaaagcaagttgtaatctaaagaatcaacaagaaaaacattggaaatagaatggtcaggagatatagcaattttaccaagtcctttgaccaaaccttgatttccatccccgaat

SEQ ID NO: 80553 - DNA, 346 bp, Zea mays
tccctttaaccccgaaacgcgatactcccttcattggtgaaactttcaggtagacatagtccccttcatgaaaatacaagggcattcgccgtttgtctgcataacccttctgacgagcttgtgctttcttcatattatgaataattttctgaaccttttcctcggcctccttcaccatatcaggcctaaagaagtacctttctccaggttcagaccaatttagcggagttcgacatcgtcgcccatataaagcttcaaaaggtgccatcttgatactttcttgatagctattattatatgaaaactccgccaagggcaaacattcatcccatttctgtgagaagtc

SEQ ID NO: 80554 - DNA, 343 bp, Zea mays
tcatattaaaaatgtcttgattttctggtgatgtttgcttgtcaacccatatggatgaacttaattgcatttctgaagtccttattttcacactagtatggctaaatagttttgtgatgcgaaagggcatctagctgagttggttaggtggtttgagtagcactcgtgaggtcctgagttcgaatctcagtgtgagcgaattttaggctgaggttaaaaaaatgtcacttgctggttcctctagttgtatgcacatgagatggattgacctatgcggggcgaatacttgtgtaagggttgggagggttcaaagcacgagtaaagatctggtacatagggggca

SEQ ID NO: 80555 - DNA, 342 bp, Zea mays
tatgaaattctctacatcccattatttaagccataccactttgagcaaatttggcacaccagacagtccggtgtgcaccatacatctaatatgctgctgcagttttttcagcaattccgacttcgtattgtgggcataacgtttagctccgaactctgattttgatgatcttggactttttgaaaatattataaaattatctacatctcagagttgaagccatgtcagtttgggtagatttgattttgtgaaagacttccaattcagtcagcccttcctctcaactttgtcaacttcacttttgttttgtagctttgtatctcacttctacttcttgatgtg

SEQ ID NO: 80556 - DNA, 340 bp, Zea mays
tctcctcaattggcgccactcctactctctctcgtatatcatcattccggactcgatctctccttgtgtggccacatatccagcgcaacatacgcatctctgccacacttagttgttggacatgtcgtcttttagtgggccaacattctgctccatacaacatagccggccggattgctgtcctgtagaatttgccttttagtttgtgtggcacccgggggtcgcataagacacccgcaacttgtcgccacttcaaccatccagctttaattctatgactgacatcctcatcgatgtctccctccttctgaagcattgatcctaagtaacgaaaagtgtc

SEQ ID NO: 80557 - DNA, 343 bp, Zea mays
tcaaaactaaaagcttagcaaatcttattgcacaagagctaaaaattgagtgagtgggagcagttggccagagagcgtatcaaatgagtttgtggtatggccgtatttatacgccaagtgcgttgaaaattgaaagaccccgcttgtcagtgaatgttgctattctagcaaagggaaggtgttttttcggaccttcggcgtaaagccttcgtccatgtcgcaatctaaatttattattttaaacaaattaatattgcgaggggctactgttggggaccttcggcatccgaaggtcctcaaaaacaggatttaacagtatttttggagtataatgtgtgaacag

SEQ ID NO: 80558 - DNA, 342 bp, Zea mays
ttcttggcatttctcataccacttatatcctcttcccttttccagaagcaaggtcatagacttggcaatcttagaaaatccttcaataaatctccgatagtatcctgcaagtcccaagaaactctgaatctcagtaactttagtgggtatgctccatgccattatctccttgactttagcaggatccactgaaattcctccattagaaatgatatgtccaaggaatggcaccttgtcaatccaaaactcgcatttgctaaacttggtgtagagttgattatctcgtagcttctgtagcaccaatctcagatgttcctcatgatcaccatcactcttagaata

SEQ ID NO: 80559 - DNA, 344 bp, Zea mays
tctgtcgtcaagcagcaaacccccgccgcggcagccacatagtagtgccattcactccccagcagcagaccacttgtgtcgtcaaccagtgctcggcacctcgttcagtgtcggtaaggcagcccttccacctattatacggttgtactatgttcaatacgagtaacaaagctcggaacaattccaacaacattctttgtggtttcgcagataacccgatttgaaacagttcgtagtgacctcgctcaggccattgcaaagatgcttgcagttggaaaggagttgaaagatttggccgaagatgagattatggcttcgccagacatggccaaagaggtgtcagt

SEQ ID NO: 80560 - DNA, 331 bp, Zea mays
tctgtgccaaatattacagaaagctaagggatggttatttagttgtgattttccaaattttaatgccaagaaggcactttccactaccttgttatttgaaaactgtcaaacaacagatttcatatttttcctatgttcttcataacaaaagtttaactatcccaaaggttggggtatttttaccttggggttatttttgtagggtttttctacgttttccttgttttcttaaaataaaaggtattctatttattttatactaaaccagggtataatcaatttttctagtaacctacactgaataagtatactaacaaaaatatgggggctc

SEQ ID NO: 80561 - DNA, 328 bp, Zea mays
  unsure (1)..(328): unsure at all n locations
tctccggtgaaatcaggcaccgaagctggttcaatatagcgtggctggtgtgtgaagacttttatcctctttctctttgattctggctcgctaggagcagttgcagcttccccttctgcagaggttgtgttttttcttttctgccctcgagtgggataacgatagtcagggtagacaaacccaatggcatcgaatacccgattcagtctcttcttttttcggcctccgaaggctgctgacattgcattatcttcagccttcgagtaggtcccgagtagctcatcacttanattttcaatgctcttcaaccagtcatcatcaggttcaa

SEQ ID NO: 80562 - DNA, 344 bp, Zea mays
tgtttgatggatgttgtcatcagtttatttttggaaagaagaatttgtgccttttaaaatccttttgttgaagtcggagtctatcatgttgttctaactttttctccgcgataaaatcttgaacttggaaataaggtgttaagtatgtggtttttcagatggccgggaggcagcgtcgtggccagaatgagcacgttcctccaccgccaccgcctcccactctgcaggagctcatggctcaacagaatgagatcttgagacagctcgctcaacatcagccacctcctcagcactatggtggtggagaccatcagcgtcaccccgcggcggctacctatcaggag

SEQ ID NO: 80563 - DNA, 344 bp, Zea mays
tatttgttacaacgtgggatgtgagtttttttaaaaatttagttacctctctatgtattctgatgcaccatgtttgaagagagtgccacctccaggaaaccaccaaagtttgcccttctcatgcacccagctctgtcctcctttgacctcagcaagatgtgaatggttgacattactacgccatacgtagtctcggcttgttggccatcttattggtatcttgtagtcatttggagggggcaccaaacaaaacaaccgcttctcccatggaggacaaatactttcaagatccacatgcctagatgtatccaggctcttcaagctgcttatataggctccatcat

SEQ ID NO: 80564 - DNA, 362 bp, Zea mays
  unsure (1)..(362): unsure at all n locations
tatancaaactcaagcttgtgaagattctttatcccaacatgttttttttcggcggggccagagccaacccatgttagtcttagcaattaaacaagtgtcgagttcagctctatcaaaatctaccaagtatagctgaccctccaacactcccttgaatgctattgaatcatcacttcttctaaagacagtgacacctatatcagtgaatagacagttgtagcccatttgacataattgagaaacagaaagcaagttgtaatctaaagaatcaacaagaaaaacattggaaatggaatggtcaggagatatagcaattttacccaaacctttgaccaaaccttgattccatccccgaatgtga

SEQ ID NO: 80565 - DNA, 345 bp, Zea mays
tcgactacccgaccgacgtcgggcttttttgcgccaagatcggctggaccaagctcgccggcggccgctacttcagccgccagttcatctcgaagaagagcctggtggacccgagccccggctcctactccatcagcatcgacaccaacggattcatgcagctgactcgcaacgccccgagcgtgcagtactggtcgtggacgtcggggagcctgggaaacctcgtgacggcgctgactgccctgatcgacatggatcccaggaccaaggggctgctgaaaccgggctacgtggccaccgccgacgaggtgtacttcacctacagcatcaccgacgagtcggcct

SEQ ID NO: 80566 - DNA, 343 bp, Zea mays
tctaaagggagaacacgtgataggtttttttatcgtgcaattcgaaaaagatagaccttgtgcagcttgtcaagcaggtaaacaagtgggaggagcgcatcacagcaagaatgtgatgaccacatcaagacccctggagctgctacatatggacctcttcggacccgtcgcatatctgagcataggaggaagtaagtatggactagttattgttgatgacttttcccgcttcacttgggtattctttttgcaggataagtctgaaacccaagggaccctcaagcgcttcctaaggagagcttaaaatgagtttgagctcaaggtgaagaagataaggaacgac

SEQ ID NO: 80567 - DNA, 340 bp, Zea mays
ttatatgctgaactgaaactttaatttttgtgcctcctcacgtaccgatcaatcatcccctccgcctacgctgaaaagaatcatgtgtcaggagccaagcgaggcataactctcttcgctccacctcaacattgaagctcggttcagccgccgtttacaatacctccatgcaacctgaatacgagtggtagcaatggttcaccaaggaggggattcatacctatggacaaaggttacctggaaggaactgaatataccaagtcttaagatcgcagtgatacatggatataacaaaaaacaccggatgctgccatgaataagcagaaacaatgataagaac

SEQ ID NO: 80568 - DNA, 341 bp, Zea mays
tctcctggacaagcgccgcacttattgctgagtgcgattctgccacatataacaacagaggagcccctggcgttggcggagttaatgttgtgagatctatcaagtattgcttcaactcttcgaaggctttttgttgacttgggccccattgaaagacttcggctgacttcagcacctcgaaaaatggtaagtttctttctactgatctggatataaatctgttgagagatgccagccttcctgtcaatctttgggccccttttcttgtagttggtggctccattcgaagtatagcttcgattttatttggattagcttcgattccctttgttgaaaccaag

SEQ ID NO: 80569 - DNA, 339 bp, Zea mays
tcacgggctactggcggagctttcttaagcactggctgggcttgagggtggctggagtgcgctggccacggtggccgaagctctggcggcaatggcgggcggaattaagctcgctggagctaaggaaaggtggctggccggagagggtgagtgcggggcgaagagaggtgcgcccggggaggctttataggcgcgggcgggcacggccgagggcgtgggcgcgcggcggacttgaccgggcgccggggtgagcgcgcgcgggggttgggcgagctctggcgtgccgaccagggtcgaacacgtgtgcccgtgcgttctgcccaagttctggcgcgtgtg

SEQ ID NO: 80570 - DNA, 344 bp, Zea mays
taatgccagaatttccatcaaggaattcccttcacttttctcatcccctcattgtctcatggcaaagggagatgctaaggtcaaaatcatcaccgatttaaatgatatagatgatgatgatgatgatgttgatgatgttgaggatgatggctattcatatgatgatcttgttagaatgttaggtgaggccgatgactacatgcacaaagaaaaagaaaagtttaagaccttgaaggaactgtaaaaaaaccctccaagtttcttttgaggagctcaagacctctcacaacgatctaaaagagaattgtgagaagcttgtggaagctcaaaactcatctattgtg

SEQ ID NO: 80571 - DNA, 344 bp, Zea mays
tcacatctctggactaactcggttgtatcactctttgccgttggccagtagaaaccagacccgaagaccttcccaactagagtcctggatgctgcgtgtatcccgcattgcccagcgtggacctcatctagcaattgcttcccagtagccgaaagaatgcatttcatgaggactcctgtcgcgccccttctgtatagtgtttccccaatgagagtatagtgagctgactgccttgcaatgcgctctgctacatttttgtcatccggctcctcctcattccttatatatctgatgattggttccctccagtcatcaggatctgactctggttggctcagaatatt

SEQ ID NO: 80572 - DNA, 331 bp, Zea mays
tgtaatgcaagaccaggttcattttttagctcaaaggtactctaattacttatctgaactttctcaagttcacaattcgaaaattggaaattgtaggctgtctcctgtattttcccctttctaagtcaaattatccaatttgaggatcactcaatctttcttgccgatgcttgtctaggctcatgggtcttatgtccagaaacttagctggtctccaaaactcccatctaaccgaccatttgcaggtttctgtcctgataatgcaatggttgttgatagatacactgcaatccttggggctccatttaaatttgaagttccactttttatt

SEQ ID NO: 80573 - DNA, 344 bp, Zea mays
ttcttgctttgttatcatagaattattatttgtattgatttatcacttccgcattatttgaaagctatactctttactagcaagaacttagttgttatactccgataattgttcatcttgttctaaccactaatcaaaggatctagttgggggataaagttttaattttcaggtttcgcctatccaccccccctctaggcgactttcaggtgacgagtgaggtatccgtatcccggaggcgtaggagtccctcggctcggtcggccttgtcgcccgaggcttctcttgcttggttaaatgatccctcggtcgctcttcgatgagccgaagccgaaggcagcggt

SEQ ID NO: 80574 - DNA, 344 bp, Zea mays
tctacacgcttgccccagtggtcggttatttatgtctgaatagccctctgataagtcgctccagcgtttttgaggccgaacggcatggaggtatagcagaaggctccgaacggggtgataaatgctgttttttcctcctcttcttttgccagactaatctgatgatatccagagtagcaatctaagaaagacaacacataacatccgacggtcgagtccaccacctggtctatcctaggaagcccgaaggggtccttcggacagtgtttgttgagatctgtgtagtcgacgcacatgcgccaatccactttattctttttgagtacaagaacagggttggctaa

SEQ ID NO: 80575 - DNA, 345 bp, Zea mays
tgaagccatggtaagtagcataggcttatttatacgaattgactcaagcctagctacgggtgcataggtttcaccgaaatccaaaccttcgacttgtgaatatcccttggccacaagtcgaactttgttccttgtcaccacaccatgctcgtcttgcttgttgcggaacacccacttggttcctacaacattttgattaggacgtggaaccaaatgccatacctcgttcctagtgaagttgttgagctcctcttgcatcgccaccactcaatctaaatcttgtagtgcttcctctaccctatgtggctcaatagaggaaacaaaagagtaatgctcacagaaatg

SEQ ID NO: 80576 - DNA, 345 bp, Zea mays
tcaatctttggggccctattttgtatataaccagtaactttctcaatcaaggactttgcaacctaaatttgtctaagtctacttttgcttggtggacctaagaatgttactttgacttttccatttgcaactttttttagtacataatgagcattgaaagcaaatggccttgaatgctttggcaagggagttggtggtgtgcctttgtagttgtgggcaaaatgtccttcttttccacactcatagcacttgattggtttaggagtttgctttgccttgtattgatttgttgctttcttttgcacaaaagaattgtatccaataccacccttattatttttcatg

SEQ ID NO: 80577 - DNA, 341 bp, Zea mays
tggaggaaaacaatatcaaatattttgcataacccctatgcccttgcaaacaatatcaaaaacataatagagtatcaaaaactcactagacggtcggtggccgtctgagtgcataacacatcaggattctgaggatcagaacccctatgcccttgcatatacacctccacatccgtgggcgtacgaccggatttgacttcctgtacataaaagttataatgacacatttctatgtgattcaaagttacgacaaactgtgacatgaccatcaccgccgtagttgtggaacgactcagtcccacggtttcccctgttcctttcggaaatggcacgaaactcag

SEQ ID NO: 80578 - DNA, 341 bp, Zea mays
tctccagggtttggggggttctctttttaaatattgtgccattgggcctggacgaagtcccttgatcatggcttcgatgacgatctcatttggcactgttggcgcctgagctctgagacacagaaacctttggacgtatgcatgcagatacttctcatgatcctgtgtacactggaataaggcttgactggtcacgagcttcgtctgaaacccctaaaagctagtgaccaacgtatccttcaacttctgccatgacgtaattgttcctagtctaagataagaataccaagtttgagcaacacttctgactgctatgacgaaggattttgccatgacagcgg

SEQ ID NO: 80579 - DNA, 343 bp, Zea mays
tgtcaacaatataagcacaaattagttaaggctgcttcggcagaccagccgaagcctatgcttttatgtgaagatatagcagatcaaagggtactgctagggtctcagttatctgatgagcaggaaaaaactttgataaggtttctcttcaacaacaaagatgtctttgcttggacgactaatgatctttgtggtgtcaacagagatgtcatcgaacattcacttaatgtggatccatctttcagaccaaggaagcaaagacttcggaagatgtctgatgataaagctgaaggtgctcggaacgaagtaaagaggcttctcagtgctggtgttatcatagaag

SEQ ID NO: 80580 - DNA, 343 bp, Zea mays
tctaaataatgtttagagttcatatttaaagtttggggatttttggaattattatctattttctaaaaatccagaaacaatgttttaggctattttaaatgctctaaaattccctatttgatctataaatcatgaaactattttttattaaattctatggaaaattaggaatctagcaaaatttgtttcacatttttatcatttttctactattttctacagatttccaaagttttatagaaaaagaaaagggaaaagcgtgaacagtgctgggctcaattcagccgcagcggcccaaacccaggtggaaaacgcgcgcgcccgcgcccgcgctgcaagcttt

SEQ ID NO: 80581 - DNA, 350 bp, Zea mays
  unsure (1)..(350): unsure at all n locations
actnaagcttaatgtttccaaaagactgccttattatgttaagggcaaggctcccatgcttaggataatgagggttacattttatatcctgctggttatcctgagcacaagattaggagaattcatgctaggaagtctcattctgtttcccatcatgcttttatgtacaagaatgaggcatctagctctaggcaatcaacccatgttaaattgcctaaaaagaaaactcctactgcatcaaatgaacctaatgtttcatttaagacttttgatgcatcttatgttctaactaacaaatcaggcaaagtagttgccaaatatgttgggggcaaacacaagggctccaagac

SEQ ID NO: 80582 - DNA, 329 bp, Zea mays
ttaaatgtgttgtcatcaatcaccttttgggggagattgaaagtgcattcatcccttttgtgagttttggtgatttggataacaacacatttaaaggtctaacgagtttgctaagtgttgaacaggaaattcagtatgatgaacatacttgaatagtgtataatgatcagtgaacaaaggttcaacacgaggttaaataaccaatgagacaatgcaaatggatataatatgatctctacattggtttgaatatatggacaagacctgagaaatcactacatacatatgatcagaatagaggatgaagtgattaagaaaaataggtcaag

SEQ ID NO: 80583 - DNA, 333 bp, Zea mays
tgaagccatggtaagtagcataggccaataaaatacgaattgactcaagcctagctacgggtgcataggtttcaccgaaatccaaaccttcgacttgggagtatcccttggccacaagtcgagctttgttccttgtcaccacaccatgctcatcttgcttgttgcggaagacccatttggttcctacaacattttgattaggacgtggaactaaatgccatacctcattcctagtgaagttgttgagctcctcttgcatcgccaccacccaatccgaatcttgaagggcttcctctaccctgtgtggctcaatagaggaaacaaaagagtaat

SEQ ID NO: 80584 - DNA, 345 bp, Zea mays
tagctgtcatttctaaatatataatagctttcctattttactttataatttaactacagaataataatatcactgtattgtgccctaataccaggcatgcagcatttgcaaatttaaggcatcttgtgatagagcttatgtcactccaaagggtgaggttgaagttaggactgttgatgttgttcgtatactgttaagttatgcaatggataaaaaccattcaggagataactctgttatcgaagaaagtgtgcaagaatctgcaaaaaagcttctctcaaagcttactgaatttagtgacacaacaatcgatccatctcttccgaaacctgcatttcaagttgc

SEQ ID NO: 80585 - DNA, 341 bp, Zea mays
  unsure (1)..(341): unsure at all n locations
tgttggaccacaatcattgnggctttctttgcctaattatgcggccgcattaaaatgtgtcctataaggtgtaacgaatggattaatttattctcctactgcataaagcgtttagcgcccgatagggcgcttcctttatctaataaagattaaagccataacgacagccttggggctgcgccatgtctagactcgttgaccgtcctctcccatgaagttcaatatcaaaggcaaaagctaataatgcaataattcctatggtgtcatttgataacttgctatggaacaagaagcaagataagtacaatgagcacaaaaaagccaagaaagactcaagttac

SEQ ID NO: 80586 - DNA, 345 bp, Zea mays
ttgtttataatatgggttagtgaattctaaaaccaagttaggatgataagagagaagcaaagagacctcttcatttgattgctccttttagatgaatatgaaacttaggagcaatattgcaagtgagtagagaactcaagaatacattaatcacataagtgaatggacaagagatacaacgatttttaccgtggttcgaccaatgcctactccacgttgtggtgacctcctttggtcaagggttgcactcaacccctctcaagtgatccaaagatcaaacttgagtgccacaacagtcttccttatattaatatcatgttgtgaggaatctccataaattggagt

SEQ ID NO: 80587 - DNA, 346 bp, Zea mays
tgtgaaggttcttcatccccacatgtgctaagcggcgatgccacagccagcccatgctagtcttagctattaagcatgcatctagaccggcctcttcttttgcaaaatcaactaaataaagtttgccgtctaatacacccttaaaagctaatgaaccatcgcttcttctaaagacagacacatctatatttgtaaatagacaattatatcccatatgacataattgactcacagatagcagattgtatccaagactctctactaaaaatacattagagatagaatgctcattagaaatcgcaattttacctaaaccttttaccttgccttgattcccatcaccgaa

SEQ ID NO: 80588 - DNA, 248 bp, Zea mays
gaatgtgcccatggagagcagggacataaatttagaaattgttcagggactgtaaatacttggggggcccatattcaggggaatacaccgatgaatttggtatcaggccttggttttggttaaaagcagggccctggtggtgtttgctctgcaagggggaaacatgcatcgtcatgcttgcaaagggctatagcaccgtacgaagcacaagggaggaaaatatacaccaacagggggtttaagtgatg

SEQ ID NO: 80589 - DNA, 339 bp, Zea mays
ttcatctttcttttttacaaacaatgttggacatccccaaggcgaagtacttgggcagataaaacctttgtccaacaattcttgcaattgcttcttcaattctgccaactcagcgggtggcatccgataaggtctcttggaaataggtgtcgttcccggttgcaacttgatggcgaattcgatatcccggtccggtggcattcctggtaattcgtcaggaaaacatctgcatactcacagaccactggaatcttcttcaggggtatctccgtcatagcaaaagtacatgactgagtagaatcttgactgggcagaaacaaggtgagactcccacagatt

SEQ ID NO: 80590 - DNA, 338 bp, Zea mays
tcacgggctactggcggagctagccgaagcactggctgggcttgagggtggctggagtgggctggccaccgtggccgaagctctggcggcaatggcgggcggaattaagctcgccggagctaaggaaaggtggctggccggagagggtgagtgcggggcgaaaagaggtgtgcccggggaggctttataggcgcgggcgggcacgaccgagggcgtgggcgcgcggcggacttgaccggacgccggggtgagcgcgcgcgcgggttgggcgagctctggcgtgccgaccagggtcgaacacgtgtgcccgtgcgttctgcccaagttctggcgcgtgt

SEQ ID NO: 80591 - DNA, 343 bp, Zea mays
ttcccgctcacatcttcggggttgtatcgaccttcgtattattttgggcttctcctactgtgatatcgactcgagtccgaagatacatgttcacacattatactccagaaacactgttaaatcctgtttttgaggaccttcggaagccgaaggcccccaacagtagcccctcgcaatattaatttgttaaaataataaatttagattgcgacatggacgaaggctttaagccgaaggtccgaaaaaacaccttccctttgctagaatagcaacattcactgacaggcggggtctttcaattttcaacgcactgggcgtataaataagggcatactgtgagctc

SEQ ID NO: 80592 - DNA, 329 bp, Zea mays
tgttgtcagtggtgccgatgagtatatgcctaatatcctacaagaaccaaattctcttaacaaccgtgtcaagactacttcacccaatggaaaatgggtctcgccgccacacaatgcgctcagtagttcccaaaaccgaaaaggtggtaggaaattgatactgaagtcaataccctcatttctgtcacttacaggagacaaacaacggttctgcaatgaacgacactaatggcccattcagcgtgtcacctctcagtttcggttagcgttgtttttttcctatgcagaatgcactagggttatgtgagttatcttgacatcgttagaag

SEQ ID NO: 80593 - DNA, 328 bp, Zea mays
tctccaccatgtctctgctagccattttgttgcagctacctccatcaatgatcaaacgacatgaacgctccttaatgacacactttgtttgaaacaaaagaaatgtccagattgtatttaaacttccaaatcggacatgatatgtatccgcggtggcaaaaacgaaccagagatgtttatggtgatggtggatctcgtggtgaccaaaacgtggtagaactcaaaactctaaaggaataaactaagaccagcaactcgacacaaccgatgcaaccaaaaactcaacaagccctaactaagtagtactagtaaatgctcaatggtttat

SEQ ID NO: 80594 - DNA, 345 bp, Zea mays
taatgcccctaagaaattgtctaattttgttaagggtaaggctcccatgactcaggataacgagggttacattttatatcctgctggttatcctgagcacaagattaggagaattcattctaggaagtctcattctggttctcatcatgcttttatgtataagaataagatctagtgctaggcattctaaccatgttaaaatgcctaaaaataaaatctcctgttgcatcaaatgatcataacatttcatttaagacttttgatgttgcttatgttttaactaacaaatcacgcaaagtagttgccaaatatgttggggctaaacacaagggctcaaaaacttat

SEQ ID NO: 80595 - DNA, 344 bp, Zea mays
tgatgaattcacgaccatcatattatggttggctcctgattccgaggtgaactgtgcatgctctcaacaacttggggaaaccatcttcactatggaaaaagctggtttggcagcggacctccaactgacttctgagagaaggaaagggggaaaacatttttgaaatggagggatgggagcaagattttttaaagaaaatagttttgactcaacaacttttggatcaacgctaagggttacgtcctgcggccaacctaacaactctgataccacctgaagcgccccaaccgtctgggactcaaatgtgatacaattactagtcctaggaggctagtaaacacatt

SEQ ID NO: 80596 - DNA, 347 bp, Zea mays
ttaagctctttgacaagaatatcacttcacccagttttaacaaaaatgcatcaaagcagaaatgaaattttgagaggttaaactaggtatgaagcagggttatgcatagacatgctttttcttcctcttgtaatttaaagatatgcaatatacgtataagagggaaatctaggtacatgtgtaaatgatatgaagtagtttacccttttgtaccttcacatagagatgattcttcattatgctttctccttagttttggttacttaagtcctatgctcaagacaatatattgaattattttgcacaagagataattcaacaactagtgatccttttctttaaacaaa

SEQ ID NO: 80597 - DNA, 345 bp, Zea mays
tatgaagattcttcatcccaacatgggctagtcggcggtgccagagccaacccatattagtcttagcaattaagcatgtgtcgagttcagctctatcaaaatctactaagtatagctgaccctctaacacacccttaaatgctattgaatcatcacttcttctaaagacagtaacacctacatcagtaaatagacagttgtagcccatttgacataattgggaaacagaaagcaagttgtaatctaaagaatcaacaagaaaaacattggaaatggaatggtcaggggatatagcaattttacccaaacctttgaccaatccttgatttccatccccgaatgtaa

SEQ ID NO: 80598 - DNA, 333 bp, Zea mays
tgaaaaatacctatacacagtccgaaggatcgaagcttccttcgaaggattttctgttaagaatatccctcgagggcaaaatgaacatgctgatttgttagccaggtctgcagcacaggggctgccgctaccttcggatgtattcttcgaaacaataaaggcaccttcagtggagttacttgaaagagcagttcttactatttctcctgtgtacagtgaagattggagaactgaaataatttcttaccttcagggcaacttcctatcagatgacgaagcttataataaaagaatagaggcaagagctcgtccgtatatcattatagaagggga

SEQ ID NO: 80599 - DNA, 341 bp, Zea mays
tctaaagggagaacacgtgatttgtttgactaacgtgcaattcgaaaaggatagaccttgtgcagcttgtcaagcaggaaaacaagtgggaggagcgcatcacagcaagaatgtgatgaccacctcaagacccctggagctgctgcatatggacctcttcggacccgtcgcctatctgagcataggagggagtaagtatggtctagttattgtagatgatttttcccgcttcacttgggtgttctttttgcaggataagtctgaaacccaagggaccctcaagcgcttcctcaggagggctcaaaatgagtttgagctcaaggtgaagaagataaggagcg

SEQ ID NO: 80600 - DNA, 341 bp, Zea mays
ttggaggcaggagattcaaccttttcagacgcaatttgctctgtcgccttttcttcaactatgataggctctgtctcagtaggctctgaaggcccaacttcggtttcagcttgaattgttgtagcttcgacttctgcttgctttgtttcagcttcgggttgtgctttggaagcttcgacaatttttcttgaaggagcaggactcaaggtttttgttgtttctaacacaacatctaacacatttgccatccttctcctcttaggagttgcggcagaccccttttgtgccttcagaactgtcacctctattgaagggctcaaaatctctggcatttttgttat

SEQ ID NO: 80601 - DNA, 296 bp, Zea mays
tataaaattgtctatatctcagagttgaagccatgtcagtttgaacagatttgatgttgtgaaacacttccaattcagtcagcccttcctctcgactttatcaacttcacttttgttttgtagctttgtatctcacttctacttcttgatgtgttggactcttagcatatataaagtgtcttcaatattactttgtaatgtcttctatgagtcttataatgtcttctttgaggtgttgcatcctcagagcctcagtgcaatccactttgcatcctgtgaactacaacacacaaaca

SEQ ID NO: 80602 - DNA, 328 bp, Zea mays
tggtgccaatggagaagtagaagtccctgaagtcctggctatcaaactgtttgccattgtcgactgtgagctcggatgggactccgaatcggcaaacaatgttttgccagaagaatttctaggcagtcttcgacgttatcgtggatactgcccttgcctcgatccacttggtaaaatactcgacgacgacgaaggtgaacttgaggttcccttgggacgtgggtagtggcccgacaatgtccagcccccagcgttgaagtggccatatgtgggcaatcagctttgtgaattacgaagggttgcccgatcggggagaaaacttctggca

SEQ ID NO: 80603 - DNA, 316 bp, Zea mays
taaacatttatgagggatcgtcctacttataacatcgcacgcaaggacatatatgcaatataaacaagtagaacaataagaatggcattcacacaacagttgtgattcggtatggcttgttttcacatggtgatctccatctccaataatctgtccatcacgatgatctccatctccatgatataggtatgccatcctccaggtgatgagtccttcaagacctatctaacgtatgctggtaaacaaattacatatacgctttggatcatcacatgttgacacgcaggtcattacattaaatttggacaatacatgt

SEQ ID NO: 80604 - DNA, 371 bp, Zea mays
tagttggcgggaaattcttcactgacatctgggaatttggtggtcgagagatggcgcacgagataataaaaaagagtgaaaaagattctcatgatgcaaaagaagcgacgaaagcagctgagaaagctgcgaaacttgaaaggcggataggtattgcttaattgcttttgactttgtgttttatttctgagacttcgaacttatttatgttatgtatcgcagttgagctatctcctccctcggagcccttcgagcaaacggtcgacccagaagcaaagagagaggaagaaatcactaaaatggccaaagctattttggatgaagctatttctcaactattaaacgaacctgcggaagtagttctaaaagaa

SEQ ID NO: 80605 - DNA, 316 bp, Zea mays
  unsure (1)..(316): unsure at all n locations
agaacccaaccggggcgaagacaagaatcacctacaagcaccaaagcggcncggacgcctcccaagagaggaaaaacgaatgagaacgaggaacacaggagcgcagaccccaacgcaaccaggcacccaaacaagactcccgcccaatgccgaaacacccatggagagcgcgcctaggacaagggggagggacggggcaacaccgcgaccaccgaaagccgcgcgcggcacgagcacgcgcgcgagggcccacgcacacgccaaaagggaccgcgcgccacacaaaaccggcgcgatcaggctcaacgccgcggcg

SEQ ID NO: 80606 - DNA, 373 bp, Zea mays
tgactttagttgtacaaataatattgctgaatacgaatcactcctgttggggcttcggaagttaagggcaatgggaataagaagggccatcctgaaaactgattctcaagtcattctggccatgtagacaaaagtagcaaggcaagagacccgaagcttgaaaaatatctcgatacagttcgaaggttggaggattcttttgaaggtttttctgtcaagaatattccaagaggtgaaaatgagcatgcagatctgctagccaaatcagcggctcaggggctccctctaccttcggaagtattttttgaaacaataaaggcatcttcggttgaactcatggagagagcagtgcttattatttatccagtacata

SEQ ID NO: 80607 - DNA, 373 bp, Zea mays
ttaaagatgatgaaagggcgcaaggcgatggaccctgatggtatcccaatagaggtgtggaaatgacttggggatattgctatcgtttggctaaccaagttgttcaactatatttttcgatcaaacaagatgatcgatgagtggaggaggcgtacattagtaccaatcttcaagaacaagagacatattcaaagttgtaccagctatcgaaggattaagctcatgagccacactatgaagctatgggagagagttattgagcatcgcctgagaggaatgacgcatattaccatgaaccaatttggattcatgtctggaaggtcaaccatggaagcaatttttttaataagacaggtcatggagcggtataagg

SEQ ID NO: 80608 - DNA, 374 bp, Zea mays
tggtcattttcttcatgaagcatgaaaagaagggatggtgtttttttcgccgaaagctcaaaaaatggtatgtatgcaaaatttcatgcatcgtaaagaattaaactatagattatatattatattcaaggttacaatatattacacatgttacgttctaaatgtttctacagtaatattcaatcctccttaagcactatttatgcagcttcattcaatagctggtcgacaaccttgtccataatggcttcggccatttttctaatttcatcgtcccccttcgggtgggggcccggagatgcctcagcaggttctgagggaagagaagatacgactatattactattacaaaccgcgaacaaagtctggaatta

SEQ ID NO: 80609 - DNA, 370 bp, Zea mays
tgaacacgtggctaagtctattggggacctatattttttaggctgtccaacatacactagttcactaatcttaccatttagaaaggcactctttacatcaatttggtagagcttgatattatgagcacaagcataagcaagaagaatccggattgcttccaatcttgccacgggagcaaatgtctcgccaaaatccaatccctctatttgagtatacccttgtgcaactaatcttgccttggtccttactactaccccatcttcattgtgcttgttgcgaaacacccattttgtaccaataacattgtgggtctttggtctctcaacaagctcccaacttcatttcgagtgaaattatttcattcttcat

SEQ ID NO: 80610 - DNA, 369 bp, Zea mays
tggtgccgatggaaaaacagaaatccttgaaatcttgattgtcaaactgcttgccgttgtcaactgttagctcggacggtactccgaagcggcaaacaatgttctgccaaaagaatttttgggcagtctttgatgtgattgtggacacagccctcgcttcgatccacttggtgaagtattcgacggctacgaaggcgaacttgaggttcccctgagcggtgggcaagggcccgacaatgtccaggccccagcgctgaagaggccatgtatgggcgatcagctttgtgtattgcgaggggttgcctgaccgacgagagaacttctggcaagcttcgcaggaccttgtgactcgatttgcggcgcagatca

SEQ ID NO: 80611 - DNA, 371 bp, Zea mays
tctaaaggttgatcatgtgttaagactaaccaatgtttgttttgagaaagacagaccttgtgcggcatgtcaggcagggaaacaagtgggacgcactcatcatagcaaaaatgtgatgacgacatcaagaccactggagcttctttacatggatctcttcggacccgttgcctacctcaacatcgggggaagataagtcataaacccaagggactctaaagcacttcttaaggagagctcaaaatgaatttgagctaaaggtgaaaaagataagaagcgacaatgggtccgagttcaaaaatttacaagttgaagggtttcttgaggaggaaggcatcaagcacgagttctccgcaccctacacaccatag

SEQ ID NO: 80612 - DNA, 95 bp, Zea mays
  unsure (1)..(95): unsure at all n locations
tatagatactcagctttagccgtcgagatagtgtggncccctttcttttttttccctccagcccacagggggggttgtgccgtggaatatttcta

SEQ ID NO: 80613 - DNA, 366 bp, Zea mays
ttatcaaatggacgtgaaaagtgcctttcttttggtccaatcaaagaagaggtttatgttgagcaacctcccggctttgaagacagtaaatatcctaaccatgtctataagctctctaaggcgctttatgggctcaagcaagccccaagagcatggtatgaatgccttagagatttccttattgctaatggcttcaaagtcggtaaggccgatcctacactctttactaaaactcttgaaaatgatttgtttgtatgccaaatttatgttgatgatatcatatttgggtctactaacgaatctacttgtgaggaatttagtaggatcatgacacagaaattcgagatgtcaatgatgggggagttg

SEQ ID NO: 80614 - DNA, 363 bp, Zea mays
ttgtgaattgagggggaacccgctctatgtgagaatttttggcaagctttacacgagcggaccactcggttagctgcacacacaatagctggacagtagaaaccttggtgcatgaccttggagatgaaggctctgggtcccgagtgtgaaccgcaggttcctctatgaacttcacgaaggagttcgatgccctcgattgttgtgatgcatttgagcataggttgacttatacccttcttgtatagttgcccatctatcactgcgaagtcacggcttctgtgcttcaatcttttggcctcgccttggtcagtggggtgataatgaccttggagatataaagttataggtgtgcgccagtcttcg

SEQ ID NO: 80615 - DNA, 371 bp, Zea mays
tgtgagaattagttaaaaatcaatttattgtagtgcttaagttattgctcaacaaactcatattcagttttactttttttattatctctctattattgttaggacggctatgttggaataaaatataagtgaattgccaatctcatcctaccagcttaacaagttgttcgcttggctttaatccgaaacaacttctactatttctatagtgttttgtctctatagattgcagctgcagcagtccgaatagctggctttaatcccaagcgaataatcaagttttgtgctgaactggttggtgcatgcaacttaacatgatatcaaagttcgaatcctagttaccgcagttaaaataaaataattatagctcg

SEQ ID NO: 80616 - DNA, 373 bp, Zea mays
tgaagccatggtaagtagcataggcaagtaatatgttatattgattcaagcctagctacgggtgcataagtttcaccgaaatccaaaccttcgacttgtgaatatcctttggccacaagtcgggctttgttccttgtcaccacaccatgctcatcttgcttgttgcggaaaacccacttggttcctacaacattttggttaggatgtgaaactaaatgtcatacctcattccttgtgaagttgttgagttcctcttgcattgccaatacccaatccgaatctcttaatgcatcttccaccctgtatggctcaatagaagacacaaaagagtaatgttcacaaaaatgagcgactcgagatcgagttgttaccc

SEQ ID NO: 80617 - DNA, 372 bp, Zea mays
tactaatcgcgagagagaagagaggagcggccgcctctcaccatcttcgccctgcggccggttcaatcctcggggaaggcgctctaagcgtggacaatagactgtggtagcgcacccgggactcgcctgcgccggggcgattcgcacatcaccggaatttctcatcggagtggacctccgctccgtcatccgccttctccgtgggcgggtgtttctcgcgacctaatcctcgggtaaggagccctcatccagttcccctatgtcttacctacgtatatcacacctcagatttgtgtttcgggcccgagatcggcgaacggtgtggcctggccatggcctccgccgtgggggaacgcgtgcgccgccgttttg

SEQ ID NO: 80618 - DNA, 373 bp, Zea mays
tcagttctgctaactcggtcggagccatgcggtatgtgtctctttgcgatgggtgtcgttccagggatcagatctatgtagaactccacttctctttctggtgccattcctggcaattcttctagaaacacgtccatgaattcttctactactgatatacttttcgttgctagattgaacatcattgggtcactggctgtgcctgacaagagactgactttccatgctggtcggtgaggaggactgtcttgtctgcgcaactaatgatgcctttgtgtttagttagccaatccatccctaggatcacatcaattcctttggatggcaagacggttaagtctgccaggaatattaccccacttaaaaggattct

SEQ ID NO: 80619 - DNA, 368 bp, Zea mays
tcggcgacggttaaaaattttggcagcgaaactattttaatagcaatgaatgttgtggtaacttcacacctactcgtctgtttatatagtgccgcaagtaagaaggcgaagcgccggaatttttacaccaggaggacacccgctcgcacccgctgtgtagtggaccgcagagaccgaacagtaactctgcaaggtggggccgctacacgctgggagattgaatcgtttctcgacaacgagctaaaggaaggtgttttttggaccttcggcgttccgaagctgaagagacttttttcacggatcaagctcgttacgaaaaacgatctagcaccgcgaaaggggctactgttgggtctatgcttcgtcgc

SEQ ID NO: 80620 - DNA, 369 bp, Zea mays
tgacatatcaaaagcgtttgactccatcaattttttatatttgatagaggttttaagagctttaggattttctcagaagtggaggaattggatcgccacaattttgggctcttcctcctccaaaatcttaatcaatggccaacaaacaaatgcaatcaggcacatgtgtggtgttcgtcaaggggatccgctatccccattcctgtttattttagctatggacccgctatagaggatgattgagatggcggcagatgttgggcttatggggagggttctgccaagagcgactaagcttcgctgttctctttatgctgatgatgcaggagtgtttgttaaagcagataaagaggatttgaaagttctgaa

SEQ ID NO: 80621 - DNA, 221 bp, Zea mays
acccaagcacacgaagaaaacacattttatttgtcacacgcccccccccaggggggccacaaaagaaaacccccagcaccaaagacacacgaccactaataccaaatcaacaacgactaagacagaagaccaaccccccaaaaccacccacggcaacaacaacccaacgcaaacaccgagcccagaaagacagacaggcgacaagcgcacacagcacaccg

SEQ ID NO: 80622 - DNA, 372 bp, Zea mays
tctaacgtgccacccgaagttgaaacgaattttttttttttcttagataccatcattcaaactaaaaccaaagtgcctacctttatagcccgctaagataaagcctgccgaaattgatgaataggtaacctaagaataggccccagagcacatttcctctaaaaaagttgcaacttctgtttcccaaactttaacagacagcattgattacatcattctgcatgcttctggaaagggactttctcaagataaaaactagaagctcaacactatgctcaaaaattgaaatacaagggggcgttagtgtttaatggcagtggggaagaagattttctgtactgtctcccagataataaagagatatctgtatgc

SEQ ID NO: 80623 - DNA, 372 bp, Zea mays
ttaccttgaatcccacaagccagcatatccttgagagtcttttcctttatcgggtaagacttgcaaaagtacactccgtactcagggttttcaaacccatgttgttgtaggtgatgaaacaaccgagttttgttgtttctgcttgaaggtggtgccaaaggaggaggcacatcagtgaacttgttggtgggaggatgttttacctccatgatatgtaataatatgctatgcactcagacacccggtgttgtaataaatactctctctatattttatatatgaatgtaaattatgttattgtaatcctttcgcttattcttacttcgattatgtgtgtaatgtctacgtgatgggtgaagcgctctcttgggc

SEQ ID NO: 80624 - DNA, 365 bp, Zea mays
tcattccctctgctggaagtaaggccttgagtaacccgaactaggataatcgcttgtgtcatcttgcacaccatctatagtcgaccatacgacattttactagttagttaaggacccgtggtccacagactgacaagtatggaaattttttcaggcatgtgacgccgacacctccactcctccacgggccacggtgccgcggcggatcaccagctccatcctttgtcgttctaccctcgactagtctagtgctccattgccagaaatgtgtcgtctgtcgatgttcctggtgcctccacctcgttcgtggcactagcctttgtcgttcccttggaaagcgagacaacaggtcaatcaatcaacta

SEQ ID NO: 80625 - DNA, 365 bp, Zea mays
tgactctcggaatcgaacgaagctccagcttgaattctgcttcgtcagaagaaaaaactttggaagaaaaaagtatttaatttccacaaactcagaattaaatggccagagtgcgttctaccgctagggttgaacgtgaggggggcgaagctgaaggttcggagactgttcccatctccgaagcaatgcgacaatccgggctggtaacttcggaaaagatccccagtgctgatgtagaacaagcagaacaaacaactgccgaagcagaagaagaaaacattgaggaaactgatcctgaagatgattatcgtattgccatgccaagcaagcccagccatttggacttcggaaagtctactatttcg

SEQ ID NO: 80626 - DNA, 374 bp, Zea mays
tcaagtttttacaggatcacctattcaccccccctctatgtgctctcaattggtatcagagctgttctcttcaagaaagggactaatcgcccgaagagatggatcctaagggaaaggggatggtggtcaacgacaatgagaaggagtccatcttcaatgagccaagggacgacaaagtcaatgactccgtctcgagtcaaaagaagaaggatggaaagaagaagaggcgcatcaggaaggttgtctactacgacagcgacaaatcttcctcttctcaaaaggacgacgaatatgaggagaaaaataaaacggttaactcgaacttttcttttgattattctcgtattccgcataattccaatgctcatttgctt

SEQ ID NO: 80627 - DNA, 371 bp, Zea mays
tgcaaagaagatagaaacactagcattcgcaggacctgcttaacttaacatcactggaataaataaaaaaaggagaagaagcagggatgacagatatactcaactggagctagactggacaggtttaagaatcagaaaatgaatcaaggttttacatttagtcattgtgcaagcttaataattgggcattgaattaaggctttacgtttgttcattttgcaaaatttcaggtagatcttgattcaacccatgttgaacttggagacggagaggacactcaaggtgcatctcaaggtgcatttcatttgctctcaatctaatccttgctcatgtcccatcaagaacctattgttttcctttcccctcctgta

SEQ ID NO: 80628 - DNA, 373 bp, Zea mays
tgccaatacttgtcaaagcaacaacatctgccagcttatcaactgcagaccataccagtgacttggcctttcgcatgctggggactggatatgattggaccttttaagaaagctcaagggggatacactcatgtattggtggcgattgacaaattcactaaatggatagagttcaagcccatcgcctctttaacctctgctaaagccgtggaattcatacaagacataatattcagattcgggataccaaacagcatcataactgacttaggatccaacttcacaagttcagaattcttcgacttctgcgagcaaaagagcattcagatcaagtatgcatctgtagcacatccaagagccaacgggcaggttg

SEQ ID NO: 80629 - DNA, 373 bp, Zea mays
tgtgaaggttcttcatccccacatgtgctaagcggtgatgccacagccagcccatgctagtcttagctattaagcatgcatctagaccggcctcttcttttgcaaaatcaactaaataaagtttgacgtctaatacacccttaaaagctagtgaaccatcacttcttctaaggacagacacatctacatttgtaaatagacagttataccccatgttgcataattgactaacagatagcagattatatccaagagactctactaaaaacacattagagatagagtgctcattagaaattgcaattttacctaacccttttaccttgccttgattcccatcaccgaatacaattgaatcttgggaatctttatt

SEQ ID NO: 80630 - DNA, 376 bp, Zea mays
gcttgttgcccaatgcactgtgaagactctcccagaatttgtatacttatttggagtctcgatcagaaacaatggacttaggtaccccgtgaagcctgattacttccttcatatacaaggggaccaaatctgaagctgaatttgtggtcttcatgggaataaaatgcgcagacttagtcaagcaatccactaccacccatatagcatctctgccccgaggagaacgaggtaaacccaccacaaaagccatggtgatatgctcccatttccactccgaaatttccaatggcttcagtaaacctgcatgccgcttatgctcggccttcacgcgctgacatacttcacaggcggccacatacttagaaacgtcaacctt

SEQ ID NO: 80631 - DNA, 368 bp, Zea mays
tgcatacggaccacatcacaatcaatatgatttttgtattaaccaattgtaaattccacacagaccatacgtgttaccttaagcttaccactgtcattgaagcattgaatatagtaagggtgtggatgtggaagcgttttcagcccaagcttctctaccatagtggtgcttgctaagttgttgcagcttccttcatcaattataatacgacaagattgttccaaaactacacatttagtttggaacaaattgtgtcgctagttttgttcatctttaataatttgggcactcaagacacgtcttacaacgaggctcacatagtgttcaacatgttcagccccaatatgctcttcatcatcattctcctt

SEQ ID NO: 80632 - DNA, 369 bp, Zea mays
tctgccaccacaagtctaataacttcccccacaagcttgtcgcctagtaagtataaggtgttagaagaagcaaaaatcttatcaaaacaaaagtgtcatcataaaatgcaggtgaacaaaagaaataacctttgcctatgactactgctcgttgctccccagctgtagctttaagaagtgtattaagatcatatgaagtgtagggtccatctgtcaatcttccaggcctacaaacagcttgtatcatgtcagaataatatatctatgatcccaccaaaaaacttctctgtgaacaaacctgaatacctgtaagacccaaaattagtagaaaaataataatataataaatcaacaaatatagtattataa

SEQ ID NO: 80633 - DNA, 370 bp, Zea mays
ttttcaccatattatcacggttatcttgagattgtttagcatgacactttcccttcaaaatagttaagctccttcttagccttccaacttcttccttgagctctttattttcttgtgtgatagaaatatcactaattcctgaaatttctagctcaatggaagattggctttcttgagagcaacatttgttagcacatgataatatagtttctacttgagtacatgtgcatatgtgaggttggtatgatttaaaattagttaacacaacctcatgagccatttctaacatgatatgtgaatccataaatttattatgagagcacacaagcatatcatgtttttcttgcaaagctagattttcaatatttag

SEQ ID NO: 80634 - DNA, 369 bp, Zea mays
tataccacagatgagtattgaagtgcagatattaatacgagtaagacagagagtcaggatacaatacagaacagagcacacagacgcaaggatttatcccgaggttcggccaagcctgaaatgcttgcctagtcctcgttggagttagccacacctgggcttggagtctatttcaacaacttcctccgtttgctcagatctgtcaatatgacagatagagcctttcactattgagatgggttacaacaacaccgtggctgcttacaaacttctcggcagcacctcggcagagtaacgatacgctcaagaccttgctctagctcttagcagcactactcctctctctaaaggcttatagctgtgccttct

SEQ ID NO: 80635 - DNA, 366 bp, Zea mays
tgctccgggaccacgcatcagaggaccaactctcgtttctttaaaaaaaacaacgttcatgcagtctgaaggaacgtttgaaaaatactcacacttgcattataaattaacacataaatatataacagacaggacagttgaccgatgattgggtaatccggcctaaaggtccttggaacagacaggactgaactgctgctggatcttgatcaatagctgacacctaacctcatggtttgtgaagacgaagaaggggtgaggcggctgcgcaagccatgccggcggatgctcagccacaataggagacagctgacgagggcagcccggtagctcagaaggagcatcgtcgatctgcatcatcatcag

SEQ ID NO: 80636 - DNA, 364 bp, Zea mays
tatgaagattcttcatcccaacgtgggctagtcggtgatgccagagccaacccatgttagtcttagcaattaagcatgtgtcgagttcagctctatcaaaatctaccaagtatagctgaccctctaacacacccttaaatgctattgaatcatcacttcttctaaagacagtgacacctacatcagtaaagagacagttgtagcccatttgacataattgagatacagaaagcaaattgtaatctaaagaatctacaagaaaaacattggaaatagtatggtcaggtgatatagcaattttacccaatcctttgaccaaaccttgatttccatccccgaatgtgatatctcgttggggatcttg

SEQ ID NO: 80637 - DNA, 362 bp, Zea mays
tagatctctgattcctatataacaacttgttaatctacctgtaacaaagttgttggtctacaattcatcttcaattttgctatagcatccccaatcaaaaaatcactggtttaaactcaaatctgactccaaagttcatctgaccttactgtcagtcccgattcagttttaaggtggtctgatagccagacttcaaacctttttatctcctatttttgtacaacaccagggcttattcacttaagcaaagttgtactcctaacatagctctacaaagttgatgtgttgacctagggcaacttccttatgaattgggagatatagagctccaaagttgaccctattcaatgaatttcagactt

SEQ ID NO: 80638 - DNA, 373 bp, Zea mays
ttatatcatagcatgatgcatatgcgagtaggatatttatggcttcaagtcgagcaacctgtgcaaaggtttctccaaaatctaagccttcaacttgagagaagccctttgcaataagtcttgccttgttcctcataatcacgccttgatcatcttgtttgtttctgaacacccactttgttccaatgatccttgcatcttgtgggggcttctccagggtccaaacttcgttacgggtgaagttgtttagttcttcatgcatggcgttcacccagtccggatcctgtagcgcctcatctatacatgtaggctcaacacaagaaacaaaggagtgatgttcaataaaagaagcatgtttatgtgatcgagtaat

SEQ ID NO: 80639 - DNA, 373 bp, Zea mays
tgacattgtttccctgttggaagccaatgtcatccttattcccagggcgtctcccattatagagcatgcttctagcaaatttaaatttttcattttctaagtcatgctcattaattttagcactaagttgagctatgtgatcattttgttgtttaattaaagctaggtgatcatgaatagcatcaacattaatgtctctacatctagtacaaatagtgacatgatcaacactagatgtagagggtttgcaagcatttaattcatcaatcttagcatgtaatatagcattttcatttctaagattggaaatagaaacactgcaagcattcaaatctttagccttagcaattaatttttcattctcaatcttaag

SEQ ID NO: 80640 - DNA, 375 bp, Zea mays
ttggtttttctttcagaacaaagatagatagggttttatttcggttcaactagttaagcttagtttgaaattaagtctcaaataatccatgaaatctatgataataagattatgtcaatttcgaaaatagattgaaaaaaagtgcattagacacattgtctgtctttacatgtagccccggcaccacatgtcaattttacacctgtaagtttatacagtgcttctgaaaacaatacaatttcccgatacagggtttgcagatcggaagaaaaatatgcagtaccattcattagttaggcatctgatattaagggggtgtttggttaaagagactaaagattagtctctagtttttagtctcatttagtctctttt

SEQ ID NO: 80641 - DNA, 367 bp, Zea mays
tctaaagggagaacacattgtaggactaacatttgttctatttgagaaagacaggatttggagcgcttgccaggcaaggaagcaagttggagcccatcatccacacaagaacatcatgacaacagacaggccactggagctcctacacatggatcttttcggcccgattgcttacataagcatcggcgggagtaagtactgtctagttattgtggatgattattctcgcttcacttgggtattctttttacaggaaaaatctcaaacccaagaaaccttaaaaggattcttgagacgggctcaaaatgagttcggcttaaggatcaagataataagaagcgacaacggaacggagttcaagaactct

SEQ ID NO: 80642 - DNA, 368 bp, Zea mays
tcaaaactaaaagctcagcaaatcttagtgcttctttatctaaaaattgagtgagcgggagcagatggcaagagagcgtgccaaataagtttgcggtatgatcttatttatacgcccagtgcattgaaaattgaaagaccccgcttgtcagtgaatgttgctattctagcaaagggaaggtgttttttcggaccttcggcgtaagccttcgtccatgtcgcaatctaaatttattattttaaaacaaattaatattgcgaggggctactgttgggggccttcggcttacgaaggtcctcaaaaacaggatttaacaatatttctggagtataatgtgtgagcaggtatcttcggactcaagtcggtat

SEQ ID NO: 80643 - DNA, 370 bp, Zea mays
ttagaggatatggtccctgagaacttgttgctgtatctctgcagacgttgatgcaacagaaacttgtgcaaccgtgcgagatgctgggttgaggtcgtcccgtgcctcgtcgaccttagagcacgatctcgggggtcgggatgatgacttggatcgtcctgatcctatagaagtagctggaggtccgtcaaccttagaggtggtcacggcggagagcttgaatcccttgaacagcgctgacatgtgcccagcccccgagggtgtcgccggggagaactcagctcgggtgaggagtgtaggccacttcccagcccccgagggtgttgccgggtgtgacccggctcaagtgggcagtgccaaccttgaccca

SEQ ID NO: 80644 - DNA, 370 bp, Zea mays
ttgtagtgcatgtcaagctagaaagaaagttgttatttcttatcctacaaaagcttttatgtcaacatcaaggccactagagttacttcatatggatctatttggaccaacaacttatgctagtgctggtggcaacctctattgtctagttattagtgatgacttttcaagatatacttgggtgttctttcttcatgacaagtctgaggttgcatcaatattcaagaagtttgctaataagactcaaaatgaatttgacagcataatcaagaagataatgagtgacaacggaaaggaatttgacaacaccaacattcatgagtaccgtgatgaaattgggatcaagcatgaagtttccgcaacatacaca

SEQ ID NO: 80645 - DNA, 371 bp, Zea mays
tgggagaagtaagctaaatggacagggtgatttttttctaatgagaacaaccataccgataacctgaaacatagtttgagccatcggtctgatgttgttggattgtcaagtgcaggggatgccaatgctagcataccttcacctgttgcaataagcaaaaatgcatgcaatctttcagatttcgttacaaagtatgaacaagctctattctttgtaattaagtcctacagtgaagatgatattcacaagagtgttaagtacaatgtctgggcaagtactcctaatggaaataaaaggcttgacaatgcctatagggttgcacaggaaaggatagcagaaaaaggaaccaaatgtcctgttttccttttctt

SEQ ID NO: 80646 - DNA, 363 bp, Zea mays
tgtccgcggaggaagccggctgctgttcattctctcctcccttgcatgcgtggtgccatcgagatccagctcgcgatcgggttctcgcgcttcgcggttgttcgctcgacgcagaggaggagccctggtggaggggagatggagctcgtcgtcgtcaggagtcgacaggggaggcgcggggctaggggcctcggcagggccgtgaaggagcaaggtgcgcggctccgcatcatctgccgctgcgtcgcgctgctcgtcttctaccgcgactgaactgaaccgacccttgcagctccataggtagtccatgtctgcgtgcgttctcgtcagtcgtcgtgatgacgatgggggcggctttgatct

SEQ ID NO: 80647 - DNA, 365 bp, Zea mays
tctaaagggagaacacattttgggactttcttatgttcattttaagaaagacaggatttgtagcgcatgtcaggcagggaagcaagttggtgttcatcattcacataagaacatcatgacgactgacaggccactcgagctcctacacatggacctattcggcccgatagcttacataagcatcggcgggagtaagtactgtctagttattgtcgatgactattctcgcttcacttgggtgttctttttgcaggaaaaatctcatacccaagaaaccttaaagggattcttgagacgggatcaaaacgagttcgacttaaggatcaaaaagattagaagcgataacgggacagagttcaagaact

SEQ ID NO: 80648 - DNA, 371 bp, Zea mays
tgccacaaccgagcagagggccgaaggaataactccttatactaatatagcttttgagaaaagtgtggccaaagaagctgaatcccttactcccgaagtactctccgaaagttttgattatatcgttagacatgcttcgggaaaaagactatccgaagaagaaatttctgaagccaaacattatgcctgggaattgcagtatccgaagggggccctagtgtttaatggtacaaacgaagatgactttttgtactgcctcccggacaacaaagaattatttgtctctcgggagatggccagaagtatgggttttccgaagcttgaagctggcctttgtgccatgacaaaggccgatctcacagatagtcttg

SEQ ID NO: 80649 - DNA, 370 bp, Zea mays
ttttagtagaaatttagataagctattttgtttactttattgattaaaaatatttttaaaactatttaaattgatattataaactccacactggagctggaatctggagccatcctaaacaatcctaaacccctgtatttctaaattagaagagttcgtcagctggagcagtcatgcctggctgaacggtggattgaaggttacttcttgctaccatctcaaaattcatggtacgcttgaacagtcagcatcgagggccaacctgttaaaccaggaacaactggcagtatctgcccagttgaaacttataaagctttaaaacaacatacacatatctttgcaacaaagccaaccctgaagtttctctatt

SEQ ID NO: 80650 - DNA, 373 bp, Zea mays
tagtgcaagcgtgtggaatggaaagacaacgaagcttaagtgtatgtatggcttgagtgaagggcaaggtggaacggagggaaaacgggaggaggcgcgcggcgacgggcggcaaggctgttcggccttgcgtctgggctgaaaacgaggtgttcgccatggcgcacgggccgaaaacggaggctcgggcacgaactcgaaaataagctaagttcaagcatgtggaaagacaccgaacatacagtgtatgtctttggtgaagggcacagtggaacggagggaaaacgacacggaggcacgcggcgacgggcggcatggctgttcggccttgcgtttgggctgaaaacgaggcgttcgccatgtcgcgcgggcc

SEQ ID NO: 80651 - DNA, 373 bp, Zea mays
tttagctttgaagcctcggctttgaaaacagtttttttgtgtttccgaagatgtctgaagctgctaagaaagctgctgctgagatgaagctgagtcttgatgaagagaagaacttagggtttcttatagcgatgtcgaagaccaacacagaaaaaatcaccaaggagattctggaagggctgtctgaagatactggtgacagtgaaagttatgatgtggacagcggtggcgaagactccgaagatcgcccctggcgaccaagccattcagtttatggtaaatcaactatcaaagagaatgatcttgttaacatgagaggaaggtatttccgggatctgtccgttgtgagggccgacgaaagggagaagacttg

SEQ ID NO: 80652 - DNA, 374 bp, Zea mays
tgaacagggtaaaacccgttgaccttgagacaactttgttatggttccacaccacctttattaattcgcccgaccattttcctctaggctggttgaagattgacttcattatccctgttattatgattccatttgctctttctactagtccatttgattctggatgtctcactgatgcaaagtgtatttttgtaccaatctggtcacaaaaagctttgaacgtttcagcatcaaattgagttccgttatcaactatgatagccttcggcactctgaagcgacaaacagtattctgccaaaagaacttctatacggtggccgaagttattgtagctagaggcttagcttcgatccatttcgagaagtactccact

SEQ ID NO: 80653 - DNA, 365 bp, Zea mays
tgcaataggtgaagtgaggccacaagaaaagtctttgactaaagaaccttttggatgacaaatgaggtcattgatgtgggcgcaaaggtggtgggtgataaacccttcacccaagcaaacacatcaacatcaagtcatccaatccttgaggaagttcatcaaccacaagagttgccaacaattttggaagatgaacctgaagtagctgttagtgaagttcctcttgatcaagatgatgatgatgaagagcaaattcaaagacaaccatcagtgcctcatcctcgagttcaccataccatccaaagagatcatccagtggacaacattcttggtagcattaaaagaggggtaacaactaaatcccg

SEQ ID NO: 80654 - DNA, 330 bp, Zea mays
  unsure (1)..(330): unsure at all n locations
tgttcagttagatgagaatttaatcatttgattgtttaaatttaatagagagtgatttaatccactacaatacatttcaatcccctaagagctgatttggtggatagggaattctnccctttcctttattcctctctttttccctttttactccctcttccttcctattacttctctcccttcttctttttacctcctcctttaatttcctttttctcgtcattcactttttttctttctctcttatctcccctccttctctccttcttcttttctcctccttcctctttatcttctttctccttctgctcttcttactttcctcccttc

SEQ ID NO: 80655 - DNA, 370 bp, Zea mays
ttagctgatttagagtcccttgttggattatttccttgtttagcttttccatttcctgacacaaagtgttctcggaggtcttcgccataagacagtggcaggaagtcttacgactcaatgcatctgccaccacattggctttgcttgggtgataatggatctccagttcatagtctttaatgagctcaagccatcgtctttgcctcatatttaactctgactgggtgaagacgtacttcaaacttttatgatctgtatatatgtgacagatatttcccagcagatagtgacgctaaatctttagggcatgaaccacagcagctagctccagatcatgagttggatagtgctcctcatgtcggcgcaactg

SEQ ID NO: 80656 - DNA, 371 bp, Zea mays
tcagaccacacacactacaagctaagccttatttactgattttgaataaacgactgaagaaagaaacagacatgcaagagtttatctaacagatgtgacttgactttctcttcctctagagatgttgataatatatttatccttggaccctggaacaccatgagacaaatgaatgaatatgcacaataagcccaagcaaactacaatagaaaagaatgtgagtcaataacacaacaatagatggacatgtaatataacacattgttgctaatttccaagtgatcatgatataaacatcatgacaatcatttgatcatgttgatcatttgaacagagtatcaacaattcaaaattaattttgcagccaaact

SEQ ID NO: 80657 - DNA, 374 bp, Zea mays
tactcctccctaagaaaggcccttcatcatcgtcaatattttgaagcccgggatatacaagctggccaacaatcaaagcgaggtctacaacaacgcttggaacatccaacagctacgtcgcttttacccttaaaatgtttcaagtcgttcatgtatcttgctctttctttacaagcataaataaagtctaaccatcaaggaaggatcagcattgcctcggtaaagcccgaccctccctcgaagactagaaggggggaaccccctctgcgtcaaatttttcctcggaaaagtctttaaccagaacgtctttcgtgcttttcgactgcgtcgataacagaatcctaaagacgagcgagagagacctttaacgacat

SEQ ID NO: 80658 - DNA, 363 bp, Zea mays
tgtaatattctccgtcaatatgtttatcaattacaagaacatagaatattatacacactagaataaagagcgccctctcgggcgctatagcgctcatatgttaaccttcagctagcacaagtatagaaacatcacctcaagtagactttaaggtacataagtaactccagataaaagtaaacggtagagtcatatagtaaaggctaacagcgaataaacaaatttcgtcgatgtggcaccaaacttagctaaatgaagaaagtggtagcccaaagttagtcatggaatagaatacacttctaggtcatcaaaagatattgtgtacacagatgcttagataacacagtttgcagccttgtaagc

SEQ ID NO: 80659 - DNA, 367 bp, Zea mays
tttccttatcgtcatcaaccttgacgtataaccatttctatttccaccctgctgcccatttgcttcggtagctgatcacaggatacttcgtagttttccggtaagcaaaattatagcaaccaaaattctcatgtaatccatcctttctagcctttgtctgatagtgcagttcgtgaactcggcaaaagctgtcagcaaacggttccaccgcctggcttcggagtgcccaaatataaacactaagcctaacgatagcgttaggggttagctggtgaaaatagattccaaaattcttcaatatctctgcaataatcccatgaagggggaatctcaacccagcctttaagaagcttttaaaaataacaat

SEQ ID NO: 80660 - DNA, 371 bp, Zea mays
taaccttataacaaggataagttgcctttgttccaaatgtggatggtccttaagccaccttgaaatccttaaaggtgaatgcttgagatgtttataacatgctctcataagtgcataaattgtcatgagcatcacacttatactatgacacaatgcacttcacattctctatgatatagacatgatctcactaacctaattatgtgcacttggcatttaagaccaaaaatttgtattcctctcaaagcacattgtcggggaccataattaggggtaccctcaaggctcctaattctcagctggtaacccccatcagcataaagctgcaaaggcctgatgggtgcgattaagtcagggatcagtccattcga

SEQ ID NO: 80661 - DNA, 364 bp, Zea mays
tgcttttgaaataaatgtaagtttatgtaattgctttcgtatgtctttatctccgatgttctataatgtctgcaagacgggtgaaacgttcctggtaaggtaaggaaagataccgaacttgtcaagtagttcaagggcacctacagggttgtctgaagtccgttggacaaggacaactgtaggtgggcctaattacttgggaggttccgtcacagctggtatcggagcgtagccctgctttgcagatattatgaggcatcttcaaaagaattttcaaaggtcttacctagaaattcttttcccttcttacctaagtattctgaagagtctattttaaagaccagataggaagagtgcaacgtat

SEQ ID NO: 80662 - DNA, 373 bp, Zea mays
tcagagttagccttctctggggggcacaccccaatttattatagtaaaaatcatgcagcacctcctgcttttgatcatgagatgtgaccaccctctcaccatccaataagctatatatatgatttcttttcctgcgacagcaggcctgcatatggaagaaggaagtgttggcatctccatctttcagatactgaactcgagatctgagccttgcaacagttctctccagtgaagcaaggaccaggcattgttgcttgagttttcttaacagccataactcatctggggataacaccctgctgtcttgagccatttctagcctgtgtaaaatctctcttgctaaacccagttgaattttaatgttgcccactgt

SEQ ID NO: 80663 - DNA, 388 bp, Zea mays
atctaataactaatctgtgtgtggaatttgagagaagattagatctcttgagtgtgtctagaattgaatgcctagctcttgttagtggttggaagtgtgaaaacttggattgctatgaatggtgggtagttgggggtatttataatcccaaccaccaaactagccgtttggtggggctgtctgtcgcatggtgcaccggacagtccggtgcacaccggacatgtccggtgcacaccggacatgtccggtgcgccagccacgtcaccaaagccgttgggttctgaccgttggagctctgacttctaggcccgcctggatgaccggtggcgcacctaacatgtactgtaaagtgtccggtgcgccaacatgggcgtgcctgacttctgcg

SEQ ID NO: 80664 - DNA, 367 bp, Zea mays
tattgcttcattccatttagatatatgtcctttatttacttgttgtaaatcattatttgtatgaaagaaactcatatatgtataaagctatgtctttggtgtatggtaaacttctttttatcttttttgctctgttgtgtgtcaaacaaaaatgtgcgcttttgagacgaaggcgaaaaacacattcccttcttttcacacaaaacaaagcgatcaaacgtagattagttctgaagcttaacacttgtgctattagaagatacattggagaataaatgatgttgccttctgttcgaaggtcttttggattggactctgcattcccttagaatcaacttctgagctgctagcaccttttctctagtgc

SEQ ID NO: 80665 - DNA, 366 bp, Zea mays
tctaaagggagaacacattttaggactaacatttgtttattttgagaaagacagggtttgtagcgcttgccaagcagggaagcaagttggtacccatcatccacacaagaacatcatgacgaccgacaggccgcttgagctactccacatggatctattcggcccgatcgcttacataagcatcggcgggagtaagtactgtctagttattgtggatgattattctcgcttcacttgggtgttctttttacaggaaaaatctcaaacccaagagaccttaaagggattcttgagacgagctcaaaatgagttcggcttaaggatcaagaaaataagaagcgacaacgagacggagttcaagaactc

SEQ ID NO: 80666 - DNA, 370 bp, Zea mays
tttaagttgagctgattggtgcatgcaactttttatatcatagccaggggtctcgaatttgaatcatggttagagcagttaaataaaataattattgatcgctcctattccacgtctgggagctaagagagcctcgacgtgcgggggagtgttggaataaaagtgaattggccacatttccccaccagcttaagcatttaggttgaattgactggtgcatgcaacttaatagagtagatcccaaaaacatagggggctaatttaaaggcactactggagttgatcctagcaaacaaggccctccaaagtatgaaaagccatcaaaagtcaagtagaggccttgttttagagtctattgttggagttgctc

SEQ ID NO: 80667 - DNA, 364 bp, Zea mays
tctaaagggagaacacattttgggactaacatttgttcattttgagaaagacaggatctgtagcgcatgtcatgcagggaagcaagttggtgttcatcatccacacaagaacatcatgacgactgacaggccactctagctcctacacatggacctattctgcccgattgcttacataagcatcggcgggagtaagtactgtctagttattgtggatgattattctcgcttcacttgggtgttctttttgcaggaaaaatctcatacccaagagaccttaaagggattcttgagacgggctcaaaacgagttcggcttaaggatcaagaagattagaagcgacaacgggacggagttcaagaac

SEQ ID NO: 80668 - DNA, 371 bp, Zea mays
tggtgcaaatggagaagcagaaatccttgaagtcttggctgtcaaattgcttgccgttgtcaactgtgagttcggacgggactccgaagcggcaaacaatgttttgccagaagaatttctgtgcagtctttgatgttattgtggatacagccctcgcctcgatccatttggtaaaatactcgacagcgacgaagctgaatttgaggttgccctgagccgtggacaggggcccgacaatgtccaggccccagcgctgaagaggccatgtgtgggcgattagtttcgtgaattgcgaagggcttcctgatcgaggagaaaacttctgacaggcttcgcatgaccttgtgacccgatttgcggcgcaaatcata

SEQ ID NO: 80669 - DNA, 363 bp, Zea mays
tctaaagggagaacacattttaggactaacatatgttcattttgagaaagacagggtttgtagcgcatgccaagcaggaaagcaagtcggagcccatcatccacacaagaacatcatgacgaccgacaggccgcttgagctactccacatggatctattcggcccgattacttacataagcatcggcgggagtaagtattgtcttgtaatagtggatgattattctcgcttcacttgggtgttctttttgcaggaaaaatctcaaacccaagaaaccttaaagggattcttgagacgagctcaaaacgagttcagcttaaggatcaagaaaattagaagcgacaacggaacgaagttcaaaaa

SEQ ID NO: 80670 - DNA, 367 bp, Zea mays
tgatgtagcaacctcatgtgatgatttgattcaagaagagcaaactagtctacatgctgaattgactgaaaaagttgaagtcctgactttagacaaccaaaaattgaagaattatttgactgatgcaactactagaggaaaagttgctattgagaacaatgatttcaacaatgagttggcagtggataatcaaaggcttaagaatgaggtcaagaaactaaaaagtgaaaatgaacatcttgcaacaagtgtgcaaaagttcaacaagggtcaatacctccaaaatgagctgcttatgaacactgttatgaaaaataacaagagtggtattggatacaatgcttttgtgcaaaagaaagctatcact

SEQ ID NO: 80671 - DNA, 373 bp, Zea mays
ttatatggacgacgatgtcatactccgctaaattggtcttaactctggtgaaaggtacttcttcaggcctgatatggtgaaagagaccgaagaaagagttcaaagaataattcataatatgaataaatcccaagctcgtcagaagagttatgcagacaaacggcgaatgcccttatacttccttgtgggagactatgtctacctaaaagtttcgccaatgaagggggtatcacgtttcggggttaaaggaaagcttgcaccccggtacattggtcctttccctatactcgagcaatgtggaccagtggcataccgactccaactacccgaaacattgtctgctgtgcataatgtgttccacgtgtcacaattg

SEQ ID NO: 80672 - DNA, 371 bp, Zea mays
tcttgatataagaaaaatgttggcaattcgatgggttcttttgtggatggatgattcccttcgtagtcagaaatatctcctcagcccatgaacctttgcttgtttacggaaaaaggaagtgcatgggcaggcccaatagcgatatatacttttggcacgttttacgtctacaatgcaagcacctgtaatcggtccccttttagagcaactccagtagttctttaaaagactttctaaatcaataatttagttagttaacataaaaattattctccaacagtttctaaataaactttctaaatttaacaacttgtcatctaaccttattttctctctacatttggcaaccatttaacaactcgctaaataaa

SEQ ID NO: 80673 - DNA, 369 bp, Zea mays
tgttgttggaacttgctctcctgggcaagatgatcctaattgggagtgaaagtaatgcaaacaaggttttaactcgagatggcgattgctctgttaatccagcctctcaagggcactgtacaggggtatttataggtgcctgagtgcccaacgtctcgatgtaaggacgcatgttccctcacgcacctgtactccccggaatattcccataaaggagggttacagactgtcattacagaaaagccattacaaatcgggcccataacacacttctccgtgcgaggccagttacaatggggcgaatcccacgtgggcctctaagtcgggtgaggacgtgtgatggggcgatgttgtctataccttttcttg

SEQ ID NO: 80674 - DNA, 381 bp, Zea mays
aaaactcagcttaggctcccccgagtaaagtccgggtcttggcattgtttcgatacgaggaggaccccggcatgggtaggggtccggtgccagcacgtgtccaggccttgccctatgcttcctgctcaagcgaaggcccgctgctgtcgcatggcatgtggcccgtgacataagccagcaggccgagccagatgcaaggtccatacagccatgcagcctttacatttattgcggagaggacgcgccgcctgccaccacgctgacgggcgacgtgccctctcggcatttaatgcgccctgtcccatccgctggcagggggtgtcagacccgtccagcagacgacacgtctgatcagtctactggcaaacagtgcgcccgtgc

SEQ ID NO: 80675 - DNA, 377 bp, Zea mays
tgtggacccgttgcctatcaactgaagttgccacctttcttgtcaactgttcacgatgtgttccatgtatctcagctgcggaaatgtgttcgcctacccactgaagtgctaccggaaccggacattgagatagaaccagacttgtcctaccaagagtaccccgtcaaggtattggattagaaggagagatcaactcgggcaagatcagttagaatgtataaggttcaatggagtcaccattcagcagaagaagctacatgggagattgaggattttctacgctcccgcttccctgactttctgcccaaaggagtcggtacataaccccaaaaccccacccccacctgccctttgaactcaattataagaaaaactta

SEQ ID NO: 80676 - DNA, 360 bp, Zea mays
ttagtgattagtgagatatgactgtcgcgctttttttagtttctcgcgccggaaccgcagcgaggcttgtattgttgtctgtgcgaaccaactccatctggctcccttgcgagtagacacgctatcgggttgcggtcgctggccgggaaagtttctctccgtttgatctgtcaacaagaagctcactctgtccgagggatccctcgatagactgaaaggagtgaattgatatcccctctttgttgacccctcgatcaggatgagggccgccagaaatggtcctctcgcaaactatactccatgccaaactctctatacgtctgcctcttggcttgctgccctttgttcagacgtctctct

SEQ ID NO: 80677 - DNA, 368 bp, Zea mays
tgtgaagagtcttcattccaacatgagctagtctgttgtgccagagccaacccatgttagtcttagcaattaagcatgtgtcgagttcagctctatcaaaatctaccaagtatagctgaccctctagcacacccttaaatgttattgaatcatcacttcttctaaagacagtgacacctacatcagtaaagagacagttgtagcccatttgacataattgtgaaacggaaagcaaattgtaatctaaggaatctacaagaaaaacattggaaatagtatggtcaggtgatatagcaattttacccaaacctttgaccaaaccttgatttccatccccgaatgtgatagctcgttggggatctttattt

SEQ ID NO: 80678 - DNA, 356 bp, Zea mays
aggataggggagaactaaacagagcgcgaacttatttctatcgtctaaaatacgacgaacggcaaccgactcgccccccctatctgctgctttcaggcacggcggcgcaaaagcggccgagcggcgttctcgccggagtcgcgttgaccgcggcccgacgagcaatctaccccaaggaaacatgcgaaacgaaatccacccgctcgcgaaatgaaaggagggcgccataaaatctgggaggggctaattaccgcaggttggagagggagtgctcccaccgtcgcgagcagcaaagccgcggcgacgatcttccgccggcgaggaattcctgggcccaaagtcgctagtctgcccgg

SEQ ID NO: 80679 - DNA, 369 bp, Zea mays
tcttaaaggctggactacgatttcccttgagcagttttgttgtggaaatactgaagatatttgaaatctaccttcatcaacttactcccgaagcaatcatgaggatgggcatctttgtgtgggccgtgaggagccaaggtttagaacctaatgcaaaaagtttctgcaacatacatgagctattgtatgagacaaaaccctagggtaaagagcagtatcacaacaattttggctgctacagcttcagcgcccggtctgggtcaagctgccccgtgccaacctttcggaagaggtggcccggcgactagatgacgaaatggttttatgtgaagaatgacttgaaaacacgggaagatattaaagatatca

SEQ ID NO: 80680 - DNA, 366 bp, Zea mays
tgagaaactaagcaagcgttggtgagctagatctattaaattgagcaaacaaagcaagtggcacaaacagcgtaccaaatgtggtcagggtgagttcttatctatacgctcggcgcgctccaaattggagggtcccgtctgtcattgattgttgctattctagcaaagggaaggtgttttttcggaccttcgacttaaggccttcgtccatgacgtagtctgaattcgttatcttaaacaaattaatactgcgaggggctactgttgggggccttcgtcctccaaaggtcctcaaaaacgtaatttaacaatgtattccaagtatggcttatggacaggtacctttggattacacgatgagaagga

SEQ ID NO: 80681 - DNA, 366 bp, Zea mays
tctgcaacatacacgagttattgtacgagactaagtcctgtggaaaggagcaataccacaacaactttgggtgctacagcttcggcgcccgctccgggtcaagctaccctgtgccaacctttcggaagaggtggcccggagcctggatgtctgaatggttttatgtgaaaaatgatctaacagcgcaaaacaatgtcaaaagtatcattatgtacccaatttggcaacgcttcgggcttcgaaggccgaaggttgaaatggatgaggcagccgaagaatgccaaagagccttcggcgcagtctgctcctttattgggacaagggacttggtccaggagcacattgccttcagggtatggccacttg

SEQ ID NO: 80682 - DNA, 367 bp, Zea mays
tgtggaggttcttcatccccacatgtgctaatcggttatgccacagccagcccatgcaagtcttagccattaagcatgcatctagactggcctcttcttttgcaaaatcaactaaataaagtttgccgtctaatacacccttaaaagctagtgaaccatcacttcttctaaagacagacacatctacatttgtaaataaacaattatatcccatttgacataattgactgacagatagcaaattatatccaagactctccactaagaatacatttgatatagaatgctcattagaaattgcaattttacctagcccttttaccttgccttgattcccatcaccgaatatgattgaatcttgggaatt

SEQ ID NO: 80683 - DNA, 373 bp, Zea mays
ttatagataatagctttgacgcttgcttctgggaagtacctttcgaaggtgttgtttttaggatcttcggctacgaagcatacccccaacatcagcattatatcatcaacattatgctatagaggtcaacattcgtttttgtcttcaaaatcgagcacgagatccgtccatatcttgctaggtcttgcaatttatttggtctgctactgattggacgttcgatagatggcctttggctagtcttcatatcacttcgtgcttcaatgcttctgtcgattagacttgtacctcatcggctatatttggctttcctttgatccctgtcgatatcttccttctatcttgaggtattcattgcgtatactgtatggat

SEQ ID NO: 80684 - DNA, 373 bp, Zea mays
tcgtgttcagttctgttttttttttgcttcagctttcgtcaatgaaccttcggttacctggagctcaaagttctttttctcgatagcatctgattgctcctttattctgctttccaaattttcaattataacttcgtgcttcttgtcttcaaaatcttgctgcattttcaaggctttgctcaatagcatactctgcacgaaaacaaccttcgtcagacatgttttcattattagaaacaataaaagttaagggaaaagtagttcaccttgaaattggaatagaataaactaccaacgatatgttgtcgtcggtagcggctgatgtccgtttctagcttcggaaaaccgatactctttgacagagtaccgataa

SEQ ID NO: 80685 - DNA, 374 bp, Zea mays
tcctttcctcgagtcgccgtgtgtctcatccaaattcgtgaccaccactcgctcctcctataaattgaaagccgggatggctgcgttaggtcatcacgaagcccacacacccgttcttcccctcgattgcccaccatagccggagaattcccctttttccccaaattggtctccgccaccgtaaagcacaactccaccgtggccagtccgttctggtaaggcaccatccaattcgcgcgttgttctcatgtccctgtatgctggtgatgctctccaaaccgtccaattgaactaggagcccaccaatcactgggaacacgaactaatgtccatggctttcgctgtcctcgtgggcagagcgaaataggtcacca

SEQ ID NO: 80686 - DNA, 370 bp, Zea mays
tctccttctattctttccccttcacattaatctattttatttctagaaaagaaaattggatgttgtataagcaagatataaatgggaataaaattagttaaaatgataaaaaaacatagatgcaaaattaggaaactgcttgattgctagaaatacatgtaagggcctgccccgccattcacataaatatggtaaaatatgctataaaacaaacaagaaagctggatttatacatttcaatggaatggtctgcaataacattaaaagggacctttgctggatttcccttccagttgatggagaacagttgacgtcggcgtggcgatggatgtccttccagttgacggattttccagttgacatcatgtag

SEQ ID NO: 80687 - DNA, 368 bp, Zea mays
tctaaagggagagcacattttaaggctaacatttgtttattttgagaaagacaggatttgtagcgcatgccaagccggaaaacaagttggcactcatcatccacacaagaacatcatgactagtgacaggccactggagctcctacacatggacctattcggcccgatcgcttacataagcatcggcgggagtaagtactgtctagttattgtggatgattattctcgcttcacttgggtattctttttacaggaaaaatctcaaacccaagagaccttaaagggattcttgagaaaggctcaaaatgagttcggcttaaggatcaagaaaataagaagcgacaacgggacggagttcaaaaactctc

SEQ ID NO: 80688 - DNA, 370 bp, Zea mays
tgccaatacctgtcaaagcaacagcacatgccttcttagcagctacagactataccagtaacttggcctttcgcatgctggggactggatatgattgggcctttcaagaaagcccaaggaggatatacccatgtattggtggcgatcgacaaattcactaaatggatagagttccagcccattgcttctttaacctctgctaaagccgtagaattcatacaaagcataatatttagattcgggataccaaacagtatcatcactgacttgggatccaacttcaccagttcagaattctttgacttctgcgagcaaaagagcattcagatcaagtacgcatctgtagcacatccaagagccaacgggcagg

SEQ ID NO: 80689 - DNA, 369 bp, Zea mays
tcgcgccacccatctgtcggggaccataattatgtgtaccctcaaagctcctaattctcagctggtaacccccatcagcacaaagctgcaaaggcctgatgggtgcgattaagtcaaggatcggtccattcgagggacccgatcacgcctcgcccgagcccagcctcgggcaagggcagccgaccccggaggatctccgtctcgcccgaagccccctccagcgacgaacatacttccggcttgcccgaggccctgtcttcgccaagaagcaaccctggccaagtcgccacgccaaccgaccaaatcacaggagcatttaatgcaaaggtgacgtgacacctttatcctgacgcacgtcctccagtcgac

SEQ ID NO: 80690 - DNA, 370 bp, Zea mays
taatagacacatgtcatctttcatgttgcaattgttgttccagaatgtgtccatctttaaaaggtaaggaattggttaggcttttacttccatggaattttttacttgctaaaatgggaacaagtggttggtgatgaaatgtagatctgctcctaaaaacttcgaagcaatcctgaggacatacatcagtaagtcattcattttgactgtgttgatatttgtagtatgcctttttggatagatggtgttgcattcctcttataaccatacttgctattttcttatatgattgaataaatatgattgtagtttactgttgttctcccgttatctgaatcttgactctaatcccttggtgagctcatatggg

SEQ ID NO: 80691 - DNA, 367 bp, Zea mays
tgttttcggctcatcctcctttttcatccaaatttggtgatagctgtggcagaaccgcccgaattattccagcttaagtgcctaagtcacaccccaggggccgtaacacacttaaatcggaataacccgtcagtccctcagatctagtctgatagagccacttaaccaggatcaaattccacaatctcactcgaaggtgagtcacagaagaaatacaataaaacaggaaacctcaaattaagtactgagttattacataaattggagtttttgcgtagtaaataaagttcacaaaataaggtgtagcggataatcgatgtcgtcggtatcgaggaattgggcaaggcctagcccactactcctcgtg

SEQ ID NO: 80692 - DNA, 52 bp, Zea mays
  unsure (1)..(52): unsure at all n locations
gacctaanaaactcaagctaancanctgcaacgggaagataatgcttacctt

SEQ ID NO: 80693 - DNA, 359 bp, Zea mays
tgagaagatatttccactcagcttcttctatccaattcaacatttgaatcttcatctcccctatgaggcatgaatggggggggggggggcgtgcatggactttaatgctatccaatccaaaaatatctaaaaactattcaaaagaaatgtacaaataaatgcaaaatccaggcttccattgcaaaagcatacattctaaaggaagtgtcaaactttataacaacttattatggtgataaactgccgagcgtgcataatccaccccctcgttacaatgatggcgacaatgaatcgaaccttaccatattttgaagccaactcggaagcgcaagtggctctaccaccaataccctgacaca

SEQ ID NO: 80694 - DNA, 175 bp, Zea mays
gtggacgtgggggtggccggaccgcggttacgcatggacgactatgcgcaaggatgctcgtgggcgggcgggcggcggtgggccaatcccgtgggggcggcccgacagcagtggatgggcggctgcaggctcatggatgcgcgcgtgtggccgggcgcgtggtggcagaccaatg

SEQ ID NO: 80695 - DNA, 446 bp, Zea mays
  unsure (1)..(446): unsure at all n locations
tatgntatggattgcttgtgagtcagttctattaccttcggcctttcttgcagcttcctgacttccatggatagcgatgggtccctgatccgaaggtatcttcatgcaaagataggcaggatgaagaattgcttcgaaagcattgatggtgccacgaccaataattgcattgtaagggtattccatgtcaacaatgtcaaacacaacttgctcagttctagtgttgttgatgaacccgaatgtcactgacatggtgatcttgcccaatgctacaatctgtcttcctccgaagccacagagaggatgtgtagcatcatgaatcttatcttctggctcttgcatttgctgaacgccttacaaatatgatgtcaactgcactgcctgtgtaaccaagacattgtggaccagcaatcctttgataacacaagagatataccatggcatcg

SEQ ID NO: 80696 - DNA, 426 bp, Zea mays
  unsure (1)..(426): unsure at all n locations
acagatgcgggtctagatgagagccatagacaagacatacctcaggtctcggaagtagaaaatgatcttttgatttcaccttttactgatgacgaaattcgtaaggctctattccagatggagcataataaagctcctggtccggatggattccctgcggagttttaccaagtgttttggtctacagtaaaagatgatctagttgctatcttctaggactttcatagaggcgacctacctctttatagtctgaattttggcacgatcatacttttaccgaaatgtatggaggcggagacgattcaacaatatagacctatctggttacttaatgtaagttttaaaatctttacaaaggtgatgacatataggctctcttcngctgcttcgaaagtaatttctccgacccaaacagcttttatccct

SEQ ID NO: 80697 - DNA, 447 bp, Zea mays
  unsure (1)..(447): unsure at all n locations
tactaagcttagcatttaacactctnttttggaggtgtgcttgtagacttaattgtctccaagacatctagtacatttaccattcttttcctttntggggtcaccattggagccttttggatttttgctgcttcaatatttattgcaggacttaaaatttctgaggttttttccttagtcacatttttcgcttcttccattttttctgtcgatggtgcttcagccatctctgcaatttctggcaataagagtggccgttcagcttcagcggccgaatgagttcctccagtatactcatgcaccgaagctggttcaatatggcgtggtcggtgtgtgaagaccttcaacctttttccttttggttctggctcgctaggagcggttccagcttcttctttntcagaggttatgtttttccttttttgccttcgatgggatacaataatc

SEQ ID NO: 80698 - DNA, 454 bp, Zea mays
  unsure (1)..(454): unsure at all n locations
tcatctaacaggcactntaagtccggcttcggcgctattctgtttcattgcagcttcggnttcggtcagttgtgttttatcttcgatttgcattntgtagccttggcaattttccctgttgattcatttgtgtggtgacaggtacgatctcagttgattcgtttgtggcccatgctctttatgactctggcgctagctattcgtttgttttggagaattttgtgtcgcgagctggtctttcggtgcagaggttgggtcacccaattttggttagttctgctaatggctccattagtagctattctgtttgttaggggtgttccgtcattcttgctgatgaggtcttttcggccaatcttgttgtgatttccttgnggcattcgatgttatcttgggtatggattggttatcttagtatcacgcagttatatactggttctggaagacagtgtta

SEQ ID NO: 80699 - DNA, 469 bp, Zea mays
cttctgcaatgaagtctccatgctaagagataatactattgaatagcagaaatcaagacactaattctatattgttaccaaggtttttgaagctgcatttggcgtacaacatattacatatacccaaacactctatatgcaaaagttcttcctcatgatgtcattcatatgaaaacatattttcatcaacacatatcatgtgaaatccaactaaagttgttttggctacagaaagaactacatttacttgagcaacaactctttattacaaccaagaatgctagaactattatttccatgtgagaatagtagggggagatgacattggtgtagtcatcaaagtagttgctgaagattcccttacagaccttgtccccttatcatcactagcttcagttgcaggtctctccttagccttttgggctcgttgaaatacttccctctatatgtatcatatatcatatatata

SEQ ID NO: 80700 - DNA, 355 bp, Zea mays
gaccgagccgaagcggttagagcaacatataagtggcttgccatcactatcaacaatgaggatggcggcggcatatatttaaatatattcagaggaattaatgactctggcatcttcttcttcctctccaccgtgacctctgatgacccattcactctcaccgtcactgtctcaaggccaccgacgcctcgagggagctcgcattgacggaatcctggcatgggggcactagatgcgcctcccgctcacatcaatcaagggatgacggagtgtcatgactggcatggtcaatgttggccgggaagacagtataatgccatgctacgtttaaagagacatgacgaccaagcacgtg

SEQ ID NO: 80701 - DNA, 448 bp, Zea mays
  unsure (1)..(448): unsure at all n locations
agctcgtcaagctcatatcagagagaagactcttgcttatatggagcgaggtggtctcacagagaatgttgttacggacagagttctagtgttccggtttacagatgttggcaagcttcctccgcccgtgcttcaatttgttgaagtcaagtttgggtatacaccagataatctcatatacaagagccttgactttggtgttgatcttgactctagaatcgcattggttggtcccaacggggcagggaagagcactcttctgaagcttatgactggtgaccttgttccattagatggcatggttcggcgccacaatcacctgcgcattgcgcagtaccatcagcatctggcggagaagctggacctggacatgtcagccctggcttacatgatgaaggaataccctgngactgaagaagaaaagatgcgtagccgctgtggcaggttc

SEQ ID NO: 80702 - DNA, 467 bp, Zea mays
  unsure (1)..(467): unsure at all n locations
gcttatgaagactctccatcccaacgtgggccatttagcggtgctagagccaactcaagttagtcctagcacataagcaagtgtcaagtttagctctattaaaatcaactaagtatagctgaccctctaatactcccttaaatgctactgaatcatcacttcttctaaagacagtaacatctatatccgtaaaaagacaattgtagcccatttaacataattgagaaacagaaagcaagttggaatctaaagaatctacaagaaaaacattggaaatagaatggtcaggggatatagcaattttaccaagtcctttgaccaaaccttgatttccatccccgaatgtgatagctctttggggatcatggtttntctcatagaaggagaacatccttttctccattatgatatggtttgtgcacccgctatcgatgatccaacttgtgcccccggatgcataaacctac

SEQ ID NO: 80703 - DNA, 482 bp, Zea mays
  unsure (1)..(482): unsure at all n locations
actaagcttcgccccacgaccggccatggcactactgtgtgctttatgactactcccacagccacagtgacgagcgacgagaaggacggatagcagatgaacaacgattctctagctttagcgtctccttggtagccggtaaatttagcgttccttttaccggacattgttggacggctagaggaggccaacatccgttatatttactggacaggacgctntagcggtctttgttggacacagcctaattacctcaaatcacgtgttgcctttttcaccaatttatgacatctgttgatatgttttacgccaatttacgacatttattgatgtgttttgcggcaacctcatgcgtggaatttgccattatgaaatagatcgacgatttacgctaaaattcatacccatttacgctgtgttgntntggttcatggtttacgtttaaatcccgccgagccagaacttgcgcatgatcgaacgtg

SEQ ID NO: 80704 - DNA, 444 bp, Zea mays
  unsure (1)..(444): unsure at all n locations
tatctttctataatcctactgacttatcttcatttatttccgacgtctgagggcgctacgtgggagagtccgatcaatgctgcgaataacattcgaattcagggagccgcatatgcccgagttgatccaatcttatgtcgatccattctgatgaaggtttttcccctagcccacgaagggatggccttgcgaaataatgggcccaagacccttcgtgaggccttcttgccttctagtggacccgaggaatatttgtcccccacaagcccccaatctttgtgttgattttgaaataatcagcccaaagattccatgtccagcttgcggntttgaaatatgtctatcaagttgatgcttctaactctaagtgactcggtaaaaacgatcttctgttatcttctcttgacattattcaacgggttttgatttaatctttagaaatca

SEQ ID NO: 80705 - DNA, 444 bp, Zea mays
  unsure (1)..(444): unsure at all n locations
tcactgggtgtctagagactgatggtgtatggagattctctggtagtcatcagtcagataaacaaggagtgggattgttcaagtgattcaatgggaaaatactgcgccgtcgtccggaagctaaaagataaattcgagggtctggagtttcatcatatagaaagagatcagaacacggcggccgatgtactgtccaagctcggatccggtcggactcatgtcccgcccggggtcttcgtgcaagaaattctccagccgagcatctcgacggatcaaatagaagagtgcaacatcatatgtcaactcgagtcagactctgatgactggacgcaaccgattattaagtatataaagaatgaagaagaaccagatgacaagaactcggcagagcgcattgctagacaatcagctgactatacactcattgnggaggtattatacatg

SEQ ID NO: 80706 - DNA, 445 bp, Zea mays
  unsure (1)..(445): unsure at all n locations
ttataggatcacctattctttctcctctangtactctcaattggtatcagagccgttctcttcaagaaagggactaattgcccgaagagatggatcctaatggaaaggggatggtggtcaacgacaaggagaccatcttcaacaagccgagggacgacaaagcaaatgactccggctcgagtcaacagaagaaggaagggaagaagaagaggcggatcaagaagatcgtctactaagacgacagcgacgagtcctcttcttcccaaatgaatgacgacgactacgagaaaaagaaaacggtcaattcanacttttcttttgattattctcgtattccgccaagtacatatgctcatttaatcttcattccacttggtaaacctcctcactttgatggagatgactacggattttggagtcacaanatgcgtagtcacttgttctc

SEQ ID NO: 80707 - DNA, 450 bp, Zea mays
  unsure (1)..(450): unsure at all n locations
tctaattaaatcatgactgcgcctaagcagcgntattatgatagtgaaggtggntgtgctgctacttcccacttcccttgatgagcaacaagcacctgcattgagtaatgcaagagtgagatgaaacatctcagcaagcgaattgttttgacgagatatttaaaccacaaattgaattaatcaacattctaaaagaatcacaattaagatcagaaatacttgtagatatagaactcagtagtcccaatataaccaataccatctcatttcctcgaacaactgcaataggttgtataacacttccttgcgtcaacgatacctgcaaatatcacttcaatgtatgcaaaggaatgcaatgtgtaggtactctgtcttcatacctctaagggtataaaaccacatcatctacaaatatcacttcaatgaatgcatatgtcctctgccttcata

SEQ ID NO: 80708 - DNA, 444 bp, Zea mays
  unsure (1)..(444): unsure at all n locations
ctatacttgatctatgctgaccagtggcataccgactccgactacccgaaacattgtctgctgtgcataatgtgttccacgggtcacaattgaagaagtgtcttcgggttcccgatcgaaccattgaagtgacagatgttgtccttgaatcggacttgacatattctgagcaccttattcgagtcttggatcaaaaggacaggactacccgaagaaaaactctcaagttttataagatacagtgaaaccaacattccgaagatgaggctacatgggaaactcaagattttttagataagaatttcccaggctttttagcctcttgtaattngtaaagcatgtgtagctactggaataaaggagtaaattcccaagccacccctgcctcgtaccagatataaggaaataaaagtatgccgcgtttccttttccattacttaccct

SEQ ID NO: 80709 - DNA, 464 bp, Zea mays
  unsure (1)..(464): unsure at all n locations
tacttatcaaagcagcagcatttaccagcacatcttctgcagaccatacccgtaacatggccatttgcatgctggggactggacatgattggacccttcaagaaagctcatggaggatacactcacgtgctggttgccattgacaaatttactaaatggatagagtacaaacccattgtttctctgacttcatctaaggcagtggaattcatacaagatataatattcagatttggaataccgaatagcattataactgacttgggatccaatttcactagctcttaattctttgatttctgcgaacaaagaagcatccagatcaaatatgcgccagtagcacacccaagagccaacggtcaggtagaaagggctaatggaatgatattggaagcactcangaagaaagtcttcgacaagaatgaaaagttcacgggaaagtggatcaaagaagtgtcgtatat

SEQ ID NO: 80710 - DNA, 424 bp, Zea mays
  unsure (1)..(424): unsure at all n locations
ctcagctataagtctactgtatatggatgcggaattatattcatatctgttctgaagccgccgcaatcattgttttcttaccgagacatttcctgccttttctgcccatggtgctgcgtcaccctattttggcccaatgggtcgtgtatcaagttaggtccattanggacgcatcctatggttgcagcacgaccccaatacccttgtggtcgtcctcccatgtttataaaccccctagccgccaccaataacggcgggttttgtttagatcaagattagctctcgctacttgcttgcaagcgcgcgtgctaattcatccgcccgtcttcttgtcttcggaaccccaccatattgtagtttgatctttaaacctacattcagatctggtaattcagcacttgctctacttggtcttgctagatct

SEQ ID NO: 80711 - DNA, 480 bp, Zea mays
  unsure (1)..(480): unsure at all n locations
ctcagcttctaagggagaacacgtgatatgtctaacatctgttcatttcgaaagatatagaccttgtgcagcttgtcaagcaggtaaacaagtgggaggagcacatcacaacaagaatgtgatgaccacgtcaagacctctggagctgctgcatatggacctcttcggacccgtcgcctatctgagcataagaggaagtaagtatggtctagttattgttgatgactcttcccgcttcacttgggtgttctttttgcaggataagtctgaaacccaagggaccctcaagcgcttcctcaggagagctcanaatgagtttgagctcaaggtgaagaagataaggagcgacaacgggtccgaattcaagaatcttcaagtagaggagttccttgaggaggaggggatcaagcacgagttctccgctccctacacacctcagcataatggtgtggtagagaggaagaacaggacgctcattga

SEQ ID NO: 80712 - DNA, 464 bp, Zea mays
  unsure (1)..(464): unsure at all n locations
ttctctttcttctttggtagctccagatcgtcgaccttgtctaaccatgggtggntgagcgcggcggctgccgtcagcctcctgtttgggttgcatgtaagcaggccactgagcacttggaatccttccgtggacagcttcgtctcggggaacagatcgcgcaggtggttgttccgctgcatgtccagctccggcatcacctcggtggcgaatggcgtcgacgagaaccacggccacgtgctgtcgtcaggcacgccgagcacatcgaagatcgcgcagagctgcccgtcgtcgtgggatccctggaagagaggcctgccgttgttgacgatctccgccatgacacagccgagcgaccagacgtcaaccttggtgtcgtagtcgggctttcccagcagcatctcgggcgcctggtaccatatcgtgccggccggctcgtacgggagccgctcgtctgtggacat

SEQ ID NO: 80713 - DNA, 450 bp, Zea mays
acacattttatgactaaccaatggtcattttgagaaagacaggaattgtagcgcatgccaagccgggaagcaagttggcactcatcatccacacaagaacatcatgacaagtgacaagccactggagctcctacacatggatttattcggcccgatcgcttacataagcatcggcgggagtaagtactgtctagttattgtggatgattattctcgcttcacttgggtattctttttacaggaaaaatctcaaacccaagagaccttaaagggattcttgagacgggctcaaaatgagttcggcttaatgatcaagaaaataagaagcgacaacgggacggagttcaagaactctcaaattgaaggctttcttgaggaggagggcatcaagcatgagttctcttcttcctactcccctcaacaaaatggtgtggtagagaggaagaatcg

SEQ ID NO: 80714 - DNA, 148 bp, Zea mays
  unsure (1)..(148): unsure at all n locations
gactatcagctagctatcacaacccccagtcccgtgaataggaataacatcaaatttcttcagctaactatgtgcagatcgataacaggaccagntagaatggtaattcaggatgcctaatctattatgcagntcatgatttctaaat

SEQ ID NO: 80715 - DNA, 481 bp, Zea mays
ctaagcttgatgttcaaatcagaacttcagtgcaacttgtttatttcttgaacatcaatgcctcatctttagtgattgaatctaagtctagctcctcaaataataccctttgcaaacattgtgccaaatatcatgcttcttgttgtctaactaaccatgcaaggaagaaaagctcacatgtgaaggtcaaagaagtattgaaaagatgctctagcaatgatgggttaaagaaagttgaacccaagtacaagtccctaaagcccaacaatggaagaagggggcttgggttcaactcatccaaggaaaaccctatcacagtgcataaggggtggagatcccccaagttcatagagggaaccaccctatatgatgctttggggaggattcactcctcaaatgacaagtcacctcaagtaaaggtaaacttgagttccacaaagagtaagatgattgaagtgggatcctcaagtggacaaaaatt

SEQ ID NO: 80716 - DNA, 464 bp, Zea mays
  unsure (1)..(464): unsure at all n locations
gccctcggacccgaccggacttgaccggatgcccgatatcaacctcaccggacttcggtcttccgccgccgcgcgtggaccgagctatccagtgagtctccgcccgattcctttcactcatgtcttctctggcatcccgtggacctccctgacctatttgattgaactatctcgccgtgaccaggccggtctcctcgccgncgacgagcatccccgcctgcgcgcgtggaccgaccaactccggccatctccgacggtgttccgcacaccgttgtgatccccgcgacctgcccttcaccctcgaccacttcaccggaacagtctcgccgccggtaagcccctacgcccttttcttcgccgcggctactagttgaggtagaagaaggacctcgggttaggttttgtagaacccgaggggttttcttgaatgtcagcgactcatgtgaatagtaacctaatgactg

SEQ ID NO: 80717 - DNA, 435 bp, Zea mays
  unsure (1)..(435): unsure at all n locations
tgcacttcctcacaccaaactggctttcaagttctctggaccctttgaaatcattcgtcaaatcaacccaatggcctatgaactggctctaccatccggcagtggaattcaccctatgttttacgtttcacaactcaaaccaatggtggttcttgggtgcaagtcagtccttccttccccgatctttcactaggattacaaattccagaggctatcctagactccaaactgacctggcatgggaacaaagtggttcagcaagttttgattcagtggtcaggatggtcgacaactctagctaccttggaagtcactcggtctatggactanggagcagcagtggcatgtctattgtttgtattggtatggtcccctgacctagttccctgactagaccagtctcggtcttgatcacctcaagtagaacctgatctg

SEQ ID NO: 80718 - DNA, 467 bp, Zea mays
acttccaaatcggatatgatatgtattctgggtggctaaaacgaaccagagatgtctttggtgatggtggatttcgaggtgaccaaaacgtggtagaactcaaaactctaaaagaataaactaagaccagcaactcgacacaaccgatgcaaccaaaaactcaacaagccctaactaagtagtactagtaaatgctcaatggtttataggattgcggtaaaactaatctactatttttttggctttttctggactataggagataagaaaacagcgaagaaaagtaaatctctcaccgatgaaccttgctctgattaccaactgatgtgcacccgttgggtgattgcccgatctttcgatgagagggtgtggaataactcgattgtcggatgagacgacgttcactggccgactacagcctgtcaaagacgctgcgccttagcaaccgatacaccacctcctatggg

SEQ ID NO: 80719 - DNA, 378 bp, Zea mays
  unsure (1)..(378): unsure at all n locations
atacagagctggagaagatactgtatgctgtcttgatggccttcacgaagcttctgcactatttccaagcttacaacataattggtccttcttcgcaacctctgaaggatattatgaagaaccgagaagctactggaaggattggaaaatgggctgcagagctcaatgcaatttgtattgaatatgttcatagatcttcgattcagtcacaggcactggcagactttattgctgattggacgccaggggctcangaggaggaaacaaataaagacaacgaagcctggacagtgttttgtgatggatcttggtgaaccttcggagcangagcggctgctgtgttggtttcaccttccaaagtcaaaacttggtatgcag

SEQ ID NO: 80720 - DNA, 350 bp, Zea mays
acttacgttctattcgaataagatagaccttgtgcagcttgtcaagcaggtaaacaagtgggaggagcgcctcacagcaagaatgtgatgacaacttcaagacccctggagctgctgcatatggaccttttcggacccgtcgcctatctgagcataagagggagtaagtatggtctaattattgttgatgacttttcccgcttcacttgggtattctttttgcaggataagtctgaaacccaagggaccctcaagcgcttcctcaggagagctcaaaatgagtctgagctcaaggtgaagaagataaggagcgacaacgggtccgagttcaagaaccttcaagtggagga

SEQ ID NO: 80721 - DNA, 396 bp, Zea mays
ttctaaaattctagaggtatagggttaagcccttcttaatattacataattccttggttgaactaaaaatcataacactatttttattaaatactgcagatatttacgaccctaacaaaattggtctcataattttagcatttttatggaatcttctatggatttcctaattctggtagaacaggaaaaaggaaacatatcaacagtggtgggcccaatctggcccgagacggcccacgacaggtgaaaatgtgcccgcgcgcgcccgcggtgtctggtttacacatagggccctaacgattctaaaacccaacaaagagtccccacacttatttgtttagtcactaacaaatacagataggcccttcttctttttcttcacaactcacggtcctc

SEQ ID NO: 80722 - DNA, 477 bp, Zea mays
  unsure (1)..(477): unsure at all n locations
actcagcttatcttgagatttaatgtcttgaatagcttcgtttgtgcaatatcgaagatatatcgatcttaagagctcatggctacagataataccttcgaagttacaaaaaagtctgttcctaagggagcgcagcgtaagttttctgctcaaaagtcgttccaaagggaatgcagagcttacagcgaataataaacgtgattccgctgaagtataaggcgaagaagctcctataggaggcttacagcgaanaataaacgctgattccgctgaagtaaaaagcggagaagctcctaatggaggcttacaacgaaaagtcagcgctgctacaccgaaaaataagtggtgaggccaaataataaacggcaaaaagattgtgtgctctactgatgaatgtgtgtgtaccttcggcgcacatatcantttgcatgtcattacatcattacatcatgtgcatagcataacatcatacatcat

SEQ ID NO: 80723 - DNA, 336 bp, Zea mays
ataaataaaactacatctccattaggtcatacttaatcataaaaattagaatgtgccgacattaaatgaaaccattttatttagaccgagaattattctatgaacattttgcaatttgaatcactaaattttgagttcatatgcaaaaggtatgaaataaacaaggttgggaattcaaaatatgaaattaagtctaattctgtgaatatttaaaaagccagggttcaatctgcaagagtacaggggcctacgcgcgaaaaccagggacggtgggttgatttctaataaaccgagggtctctttaataaaactaccgctcgaaggggtatcgggtga

SEQ ID NO: 80724 - DNA, 324 bp, Zea mays
  unsure (1)..(324): unsure at all n locations
aatgaatcatagacgaatcatagacgaattatattatatttacttcgcatatcgcatcatttaatacaataatgcctctgccttggcaaatgttgaattccgaatgatgcgactgcaatttctagaatccgtgaacagtaaaggaatactgctcactatgtatatgcacaggacgcagcctgtgaggaattacaagtatgccccttgtgaaagtntacaacattgactcagacctttatggactagaaggtcattctatctttaagttggtttgcaatacccgaagcttcgagaaaaggaaccttcggccatcttatataaaca

SEQ ID NO: 80725 - DNA, 422 bp, Zea mays
acgcgatactcccttcattgttgagaccttcaagtagacatagtctccatccaggaaatataatggcattcgccgtttgtctgcataactcttctgacgagcttgtgctttcttcatattatgaataatttcctgaaccttatcctcggcctccttcaccatatcaggcctaaagaagcacctttccccaggttcagaccaatttagcagagtacgacatcgtcgtccatataaagcttcgaagggtgccatcttgatacttgatagctattattatatgaaaagtccaccaaaggcaaacattcatcccatttctatgagaagtccagaacacatgcccgcagcatatcttcaagtatttggttcactctctcagtctgtccactggtttgaggatgataggccgaactgtggagtaactt

SEQ ID NO: 80726 - DNA, 425 bp, Zea mays
cagcatctatatttgcttcttcttgctgagcgcctgtcgtctagtcagcaattaagtctgctaacgcctgcgactggatcgaggatctatgcacataatcaatgctgaattcattaagttccgcagcccactttccaatccttccagtagtttctctgttcctcataatatctttcaaaggctgagatgaagggacaattatatggagtgcttgaaagtagagccgaagcttcctggatgccattaacacagcatacaacaccttctgcaattctgtataatctttctttgataagcttagaacttccgagataaagtatactggggcttgctttttgatctgtacttctaatttctactgcacaagcgccgcactcactgaagagtgcgaagctgccacatataatagtaatggagcccctggc

SEQ ID NO: 80727 - DNA, 478 bp, Zea mays
  unsure (1)..(478): unsure at all n locations
ccttgatactaagcttgatggcgacaggcgatccgtaaactggttttatctctgagagcgatggttntttaggcctgatatggtaaaagaaacagaagagagggttcaacgaataatacacaatttgaaagaagcccaagctcgccaaaagagttatgcagacaagcgacacaaacccttgtactttcaagttgaagattatgtctacctgaaagtctcaccaatgaagggtgtatcacgtttcggggtaaaagggaagcttgcaccccggtatattggtcctttccctgttcttgaacaatgtggaccagttgcataccgactccaattacccaaaacattgtcttgggtgcacaatgtgttccacatgtcccaattaaagaagtggtctctggttccgaccgaaccattgaagtaacggatgttggcttagaactagactcgacatattcagaacatcctattcgaatcttggatc

SEQ ID NO: 80728 - DNA, 409 bp, Zea mays
  unsure (1)..(409): unsure at all n locations
tcatatgaaanatgaaacttcaggtatggttgtttcactggggctgnttctggtagcctgacagaaatgagcgggtctgttcactgataggcttcatcaagtaaatggccgaattggctctcccagatatggggactttcgtagagggataaaagttcttactttcagcagaatttcatgatttttgggtgagtagtttgtgagatatcgaatttttaaagttaattatgctgctgtctaaaacagattcagtcagntatcttgttagatgttttagaacttatagatggcagaatttaattatccatcgaatatcgaagttgtagaatactttgtgtagatactcatggagtatgtgtttgatatcaccactgttataattttaaagatacaaaattaacaaacaaca

SEQ ID NO: 80729 - DNA, 434 bp, Zea mays
  unsure (1)..(434): unsure at all n locations
aagaagaggtcgcgagtaccctaatcatgttacaaactctctaatgcgctttatgggctcaagcaagccccaagagcatggtatgaatgccttagagatttccttatcactaatggattcaaagtcggaaaggccgatcctacactctttaccaaaacacttgaaaatgatttgtttgtatgccaaatttatgttgatgatattatatttgggtctactaacgaatctacatgtgaagagtttagtaggatcatgacacanaaattcgagatgtctatgatgggggagttgaaatatntcttatgatttcaagtgaagcaactccaagagggcaccttcctcagccaaatgaagtatactccagatattctaagcaatgttgggatgaaggatgccaaacccatcaagacacccatgggaaccaatgggcatct

SEQ ID NO: 80730 - DNA, 485 bp, Zea mays
  unsure (1)..(485): unsure at all n locations
actcagcttctaagggggaacacattntatgactaaccaatgttcattttgagaaagacaggatttgtagcgcatgccaagccgggaagcaagttggtgcccatcatccacacaagaacatcatgacgaccgacgggctgcttgagctactccacatggatctattcggcccgattgcttacataagcatcggcgggagtaagtattggcttgtaatagtggatgattattctcgcttcacttgggtattctttttacaggaaaaatctcaaacccaagagaccttaaaaggattcttgagacgggctcaaaatgagttcggcttaaggatcaagataataagaagcgacaacgggacggagttcaagaactctcanatcgaaggctttcttgaggaggagggaatcaagcatgagttctcttctccctacaccccacaacaaaatggtgtagtggagaggaagaatcgaactctattggatatg

SEQ ID NO: 80731 - DNA, 346 bp, Zea mays
gttcgccgaaagatcacaaacggtatgtatgtaagtttcatgcatcatatagaaataaatcataataattcacatattcgatttgaagttacacacatcaaatgttatagcttcgttgcaataaaagagcacaatgatcattctagtctctcttacgtcgaccatttaagaatgtttttacaacaagtgttaatcttctttcaggattttttctacaacttcatttagtgattcattaacgacttcgtccacaatagattcagccatatttatgacctccagtgcttccttcgcttctggatcggccaggagatcgagcgtgtccggcagcggagataattcagct

SEQ ID NO: 80732 - DNA, 383 bp, Zea mays
tattaaaacgataaaacgtcggaacgctcatggatgttatttagacttttaaatgttaaaactttggttaaacgtagttctaaacaacataggaaaaataccaatatatcataatttcagacaataatatgaagttaaataccaaaacagagagtttaatggcttaccaaaacttcacccatgagctggattgaaccccaaatgtaactaatagaccgggcccaaaaatagctaatggtctaaaatgcataaaacactgcgttttacagtttataacgccaaaacgctaaaacgtgatttcaacctctaattagagttttgacgtttaaacgtagtgtaaacatcgtttaaacgtagttctaataacactggccgtcttactt

SEQ ID NO: 80733 - DNA, 349 bp, Zea mays
acagtgcaactagcaatggatgtcgtggggacttcacacctactcggatgattatatagaactgcaaggaagaacgcgaatcgccatgatttttacaccaggcggacacccgcttgcactctctgcgcggtggaccgcagggacaaacagtgactctgcaaggagggaccactacgcgctgggaaactgaatcgcttctcgacaacgagctcagggaatgtgtattttggaccttcagctccccgaagcttaagagactatgttcacggatcaagctcgatacgaagaacgatctatcaccgcgagaggggctactgtcgggtctatgcttcgtcgccgaatgtcttct

SEQ ID NO: 80734 - DNA, 456 bp, Zea mays
tcattccatttgaactctctacctttctccagtagatatgttaggggtttcactaacttggaaaaaccttcaataaatcttctatagtatccagccaatccaagaaaacttctgatcttggacgcatcctttggttgcttcctgtcggggaccataattaggggtaccctcaagacgcctaattctcagctggtaacccccatcagcataaagctgcagaggcctgatgggtgcgattaagtcagggatcagtccgtacgagcgactcgatcacgcctcgcctgagcctatcctcgggcaagggcagccgaccccgatgggtttccgtctcgcccgatgtccccctttttaacggcggacacatctccggctcgcccgaggccttgccttcgctaagaagcaaccctgactaaatcgccgcaccaaccgaccaagttgcaggagcatttaacgcga

SEQ ID NO: 80735 - DNA, 350 bp, Zea mays
ttatcaactgtgagctcggacgggactccgaagcggcaaacaatgttttgccagaagaatttctgggcagtcttggatgttatcgtggatacagccatcacctcgatcccattggttaaatactcgacggcgacgaaggtgaacttgaggttcccctgagccgtgggtatgggcccgacaatgtccaggccccagcgctgaagaggccatgtgtgggcgattagctttgtgaattgcaaagggcttcccgagcgtggagaaaacttctggcaggcttcgcatgaccttgtgacccgatttgcggcgcagatcatggcgagccagtagataccttgacggatcacctttgc

SEQ ID NO: 80736 - DNA, 448 bp, Zea mays
  unsure (1)..(448): unsure at all n locations
tcatttatatttgcatccttgattcaatgcgaaatcagtacaacctgccaggctgctgctattaaaaagaaagaagattctagtgagagctcacaaactgactcacagtcagattcagaagattcagaagtaggtggcattattttcccactcatgttattttttgatcatgcagntattaattctgctctcttgtctttacagcctgaaaaacctactgtccctgcgaaaaggcctctagcaacaaataaaaagaatgaacaagtactctcttataaaatcttattttatttacttgtactccccctgccagtttatttaggtgtattttgattttgattgaagtcaactattcacagtcattgccacttcatttagtgtacaaagaagtattttgtatgccaatgttttaacggcctgatctgattctgtctttcatatgaaatac

SEQ ID NO: 80737 - DNA, 415 bp, Zea mays
  unsure (1)..(415): unsure at all n locations
gcaacagaatgagataatgcgcaataatacagctagcaaaaaaatgttatagctcgctccataaccatttggctcgacagaacgacaattcatcagtggcctcaatcaagaagactgaccgacctttgccgttttgctgggacgtataagggcacgaaagacgcaggtgatgagtgccaaaggaagacagaagaaggcgcatggcgtgagaatcatatccacgtctgttgtctgtctgtgaaacgccaggactggtatgaacgtaagacagcaacatgtaaggaaaatagaccccgggccatttggctaattaagttttggtgtttgatgaacaacacaatccgtgaactaataagttttctagtggttgtgtttgtagntcacaggatgcgaagagaattggaccaagtcaatg

SEQ ID NO: 80738 - DNA, 487 bp, Zea mays
  unsure (1)..(487): unsure at all n locations
ttaaatactaagcttaaatggctaagcgagtcctgtgatggcaccatatgataattacctgctcatttgtaaagctataggattatacatagccaacaaattcgggcctagtaaaaaatcggcaaaatatgccctagtcatccagctcaataatcttcacaaccgatgaatctcccactttcgggcaaacgacgtgatgtggattgggggaggaaaccaggaaattgacaccacatagttgaacctgagtgaaatggactcaatggactatggggaaggtggaaccagaggaggtcgatttccagtcgaggtgaccgaaggagatcgccctctctgggagatctattattcttcaatgtctcctattacaaactatggtgctntatatagctagcacctctttctcttaaggaaaccttacttaaggaaatatactaacaggaaaataaactagatcatatctcttaattgagggaaactctcctca

SEQ ID NO: 80739 - DNA, 468 bp, Zea mays
ctaagctattcaaggttagatgaacgaaattgataaatctatgttttaattgatgctttgaatgagaagaatagattgttagaaaagcaagaggatcttttatatgaagagcatgataagtttgttagtgcacaaaattctcttgctctagaaggtaaaagaaatgaaatgctttcatgtgaattgtctacatgccatgaatctatttctagcctaaagagtattaatgatgacttaaatgctaagttagaagtagctaacaaatctagctcatgtattgaacatgtagtaatttgtaataggtgtaaggactttaatattgatgcctgtagtgaacacttaatttccattgcaaaattagatggtgaagtggctagtcttaatgcccaacttaagactagcaagaatgattttaataaactataattttgcagggatgcctacaccattgctagacacccctcaatt

SEQ ID NO: 80740 - DNA, 463 bp, Zea mays
tctcttgccttgctacttttgtctacatgatcagaaattacttaggaatcaggttttagaatggcccttcttattcccattggccttaacttccgaagccccaacataagtgcttcgtacttatcaatattatttgtgcaactgaaatcaagcttgactgcataacatgttttgacttttgaaggtgccactatgaccgcagccgctcctgcaccgaatgttccccaagaaccatcgcagaacactgtccaagtttcgacatctttgtttacttcttcgtgagcccctggcgtccaatcagcgatgaagtatgctaatgcttatgactggattgaggatctatgcacataatcaatggtgaattcgttaagttctgcagtccatttcccaatccttccagtagattctctattcctcataatatccttcagaggctgtgatgaaggaacaattatgtgatatg

SEQ ID NO: 80741 - DNA, 382 bp, Zea mays
  unsure (1)..(382): unsure at all n locations
gcgaacccctcattntcggcccagacgcatggccgaacagccatgccgcccgtcgccttgcgcctccgtgccgttttccctccgttccgccatgcccttcacccaagacatacatattaccttcggtgtctttccacacgcttggacttagcttatttccggtgccatgcccgaacctcggttttccgcccctgcgccatgggcgaacccctcgttttcggcccaaacgcaaggccgaacagccatgccgccccgtcgccatcctgcccttcacccaaggcatacgtcgcagcttctgtgtccttgcacacgcttggacttggctttttgtctggtcgtgcacgaacccacggcggtcttcggccacgctgcgccttggctg

SEQ ID NO: 80742 - DNA, 362 bp, Zea mays
  unsure (1)..(362): unsure at all n locations
tgcccttgaccacctccttgacgaaataatatttgcactgaccgctacgcttataataatatttgcactgaccgctacatttacgatctgttcacatccttcgntaactgaaatgaagaaaacatgtgggttcacaacattggtaccattatataaaaacttgagtgccatttataataacaacacttatatattaaacaactttgatagagaaaatctgggaaatcgacaaccagacaatgtatgctatatgaataaaaaacgctagtggacgataacacaagatgatagatatcaatagactattcatggtatttatgacattaaagaatactatgaaggagtgtatatataactgcaga

SEQ ID NO: 80743 - DNA, 246 bp, Zea mays
catgtccatgcagatctgacgtgacgggccgtacacaaacacgctcatagccgagccaacaaagggcgtgcctccctctacacgcgcgggcaatccgcgaaatgatgcggaggctggcgtagaggcgctctgatccgtccagcaatcaatatgtgtagatgcatcggtgacttctttactcaccaccgtggccgcgagaatggttcatgcgagacgtctgtgctttgtatggttctggtagggacg

SEQ ID NO: 80744 - DNA, 320 bp, Zea mays
  unsure (1)..(320): unsure at all n locations
tgatttaatgacgactgacatgtacataataataacgcaacatactcaaatactgatataatgacagctgaatgaatcagttaataaccaaaattaaatccacaaagcatgatcataccaccctacacctttctagttcgcatatagacgtggtaccgacatggacaatacttgactgaacttaaacctaacctatanggatatggtcgcgtgatagcacgaccatcgtgacccaaattttatagtaatgggacttcgttatatactcgctttgaacattttataaactcttacgttcttgcgtgattcgttactgaagt

SEQ ID NO: 80745 - DNA, 281 bp, Zea mays
cttgcgtatgacatcacaagtgcctacagagccctatgaaattggcatttgagccacagatccaagtgcttcgcacaggacctactgtacaggtttttgctggaacgccttcatatactgtggagaagctgcctcacaagattggtgaatatatgcgcgctgacaatgactttcgtcaaattatggaggatgcccacatgttctctcagataaccagcggcctccgagggaggatccgcccgatgaatgacacggatattcactggacacagaatgacgac

SEQ ID NO: 80746 - DNA, 75 bp, Zea mays
gctccatgttctctagaagcatggacactccgttaaatggagaccacctggttaacttaagcctttggtcacacc

SEQ ID NO: 80747 - DNA, 455 bp, Zea mays
  unsure (1)..(455): unsure at all n locations
aatacagtttcatcagccttgtcacaaagaatggatctctctttgcgaagcatggatatctttctttacgaagcatggatctttttctttacgaagcatgaaaataagggaaggtgtcttttcgtcgaaagctcaaaaacggtatttatgtaagtttcatgcatcgtaaaaaaataaattacaataatttacatatttgattcanagttacacacatcatatattacagtcttgttacaataaaagcacaatgtccattctagtgctcatacatcgaccatttcaaaatgtttttacaataagtgttattcctctgtaagaactttctctgcaacttcgtttagtaatttgntaacgacttcgtcgataatagattcagccatgtttatgatctctagcgcttccttcttttttggatcagctaggggatcgtactgttccagcggcggagatag

SEQ ID NO: 80748 - DNA, 368 bp, Zea mays
  unsure (1)..(368): unsure at all n locations
tggacgtgaagagtgccttcctcaatgatccaatcaaggaagaggtctatgttgagcaacctcccggctttgaagatagtgaatatcctaaccatgtctataagctctctaaggcgctttatgggctcaagcaagccccaagagcatggtatgaatgccttagagattntcttattgctaatggcttcaaagtcggaaaggccgatcctacactctttactaaaactcttgaaaatgacttgtttgtatgccaaatttatgttgatgatattatatttgggtctactaacgagtctacatgtgaagagtttagtaggattatgacacagaaattcgagatgtctatgatgggggagttgaagtatttc

SEQ ID NO: 80749 - DNA, 445 bp, Zea mays
tggagaagcagaagtccctgaaatcctggctatcaaactgtttgcccgtgtcaactgtgagctcggacgggactccgaatcggcaaacaatgttttgccagaagaatttctgggcagtcttcgatgttattgtggatactgcccttgcctcgatccacttggtaaaatactcgacggcgacgaaggtgaacttgaggttcccttgggccgtgggtagtggcccgacaatgtccatgccccatcgctgaatgggccacgtgtgggcgatcagctttgtgaattgcgaagggttgcccgaacggtggggaacttctggcaggcttcgcacgacctcgtgactcgattcgcggcgcagatcatagcgggccagtagaagccttgacggatcaccttggcatcgatggccctatgccatgcgtgagagccgcaagttccgctgtggact

SEQ ID NO: 80750 - DNA, 416 bp, Zea mays
  unsure (1)..(416): unsure at all n locations
tataattgccttcggggtaaattgatggagatagacttcgaatattttcaacacctctaccacgaagcttgctaagggaaatcgcagtccaactttcaaaaagcttcggtacactacggcctcattctcttcagggtgtgggcaagttttttccccttcgtcggccctcacaatggacaaatcccagaaataccttcctctcatgttgacaagatgattctctttgatagttgatttaccatanactgaatggcttggtcgccaaggacgatcttcggagtcttcaccaccactgtccacatcatatctgtcactgtcaccagtatcttcagacaaaccttccagaatctccttggtaatttcttctgtgttggtctttgacatcgctatgagaaaccccaagtttttctcttcgt

SEQ ID NO: 80751 - DNA, 469 bp, Zea mays
ctaagcttctcagaatctgagggaactgtgaacctcgatcagactcgatcttctttggtactccgtggtaacacacaatccgagctatgtataactctggcagctgagagcctttataagtagtcttgaccataatgaaatgagctactgtagtcaatctatccacgatcaccaatatagaatcatatcctttcggggtacgaggcaatccagtaatgaaatccaggccaatttcttcccacttccattcgggtatcttcaacgagtgcaataatccagctggcctttgatgttcagctatgactctttatttgacacacatcacacatagccacatgtgcagccacatctctcttcaacccataccaccagtacttctgcttcaaatcttgatacatcaaatacatgatatatgtcggagcattggtcagcctgaatgacatcaccaagtactcgtaaagcccatatc

SEQ ID NO: 80752 - DNA, 210 bp, Zea mays
gggcactccgatggcgtggcgccggcggacttgaccggacccgggtgagcgcgcgcctgttgggcatctctgcgtgccgaccaggtcgtcacgtgtgccgtgcgttctgccaagttctgggcgtgtggcgtcatcgacctgtctcgcttggtcatgcacaaactttctctcctacactacattttggtggggcatggatttgctatggtg

SEQ ID NO: 80753 - DNA, 477 bp, Zea mays
  unsure (1)..(477): unsure at all n locations
tcagctncatctatgtgatggatagattttgagtcatttcttttgtcttcngcccttcttgcagcttcctgacttccatggatagcaatgggtccctgatccgaacgtatcttcatgcaaagataggcacgatgaaggattgcttcgaacgcatagagggtaccacgaccaataattgcattgtaagggtattccatgtcaacaatatcaaacacaacttgctcagttctagtgttgctgatgaacccgaaggtcactgacatggtgatcttgcccaatgctacaatctgccttcctccgaagccacagagaggatgtgtagcatcatgaatcttatcttctggctcttgcatttgtctgaaggccttatcaaatatgatgtcagctgcactacctgtgtcaaccaagacattgtggaccagaaatcctttgataacacaagagattaccatggcatcgttgtgtgggtaatctttg

SEQ ID NO: 80754 - DNA, 135 bp, Zea mays
gcccaaccgctgcctatgtggttaatagattgagatcaagatcgcactgtttaatggcctcatctactgagctgctcgaaggaatacagctgatcatctatctcagccgtctgaacactaccgactaatctgctt

SEQ ID NO: 80755 - DNA, 470 bp, Zea mays
  unsure (1)..(470): unsure at all n locations
actcacttcaatacatgnatctaggtatatgttcttttcttcttagcttagttagtagatagggttggtaccttggttgcataactccttttgtggtatggacaacaacactcaggcaaaactatagttgcacctaaggtagtttggttctttgcaaggttttcactataaaaaaaatagaagccatggattatnannttaaattgctctccctcttaagcgtcatcattccctacaagattgtctttgttatgcatatgtttaacaagttgctagttggtttaaagagagcctaaagtaaagtagagcaagtaatcactttcgcatatctaaacatcttaactctagttattattgtaaattctcgtagaatatatntatatgctattaaccctcccnctctanactatttggtcctattagtctactcgtctacagaggcatgatgagtgagccttgcagcatgttgc

SEQ ID NO: 80756 - DNA, 462 bp, Zea mays
  unsure (1)..(462): unsure at all n locations
ctcaactggcacaccttgccgatttgtagtcaatacattcgatgcatcataagtcttaaatgaaatgctatgctcattcgatgcattaagaatcttcttcttatgcaacttatcacgggttggttgcctagaactagatgtctcacccttatacataaaagcatgattagggccagagtgagacttcttagaatgaattttcctgattttgttctcaggatagccggcagggtacaaaatgtagccctcgttatcctgaggcatgggagccttgcccttaacaaagttagacaagttcttaggaggggcattaattttgacattgtctcccctttggaagccaatgccatccttaatgtcagggcgtcttccattataaagcatgctacgagcaaacttaaatttctcattntctaagttgtgctcggcaattctagcatctagtttagctatatgatcatt

SEQ ID NO: 80757 - DNA, 462 bp, Zea mays
tcaagtgtagtcgatggaccgacgtgggcatgtactttatggacaaataacggacgaccgatcatcgtccacaggcccaccagctgcatgcgctgttcacgcaagcagacgacggtggacgcacaggattttgggtgtctaaagggtatttttacaaaaaaaaagttgtagatccgtctctctacgtttttttgcggctcgtaacctaagtagtaataaacgtctcacttctattgtatttaattattttgtctgttttatcgatcttatgttgtagaaacgtatttacttctgtatttattggtacactatatttatagacactaaattgtataataaagtttattaattctcttgtggtgtcgcgctttgaccgccgataggtgtgcgcttggctcttgctacgtggtagccgccttaccaggttaaggcgagatgtatgctaagatggttacgggctac

SEQ ID NO: 80758 - DNA, 413 bp, Zea mays
  unsure (1)..(413): unsure at all n locations
ctgagcaaaatgaatagcttcngttgacgatgcagtatatcaacttcgactatgggtcaaattttggtagcaaaacagtgcaatagcaatgaatgttgtggtaacttcacacctcctcgtctggttatatagtgccgcangtgggaaggtaaactgtcaactctttcgcactggacaaacagccgcccgcacccactgaacggtggaccatagagcccgagaaggtgaatcgctaggacgcatgtaactgctgcatggtggggccacctcgcgctcagattattttaatcgtttctcgacaacgagctcatggaaggtgtttttcggatcttcgtcatcccgaagcctaagagtctttntcacatatcaagctcgtatctatcaccgcgaangggctactgttggtggtatgc

SEQ ID NO: 80759 - DNA, 444 bp, Zea mays
  unsure (1)..(444): unsure at all n locations
ttgaatgaagatgagaaagaacctctctaagagaagtttattccgaagaagaataaagtatcatctccgaagcgaatagcatccgacgaagaagagactcccgcatcacgctctgccactgacgtggaagagattttgaaggtaatgactgaatccctgcctgtgaagctaagtccattagggcctcgactgacgaagttttttcagaaggaaaaggagcccgaaaaaacgaatgaaacaactaaaacaaagagacaaagaatcatcgcagtgacagaagtcattgacaagacaccaccgagagcctcagctcggaaggtaccagcggttgaggaaataacaaatattgaagtcgcaccttcggagatcgcgactaccgaagctacctcaaccgaagatntgaacttggaaaccacaatcgaacatatcgacaaaatactgaca

SEQ ID NO: 80760 - DNA, 448 bp, Zea mays
  unsure (1)..(448): unsure at all n locations
acatgtgctaagcggcgatgccacagccagcccatgctagtcttagccattaagcatgcatctagaccgacctcttcttttgcaaaatcaactaagtaaagtttgccgtctaatacacccttaaaagctagtgaaccatcacttcttctaaagacagacacatctacattcgtaaatagacagttataccccatgttgcataattgactaacagatagcaaattatatccaagagactctactaaaaacacatttgaaatagagtgctcattagaaattgcaattntacctaacccttttaccttgccttgattcccatcaccgaatataattgaatcttgggaatccttattcttgacgtaagaggtgaacatcttcttctcccccgtcatatggtttgtgcatccgctgtcgataatccagcttgataccccggatgcataaacct

SEQ ID NO: 80761 - DNA, 476 bp, Zea mays
  unsure (1)..(476): unsure at all n locations
tactaagctgtcaagcatatttggtacccaccgctagatgggtccatcacggntagtcaacanagatctatgaacccaagagtcctttgtgttagcactaggtaagctcattacctttctagcacaagttgcaatnttgggttgcctagttacatgaatatcaattgacaagttaggagtagaattgttaccagtgggacaatccttgcattgatgtcccttctttcggcatgtgtagcatagtcttttttcaagttttgaagctttcttctttccttgtttgttgcttgctacatggttagtaaaaactntcttttctaaccctatgcctttttgtttaaatggggacaagatctaagtaagtgtcccttcttagagcactttaaacaaagtctatcatccttgggtaataatcaagccattttaatgtanggacatgacctaatcaagtgtccctcttcaaagcattcactaca

SEQ ID NO: 80762 - DNA, 389 bp, Zea mays
  unsure (1)..(389): unsure at all n locations
tatcattgatcaaccccagtcagactctgatgactggaggccaccgattattaaatatataaagaatgaagaagagcccgatgactagaactcggcagagcgcattgccagacaatcaggtcactatacactcattggggaggtattatacacgatgggcgcgtcaagcgtcctcatgaagtgcgtactcccgtccaccgggaagcaacttctggaggaagtccatgcatggcaatgtggagtacacgcagcatctagaacattagtcgggaaggttntcatgtcatgattctattggccgacggcgaagaatgatgcaancgagttagttcagagatgcgaagcttgccaatacctggtcgagcaacagcacatgccagcgcagcagc

SEQ ID NO: 80763 - DNA, 480 bp, Zea mays
  unsure (1)..(480): unsure at all n locations
tactaagctgtctgcacattgtattatgagcaaagtctctctttttcacatttaaagtattccggtgtcttaggcattntctttggnttggtntattggttatatttcttctctttaaatgtttgagagccaataccattcccatccaatttcatgaaaatgttaatgattaattcactttggaggtattgcactttggtgaattagctcttgatttctaccacttctaattcttttctaagtttctcatttgtttcttggtttgatcaatctcatttagtgcctttgcttttagtttctttctctagtctttcaaccaaatcatcgcatgatgttgctatatcaatattaacaatttggttagcaacatcatgtgttttactagacaagagctcataagcaataacaagattatcatgattaatctcaacacaaagtcttcttttaaagagataaatctagtgttgagctcctcatgta

SEQ ID NO: 80764 - DNA, 460 bp, Zea mays
  unsure (1)..(460): unsure at all n locations
ctaacgcgaaggccatgctcagcaaagctgattgtccctgttagatgtgccctagaaagcagaccatgtttagttcccttaattatgtggcatatatcatgattgagccagagctaacagaccagtctgaagggctggcttttatctaagcggaacttccaaaaccaataatgtagagctgaaaaatgggtcagcaacacaaccaaggatgctttattattcctgaaactgtgcgaaatgcgaaaccacaccacctatgtagttttacgcatcattctcccttcaacttttctagtctagctgttggtctgagaaaaaaacataatgtgagccagaacatgtaccagtgaagtgcatacggcatgggaaagaagaaagaatatgctntttcactcccccttctggangtctttgtgcataatctatgaataacataaagaaacatattccttctgtgaaa

SEQ ID NO: 80765 - DNA, 477 bp, Zea mays
  unsure (1)..(477): unsure at all n locations
ctcagcttanccacagggctgccactcttgagccgctgtattccaatcangatgtcctttctcttatggaggcccgaagccagaagacgatggccaccagtccaacgcctccggaggacgacttggatcaagaaatccaaaacttggagatgctccaccaacaggttcaacaaaagaaggaaaagatggctcgtctagctgacctacagaggtagatagatgaagcttcgganaaagttcgtcatcttgctcaaggtgaccagaactgaatgcctccgcgcagagagcttcatcaggagggcttctacaacgaggacgactggtatgaagatttccatcatggaaattntgcttttgatgatgcttctcatctgtcaacagaactgctggctacaccatggccccagtcttacaagccaccccagctccccatgtacgacggtcattcagacccgatgcaattcttgatgagctatg

SEQ ID NO: 80766 - DNA, 439 bp, Zea mays
  unsure (1)..(439): unsure at all n locations
tatcacaagtataatgcaagttgtgtccttgatcactttctttacctaataatgattctgttaatcaccgtgacacagttaggttaagctgatggtatctaataggttacctagttttgtttaccctacaccttacaaacaaatgagctatcgggtactcttgctatgttatacctagttctaggattaatattatatttgaattatgatcatgctctattattattgttggatttttattgttcttgataagattattttgttaattggaatatggagaaccacccgagaaaacagtgctaccataagggtggaatgggacgcccttggccaagtaattaagaaagttggggatagattaccttatccgaaaggggcaagcggtgagtgcgtcaatgtagagtatanggaggtcttcgggtcgaattgctgtaatagc

SEQ ID NO: 80767 - DNA, 484 bp, Zea mays
tgacactataaaatagctcagcttaaccttgatacgaagataagatggctgtgtttctattgtggatggtccttaagccatcttgaaagccttaatggaacatgcttatgatgcttataacatgctttcataagtgcataatctggcatgagcatcacacctatactgtgacacaatgcactttactttctctatgatataaatctggtctcattaacctaatcatgtgcacttggcatttaatgccaaaaatatgtattgctctcaaagcacatatttatggggagaaatctatattatatagaactatgatcatgcttaattgatatatctcttgatcatatctctttatgtctacgactaatgtgctctcaagagatctttatgctaactcgtacattgaaacggaaatggagtcttcggcgaagacaaggcttacactcaactctattgggactatttatacttcaccatcactccacac

SEQ ID NO: 80768 - DNA, 420 bp, Zea mays
  unsure (1)..(420): unsure at all n locations
ccatggtagtccgagcggttaatcgagtgtcgagttcaaatctattaaaatcaactaagtatagctagccccctaacactcccttaaatgctactgaatcatcacttcttctaaagacagtaacacatatatccgtaaaaagacagttgtagcccattttacatacttgagaaacggatagcaaattgtaatctaaagagtctacaagaaaaatattggaaatagaatggtcaggtgatatagcaattntaccacgtcctttgaccaaaccttgatttccatccccgaatgtgatagctctttgggggtcatggtttgtctcgtaagaggagaacatccttttctccccagtcatgtggtttgtgcacccgctatcaattatccaacttgagcccccgatgcataaacctacanaacaag

SEQ ID NO: 80769 - DNA, 415 bp, Zea mays
  unsure (1)..(415): unsure at all n locations
gcttcatctccataactcaaacgaggcgccctggtgcgaccaaaggtcatccccgatgccctatagatgaatgagggtagaagagacatagatgacatattttgtaggagagaagacaagtgtgccatcggtggttgttatagttcatgtgtataggaaatgagggtattgatgtaattatgtatgaaggtgtatgtcatcgtgtctctataaataggtgaacaatgcccatgcacaaacactctttggatctccaagagtttgacatgatcccaccttcctagagctctgactctaaagtctacaatntgtatcagccttcatataataggcaggtgttacgaaggtaatcatgtaaagaaataaggcataataagagaccgaaataaggcattcattgtttcctctncgtatc

SEQ ID NO: 80770 - DNA, 368 bp, Zea mays
agctatcttgtgcttgaatcgaacgggagggaactggagaggggttggccacagcggtggccctcgggcggcactggccggtcgcggggaggtcgcccgatgcaatggctggctcgggcgagtccggcgaggtacggaagaggtaacggggaaggcaaccgagcgctggggcgggttttataggcgcagacgcggccggtgcgtctgttcgaccgtttggcgcgacgcgggcacgcggggcgcgcgcgggcgtgccctggcgagctcagagcgcgtcgaacacgtggcgcgttgcttctgcccgtgttcttcgctctgctgagcggccatgcgtacgaatcttgccctatccgctgcgggagatctct

SEQ ID NO: 80771 - DNA, 444 bp, Zea mays
  unsure (1)..(444): unsure at all n locations
tctgagatctagaatatntagctcatttctcaacatacaaaagtgggttgtatctaaaggttntgtgaaaatatccgctaattgttctttcgatctcactccctcaaaagtaatatctcctttagcaacatgatctctaaggaagtgatgacggatatcgatgtgcttggagtgagagtgttgtgcaggattattagcaattttaacagcactctcattgtcacacaacaaaggtacattttctaaaactacaccatagtctagaagagtttgtttcatataaagaatttgtgtgcaacaagcgcccatggcaatgtattccacttcggcggttgacaaggcaacatgttggggacttgttctcaaatgctataagaacaagacaacacatatgttaataattaaagaccttcatctttcgaaacattatctcccttgggatat

SEQ ID NO: 80772 - DNA, 456 bp, Zea mays
  unsure (1)..(456): unsure at all n locations
tctccctagntgtggccaactaagacttgacattgtcaaccttcttatgcccccacgactgtacggattttgctagccttttcatcttatggaacaccctttccagatgacaagaagcctgaattgtctaaccccaagaagcagaaaccacatccaagaaacctggaatcttggttcagaaactctcatagtggaatttacgcttgcccttgatatccactctaaggttgagagacaaaggacaatgatcagagagcttagttgcattgctatgcaagatacaatccagataaagttcctcccagctggctatgcagaatacatgatctagcttcacaagggtggnggcatttctctcattcgaccaagtctatntccttcccatgaggggaatttccttgagatccatttcatctacaaaccttctaattctggctagcaatgctatgttaatat

SEQ ID NO: 80773 - DNA, 342 bp, Zea mays
  unsure (1)..(342): unsure at all n locations
tagatgagaaaactttgtgctcttgtaagtttgcccatatctatgatttttgtgtttagaagtttgtttgtgatctactactaagaattggattcttagtgtacttgtttctttttagctttttgagtgatgttattcatgaaactacttttcccttttcttatgtgaaatagaataccatgtataatgtttggaggaatactgtatacctgcgggattctgttaatattaaaagaataatggtgcaacacttccaacaagaactctngctttacaacattctgaaagagcatgtacgttccagatcataacttgctacatggtactagcatgccctgttct

SEQ ID NO: 80774 - DNA, 450 bp, Zea mays
  unsure (1)..(450): unsure at all n locations
tggtcccacgtgtctgtgcttgaaagagatatccagntcgntggttggtatactagaaatcaggctcgctttgtcattgatatggcgggacacgttggctcatgtgaatgggccaagaagaggcccatgcggccgagctggctatgttgaggcgcgattggagtggggggaaagagaggtgggccgtgggatcagtaaggtactggcccggccggtatgtattccgacccagacagcatgtgtgttcttctttccattactattactaggaacgtgcccgtgcgatgcaacgaaacacaaattgcgacccttcaatggacttatggccctggcgatggcggcgtgagtacaatagtgacgacaaaatctgtgattaaacatcatctattgctgtgagtataaatgtanactaagtctgtttacctatcgaaacaatgctatgtcagtcca

SEQ ID NO: 80775 - DNA, 391 bp, Zea mays
ttcttgcaaaacacaataaccacgagaagatcaacacagataggcacagtggtttatcccgtggttcggccaagtccaacacttgcctactccatgttgtggcgtcccaacggatgagggttgcactcaacccctctcaagcggtccaaagacccacttgaataccacggtgttttgctttgtttactatatcccgcttgcgaggaatctccacaacttggagcctctcgcccttacaatttgatgttcacaaagaagcacggaagtaaggatgggatgagcaacacactcaagacacaaaatcagagcacaacacgcacacaagtcacaactcgagctacaacacaacccgaagagttctctaatcaatggagctctagttctatcacaa

SEQ ID NO: 80776 - DNA, 469 bp, Zea mays
tgtgaagattcttcatcccaacatgggctagtcggcggtgccagagcctacccatgttagtcttagcaattaagcaagtgtcgagttcagctctatcaaaatctaccaagtatagctgaccctctaacactcccttaaatgctattgaatcatcacttcttctaaagacagtgacacctatgtcagtgaaaagacagttgtagcccatttgacataattgagatacggaaagcaaattgtaatctaaagaatctacaagaaaaacattggaaatagaatggtcaggagatatagcaattttacccaaacctttgaccaaaccttgatttccatccccgaatgtgatagctcgttggggatcttggtttttctcatatgaggagaacatccttttctcccctgtcatgtggtttgtgcacccgctgtcgagtatccaacttgagcccccggatgcataaacctacaaaac

SEQ ID NO: 80777 - DNA, 450 bp, Zea mays
tcagcttcatggctgatccatgcgatagggccttcggtgtcaccccttatgaaggtctcctcacttgagaatgcgccaacgctggcgaagctggtttttattgtcttaacacattccatagattattcatagcatcttttcttatatgcacgaagctcttcaacgtttttctccaaatgatttgcccattgtgcactgatttctcgctatgtttcttcaagtgtgcgctcctctttagctctagctagttgtttttgaagatcttcaatttcacgcttctgagcttcagcttgagctttaaaagtagcttcagcttcttttattctatgtataaacgaatataatattttatcttttttgagaccttcgatccttagttcaattacttcggaacgaaggttgctcacggccataacacacacttcgtcttcagcatcttgttgagccctg

SEQ ID NO: 80778 - DNA, 409 bp, Zea mays
cattcattatctccgagagttatgttatgccaatagaagttgctgaatgagtttcgacagagcgcctcggcggagaagacttttcttcttcatcacggatcgactccataattttccatttcttagataccgaaagttccggcgacatcttcggtcttttctatagccttttctttgtgcccttctcaatagatcttattgcttgtcttttcaggatgcttacaactcttttcttcttcactccctcggcctcttcgttaagtctatcataatcaggatactcgaagccgagggcatccatcactcggtgtaaccttcatttctcccgtgtgtcgaaggcagcagtcatcaactggtcttgcttctcagtatatttcccaagggattcattgcacattggtttaaaaac

SEQ ID NO: 80779 - DNA, 218 bp, Zea mays
agttgtcaatgtgtagccgcatttttgtaatgcttattggacggatcagcacacagatggaaaaaagaagaaagtctcagataaggcggagccatgtgtcgaatggatcatgaactagcgatctcgacgacagcgcgcactcgcgtacatggctgtttcccacgcgccaatgctatgaagacgaaaaaaagtaattatctcctaataattttagaaat

SEQ ID NO: 80780 - DNA, 442 bp, Zea mays
  unsure (1)..(442): unsure at all n locations
cgtcgagaaattcaaactccaaagttaaacggtctttctggtcctcgaacggctcgcgcacgcgcaacagacgccccacgaatccttcggcaggggaagcgggcgcccgttcacctccgtcatgatgaccgcttcaaaaaaggtgtgccaccttatttaaattcatgtnctttntctttccctctctctctctcttgccatatggaccgggaaaggggatatttcanaaaaggatccttcccagcgaaggaaacgggccctgagccgtcctactgatcaggggttcgaaggttgcgccctccggagttcgacaaccgccccagagcactcgggctccatgccctttactgatcatgggttcgaaggctggccccctcgaagggttcgacagccgccccagagcacgcagagtcanggatgaccctgtgtaccgtccgtacat

SEQ ID NO: 80781 - DNA, 266 bp, Zea mays
cctcagcatcacatgctgcaaattcagtggcaactgaacccgctgataatatgcttcccctcacctcacctcctttcttgttcgatgagataacttgattgttcgctattttcttcaacccatcttatccagattgctcatatagctttggatgtttttttggcacaccgtgcaccattatggagcgtgcttattaaaaacatgttctacacgttatgtgaaacctgtttttttcctgaagagcatgtgaccgctcagctgctcac

SEQ ID NO: 80782 - DNA, 153 bp, Zea mays
tctttttaagatactgctggcgtgctaatatcaacatttagtgtcctttctaccacagcgatggtgaccccctatatacatcttatgcagcaggtaaatgggctctaactgtacatcctaaaatcttgcaactggtacaaattaactcacttc

SEQ ID NO: 80783 - DNA, 282 bp, Zea mays
tcttcgggcgaggcccgaatccctccgttatttgcgacgtgcggtactgtcgatcacgacatcggacacgaagccgtgatataggaatccgtgagttccgactgcagtctaaccactctgccccgcctgcggaacgatcgtaatacggacttgaatcaggagtagtatcctggacgattcggaccaagcgccaacaggccgtgcctgcttgacaatgttatgtggactccgtttctgacgtcaattgataccataaacggacatcttggtcaccgacgtata

SEQ ID NO: 80784 - DNA, 293 bp, Zea mays
tcatcgctcctttgttctaactgcgtactgcaatagcttgacgactctcgatggtcagggtttactttaaacctgagtgcgtccgcactgaatttgccataatcaaacgcatcctgtctgttaagctaaaggggcttaccagtacggatatgctcggctgatggctgggcctgtacctcggttcgctaaattgagctgtctctgcacaatcctgagtctgttggtgtggtaaccctatctcttttaaagtgccagagcgcgtactttatctgtttcctcgcacggttgtgtgc

SEQ ID NO: 80785 - DNA, 184 bp, Zea mays
  unsure (1)..(184): unsure at all n locations
aaaccgtgaaattttcattgacnacaccggcttttcactgtcatacatttttattttaccacacgtgaaaactactactacttcaccctcgaagacccaaatcagctacttctattggagatgtctagctattatgttagtcaacttaacacgctactggaataatcttcatatatttcgtgta

SEQ ID NO: 80786 - DNA, 271 bp, Zea mays
catccatttctaaggagcaggcatttagccaatatcattagccagcatttcgcacctcaggaagagtggctggaaatggacaccaacttgtattgggaacagccctcaactgcgacttcaacaaaatgcgacaccacatacgacgttcacctcgtctccttcaaaaggacaccattggtaaaatcagtcgccgtcctccctgcctttccacccccaggcctgcccccctaaggcatccaccactgtacacttcggatcttggctttttctt

SEQ ID NO: 80787 - DNA, 133 bp, Zea mays
aaaaggaccttggtcaacgactcctcagggtgtagaggacaagattactcatcaaacaaaatcatacgtctttcactggcgcctggaaaaattgggaaaatctatgcgttttcttcgtgcacgaaagtcctgt

SEQ ID NO: 80788 - DNA, 64 bp, Zea mays
ccctggcctgctcgccgttgcagtgcattatcagtaatttctcgtttttttcagagatggtaat

SEQ ID NO: 80789 - DNA, 262 bp, Zea mays
ttcggcggcgctattcgcggcctggaacctatttgcaactcagcaagctgcgccggcttgctctgcgttcctcgtcgctgcctaccagaatctatacttcggtttccacctggctactattcgggctgccactcgttcgcctgcctggcacctcgttcgcaaccatgcaaagctgcgccgtgctctgctaccagatctgactcgtgctgcactgactgttttttgtggacacccgcgctcgccctggctgcgtcgcgaacgg

SEQ ID NO: 80790 - DNA, 57 bp, Zea mays
tcgtctctattttttcgaatgtctcactgattattgtgtaaatgctttgcacataag

SEQ ID NO: 80791 - DNA, 294 bp, Zea mays
gaagcatcatttatactcacttctctatgttttcaatgacaagttttgatgtatttaactctatctctaggagaattgtgtgtgaataaaatatcttgcaagcagctcactgagaagcaagatggacatatgttcaggcagtctaatatattcttggctgggccataaaaacctcatgttaatttcctctgagaacttttgaatgttattttttctgactctgtaatggagcctggtgtactatattttgctgattattaaaatcagtcaaataggtgagatatctgccttaag

SEQ ID NO: 80792 - DNA, 274 bp, Zea mays
tagttaagcaagcgagccgccgtggcacactctggaaacttcgtggaccaacacggggacgcgcaacgacacaggcgcgccaacacgagctatctgctgcagccccaataacgctcggcaggtggacttgctgtgcgcagaacgatgcgctccgcaccgcgcagagactactcagacaatcctccgtataagccagtggacttccaccggaaagacgcccggaccatggtctctacgtaaactaaggggagtacgtgtcactaggactggctga

SEQ ID NO: 80793 - DNA, 297 bp, Zea mays
  unsure (1)..(297): unsure at all n locations
gacagtgatctctccacaactatgacacgcagcgtgacactccatgacatcgccatgtactacacgcgagagatgctgaaaggagatattccttatggatttttcagaaactaaccaaacttaggactgacgctnagatcctagaagaaaaccaggcggtaactcacagtctaaagcactatcttctctcacaggagagaatacttgctgcactctgacaacgcgtgcacgaccgtctacgttcactaatttacacgaacatttaattgcagttttaagaacatgcacgagtttgta

SEQ ID NO: 80794 - DNA, 287 bp, Zea mays
agacttcacagatgtgtaccttaacttgactgtcttgacctcgacgcgcattactagagagagatgcagtatgtgtgatttccgttattgggtctttgagtagctaaccaggacctaccttctagaagctaaagtactaggaaatagcaccggcatcaactaggagatttggagaggacaccagttcgtctccctaaatgggtaagaacagactatattgagcttctgaatcaaccatgttgcgacgaccgtgacctaagcactaccttaaacctacgacgacaaca

SEQ ID NO: 80795 - DNA, 88 bp, Zea mays
cgttgcgtgtgtggcactttcaggagatgtgactacaatgcgacgaccagccagaccgaaaacgtgtgacatcagtgcgcgcacgcgt

SEQ ID NO: 80796 - DNA, 114 bp, Zea mays
aatggatatctttaacttattctagctcataactctgcactagttgaagtaaattctctcgacatttactattctcaagattgcttcgtagcttgtttctttcagttctcatat

SEQ ID NO: 80797 - DNA, 97 bp, Zea mays
tgcacaatctccaggtattggatgttttaggactctttctgtggtggccgttatacactacccgtgtactcaatattagctgttagccacgctggct

SEQ ID NO: 80798 - DNA, 200 bp, Zea mays
  unsure (1)..(200): unsure at all n locations
gtgcgattgaagcttactacgttcttacgaaccaagtgtgaggcttgatccctgatctgtctgtacttatcccacgttggtttgtgagtgctgtctgagctgacaactttacagctcatgacaactcccatacctgtggtgngcatgtctattcttgactcgngtaaacgccgtttctactgcacacggtcaagtcgttg

SEQ ID NO: 80799 - DNA, 305 bp, Zea mays
tacacgagtcgcttgactcggtgcacgggggttggtccggtctcggttggccgggccgattgcactgggatgcgcgagaacggaaacacctggcgtttactgcgctgacgcgccgcccggtccccgctttactcccatgacccgcactggattttctgtacggatacctatcgttgaaccggcgcctctgcacacttgtatcaaaatgcggagataggaatctgtatcacgcattcaagaacatagggcttagttggatgcctatggagtattgagacgactcagatgctgttatttgactgatt

SEQ ID NO: 80800 - DNA, 199 bp, Zea mays
tatatattgcattaacacagctgacactatacactatctaacaatcgctctgaaacagaagtgagctctttttctagtggacctggaagtatgtagcgggagctatcacgcagaacagctctgcacccgctcttgagttctcttgcctcgcttttaggtctagcatcgtacgctctgtatggtctgctacgtactaagc

SEQ ID NO: 80801 - DNA, 333 bp, Zea mays
tactagctgagacttgagattgcatgctcagctcttgggttgttatgacaacttatggaagctgccagcggtgtctgaccactctttgtgtggaatatgtcaccattgtgaggaaagcactatctggatgtaccttgtgcaccatcatttatgttcactttgtatgaaccaagatgtcatacataacagtcccttaatacagtagtcgggactgatgtggattgggggctactgcttgattctgtgaatattcctgctgccttgaggatctgattcttttactgcattagggactataaaatatgtgggttgtctgctcagatctaaacactt

SEQ ID NO: 80802 - DNA, 285 bp, Zea mays
gtgacctgaactgacagtggtattcccaacattaacgtgcgtgcatcctgatatgcacgtctacatggagaaatgtgatggagaattctatgggttttcgaaacaacaatctagattgacgctcagatgtagtaaaataacacagacgtaacttatagtttggcagctaatattttctcacacatagagagaatactctctaagctctgacaatgcgtggcaaaattgtctatgtctcgacaaattgacacgaacagtttactgcagtttgaagaaaatcagtag

SEQ ID NO: 80803 - DNA, 430 bp, Zea mays
gctatgcttcggctctttattatggctctcctataatgaacttttatttaggactaatataagtactccctaaggtgctacagtgatctgtaggaatgcttgatttatatcaaggcaatattgatcgacttgccaatagtaatgatccatgtgatatcctataagattaacattgtagtagggagatattacttgatgtgatacatggcggctatacttaactgagtataagtatgaacactttactatatgcaatgtgattgtaaagaatcctgaactgctagaaatatcaaatttcctttaatagatgatactatctactgtggatggcagatctacatgattctgcgtagtcattcagtcatccagctcattattttgacacttgctttggaatcttgcaactgccttttgtgtgacttgtctcttt

SEQ ID NO: 80804 - DNA, 52 bp, Zea mays
cttgggtaggatgtactattgtccctctatgtataacgagtgatagaaatct

SEQ ID NO: 80805 - DNA, 225 bp, Zea mays
  unsure (1)..(225): unsure at all n locations
agaccatacacagatggagacacttagacctaagtacactatgactttcgaccgcgctattacatagagaagagatggtagtatgtgtgacttccgttatgggtctttgagaagtgaacagacctacctctagaactanatgatgactcaggaaaatagacacacggccagtcaaactcatgagatctagagngacacacattcctctccccacaatgggaaaga

SEQ ID NO: 80806 - DNA, 167 bp, Zea mays
aaccctagctgtggggaggtgattttttttaatcctatttcattgctacagataattcatcctatcactacgacacctaatgtcttatttgtggactatgaactaacgccgtgaactgacataaaatctaccggctcgtcatagtggttagttaagatgctggatgg

SEQ ID NO: 80807 - DNA, 135 bp, Zea mays
gggcgtatctgagacacatttattggttaatgaagctatgtgcatgcgtcggagagctccgtatttcatcctcgccggcataattggctgtgcatccatccgcgcgcaaacctgtgagcctgtagacccatgttt

SEQ ID NO: 80808 - DNA, 203 bp, Zea mays
tatagtgcgcatccctaagcggactatttaaacaccttcatgaaaacgtttccttgctatgctacaatcaatttcaatttcaaatctaaaaaagcctaaatgcattactacctcactgctgttcatacgaatatgatctggatctatctgcgagagtgacttcttcccgctatgtggctcgtggtatcactgacccgtgtaac

SEQ ID NO: 80809 - DNA, 119 bp, Zea mays
tctcttttcggtcggtgttcaacgtcgcaactacatactacaccaactgactattccccgcacacattcataggatacaacgcgacatcaacctaactcagacaacatctcagctgggt

SEQ ID NO: 80810 - DNA, 185 bp, Zea mays
gtaagacttctgaatgattagctgtggatggagactcaaaaaatggattgatgatcaccataatgtcaaaattacaatacaatatatgttggattttatttatttaatgcatggctacttgacgatggctctatatttatatccgtaatatatcgtatctactatcataatcgtgtcattctgac

SEQ ID NO: 80811 - DNA, 194 bp, Zea mays
cttgtgtggagaatgtggagaagcagcatacttagctaatttcaactgagtcctctctgatctcgtttatacgtgttgaacttaccctgcatttgggtgctgaacaaatatgtttgagctttatactgtaacaacggatgaactattgcctagatttgtaatacatgttgtgcgaacgttggctgtggtgtgga

SEQ ID NO: 80812 - DNA, 221 bp, Zea mays
  unsure (1)..(221): unsure at all n locations
ctgctctctgttttataactcactctctctagtgactctattgccaatacgtcaaaagtacctcggtagactcaacagggagaggtcttgactgctcttgctttcttggtgatacgacaacgctttcgaganactgtgacgatctacacattatcattatgatggtcatagtcggagattgtaccttctgtctcattgtgtctcattgacacatgaaaatg

SEQ ID NO: 80813 - DNA, 251 bp, Zea mays
  unsure (1)..(251): unsure at all n locations
cacactacactgatttcttcttctttgattacgggcaaacacctaagttatgggggctaacatacatctactcctatatctattatattaaaacgaatctcgattaacctcatatatgactgattactcngcggtacgacacttttttctggaggaaaaccctgagaggctgaatcatcacaatttgctactgacttgtcatcagcattgacacatgtccacttgccagatggtctacaaggtgcttacat

SEQ ID NO: 80814 - DNA, 328 bp, Zea mays
aatactcctgctgctgtccgacgatcaatacgtctattgaaatgcaaatgttgagactcgaacgagacccaagagcggctgcccctggacatgccgacatgatgtccaccttctaggcttatgtgcggcggctgcacacataattgaagattcattgtgggctgactcagatggttcgaagtcgtgcattgcatcaacgaccctcgatttaatattgcgatcctgtcagtaccgactgacgctcatatgccactgccgagctacactctagcatttttactcgctgtgattgagcgagatcgacatacgcctgcatgtctttgctttg

SEQ ID NO: 80815 - DNA, 113 bp, Zea mays
gaaaactgtttaggtgcatgctaacacattttccactgcagactgtgcacacattggctactggggtacaggacccaggtaactccactgtttaagtctgtatcaggtggggt

SEQ ID NO: 80816 - DNA, 317 bp, Zea mays
acctctagatgtatgcttgctatgcaccactaactgcggatctgtctttgcaacctgtcacatgattgaatgacaatccgacctgaaatgggccgtgcttcttcatggtctgtacaaagatgaaccttttgcagtgatcattgtgcttggtgaacgcttactataatatgaaccaaacgaggtctaatatgaatacatgtcaccaaatacaacagattgtgtctacacggaagtgaatacctcatactgaccgcatattatctgcaactggcatgcaactgcggacgaatggagtatagatgcagatggtttgatga

SEQ ID NO: 80817 - DNA, 86 bp, Zea mays
attacttcgtccctgttgtaactcatattcgctctgatgcacttagtcgaggacctgtacacttgactcagaatctgtaatctgtt

SEQ ID NO: 80818 - DNA, 191 bp, Zea mays
tgagtcaacttttatgtgtgtcaaggattggctgattgatttggactctgcttgattcaaagcaaaaccgatgacttggaaaggcgaatcaaattcaaactgattcttagggtctaacaggctgttgggttattagtatttgtacttctcactctgtgtataaatcttactattatggtcagcaattaact

SEQ ID NO: 80819 - DNA, 202 bp, Zea mays
tataatgaaggctgatgatttgatgctggtcggctatataggacagactcgctgtacctattgatcctttgtacctatctcattctaatgagacctgatcagtatcgtatctaataaatatacatgatctctatctactatctccctttagatataagccctctactcgcaacatttctaggatagtcaggcagctacatac

SEQ ID NO: 80820 - DNA, 420 bp, Zea mays
tatatctacctactagaccaagtaaaaatgttaaatctctctgtctactccatttaaattaattttaccccttaatctatcatatgcttaaagataaggaaaatggaaaatgtaatttaattaatgaaccagagaatacctctatttttgttaggttacttattcaatatagatcactggaaaaatatatcataccctgttttagtataaaataagtaggatcccttttgttttaataaaacaagtgaaacttagaaaacccctacaaaaatgaccccaaggtaaaaacacccccacccttgggataactaatattttattaagaagaacttaggaaaaataggagatctgctgtttgacatttttcaaataataatgtagtagaaagagcctttttgacattaaatttaagaaaatcat

SEQ ID NO: 80821 - DNA, 413 bp, Zea mays
tcggttcattcggggacgcgcttccgatcctatttttattgtcttctctaaacgtagaagagagcttcctggtttgatttatactagtaccctttttccccttagctgcaaccgctgcaaaggtaatttaaatctgacaaaatacagaattgtatattgcttttttcagactaaagtttacgttgttgggcccaatgatgctaacgaacgtaataataatcggacggccgctgtccacgtgagttggtggcacgaagagctgctgaaccccgggcaggcaacacagatcacagaacatggtggtcgtcactcatcattttttgttgccaacacgactccggacagtgtatctgagctgcctgcctgacttgcaagagatagaaaaaaaaaggggttggtagttcgctcacgtc

SEQ ID NO: 80822 - DNA, 351 bp, Zea mays
gaaactaagctctaagggagaacacgcgatttgttaaccaatttttctttcttatttatagaccttgagtagctcgtcgagcaggtaaacacaggggatgagcgcatcacaacaagaatgtgatgaccacatcaagacccctggagctgctacatatggacctctttggactcgtcacctatctaagtataggaggaaaggagtatggccttgttatatatgatgacttttcccgctgcacttgggtattgtctttgcaggagaaatctgagacccaagggaccctcaagcgcttcctagagagagctcaaaacgagtttgatctcactgggaagaagataacgagcggca

SEQ ID NO: 80823 - DNA, 415 bp, Zea mays
tctaaagggagaacacattttaggattaacaaatgttcattttgagaaagacaggatctgtagcgcatgccaggcaggaaagcaagttggagctcatcatccacacaagaacataatgacgaccgacaggccactggagctcctacacatggatctattcggcccgatcgcttacataagcatcggcgggagtaagtactgtctagttattgtggatgattattctcgcttcacttgggtattctttttacaggaaaaatctcaaacccaagagaccttaaagggattcttaagatgggctcaaaatgagttcgccttaaggatcaagaaaataagaagcgacaacggaacggagttcaagaactctcaaatcgaaggcttccttgaggaggagggcatcaagcatgagttctct

SEQ ID NO: 80824 - DNA, 419 bp, Zea mays
tgtgccacgcacccgggcattgtgtcgcaccaaatatcagcagcttcacaccctcaagcctcgcattgaacctgctcgacgaaaagcgcagcaagctgcgtgtcgttcgtccctgcagcaacaccattcttcacttcgcgtcatacatcgcatagccttcatcgctgcgcattgtccgcattgacgcagcagcccttccgttcattctccactcccctcgtcgcgtgtcatcaatctcgtgcttgctgcgcagcccatcctcgtcgtcgtcaaaacccttggtgagcccctcgctagtacccccactgtttttttgatctcgggtgcttgataaaatgtttgaaccactgggtgtttttaattgcagctagatgttgccgctgcgcctcgcgcgacgcatgattcggtgaaacacctaa

SEQ ID NO: 80825 - DNA, 413 bp, Zea mays
ttatcaaatggacgtgaaaagtgccttccttaactgtccaatcaaggaagaggtctatgttgagcaacctcccggctttgaagatagtgagtaccctaaccatgtgtataaactctctaaggcgctttatgggctcaagcaagccccaagagcatggtatgaatgccttagagatttccttattgcaaatggattcaaagtcggaaaagccgatcctacactctttaccaaaacacttgaaaatgatttgtttgtatgccaaatttatgttgatgatatcatatttgggtctactaacgaatctacatgtgaagagtttagtaggaccatgacacagaaattcgagatgtctatgatgggggagttgaagtacttcttaggaattcaagtgaagcaactccaagagggcacct

SEQ ID NO: 80826 - DNA, 414 bp, Zea mays
tctccttatcgtcatcaaccttgacatagaaccactcctattttcagcctgctgccaatttgcttcggtagctgatcacaggaaactttgtagttttccgataagcaaaattatagcgaccaaaattgtcatgtaatccatcctttctagccttcgtctcatagtgcaactcgtgaactctgcaaaagttgtccgcaaacggatccaccgcttggctttggagtgcccagatataaacactaagcctaacgatagcgttaggggtcagctggtgaaaatagataccgaacctcttcagtacctctgcaataataccatgtatggggaatgttaacccaacctttacgaagctcttgaaaataacaatttcatccttctacggctttggggtagtctcttttcccccgaagcgta

SEQ ID NO: 80827 - DNA, 402 bp, Zea mays
  unsure (1)..(402): unsure at all n locations
tctaaagggagaacatgtggtaggttngtctaactttctattcgaaaaagatagaccttgtgcagcttgtcaaacaggtaaacaagtgggaggagcgcatcacagcaagaatgtgatgaccacttcaagacctctggagctgctgcatatggacctcttccgacccgtcgcctatctaagcataggaggaagtaagtatggtttagttattgttgatgacttttcccgtttcacttgggtgttctttttgcaggataagtctgaaacccaagggaccctcaagcgcttcctcaggagagctcaaaatgagtttgagctcaaggtgaagaagataaggagcgacaacgggttctagttcaagaaccttcaagtggaggagttccttgaggaggaatggatcta

SEQ ID NO: 80828 - DNA, 413 bp, Zea mays
ttacactaagcacatgtccaacagttaacacacctgtctgtcctttaatttggttttcattcaaaccaccaaaacccacaagagagcttttaatctcccccattgtggtgattgatgacaacacagttaaaacttacacaagattaagatttaaagcataattttgaattctaagctatagaatgctccccataaatatgggtttacatgaaaatctcaactttgaccacatattccaaatagcacatacttaggctaattgcaaagcattactacaccttatcatccatgggaagaatgtttgattatgggaaaagggggagtttttgaatctttgatcaatatatcttggaatacctttctatatgcctaaacaagtgaatttgacttagagataggaaatatgagttgat

SEQ ID NO: 80829 - DNA, 417 bp, Zea mays
ggacacataaaactcagcttggcaaaactcttttttgcttccttgcctttttccgaacttggacaacaacaacttcacctttacattcctcttctgcaaattgtacattctcttcttccatcagcgcggcttttgaccctgtattctgaacaaaggaatcacgcatctctttcctaacaatggcaggtgcctttggacatttttccgtgtctccaaaaccaccacaaaggtgttgcttgaatcttcttatccctgcaggcacaatctttttacaaaatatgcactataccatttccttcttggtctcattgggccaaaatccatactttcagcccggatcctttgatctagcatgattcttatgatctttaccgaggtcagccagcttttgtggcagctctgctaaagccctatcaa

SEQ ID NO: 80830 - DNA, 307 bp, Zea mays
tctaaagggagaacacgtgataggtttgacttacgttcaattccgaaaggatagaccttgtgaagcctgtcaagcacgtaaaccagtgggagagcacatcacaagcagaatgtgatgaccacttcaagaactcttgagctgctacatattgacctcttcgggacccttcgtttttttgacctatgaaggagagaagttggccaatttatggtgaagaacttttccccgtaatcttggggttctttttgcaggataagtttgaaacccaagggacctctacgcgcttcttcgagagagctcaaaaaga

SEQ ID NO: 80831 - DNA, 408 bp, Zea mays
  unsure (1)..(408): unsure at all n locations
tgctnttgaaataaatgtaagtttatgtaattgctttcgcatgtctttatctccgatgttctgtaatgtctgcaagacgggtgagacgttcctggtaaggtaaggaaagataccgaacttgtcaagtgacttangaacatctacagggtgtctgatgtctgttagacaaggacaactgtaggtgggcctaattacttgagaggttctgtcacagcaaccctcgcatttctaaacatacacctttactttccgtcccattaggcaaaccaccaacttttgatggtgaagattacgctagatggagtgatttaatgcgatttcatctaacctcgctccacaaaagtatatgggatgttgttgagtttggtgcacaagtaccatccgtagggatgaaaattatgatgagga

SEQ ID NO: 80832 - DNA, 280 bp, Zea mays
tcctcaatctttattgtcgtttattgaatatacttcaatgtttataattggcccaagccatgattttgaatttttcatactcttttccccattttcttgaattttgttcatagggctcaattagggtttttgttggggttgcacaattttgccttttttgaaaaatccatttgttttggtcatgatacttttaagtttaggatggtggggccctttatccttaagccaattggatgttcatgctcaattctggttcacataaaatgatggttcatgggtt

SEQ ID NO: 80833 - DNA, 383 bp, Zea mays
tcgcataagtgaacgaaaatacacaatgggtgaatgtaattttgtttcaaatgagtcatgctgatgtgataaaaatcaaggacgccaccgaataaatgagatattgtaaggccgaggccgggaataaggaaaggactgtaaactactgactcgtgcgtatcttccgctgggacactaatgccgtgtgctacccgccaagaacagagcttccgcggtggaagaaactctatggagacaaggcggagaagctcaccttcataaattacagacatgtggctacctgcgaagggtaactggctgacatggtcgattgcggcgatcactgcagacatacgagttcgcaattttctcttgggcgccatcatgtttctcactggctaaac

SEQ ID NO: 80834 - DNA, 417 bp, Zea mays
tcatactcggctgcgttgttagaggccgggaatatcttttggagagcgtacttgaggtgttcgcctcctggtgcagtgaagagaattcctgctcctgctccctgcagcttcagcgagccatcaaaatacattcgccatacttctgcggtttctggattatccggcacttgctgttctggccattctgatacgaagtcgaccagtgcttgagttttgatggcagtgcgaggtcggaactcgatatcatgggatcccaactcgcaagcccacttggctattccgccaatggcttccttagtgtgaagaatgtcccctattggaaaaccagtaactactatgactttgtggacgtcaaagtagtgacgcaacttgcgggcagatagaagtactgcatataatagcttctgaacttgagga

SEQ ID NO: 80835 - DNA, 419 bp, Zea mays
tactcctccctgggaagggcccttcatcatcgccaagattttgaagcccgggacatacaagctggccgaggtcttcagcaacgcttggaacatccaacaactgcgtcgcttttacccttaaaatgtttcaagtcgttcatgtatctcgctctctttacatgcataaataaagtctaaccatcaaggaaggatcagccttgcctcggcaaagcccgaccctccctcgggggctagaaggggggaaccccctctgcgtcaaattttttcctcggaaaactcttttaccagaatgtctttcgtgcttttcgactgcgtcgataacagaatcctaaagacgagcgagagagccttgaacggcaaggccgaccgagccgaggaactcctacgcctccgggatacggatacctcactcatcacct

SEQ ID NO: 80836 - DNA, 439 bp, Zea mays
  unsure (1)..(439): unsure at all n locations
acactaagaatactaagctttgggaactntgcccgtatccaatctgcctgagtcggaactattatcgcttgccagatgcccccgttccggtcgaccacgaccagcacccaacataagactgccctagttatttagctaagaccagagccatgatagttctcatggtagcactgttttcacgggtggtcactccatgttccaattaatatgcaataatcttgtttaaccatcaggttaacaacaataatgtaaacttaccatttagaacattaatatcataaacaggagtgactacataaagttaagttgtagcaataacatagctacttgattagatcataatcccaggttaaacaaggattaatgttggaaaggttaggtgtatctaaataggtaacccatcaaattatgcatatatatcaaagaataaactttatta

SEQ ID NO: 80837 - DNA, 415 bp, Zea mays
tcatgatcggaatgaataacaaactctctttgccattagtagtgctgccatgtttcaagcgttcggaccaaagcatacaattctttgtcatacactgaataatttaattgagcacctccaaatttttcactaaaatatgctataggttttccttgttgcattaaaactccttctatcccaatcccactagcttcacattctacttcaaaagttttagtgaaatcaggaagaataagtacaggtgcttcagtcaaacgtttcttcaattcttgaaaagcatcttcttgtgagtttccccatttaaattcaacacctttctttgtcaactcatttaaaggggaagcgatagtactgaaatctcgcacaaatcttctataaaaaccagcaagaccatgaaaactttttacttgactta

SEQ ID NO: 80838 - DNA, 416 bp, Zea mays
ttatcgtatctggcgccaacgtgtgtgcgaccatcatggctatcgcatcatagcaagccttcgtaataagcgcgacaggcgcaattgtggcttaatagtcatggtataagataagtccacgcaacatgcgcaacagacacaattgtggctcgataataatgactgacgaacaatgcctacagggcatgcaaaaaatacgcgactcgatgatggcatccgactcaacaggagtggtccgattaagcgagagtgcgatatagcaatcaaatgacacagccaggttcgtacgacacaaataatgtgttgtgttgccagggcgcagccaatgctcagccaataccataactcaatcgattaataatgtatcctgatcggcgcatctgagtacccactatacaattaaatcgctcgtgtgt

SEQ ID NO: 80839 - DNA, 413 bp, Zea mays
  unsure (1)..(413): unsure at all n locations
tctaaagggagaacacgtgataggtttgactaactttcaattcgaaaaagatagaccttgtgcagcttgtcaggcaggtaaacaggtgggaggagcgcatcacagcaagaatgtgatgaccacctcaagacctctggagctgctgcatatggacctcttcggacccgtcgcctatctgagcataagaggaagtaagtatggtttagttattgttgatgacttttcccgcttcacttgggtgttctttttgcaggataagtctgaaacccaagggaccctcaagcgcttccttaggagagctgaaaatgagtttgagctcaaggtgaagaagataaggagcgacaacgggtccgagttcaagaaccttcaagtggaggagttccttgaggaggaanggatcacactctagttct

SEQ ID NO: 80840 - DNA, 409 bp, Zea mays
tcgaaacatatgataagcaaactaacacttagtattactgtttacgacgaagacactgatttaaacattattatagactctgactctatccatctacggttccaagtctatcttggtcctgtagacaggggtgccatgagcatgatgaccacggggcggcgagcgataagggtgttgagtcccgatgggagcatgggaatcatactcctaatggcggcgctctgcacgctcaacacacatttctgcaatctccacccaagccttgcccaactcgtcaagggcatggtctatcttagtgttgagcacaacgaccaggttgaccatgctgctcaatctgggattgcccacaccaactggtgagacaatcacgcctacggtactgccagtcgagcggcggtggtaatacttc

SEQ ID NO: 80841 - DNA, 412 bp, Zea mays
ttcaatagctggcttcaggatattgtctagagagatatcagtgtgatctttagaatcagccatttaagggccagatttttagtagatctacctggctccctagttgagtcgccaaaaagtgggttggcgccaatcaaggcgccatacactggaatgaaccacatggcaatgctctccgcggaggcctgaacggtccacggcacagggtcggacagtccgcgacctggtgcaaaagcggcttcttctctgggtacgtctgaatggtccgcgcctaggacctgaactgtctgcgatggcgcagagggtcgtcttatttgcagcagacctagatctcgcctcccgagagggaccctgtcggggaggagatattctagggtgtgtcttggcatcatcagaccacctaagacgtctc

SEQ ID NO: 80842 - DNA, 413 bp, Zea mays
  unsure (1)..(413): unsure at all n locations
ttgtnaagtgagaaaagcggaggcatatcttgtctcacctggcctaataatatctcttttctttgtgaacttcctcattagagacaaagtgctgtggtgtgcataaataaatatggtcaatccttttgctgaatcaattacattcttgaaccttttcatctttccaattccttcaagcattaggttaattgtatgggttgcacaggaagtccaaaataggttgggtctcttgacataaagcaaatcctttgctgccatattatttgatgcattatctgtgaccacttgcacaagatggtccttaccagcatccaatttctcaataaagttatccacaaactgaaaaatcatttcccccgtgtgtgactcagctgaaacctcttttgactcaacaaaatatgtaccgatggcag

SEQ ID NO: 80843 - DNA, 412 bp, Zea mays
tctaaagggagaacacgtgataggtctaaccaatgtacatttcgaaaaagatagaccttgtgcagcttgtcaagcagggaaacaggtgggaggctctcatcacaccaaaaatgtgatgaccacatcaagacccttggagatgcttcatatggacctcttcggacccgtcgcctatctaagcataggaggaagtaagtatggtcttgttatagttgatgatttttcccgcttcacttgggtattctttttgcaggataaatctgaaacccaagggaccctcaagcgcttcctcaggagagctcaaaatgagtttgagctcaaggtgaagaagataagaagcgacaacgggtccgaattcaagaatcttcaagtggaggagttccttgaggaggaggggatcaagcacgagttt

SEQ ID NO: 80844 - DNA, 419 bp, Zea mays
tggtcgatctaggagtcaagctataggaatctacaagttgtgtatgtgtaaattcaagggtaaacacacaagggctagaaaacaccaacacgagcatgattttttaaagaggtttcacttgctaaactcaaggttgtttggagggggggtctttcatgagcagaacagacaacactttttttagcaaaaagggttgaacatttacaataccacctagatagcaaggcaagaaaaacacataatgcaacctagcaagacttactaattagacaagagatatggcatttcttatagttcataacatagcaatacattacatcactcacaatttcttgttattggaataaaggtgagaaaagcatgttgatccacaagagacaattatgatgcgacagtcatgatgcatgctcattctaaac

SEQ ID NO: 80845 - DNA, 421 bp, Zea mays
  unsure (1)..(421): unsure at all n locations
tttagatcataaatacatttaatagacaatatatactgtgagtcgtgtagngacgcctcttgtattttttcaattaacactcaagagatcccatattaaatgtggttatacatgccctaatatctcactattgattaagaactatgcttgacagtaaatcaaaaaatggcatctagcagtgaagacctatcatcgagccttcctcagcccattcagcagaaatggaaacaagacatatccttgatcctccatggagaatttttctgttagaggatgaggatggataaatttaatctccactagatcaaaacaaaaaatagtctccacgggttcatggggatagagatggggaaccattctccatccacgttctccatgtatccatcccatgaccttctcttggtctaaattagttcattgg

SEQ ID NO: 80846 - DNA, 419 bp, Zea mays
tctcgtataagtgatgatggacacagtgcaccccgtatctctgatgcactggttgacaatagactggacaggcacgccgtctgtaggatggccctggcgccgcctgccagcggagtggacaggacgcattaaatgctgagggggcacattgcctgtcagcaaggtggacaggcggcgtgtcctctccgtaataaatgtagagaccgcgcggcccaaaagccttatgtcaggctccgtccgctggcttacgtcacgggcaacaagccacgtggcagcatcggatcttctcctgagtggggagcgcaagcgcacaggataaagcctggacacgtgtcaggtttggacccttgcttaagccaaggtattctctgtcccgagacctcgttatgggtggtccggaccttacttggagggatccc

SEQ ID NO: 80847 - DNA, 417 bp, Zea mays
  unsure (1)..(417): unsure at all n locations
tgacaacaccatttgacatcttaaataaaattcttgttatctagtatattnaattcattcctcaacatgcaaaagcgggtcttatcaagtggcttagtgaaaatatccgctaattgatcttcctacctcactccttctaaaaggatgtctcctttagcaacatgatcactaaggaagtgatgacggatatcaatgtgcttggtgcgagagtgttgtacaggattattaacaattttaacagcactctcattgtcacacaacaaaggtacattttctagaactatgccatagtctagaagagtttgtttcatatataaaatttgtgtgcaacaagcacccacggtaatgtattccgcttcggcggttgacaaggcaacactattttgctttttggatgtccatgatactagtgatctc

SEQ ID NO: 80848 - DNA, 410 bp, Zea mays
  unsure (1)..(410): unsure at all n locations
ttgacataggagatggcgctcgnctcattagttttttcaaacctcaaacaaaggagggggaaagactacaagtcccgctccaagaaggtttgctacaaatgtggtaagcccggtcattatattgctaaatgtcctatatctagtgacagtgatcgaggcgacgacatgaaggggagaagaaaggagaagaaaaggtactacaagaagaagggcggcgatgcccatgtttgtcgggaatgggatttcgacgagagctcaagcgactccttctccgacgaggacgccgccaacatcgccgtcaccaagggacttctcttccccaacgtcggccacaagtgcctcatggcaaaggacggcaaaaagaatgttaaatctaaatccttcacaaaatatgaatcctctagtgatga

SEQ ID NO: 80849 - DNA, 412 bp, Zea mays
  unsure (1)..(412): unsure at all n locations
tttgctcatctcccgacacacagaaatctccttgctataatggagacaatacaagaagtcttcttctccgctgccattgaatatcaacgccccctttggatattttagtttttgggcatagaactgagcctcttgcttttctttttcactcaactctttccccgaagcatgtcgtaaaatataattggaagcttcggaaaatgcttcgggggcggcagtgccagtttctccagttaaaatttgttctgctgcttctgtttctttggtttccaaggattccaccttggcgggctctgaaggcccagcttcagtctcagcttgatgctttgaagcttcggcaccaaaggcttcgatttgcactttgggagtttcgacaattntcttcggagtagtgcttgaagactttattgtc

SEQ ID NO: 80850 - DNA, 320 bp, Zea mays
actcagcttggacttgaacttatgatcaaagctctttcttattgcaatttggagcaaggcgccacctcaacacctgagtgcataccgttgcattcaaagcgacggaaagaagaaagaggagtctacatcaagtatgcttcccatcaacgcctacaaacttgacaacgaggaaatggcgctctttattaaaaacttttggctaattcctaaaccaaaaagggggaaagaataacaaccccgcttcaagaaggtgtgctaccaatgtggttagccccgccattatattgcaaaatgttcaatgactaatgaagtgacaaagg

SEQ ID NO: 80851 - DNA, 407 bp, Zea mays
  unsure (1)..(407): unsure at all n locations
tataacaagagaatagaggcaagagcccgaccatatgttataatanaaggggaattatacaaacatggagtttgttctccattgctcaaatgtttatccagagctgaaggtatagaattgatgaaggaaatgcacgcaggcctgtgtggatctcacatcggatctaggcccttgctgagaaaagtttttcgtcaaggattttattggccgaaggcagcttctgatgcagcagaattagtccaaaaatgcgaaggctgtcaaaaatgtgcaagggatcaaaaatagccttcgtctctgactcagttaatatagcccacttggccgttgcaaaggtggggccttgatttgctatgcccacttccaccagcacaaggaaatttaaaatttgttgtggtggcggtagaata

SEQ ID NO: 80852 - DNA, 413 bp, Zea mays
ttcctgcgtgtgcgcctgctctggctcgttgcttctttcatggccagagctccctgttcagtctcctgcgtcgagttttgagctcacgcccacagcttccctgtgcgcgctcagcttggagctctgcccctgcttcttgttcctctaactcgtgtctgaccggattccctacaccgtaatattttcctgcgcgcagctgcgctctctgccgtgaccccgccgtggtgtttcctcgcgcgcagctcgcctggctgctgcgcagtccctgctcttctccccagccgcgcgttcccccagctccagctcgctgcgcgccgagctctcttgttatagctttctgcttccttgtcgtgcgcgcagcgtttcgtcgttcctcgtcgtgccaagttctcctctgcacgcagccgtcgcgc

SEQ ID NO: 80853 - DNA, 394 bp, Zea mays
tataagcacgtagcacaactgcattgttcttctacttaagttaacggtcaactttccactaacaaatgtaaccttttgaaagaatttcaaaggaaaatatcagtatgctggtgacataaataaaaatatctgctgttcctgacctgtgcacaggggaaaaatagcaacggataagtgttcgcagaactgaatggcctctgtatgtggccacagactgatcacctggatgcttaagattatgagcttctgatggaaatggcatccacctatagtcccagtccactagactcactgggcgactgtgaaaacaacagaatcaaattctaaacaatagaaactagacccgcaaaaaaaggaaatggaacttaaaagtacatatcatgataattttgct

SEQ ID NO: 80854 - DNA, 400 bp, Zea mays
tctgatcattgacctttggcctcgtcattctgtacataccaaagcgatatatggtaaataaaaatctcaagagaaggtaagcaatatgtacaagtttaataccggcttaagatgacttcgagcttcgtcaccagctaagttctgcccacccttcgtccaaatttgagttatgaatctatttccaatgcttcgggctaggctggggatgtcagttaaatctgttggtgataggctgaagttcggcctgtttacgatctttccatgtgtgcaaccagccttcataaaagctacagttgtgccacgagaagctagcggggcatagaagtcaccatgcctagctataacttcgtcaagcgcctcaacttcgccctcaatatgttcgaaggtgcttgacaggtct

SEQ ID NO: 80855 - DNA, 413 bp, Zea mays
tcggaaagcctatgcttctcgccatctctcggcagtcggatagctctttgttatcaggcaggcagtataagaagtcatcttcatttgttccattgaatattactgcccccttcggatatttcagctcctttgcataatggttggcctcatgagtttcttcctcagatagctttttccccgaagcatgtcgtatgatgtaatcatgcatgccggcaggtgcttcggggatgacggtgtccgtttcttcaactaatattggttccggaatttttactgcttcggcttcaaaaggatgttctttgaagggctctgaaggcccagcttcagcttcagcttgttgagccgaagcttcagtagaagcttcagcaacttcaacacctttttttggaattgtgcttgaagacttaattgtc

SEQ ID NO: 80856 - DNA, 427 bp, Zea mays
tactaagcttagcttcatcatcctacgaataacaaagagcagttttttataggtgcaaatttcaaggagaaggtgaaagtaacaaatataagcttcttaccggcttaagatgacttcgagcttcgtcacccgccattttccgcccgccatttacccaaatctgggtcataaatctattcccgatacttcgggctaggcttggaatatctatcaaatctgatgatgataagctgaagttgggcctattaacaatctttccatgcgtgcagccagccttcagaaaagcggtagctgtgccccgagaagctaccagggcgcagaagtcagcatggccaccaataacttcattaagagcatcaacctcgccttcaatatattctaatgtgctgggcaagattttagctgaaggtgtaaatatttcagagct

SEQ ID NO: 80857 - DNA, 281 bp, Zea mays
cttcaggacactaaaaactaagcttgggttgtgttagactaccgccctcttaatgcggtgactatcaagaacaagtatcctttgcctcgtattgatgttctttccgatcagttggtcagagccaaagtgttttccaagatagaccttcgctccggctatcatcagatcaagatacgagcaagtgatatttccaaaacggctttctcaaccagatatgggctatatgaattcttggtgaagtctttcgggttgacgaatgcaccagcatattttatgtatct

SEQ ID NO: 80858 - DNA, 432 bp, Zea mays
  unsure (1)..(432): unsure at all n locations
gacacttaaatctcagcttagagctntacactattgcatctcatctttatcttaatgtatgtagagaaagtctactcgggtcaattttaaataccttttcatctcaaccgtggtcagtgtattatgtttatgtctgctagtgcttgtcctgcggggtgtcccaattattccatccgtttaaaaattgcaattatagatttaagacagatgtatccttttcaaattcatctgaattaatagaaaatagtactaatacttacgactgtgaataagtatatgataaaaaatattttagacttaatatggtaatttttgtttggtatcataagcgttattgtttttctgatgtgattaaatttaagtttgacggttagatttaatacgagtttggtacatacttttactaaattaaattaaattaaataaatcata

SEQ ID NO: 80859 - DNA, 365 bp, Zea mays
tagttactaaaaataaaaaattacataaaaagaccttaatatttttgtccttgattcgtttcttatcttatgagactaaaatttactagagctaaacaaaacttttattaaactaataaaattttgttgattctattaagcaagttgagtggtctttcttctaattactaactaaattatacatttggtttttcagaaacacctagcaaacatgaatacaatgatattcaatttttacttataccttatgtgtgctaaacttatatattcaaatatttttagaatttttttatagctgataaccttatctatctgaagatatgggaattttttgtaactatgggtacaatttaagtcttgaaaat

SEQ ID NO: 80860 - DNA, 417 bp, Zea mays
  unsure (1)..(417): unsure at all n locations
tgattaanaattcagaaacccgaacaaaaatgtttcttgttcacaatcaaaagacttctttggcaaaataaaagcactataaagaagtatcttgtcttcgaagtcaagtagcaccttcacccaacatataagtatatgaacatactagcttgcaagcaagtaaaaaaacctactgtggagtcccttcgaaaagctttccctatgatagattgaacaatgcgtcacatgtaaatataactctagaaccaacaaaataatagcaaacatgacatagtagaaagacatggaaagtgaacgaaaagcctttgtgcgctccgcaggagataattgttcaactttaaatgtgtcggggaccataattaggggtaccctcaaggctcctaattttcagctggtaacccccatcagcacaaagct

SEQ ID NO: 80861 - DNA, 408 bp, Zea mays
tgtgaatattcttcatcccaacattagctagtcggtgatgccagagccaacccatattagtcttagcaattaagcaattgtcgagttcagctctattgaaatcaactaagtatagctgaccctctaacagtcccttaaatgctactgaatcatcacttcttctaaagacagtaacacctatatccgtaaaaagacagttgtaacccattttgcataattgagaaactgaaagaagttataatctaaagaatctacaagaaaaacattgaaaatagagtggtcaggagatattgcaattttacccagtcctttgaccaaaccttgattttcatccccgaatgtgatagctctttggggatcatcgtttttctcgtaggaggagaacatccttttctcccctgtcatgtg

SEQ ID NO: 80862 - DNA, 412 bp, Zea mays
  unsure (1)..(412): unsure at all n locations
ntcacgtggtcacatcctagtttctccaaaatagtcacgattcccctggcacctgagaaggcgcagacatccccgcgaccactcaaaatttcttaaaaggcttgaacttcgttgctgatccaatcaattgggcctttaggatcgccccttacgaagttgtcctcgctagagaatgcgccaacattggcgaagctagattttattttttgcacacactctatggatttttcgtaacatttctcttttggagactgaagttctacaactgtcttctcccaataatttttccaatagttactggcgtctcggtcagcttctgcaattgcacactttaacttcgcttcagccaactgtttttgaagatcttcaatctcacacttctgggcttcagcctgngctttggaagtagctt

SEQ ID NO: 80863 - DNA, 415 bp, Zea mays
tccacacgcttgccccagtgatcggctaatcatgttttaatagctctctgataagtcgctccagcgtttttgaggccgaacggcatggaggtataacagaaagcaccaaacggggtgatgaacgccgctttttcttcgtcttcttttgccaaactaatctgatgatacccggaatagcaatctaagaaagacagcatcgaacatccagcggtggaatccaccacctgatctatccttgggagcccgaagggatccttcggacagtgtttgttgagatcggtatagtcgacgcacatgcgccaatccactttattctttttgagtacaagaacagggttggctaaccactcggggtgtaatacttctctaataaatccggccgcgaccaagcgggctaactcggcacgaatggctt

SEQ ID NO: 80864 - DNA, 69 bp, Zea mays
aactcagctttcttcgcgccataacaagtttatgatcgcctttgtgttcaaaaaactcgaagagtggaa

SEQ ID NO: 80865 - DNA, 405 bp, Zea mays
tacggcctcctggggatctatctatgggcttggttcgagcggaggagggcggcaaatggttcggccacggtggttgcccacgagcggctctggcgggtcgcggagaggtcgtcggagctacgagcgagctccagggagtttggcgcagtacagaggatgcaacggggaagatagccgagcactggggcgggctttatagccgtggcgcgggcgtggtcacggggcggccgcgggcgcgcgggggttcgcacacgggcgtgctctgagcgcgcccccgagtgtcagccctcgtcgaacacgtgtgtgtttgcttctgccatggttcaacggccgattggagtaccttagcgtgcagatcttggcaaaacactcgtgtatggtctcttccctgcaccaaatcctacc

SEQ ID NO: 80866 - DNA, 410 bp, Zea mays
tcatgcaactgctgccagaaatgagaggtgtactttgttcctctgtctgatactatcttctttggcacaccatgaagacaaacgatcctagacatatacaattctgccaatactgcactgctgtaattggtcttgacaggtatgaagtgggctgacttggtcaagcggtccactactacccaaatggaatcttagccggctcgagtgcgaggcaatccgactatgaaatccataccgatttcgtcccatttccactgagggatctgcaacggttgcaacaatccagcaggtctctggtgctctgccttaattcttcgacaactatcgcacatagccacatgctctgcgatttcccttttcattccgtaccaccagaatttcttcttcagatcctgatacatcttctcact

SEQ ID NO: 80867 - DNA, 419 bp, Zea mays
  unsure (1)..(419): unsure at all n locations
tcgtcaagagggctcattcaatgaagatggatggtatgattattttaatcatggtacctttacttttgatgatgcttctcccctggtagcagaattgcaggctatcccatggccacaatcctacaagccaccccagctacccatgtacgatgggcactcggacccaaagcaattcttgatgagctatgaggcaacaatatcctcatacggaggcaacacagctgtcatggcaaagtccttcgtcatggcagtccgaaacgtggcctagacatggtactcctctcttcggccagggacaatcacgtcatggcaaaagctcaaggacatgctggttaccagttntcaaggctttcagacgaagccagtcatagctcatgccttgttccagtgcacacaagaccatgaggaatacctttagt

SEQ ID NO: 80868 - DNA, 418 bp, Zea mays
ttagtgactagtgagagagatttgcttgtgttctttcgagctcttgcgcttggattgctttcttctttcttgattctttattgcgatcaaactcacttgttattgaggcaagagacaccaatcttgtggtgatccttgtaggaactttgtgttccaagtgattgagaagagaaagctcactcggtccgagggaccgtttgagagagggaaagggttgaaagagacccggtctttgtgaccacctcaacggggagtaggtttgcaagaaccgaacctcggtaaaacaaatccgtgtgtcacacctcttatttgcttgcgatttgttttgcaccctctctcgcgaacttaattatatttctaacgctaacccggcttgtagttgtgattatttttgagaaatttcagtttcccctattca

SEQ ID NO: 80869 - DNA, 359 bp, Zea mays
tatttttttttttaaagccaatcacggggtgaaccaagggttcattttcagaagctaaggatcatgatgtgatgggcctcgaatactattttggaatctaaccagatagaaaggttttttcttcatcttccgctttcatacaaaccacccttatgaaacccttatatctaccatcctaaaccaccttattctagaaatgaagactcaaacctaccagtatttatggctttctaaacaatataaccctaagggttaaatctgattatgcttcccatgagaaggggaccccgaaaaatatgaaagacacttactggcgtttattagccacccttttaaaaaaaagaaaccaaaaactcttc

SEQ ID NO: 80870 - DNA, 277 bp, Zea mays
gaggacgagcgatgcagaacggccaatgactgcgttgatcttattatacgcccggcgttgaaaatgaagaccccgctgtaggaatgtgtgtctacaaggaagtgtttttcgaccttggcttaaagcttcgtcatgtcgaatctaaattattatttaaacaaatatattgcaggggctactgtgggggcttggttacaagtctcaaacaggataacagattttggagatatgggaacaggatttcgactcatggatcacagagagaaacaaatatcga

SEQ ID NO: 80871 - DNA, 418 bp, Zea mays
tgaggaaggagaaaccgcagcaagggtcaaactccatgataaggatgttcccaaagcaataaatgaagaaatcaacataaacaaggaaaaaggtaaaaattcaattaatcatgttgtttgcactgatcatctctccatgtcattcaagtacaaaaagaaaaaaagcaaaatgaggtgcttcaagtgcaagaagttaggccacctcatcgcgtcttgtccgtacaaagacaagaatgaagggacaaggagttgttttggatgcaacaataaggaccacacgatcacttcatgtccggtcatgaagaatcaaggatgtgcatcctccaaggtgaccctcaccaaggaaaatgacacacaacaagcgtcatgtcaggttgagcgacgcttctgctacaagtgtggtgagcagggtcatcta

SEQ ID NO: 80872 - DNA, 416 bp, Zea mays
tcagctccatctatgttatggattgcttttgagtctgtccagtttccttcggcccttctggcagcttcctgacttccatgaatagcaatgggtccttggtccgaaggtatcttcatgcaaagatatgctggatgaagaattgcttcgaaggcattgagagtaccacgaccaatgattgcattttaagggtattccatgtcaacaatatcgaatacaacttgttaagtccttgtgttgttgataaatccgaaggttactagcattgtgattttccaagtgctacaatctgccttcctccgaagccacaaaggggatgtgtggcatcatggatcttgtcttcgagctcttgcatctgtctgaaggccttagcaaatatgatattagctgcactgcctgtatcaaccaaaacattatgg

SEQ ID NO: 80873 - DNA, 428 bp, Zea mays
  unsure (1)..(428): unsure at all n locations
tcaggacctatgaaactcagctttggctcagcttggaggagatagntgcgacttttctaccctagaatatcaattcagggtttgttgtcccatattacatatggaacagttgtccgacgattgatctccattacctcagaagatgattgggtgatatatttaagaattgtgaagacgatggttccaccatgtttggatgtggttgttcaaaagttacctgttagtcattgcgatggtccagtcgggttatctccacaaatgccaaatgcatctcgtattgaagctcctttggtagagcttcatgaagaagtggttgttgtgcccgatgctcaatcgggtgcgcacgagtatgggatttctcgtcctattcctggcgtttgtggggcttctaatgtggtggtacccccccaagagatcccattgaccca

SEQ ID NO: 80874 - DNA, 410 bp, Zea mays
tggaagcgtctattggttgtcgacttggtgtagctttcttcttcttgtcttccgtcgccttgaatgcgacgggttgagcttcggatgtggagggttcgtcgagctcgttgatcttcctcgagccttcaaccatgcactcaaaactaacaaaatgcctgataacttcctcgggggtcatttttgtatatcgacgattaccacgaattaattgaagttgagttgggttaaggaaaatgagagatcttagaataaccttaaccatttcgtggtcgtcccattttatgctcccgaggttgcgcacttggttcaccagggttttgagccggttgtacatttgttgtggctcttcccctttgagaagccggaaccgaccgagctccccctcgatcgtttcccgcttggtaatcttg

SEQ ID NO: 80875 - DNA, 408 bp, Zea mays
tgaacttggcgggtctgcaatgtctatttgatcatctttgcagacagccttgcttacaatagcctgaaggtgtctatattttgatttgttgtgctacaatgaactatttctatggtttttcttaccttcattacatgctcattcttcatttttagggcttgattctaagcaaggctttaaaggctaaaaaagatgaagaggatgagagctatcaaatagctcttgggagccttcgttcagaagttataacattgagaaatgaagctcttgaaaaggataggatattactttccttactggaaaagctgaaatctagcgaggctagtcttactgcacaagccgaagctcataaagccgaattggaagaactgaaaaggaaggttgttgaagcaaccgaaaaatttgaag

SEQ ID NO: 80876 - DNA, 404 bp, Zea mays
tactcaagattgaaccggggacccgcgtcatctgtattgcgaaaccgtgctcgccggagttcatcatcccgccggcgcacgtggaccgggtaaatcactgagccatttttcgattcaatgcacagatagcctctacatcaccccaggaagctcaccgtgccgttggattggactaggtcgccgtagtttggccggcacacccaccgccgacgaggacccccgcctgcgcacgtcgaccgagcgattccggccatccccgccgtcgagccgtacatcgctgtgaccgctagagcctccccgagctaaccctacccctcgccggacctatctcgccgtcggtaagccgcgccaccccttccttctctgcggttactgttacacttgggagggaccgcggtggagag

SEQ ID NO: 80877 - DNA, 416 bp, Zea mays
  unsure (1)..(416): unsure at all n locations
tgctaacctcctcaaggtggtccacgcagtacatgattctgtatgtgctgnttatgctttgaaccttaatggtaaaaacaaatagatgttagtcaacaaagttaatggatataaatgatttatgaaatattatataaactgaccaaaggggacacacccaagtctctcttcaagttgttcactgtagcaactgttgctttctcgccttcatattgttcaatgaagtcttcattaactctgtcacgaaagctatgtgatttgtctcccagctgattcaacaacacctacacaatacactgaagaaaagctatcaagttgtacaactaatcagaatcaaagttatcaagttgtacaactaattagggttatcagtgcttaacgattagttgtgcataacgcttagctacgattagtct

SEQ ID NO: 80878 - DNA, 440 bp, Zea mays
  unsure (1)..(440): unsure at all n locations
acactatannaatactaagcttanaanatgaggtagtaatgagctgtcactacttgtgtatactgtctgtgactgctcagtgaccttatcaaaaggaaaagcacctctggtattctattttttctaggcatgaatctgataacttgggcatcacagaaacagaaagttgtggctctcgcctcgtgtgaagcagaatatgttgctgctgctcttggaacatctcacggagtgtggctaagtattcttattgcagacatcaccaatgaacccattcagaaattcagactattggtggacaacatgtcagccatcgagctgagtaaaaatccagtttaccatgaaaggagcaaacatattgacactcgttttcactacattcgtgactgcattgatataggcgtggntgatgtaaatcacgtgggcactgaggatcagctggc

SEQ ID NO: 80879 - DNA, 415 bp, Zea mays
atactcagcttaggacatgctggttccagttctcaagcttttaaatttttctgcacagctcaggccctattccaatgcacgcatgaccacgaagaataccttctggcatatatacgaaggttcttgcgactgagggcacaagcgcctatagtgcccaatgaaattgtcattgaggccatgatcaagggtcttaggctaggacctactgctcaatatttcgccagaaagcccccacagaccctggagaagccgcttcagaagatggattgaatacattcgggctgataacgatttttgccaaagaagggaggaagcgtacagattctctgagatgaccatgggcttcggaggatgaatccacccgaggcatgttaagttgattcatagctccagtccgaacgatgacaaagggagc

SEQ ID NO: 80880 - DNA, 409 bp, Zea mays
aatctaagctggaagcacctgcaccccatcgtgttcgagacctttttatgaaacctgggcagccacgaatcttcagagtattacctttgagcattttgatacgaaatcagtgagcggtctgtatttctgtgcagttgataggttgatagactctagcatcggacaactctgcgcgatttgaatagattcatcatcgctaaggccttcacacctgaaacggaaaatataagttagtttactgactaagatcaacccaacacagagaacaaccaggcatgtctagtaatgacctgtacaaatcaatctcgcggagttttgggcaagaccttccgatgtgggtaagaccttcatcacttatttgtcgacaaataccaagttgtagactcgaaaagtccctgcatctggcaag

SEQ ID NO: 80881 - DNA, 408 bp, Zea mays
tgaacttggcttatctgcgatgacggaggatctttctttcatatagccttgcctacaacatcttgaaggtttgtatactttggcttgtcggtttgtaaattttgctatggtgaactatttttgtggaaatttttatcgccgttatttgttcactcttcgtttgcagggcttaattctaagcaaggctctgaaggcccaaaaggatgcagaggatgagagctgccgaatagcgcttgggaaccttcgttcggaggtcataacattgagaaatgaagctcttgaaaaggataagatcctactctctttggtggagagattaaaatctagcaaagccaggctttctgctcaagctgaagcccatgaagccgacatgcaagagctaaagaagaaagttgccgaagcaactga

SEQ ID NO: 80882 - DNA, 414 bp, Zea mays
tctaaagggagaacacattttaggattaacaaatgttcattttgataaagacaagatttgtaacgcatgccaagcagggaagcaagtcggtgcacatcatccacacaagaacatcatgacgaccgacaggccgcttgagctactccacatggatctattcggcccgattgcttacataagcatcggcgggagtaagtattgtctagttattgtggatgactattctcgcttcacttgggtattctttttgcaggaaaaatctcaaacccaagagaccttaaagggattcttgagacgggctcaaaatgagttcggcttaaggatcaagaaaattagaagcgacaacaggacggagttcaagaactcacaaattgaaggcttccttgaggaggagggcatcaagcatgagttctc

SEQ ID NO: 80883 - DNA, 414 bp, Zea mays
tcttcattaaaaccaaatcttctgcctttacagtggattttccaaattcaatatggctaggcttgcttggactcaaaatgccatcatcctcttcgtcatcactagcagtttcggcaatagcatcatccttctccgggataacctcttctccctcttgaacaactagcccggaatgtttcattacttctaagaccggggtcgtcttagttgcttcagtatcctcaccttcgtttgttagtctaccagtagacctgatcctagccatttcagtccttaagacgaagttaaattcaactaacttaacgtttgcccaaaggttacacagcaagtgcacaaaaaacagaaagcttcggcttcagtaaaaaatttcaatagcacaacgacgcaatagcaatgaatgttgttgtaacttct

SEQ ID NO: 80884 - DNA, 416 bp, Zea mays
  unsure (1)..(416): unsure at all n locations
actactaaagggagagcacattttatgactaaccaatgtttattttgagaaagacaggattngtagtgcatgccaagcaagaaaacaagtcggtacccatcatccacacaagaacatcatgacgaccgacaggccgcttgagctacttcacatggatctattcggcccgattgcttacataagcatcggcgggagtaagtattgccttgtaatagaggatgaatattctcgcttcacttgggtattctttttgcaggaaaaatcacaaacccaagaaaccttaaaggggttcttaagaccaagctcaaaacgagttcggcttaaggatcaagaaaattagatgcgacaacgggacggagttcaagaactctcatatcgaacgctttcttgaggaggaaggcatgaagcatgaattc

SEQ ID NO: 80885 - DNA, 401 bp, Zea mays
  unsure (1)..(401): unsure at all n locations
tagaagcactttcatttcttagacccccgtcatgttcttttcctcacacggntaagcgttagaacgaggattaggctccgataccaattgaaagttgcctagagggggggtgaataggcaagttaaaactttttcaacaaaaactagaagcaaactgggtaaaactgaattgatctcgaaattcacccagttaactttggaaatgagatgttctaaatgatccacagggttcaaagtagtagatctgagaagggcacttctcaaaatccacacaccaaaaagatataaacaaatcttccacgcaatgtgagagaacgaagaacacaaaataaacacaatgagcaagaacacaagagacacaagatttatcccgaggttcggtcacaccaccaaggtgccct

SEQ ID NO: 80886 - DNA, 410 bp, Zea mays
tgaagccatggtaagtagcataggcaagtaatatacatattgactcaagcctagctatgagtgcataggtttcaccaaaatccaaaccttcaacttgtgaataatctttggccacaagtcagattttgttccttgtcaccacaccatgctcatcttgcttgttgcggaatacccacttggtacctacaacattttggttaggacgtggaactaaatgccatacctcattccttgtgaagttgttgagctcctcttgcattgccaccacccagttcggatcccttagtgcatcctctatcctgtatagctcaatagaggacacaaaagagtaatgttcacagaaatgagcaactcgagatctagtcgttacccccttatgaatgtcaccgagtatggagttgacagggtga

SEQ ID NO: 80887 - DNA, 417 bp, Zea mays
tgtagtatttggtggctacttattgtatgcattcttgtttgaactttagctttgacatgtctttaatgcaggtaggataaagcgtctttgtgaaactgaacttggtttagtaactcaatgttgtcaaccaaagaatgtttttaaaggtggccgacaatatctccaaaacctggctcttaaaattaatgttaaggtaatgtcgcctaggtagttgctgaatttggcctttgtagatactattcagctcatatactgtcattttgggctgtttcgagctttagtataattggtatttcattgaaattatggtttgtgggtttggcttttatagctcaagaaagaaagagtggaacatgtaactaatttgaagattgcttacattgttcataatttgcacataggttggtggccgtaata

SEQ ID NO: 80888 - DNA, 343 bp, Zea mays
  unsure (1)..(343): unsure at all n locations
cgaagccatgcnnagtaacatagacacaatagataccatttgactcatgcctagataccggcgcatacgatataccgcaatccaaacctttgacttgggagtatccattggccacaaggcgagcgtagttccttgtcaccacaccatgctcattttgcttgctgcggaagacccacttgagtactgaccacaattgattaagacatggaaccaaatgccattcctcattcctaacgaagatgatgagctactcttgcatcgccaccacccaatacaaaacctgtaatgcatgctataccatgcgtggctcataagaggaaacaaatgagtattgctcacaaaa

SEQ ID NO: 80889 - DNA, 405 bp, Zea mays
tgcctttgcctctgtgtaccattcccagtccaacggatttgttgttcgcgccaacggcaaaattttcacagctgtcaagaaaatgctcctcgacgacaaaaaaggcaagtggcccgacctgttacccgaagtggtctgggcactaaatacaactgagtgcagggcgactgggtttacccccttccgcctattatacagatcataggccatgactccgcaagaaataaagcacaggtcgcctcggacagccgctgtcaccgtcccagacgtagatgagccaacttctaaggatctcatcgaccgagaccgcgtcttcgtccttcaagctctggacaaataccaagcccagacaaaatcgtggcgcgaccaggcagtcatcccaagggaatttaacgaatgggacct

SEQ ID NO: 80890 - DNA, 414 bp, Zea mays
  unsure (1)..(414): unsure at all n locations
tctgctcatctcccgacagatagaaatctccttgctgtctgggagacaatacaagaaatcctcttctccgctgccgntgaatactaatgccccatttggatatttcagcttctgggcatagtgttgagcttctcgntcttcttctttagagagcttttttcccgaagcatgacggataaaatattcagtattttctttcaaagcttcgggagtaggagcgacagctttttcaggcaaaatttgttctatagcttcttcctctgctgccttttctccaatttccgaggatttctctttggtgggctctgaaggcccagcttcggcgtcggcccggatcattatagcttcggcttcggtcagctttgtctcggttntgacctgtgtttttgaagccatggcaatttttcctggagt

SEQ ID NO: 80891 - DNA, 415 bp, Zea mays
tgaccgtcgacacctcgaagctcaggaacaaattgtagtctattcgcgacacgcagcgaatacgaataggcacaaacaaacaaacatatacatgcataagaacattacaccatgcaaaggaaaacaatttaaaacatgtaacaaagaataaatctcgcttctacggtcatgcgagaaaaaggaacatgatagtcagagctatagtcgagaagttattgtgtttacactaaacaagtattaattagaatatttaattcgacataattatatgaatttacctttatcaaatgtaaatgaatactactacttagttttgaccggcttaatattttaatagttgacggttaatcaagtaatttaattaatataagcggttctaagcgaggcaaattaacgatgcgcaacaaggtgctcg

SEQ ID NO: 80892 - DNA, 414 bp, Zea mays
tgtctgatctggagctcagagtggcgcaagaggatgcatgaatgagctgcagaaggggcagaccaagacctgctttttcttacacacgatttacattgggacatatcagtttgcttcgttgaatacaacctgaacgtactagctcgtgtagtacaatgcaacatatgcatggcattaccagctggttcaactacccatgaacgtgaatattcaacgaagcaaactagtcgagaatagattaggacatgcacgtgaatttttactacccatgaacattttatacgtcagaattggataaggatgagtctgaggcatgtccttttgatgcttcaactgtttgttaccatatctatcagataagagcagatgtcattgacaacctagaagaatatagttatcctgactctatggcat

SEQ ID NO: 80893 - DNA, 415 bp, Zea mays
  unsure (1)..(415): unsure at all n locations
ctagaactcacaagtgagctaaattttttaaagcttttatagctctaaacttcagagaagtgtattatcgcaattgttctctaaacatcactgtaataggtttcaaaccacaaactcattaaatttttggaggagctataaaaaagttaaaccgcctttagtcctaccagtacataagtatgaagacctagaagatctccaaacttcttaacaagtgatttacaacaccagttcggattaaggttagcttttcaattcaacataatattcagtgatttcacctttttctggatttgttgcttaaatctacatttccttttttatatgttcaactaaaacaacacagggaactcatggaagtgaacatgtntgttgatctacttctcctagaggtttgccaagttctttttcctat

SEQ ID NO: 80894 - DNA, 426 bp, Zea mays
gaactataaatactcagctttgccatgggcagattaataccagaaaggcctttattcaatgggagtggagagttggcgagagtagcgtgtaccctccgtggcaagaggctggacggtggtgtatctgtgctctcggttggcgtgaacccggtctggtcttaagaaccccggtggcgagttgacatatgcaagagttaagtgctacatatgtcgtgtgaatggagattcccagatgagtattaatcaattcagatcgccgttacttctcggacatgaagacttggtcactgccctacacgtagtattccagtgaacagaaaggggttgataaaaggatagctagcataggccaagtgcttgaactatggtagaaagaaatctagtgacaggtaatgacttaacttgctaataaaactggatttttaa

SEQ ID NO: 80895 - DNA, 409 bp, Zea mays
tgcattgcatatttaaattccctggattgcatctatgacttggctaacccaggtgagataaccgcccacaaagccaggggaaaagcttaacttgagtccaacccgacaaggcttagttttaagcttttaacacttaaattcttacttttcatgccaatattgggtcttggaatatgcctgcgggactggacttaagggggagattcaaaacttaaatcactcttgaaaacccctaatgccagccaaaatgccaaattcaccatttggctattttcttttaaaaatatctaacctatggcaaaatatttttgaaaggatttgaggggggccatacccggtcccaaccagggtattttggtggaatattaagtgggaattgggttgggtatgaagtaagatggaaaaattc

SEQ ID NO: 80896 - DNA, 413 bp, Zea mays
  unsure (1)..(413): unsure at all n locations
tgctccaggaatcaaatcaatctggtgctcaatcccacgaatgggaggaagtcctggaggtaactcagagggaaaacatctcggaactgctgcaaaaagttagtcatagatgcaggcaaagtgctagcaatatcatcaatagaaaagaaagcatctttgcaaaccaaggcatagcaacaagcatcagtagcatgagtttcaagaagatcagatttagtagcaagcatgacaggagctttcaatttaatttgttgctgaatttctgtctcattagttggttccttatgagtatttgcagctctatctttatcagcttgtacaatttcagcaagagtcaaaggtaccaaagtaatgtttttatctttatgcctaanagtgtatgtattactcctaccatggtgacgtgcatcagt

SEQ ID NO: 80897 - DNA, 420 bp, Zea mays
  unsure (1)..(420): unsure at all n locations
ttaactnggttgagaacacaaacggtcaggggtatacttgtaccctctaaggttgtttccaacaacttttctatctcactttctatatcgtcttttatttcaaactctactctataaatagtgtattatagtttaaaacaatgttttatatgatcatacatatggtttgctggagacgtcttaaggccatatccagcaaagacgtgtaaaacaatattctacactatagatgcaatgtttacaaagtaaaattcgaaatgaggagcgagaaagagagtgaaatggggaggatgctggaggcaggcggctgaggtaaaaagatgcatcgcggtcgttatttgtttttccgttttcattgtccctctcagcttagctattgtagtattaaaattaaaatcttagcttataaattcactagag

SEQ ID NO: 80898 - DNA, 418 bp, Zea mays
tgaagccatggtaagtagcataggccaataatatacgaattgactcaagcttagctacgggtgcataggtttcactgaaatccaaaccttcgacttgggagtatcccttggccacaagtcgagctttgttccttgtcaccaccccatgctcatcttgcttgttgcggaagacccatttggttcctacaacattttgattaggacgtggaactaaatgccatacctcattcctagtgaagttgttgagctcttcttgcattgccaccacccaatccaaatcttgaagtgcttcctctaccctgtgtggctcaatagaggaaacaaaagagtaatgctcacaaaaatgtgcaacacgagatctagtggttacccccttatgaatgtcgccgaggatggtgtcgacggggtgatctcgttg

SEQ ID NO: 80899 - DNA, 381 bp, Zea mays
  unsure (1)..(381): unsure at all n locations
tgagaaaggaaaaactgcagcaagtgttaagctcattattaatattgttcccaaagctataaatgaagaaatcaacatgaacaagaaaaaaggtaaaaattcaattagtcatgttgtttgcactgatcatctctccatgtcattcaagtacaaaaagggaaaaggaaaaaggaggtgcttcaagtgcaagaagttaggccacctcatcgcgtcttgtccgtacaaagacaagaatgaacggacaaggagttgttntggatgcaacaataaagaccacatgatcacttcatgtccggtcatgaagaatcaagaatgtgcatcctccaagatgactctcaccaaggaaaatgacaaacagcaagcgtcatgtcatgttaagcg

SEQ ID NO: 80900 - DNA, 415 bp, Zea mays
  unsure (1)..(415): unsure at all n locations
taaagccatggtaagtagcataggcaagtaaaatatgaattgactcaagcctagctacgggtgcataggtttcaccaaaatccaaacctttgacttgtgaataccccttggccacaagtcgggctttgttccttgtcaccacaccatgctcatcttgtttgttgtggaagacccacttggttcctacaacattttggttaggacgtgaaactaaatgccatacctcattcctcgtaaagttgttgagctcctcttgcatcgccaacacccaatccgaatcttgaagtgcttcctctaccctgtgtggctcaatagaggaaacaaaagagtaatgttcacaaaaatgagcaacacgagattgagtggttacccccttatgaatatcaccgaggatggtgttcacggngtgatctcg

SEQ ID NO: 80901 - DNA, 412 bp, Zea mays
  unsure (1)..(412): unsure at all n locations
tactcctccctgggaagggtcgntcatcatcaccaagattttgaagcccggaacatacaagctggccaacgatcaaggcgaggtctacaacaacgcttggaacatccaacagctatgtcgcttctacccttaagatgtttcaagttgttcatatacctcgttttttctttacatacataaataaagtctaaccgtcaaggaacgatcagccttacctcggcaaagcccgaccctccctcgggggctagaaggggggaaccccctctgcgtcaaaattttcctcggaaaagtctttgccagaacgtctttcgtgcttttcgactgcttcgatagtggggtcctaaaaacgacgagagtacacgtaagcggcaaggccgaccgagccgagggactcctacgcctccgggatacg

SEQ ID NO: 80902 - DNA, 414 bp, Zea mays
taagttccttgcacgtttatgcatccggtggctcttgctggattatcgacagtggatgcacaaaccacatgacagtggagaagaaaatgttcacctcctatgtcaaaaacaaggattcctaggatactattatctttggagatgggaaccaaggcaaggttaaaggattgggcaagactgccataacgaacgagcactcgatttcaaatgtgtttttagtagagtcgctcgggtacaatttactatctgtaagtcaattgtgtcatatgggctacaattgtttatttacaaatatttatgtatctgtctttagaaggagtgatggttcattagcctttaagggtgtattagacggcaaactctatttagttattttttcaaaagagaataccgatctatatgcatgcttaataa

SEQ ID NO: 80903 - DNA, 410 bp, Zea mays
tctatgtatatatatatttcgtattaactacaagatccttctctaacgatctatgggtgtagagttatcttggtcttgcagtcgggattgccataagactggtgtccacgctgaggtgagcggtacggatgctgagtcccgacgggagcgggggaaccaccatccaagtgacgacgttccgcgcgctcagcccgcaacagggcaatctcagcacgagccctactcagctcgtctaatgcatggtccagctccgtgtttagcacggcggctaggttgactgtgctgctcaacctatgattgccctcaccaacaggtgagacaatcacgcctcctgtgctgccagatggacggcggtggtaatatttcaggttaagaccgtcagctgccccaccgaaaaccgagcagtagtg

SEQ ID NO: 80904 - DNA, 412 bp, Zea mays
tgcattgcatgtttaaatttcttggattgtatctttggcttgtctaacctagttgagataaccgccaacaaagcgagtgaaaaagcttaactcggatcaaacttgacaagtcttagttttaagcttttagcacttaaattcttattcttgatgcaattgttggttcttgaaatatgcatgaggtactgcacttagggggagtattcaacactcaaatcactcatgaaaacccctaatgcaagccaaaatgcaaatttcaccatttgcctattttctctagaaattatctagcctatggcaaaatattttgtaaagtatatgagggtgccaatacctgtcccaacaagtgttattttgtgtgattataagttgggatttggtttggttggaaactagatagaaaaattcaaaa

SEQ ID NO: 80905 - DNA, 411 bp, Zea mays
ttccatatcatcatcatgtacacaaggaacatactatatttaacatagtcacattctaacaaaatacaagtgaatctcaataatatacatgatgagatgcaaattgtcatggtttcggaaactggggggacaatagatttgtgtttggtgggggatgctagcatggactcactctaaatggtgaaccacgtggggctcaaagatggatctgagaaaaggggttattgaaagtcgcctagaagggggtgaattggcaaatctgaaatttataaactttaagcacaactacaagccggagttagcgttataattaaattcgagtccgaaagagagggaaaacaaatcaacaaagaaataaagcggatgaacacggtgatttgttttaccgaggttcggttcttacaaacctac

SEQ ID NO: 80906 - DNA, 411 bp, Zea mays
tccccaatcatctcgttctagggaaaccgcagtctctctctgaagaaactattgaaaactaccacctcatcattttccggtgtcggagtgatttcttccccggcgaaacgaatcagcttcttctcagcttctctgaagtagccaagctttatcatcatgggcatatcagcctcagaaacggtagattttccaaagtccaagtggctgggtttggctggcatgagagtgttataatcttcctcttcttcatcaacatcatcttcttcgatgttagtctgttcagcttcggcagcatgtgcaccttcgtcagtagctccctctgtcacaacgagtcccaattgtttcatcacttcagagatcggggcagtctctgtggcttcggcctcttctccatcacgggtcaccctagca

SEQ ID NO: 80907 - DNA, 410 bp, Zea mays
  unsure (1)..(410): unsure at all n locations
nttccacctttttcttgtgaaantgtcttgtcttgtcatctcttttcttgaaggaattgttgttcttattctcactgtcacttgcattgacttttttgcccttgaatttgttcttcttaggctttgagaattgatgatagagatggtcaagcccatcatagttataatgatccatttcatagatgggccttcccttgctacctatgagaacttcttccttgaatcaaatttgatgccttctcgattgagcttctgtcatcttggtcgtgttcaccataagcatgagatttacatcattgactttattgtcactgagatttcaatatcttcttgaactttaactttgttcttctcatgattttccttgagagacatatccttcttatttgaagaagagccatcttcatcat

SEQ ID NO: 80908 - DNA, 412 bp, Zea mays
tgccaatacttgtcaaaacaacaacacctgcccgttcagcaactacagaccataccagtaacttggcctttcgcatgctggggactggatatgatcggacctttcaagaaagctcaggggggatacactcatgtattggtagcgattgacaaattcactaaatggatagagttcaagcccattgcttctttaacctctgctaaggccgtggaattcatacaggatataatattcagattcgggataccaaacagcatcataactgacttaggatccaacttcacaagttcagaattcttcgacttctgcgagcaaaagagcattcagatcaagtatgcatctgtagcacatccaagagccaacgggcaggttgagcgagccaacggaatgatattggaggcactcacgaaaa

SEQ ID NO: 80909 - DNA, 375 bp, Zea mays
taagatcgcctcccacaagtgatgatgcatgaactatattttctctccagactccattatccacaaaactggtgttctaaactacaatcatcaataactatctaagtctcctgaaatacttacaagcagctgttggactttgtgtggtccaatcagatagaacgatgctattatgctagctcagagtcgtaaagtgtctataatgaagaaacaacttgaatatctctaaaataggaatgtgtacatttaatttgattgaaaagctcgcttacaaatatgttcacctacctctgcccttaaaaaaaggctacccaatcacgctcattattttgttgataaacaatgcaagacaaatgatatttcactatatcgaca

SEQ ID NO: 80910 - DNA, 377 bp, Zea mays
tgggaggttcagagggagacaatgcatatgcatctgattgtcatgttcaagatcagggaaaaaacaaggccgatttgattccaggtggtttgaaggcacaaacagttagcataccagtagaagatgagcttggagactatgcacgtgcacgaggatttgagatatttgataaaatgtgctcagagaaagagagagttcaaatgagtgaggctgctctgaccgcaaaggcacgtatggcgttgtccatgggtgacagtgatatggcctttgagattgtgaaacagatgaaaggcctgtgtttaaagccaaagttgcgctcatatggtcctgctttaacagcattttgcaacagtggtaatgttgaaaaagcatttgaa

SEQ ID NO: 80911 - DNA, 377 bp, Zea mays
  unsure (1)..(377): unsure at all n locations
tcggcgattacttcgncggcccaggcttggaacatcttatcgatttgctcgccgagaacgaccccaaccgctatggcacgccgccggctgccaagtcggccctctcctcgctccccgacgtcgtcgtgactcacaccatggtcgcagctgcggagggcgctgagtgcgccgtctgcaaggaggatttctctcctggagaggtggccaagcagatgccctgtaaccacatctaccacaccgactgcatcatgccgtggcttgagcttcacaactcgtgccccatctgtcgctttgagcttcccactgacgatcctgattatgaggtgcggaagggctctaattctcagcaggctgttggtattgctgctgctgcatca

SEQ ID NO: 80912 - DNA, 375 bp, Zea mays
  unsure (1)..(375): unsure at all n locations
ntgggccagggagtcgctttagaggctagcgttctcgctgaccaagctttgggctctgttggtggtgccgagttggtccctgctggttcattacaagctgcttcgggtggcgaccttatgccaggtcatcaattgatctctcacgatttgggagtcccttcgttcttctccaatctccaggtactgtgatatattctggcctgacttttacaccatacgaactgctatcaacacgctcatctgttctccctatcaggcgttggtggacgggatggctagtcagctgaggttacaaggtgcttctgttccagaaggagcttcatccctggcacgttgaaatccggtgttgctccaacatcgtatctctgatttgga

SEQ ID NO: 80913 - DNA, 383 bp, Zea mays
  unsure (1)..(383): unsure at all n locations
ttagggttttctccatttgggtgttgntttacccccctcataaccatatttaagggtaagtaccctacactatggttttatttgcaaaataccataacaatacaacttgtttgaaatttttgcctagtgaatgcattctaggtgtatcaaacatatgaaatgctgatgcttatgatgttatgctcaagttttagtgacagtaacaccaggggtgttacagggttgtgaaagggaaatagggttaaccttttcctataattaattttggtggttgatagtcaacgcaaacacatggactaactagtttgctctagaactcatgtattacaggtgcataaggttcaacacaaaccaatgaaagaatcaagttatggacataattt

SEQ ID NO: 80914 - DNA, 374 bp, Zea mays
ttaccaaatggacgtgaaaagtgcctttctcaatggacgtatcaaggaagaggtctatgttgagcaacctcccggctttgaagatagtgagtaccctaaccatgtctatgaactctcaaaggcgctttatgggctcaagcaagccccaagagcatgatatgaatgactgcgagatttccttatcactaatggcttcaaagtcggaaaatccgatcctactctctttagtaaaactgttgcaaaagacttgtttgtatgccaaatttatgttgatgatattatatttgggtccactaacaagtcaacttgtgaagagtttagtaggatcatgatacagaaattcgagatgtcaatgatgggggagttgaagtatt

SEQ ID NO: 80915 - DNA, 374 bp, Zea mays
tgaaggaccactttggcagaagagcttccgaacgtgaagacttgtccggtccacggagtcgctttatccgaacgcgagttacttatcgcagaaggtgatgagtgaggtatccgtatctcggaggcgtaggagtccctcggctcggtcagccttagctgcttacgtgtactccgtcgtttccaggatccgcttttcgaagtagtcaaaacgcacgaaagaaattctgctaaaaagagatcttttttcgaggaaaaattcgacgcagagggggtctccccccttttagcccccgagggagggtcgggctttgcccacgccaggcccacccttccttgatgactaaacttttgtgtgggtgcgaaggatatgaacaa

SEQ ID NO: 80916 - DNA, 376 bp, Zea mays
  unsure (1)..(376): unsure at all n locations
tcgcatcctgngcctgctgcgtatggctgcttgtgtgcactacggtggatatccaaggatcagccgcgtgtgatgctcgtaacaatatgggatgtgctggtcgaagctaaaatgtgataaccatcttcatactcttttactccatccatctgtatctattttactccaccatttttattttcgcacgccgactaatccttgatctaaatattgagactatggcacaactctatactaatgtatactaccagcgggatgaatagttagcatttggctaaattttacactcaaacatgcgctattctgagttaatgtggcacgagccgcaaaaacctaacatcggttcttgcgttacgatttagaccattaacatata

SEQ ID NO: 80917 - DNA, 392 bp, Zea mays
ggacctataaaactcagcttctaagggagagcacattttgggactaaccaatgttctatttgagaaagacagggtttgtagcgcatgtcaagcacggaagttagttggtgttcatcatccacacaagaacatcatgacgacctacaggccgctcgagctactccacatggacctattcggcccgattgcttacataagcatcggcgggagtaagtattatcttgtaattgtggatgattattctgtggcggaaccgcccgaattattccaacttaagtgcctaagtcacgccttagaggctagaccacacttaaatgggaataacacgtcagtccctcggatctagtccgatgaggccactaacaggatcaagtaccacgtactcactcgat

SEQ ID NO: 80918 - DNA, 383 bp, Zea mays
  unsure (1)..(383): unsure at all n locations
tttagtttgggcttcgctgggggggctctattttttattcttttttcgnttcatgtaatatcacaattctgttacacaacagtcagtattttaactcctgaaactagtccacaaagtctgatagttacccatacagcattttctggctttgtagtaacctgggatacttagtgcactttcttttaatccaaaaaaagaatgtgatgctcatgactgtctttgatttgtcctctggtgtagtaccgataatatatcaagttcatcgggcacgtgatggatccagctttgccacaagaaaagtggaggcaaagcagaagggcctagttgtattcaccttgattgcttctttccaggtgcttatacttctataaatgataatattt

SEQ ID NO: 80919 - DNA, 371 bp, Zea mays
tgcgaatgttcttcatacacacatgttctaagcggcgatgccacagccagcccatgctagtcttagctattaagcatgcatctagaccggcctcttcttttgcaaaatcaactaaataaagtttgccgtctaatacacccttaaaagctagtgaaccatcatttcttctaaagacagacacatctacatttgtaaataaacagttatatcccatatgacataattgactaacagatagcaaattatatccaagactctccactaaaaacacattagagatagaatgctcattagaaattgcaattttacctaacccttttaccttgccttgattcccatcaccgaatataattgaatcttgggaatcttta

SEQ ID NO: 80920 - DNA, 367 bp, Zea mays
tgacaatgaggagatgactcttatcatcattagctttcggaaaaaccttaagcaaagcaagaaggactacaaaccctgctccatgagggtttgctataagtgtggtaagttcggtcactttattgctaaatgtctatatacaagtgacagtgatagggacgacgacaagaaagggaagaagaagatggagaagaagagatattacaagaagaagggtggcgaggcgcatgtggggtgggaatgggactccgacgagagctccaccgactcctcctccaacgaggatgccgccaacatcgccatcaaaaaaggccttctcttccccaacgtcggcgacaaatgcctcatggcaaaggacggcaagaag

SEQ ID NO: 80921 - DNA, 377 bp, Zea mays
tacacagtaacacgggtgccaatctttccaagtctttttccacggtccgagataactcttttgcacaaagctgacggaagaaatagcttaactctgaaagcgctagccagacatgctcagggacatagcctcgaaccatcgcaggaagaatccgttcaatccatatgtggaagtcatgactcttcatccctaagactcgcatagtagataagttcacccccctactcaggttgactgcatacccattagggaacatcaacatcttgatccactgaagtacttctttcctttgggccctacttaggacgaaatcggccttaggccttcttcacgtctttccgccacttggcggcttcatctctaggtttggtctatca

SEQ ID NO: 80922 - DNA, 376 bp, Zea mays
tagtcggttcactattacttaggcacacattgttatcatattgagagcacctagaggggggtgaataggtgatcctgtaaaacttaaaacttaatgccacaaaacctgattagaagttagcacaagaatgccaagtggctagagaagagtctttgcaagacacgataaccacaagaagatcaatcacagatagacatagtggtttatcccgtgcttcggccaagttcaacacttgcctagtccacgttgtggcgtcccaacggacgagggttgcaatcaacccctctcaagcggtccaaagacccacttgaataccacggtgttttgctttgctttactatatcccgtttgcgaggaatctccacaacttggagtc

SEQ ID NO: 80923 - DNA, 405 bp, Zea mays
ctatcaggacctatgaaactcagcttggtttatcttcttctctatgttctcaagctcaccacggatgtactgaagtgtattcaggcgaacacagagttgaggaaggcccaagggatcatttccatttgctgctccattttgtgatactcgaacctgcagattttgtggcttctcttttttcttgaataataacttggagccaacctcgcatcgtgtgagtggaggtagttggggcataaaagaattccgtgttcctgttcagtgacacaaaagcagaaatgaggttcaccaaaggaatatcattctcacaaattacttaaactttatctagtacttaccacagccagattttgctttagcaacataaagttgtaggcttctgtcgagcccagctgtcagatcagg

SEQ ID NO: 80924 - DNA, 382 bp, Zea mays
tcttaactgttgcactgtgtcactgacaaatcacagaatggccctcccccttctatttcttccccgcgaatgtccctgatcacgacgcgcacacagattgtctccgacgtggttcgtaccggccatggccggtgacggcggctacggccaactaccggggaggcattactaacctatgacagcctcggaacatacatcaattggacctaaacaccccgagaacgaccggtccacgagcacagcggaaaccgcggcgtcgatcttatgttctcaattacccaggcccgaattggtcaagcggatgctacggtgagctttacgggcctacatagctgctagaacaatagtggaggggcgcagagccttaccggaatggtctggg

SEQ ID NO: 80925 - DNA, 387 bp, Zea mays
  unsure (1)..(387): unsure at all n locations
ntgccaaggtgagtcacttcttgccttaattgctcattctcctttgcaacctcattcgaacatgtttctataacaatatcctcaacaagaacttggttgcaggggttagaatcatcaattaaatcaaagcaagaagtaaaagcatctttcttaataatttcaggtatttcaactaaagatacttctgaggtgctaccaatgttttctagtttagtagttagctcattattgtgtatgctaagaatttatattttcgctagcaagttttcaatagcttcttgagagctagctaacttagccttaagtttttcagtccttttaataaggctatcatcggtagctgaggatggaacattagactctaatttctcaattttagttattagc

SEQ ID NO: 80926 - DNA, 373 bp, Zea mays
tatgaagattcttcatcccaacatgggctagtcgtcgatgccagagccaacccatgttagtcttagcaattaagcatgtgtcgagttcagctctatcaaaatccactaagtatagctgaccctctaacacacccttaaatgctattgaatcatcacttcttctaaagacagtgacacctatatcagtaaaaagacagttgtagcccatttgacataattgggaaacagaaagcaagttgtaatctaatgaatcaacaagaaaaacattggaaatggaatggtcaggtgaaatagcaattttacccaaacctttgaccaacccttgatttccatccccgaatgtgatagctcgttggggatctttgtttttctc

SEQ ID NO: 80927 - DNA, 374 bp, Zea mays
tttgcttttcagcggcttgtgctcagtgactatgtttcatgaaaccaacaagatgcgtgtgccagtgtgccgtgtatgcatgcaccgatgaacctttggtcacttggctagctgataatggagcagttcacggttttgaccctggcacacaggagcagcgaaggtgaacactgaacagcgtccggactccggagtgaacgatggagagaaacgaagagagtgtttaggggacgactgactgcttgtattacttcatacagtaccgcatatatacactttacatgagtaatcaagctactaactaaggtggttctgtttgaaacctctaaaactaatagaggtcgggtgtctggacctgagggcttcataatcta

SEQ ID NO: 80928 - DNA, 377 bp, Zea mays
tctcaaataaacgtattcaatcacacgatttagttgaattgaatgcgtggaacccatcaaataaatgtttttaatgttttctcggcactggtattcacacaactgcattgaatcgaacaggcagagtctctcaaaacctttttcactcacataattcagtttaatgctttttgaaaggatatgctacttactcttgttactcacgcagtagtagatgagggactcacgcagtagtggatgaggggtcagataaactgccaaaccggggaagggaaagataagctagtagataactgtgttgtcgtgccctgtactttttagctaccgacgacatctttctcctccccctgcagtcccggaggcataggcacgaaacg

SEQ ID NO: 80929 - DNA, 376 bp, Zea mays
  unsure (1)..(376): unsure at all n locations
ttgcatcctgngcatgctgcgtatggctgattgtttgatctacggtggtttccagggaacaaacgtgtctgatgctcataacaataaagggtgtggtggttgaggttaaaatcgaagaaatatcttcattctcttttcctccaccaagcaatatctaatttactccacgattcttatttttgcacaccaactaatcctagatttaaatcttaagactatggcacaactcgatttgaatttaaactaccaaagttttgaatagttagtatttgtctaaattttaaatccaaacatacgctagtctgagttaatgtggcacgagccacaaaaacctaacataagttcttgcgttacgatttagacgaaaaacaaatag

SEQ ID NO: 80930 - DNA, 386 bp, Zea mays
tctaaagggagagcacattttgggactaacaaatgttcattttgagaaagacaggatttgtagcgcatgtcaagcaggaaagcaagttggtgttcatcatcgacacaagaacatcatgatgactgacaggccgcttgagctactccacaaggatctattcggcccgataccttacataagcatcggcaggagtaagtactgtctagttattgtggatgattattcttgcttcacttgggtgttctttttgtaggataaatctcaaacccaaaagaccttaaagggattcttgagacgggctcaaaatgagtttggcttaaggatcaaaaagattagaagcgacaatgggatggagttcaagaactcacaaatagaaggctttcttg

SEQ ID NO: 80931 - DNA, 369 bp, Zea mays
  unsure (1)..(369): unsure at all n locations
ntggcgcgtgtggtcgctcatccgagcctgctctctccttggccagtgcaagaaacctcttctcctccctacaagctaccattcttgtgtggaggccataggattttgcctactggttgcagagatatggagccaggaaatctggtctgtctccctgcccaaacccgaggcaaatcccaagttttgtcgtgtctagggctcgcgtcccaatgccatcttctggcacacgacagaggggttagttagacacaattttgtcaatggggccattaggattcgagttaaggatcaaggtgaacatccctgatctttggctcaaggtctgaatttcagaattctgaaattcagaattcccaatgagtcccaaca

SEQ ID NO: 80932 - DNA, 378 bp, Zea mays
tattatatgtgcatatctatgttcttgaagcggcgtggtagactggttacctcatttaaacaagatctatctttgtgaggtaactgttgggagcacatgcgtggaggctcacagcataatctggtctagcccgtttttaattcctggattcgtcactcgactacaccaaaaaaaagacacccccaccaaaaaggaaggctaagcaaaaagcaaacagaaaatctaaccgcaattaaagcgactatagttgcctccgtttactccccaaaatgccccttatataatcgaccagtatggtgcatgtgcgttgcaacgaaacacaaattattcgttaaaagcttattatatgtgcatatctatgttcttgaagcggcgtgg

SEQ ID NO: 80933 - DNA, 373 bp, Zea mays
tgcgaggagtattgtggcctttgctgttgactccctctatcatcactctgagtagagttgtgaattgacctgacgtgcctcggatggaatcttcctccgaagcccctggtcatttcagagaacatgtatgcttcctcccttctttggcggaagtcattgtcagctctaatatactcgtccatcttctggagcagcttcttcaaagtttgaagaggcttcctggcaaagtattgagctgaaggtcccggccgaagccccttaatcatggtctcaatgacaatttcattgggcactgttggtgcctgtgcccttagacgcaggaaccttcggacatacgcctgaaggtattcttcgtggtcctgggtgcactgaa

SEQ ID NO: 80934 - DNA, 382 bp, Zea mays
tctaaagggagagcacgtgataggtttgactaacgtacaattcgaaaaagatagaccttgtgcagcttgtcaagcaggtaaacaggtgggaggagcgcatcacagcaagaatgtgatgaccacttcaagacccctggagctgctgcatatggacctctttggacccatcgcctatctgagcatagggggaagtaagtatggtctagttattgtcgatgacttttcccgcttcacttgggtgttctttttgcaggataagtttgaaacccaagggaccctcaagcgcttcctcaggagagctcaaaatgagtttgagctcaaggtgaagaagataaggagcgacaacgggtccgagttcaagaaccttcaagtggaggagttc

SEQ ID NO: 80935 - DNA, 384 bp, Zea mays
  unsure (1)..(384): unsure at all n locations
ntacacagatcaaagtcattgacccctcttaatagtacggctatctaacctattaatccggtcaagtatcttctctaaactcctgaagaccggcaaaaacaaaacatatgttatacctttgccttcacttgatccacaaccaatgcttatgaatctccaagatttcctattctatgtggtccaaccctgcattcttatttctccaagaaccgttagtccacaaacagttgttattaattaccaaaacatcactaaggggcctagatgattcacaatctcccccttttggtaattgatgacaacactacataatatattcaagagaagttttgtttttccaaatctccctcataccttaggtataagaaggattttggagatgag

SEQ ID NO: 80936 - DNA, 388 bp, Zea mays
tttgtggagtgaggttaggtgatgcctcattttatcactccacatagaataatcttcaccttcaaacataggtggtatgcataatgggacggaaagtaatggagtgcgttttgaaatacgaggatagcgaaggggcatcttactatacttcttgcgctcatggcgcttagaagtgtcggatgccgattccgagccggaggtggagggtgacgaagagtcggtctcgtagtagaccaccttcttcatcttcttcttctcgtcacccttccgttgggacttgatggagacagaggattcctccttgtgcttgtgggcggactcccttgaatgtgttctccccgagcttgcggacttgttgccggtcccgatctccctcatggcggatgct

SEQ ID NO: 80937 - DNA, 374 bp, Zea mays
tttgtactggtggaccagaatgaagagggagattttccattatgtatcagagtgtgacacctgtcagaggataaaggcaagccacttgaagtcagctggagctttgcaaacactgttcgtaccttcgtggaagtgggacgacatcagcatggatttcattgtgggtctgcccaacacctctcgtcatcatgattcgatttgggttattgtggaccgattgacgaaagtggcacattttcttcctgtgcacaccactgataaggctcagaaatatgcagaattgtatattgaccggatcgtgtgtttgcacggattaccacggaccattgtttctgaccgaggagcccaatttgttgccagattatgggaacaat

SEQ ID NO: 80938 - DNA, 374 bp, Zea mays
tactcctccctaggaagggccgttcatcatcgccttgattttgaagcccggaacctacaagctggccaacgaagaaggcgaggtctacagcaacgcttggaacatccaatagctacgtcgcttctacccttaagaagtttcaagtcgttcatataccctgttctctttacatacacaaatagagtctaaccgtcaaggaagggtcagccttgcctcggcaaagcccgaccctccctcaggggctagaaggggggaaccccctctgcgtcaaaattttcatcggaaaaagtctttctgccagaacgtctttcgcccttttcgactgctttgatagcgggatcctgaaaacgacgagagtacacgtaagcggcaag

SEQ ID NO: 80939 - DNA, 380 bp, Zea mays
ctgtatctgatcctaacttcggggttgggtgactttttcttcttcttggccttcaagcgggaccacttgagctggttgaccttggcctttctcgacatcttcttctttggaggcggctgctgcctccacttctgcttggtgacacccatatcgccgactccaaacctcgcaaacttgccatctgtatcaagtgtgatcgtcgtgctcccgcacctcacgggctgctgaaaccacggcctcctccgcccgtgtgcctctggtccaaaccatccccacaaacacttgaacgatgctgaaggatatgaggaagaggacccacaccttcgatgccatgaatcactaaaaacagccagttcagcagagattagagcaagcaaaaa

SEQ ID NO: 80940 - DNA, 375 bp, Zea mays
tgggcaaggctcacggtctcaccaggaagctatctgtgggcttgaatcgaacggagggggattggagaggggttggccacggcggtggctctcgagcggcactggcgggctgcggggaggtcgccggaggcaagggctggctcgggcgagtccggcgaggtacggaggaagcaatggggaaggcaaccgagcgctggggtgggttttataggcgcggacgcgaccggggcgccggctcaaccgtttggcgcgacgcgggcacgcggggcgcgcgcgggcatgccctggcgagctcagagcgcgtcgaacacgtggcgcgttgcttctgcccgtgttcttcgctctgctgagcggccaggcgtacgaatcttgccc

SEQ ID NO: 80941 - DNA, 366 bp, Zea mays
tctgcacgcgcgcgcaggtcctaaagactgttactatttggccagcgaacaacgtacgattatgatatttcgattgcatgatattgtttgcttgatcgggtcagattggtagtatggataattgttctgcgagctcttatttcttcaaggaaaggctcacggcagctgtctcaggtgcttcaaggagtttacgtacggatcagcatttattggttcaggtatgggtgcccatcaggggggaggtgaggcagccatttgtgaactgtagctaattagtttcatttacaagggctggaaactgcaactaattaggagtatcacttacaaaggcggggaatgctagctagtgatgccttctgaactagc

SEQ ID NO: 80942 - DNA, 389 bp, Zea mays
actataaaactcagcttctaagggatagcacattttaggactaacaaatgttcattttgagaaagacagggtttgtagcgcatgtcaagcgagaaagcaagttggctcccatcatccacataaagaacataatgacaacagataggccactggaactactccacatgaatctattcggcccgatagcttacataagcatcggcgggagtaagtactgtctagtaattgtggatgactattctcacttcacttgggtattctttttgcaggaaaaatctcagacccaagagaccttaaaagaattcttaagacgggctcaaaacaagttcggattaaggatcaaaaagataagaagcgacaatgggacagagttcaagaactctcaaatc

SEQ ID NO: 80943 - DNA, 373 bp, Zea mays
  unsure (1)..(373): unsure at all n locations
tctaaagggagagtacattntgggactaacaaatgttcattttgagaaagacagagtttgtagcgcatgtcaagcaggaaagcaagttgtgcccaccatccacacaagaacatcatgacaacggataggccactggagttactccacatggatctattcggcccgatagcttatataagcattggcaggagtaagtattgtcttgttattgtggatgattattctcgcttcacttgggtattctttttgcaggaaaaatcatagacccaagagactttaaagggattcttgagacgggctcaaaatgagttcggattgagaatcaaaaagataagaagcgacaatgggacatagttcaagaactctcaaattg

SEQ ID NO: 80944 - DNA, 378 bp, Zea mays
tcgggtctcttgccctgcaactcttgtcaacatgactcagaaataactttggaatcggttttaaggaccacccttcttatccccattgcttttaacttacgaagccccaaaagcaaagcttcgtattcagcaatattatttgtgcagttgaagtcaagctttattgcatagcatgttctgactctggaaggtgcaactaagacagcagctgcacctgccccgaaggttccccaagaaccgtcgcagaacaccgtccaagctttggcatctttatttgcttcttcttcctaagcccctggcatccagtcagcgatgaagtctgctagcgcctgggactgaatcgaggatctatgcacataatcaatgctgaattcgttg

SEQ ID NO: 80945 - DNA, 382 bp, Zea mays
tcggctccatctatattgtggatggattttgagtctgtccaatttccctcagcctttctggcagcttcctgacttccatgaattgcaataggcccttgttccgaaggtatcttcatgcataagtatgctggatgaagaattgcttcgaaagcattaagtgtcccacgaccaatgattgcattgtaggggtattccatgtcgacaatatcaaacacaacttgttcagtccttgtgttgtggacaaatccgaaggtcactggcattgtgattttgccaagtgctacgatctgccttcctccaaagccataaagagggtgtgtagcatcatgaatcttgtcctctggctcttgcatctgtctgaaggccttagcaaatgtgatat

SEQ ID NO: 80946 - DNA, 383 bp, Zea mays
  unsure (1)..(383): unsure at all n locations
ntcctgcttcacagcttcggcgctgtgtcaacctttgtatctnttgagcttctccctttctgatacgagtccgaagatacctgctcacacattataaagccgcttctcccttgaagaccttcggcgacgaagcatagacccaacacaattggaactagaacacgtgacgtctagttattcaccaacccatagtgcgtctcgggcataagctttaactctcgcgagaccttttctcatttctttctaaccatggtaaactcattattgtatgtgatattttatgcatgtctaatctactgattctcttgtatggtgtaatgttggtttcctaatttcaatggatggatatatgtatgcttgcaatcgcttagagaacgatccga

SEQ ID NO: 80947 - DNA, 388 bp, Zea mays
tcttcaccatgtgatcacggttatcttgagaaggttgggcaatgcatttccctttaagttgtgtcaagctcttctttagcctctcattttcttctttgagcttttgatatgaatcatcatttgttcctgcagattctagctcaaaagaagatttgcttgtcgacgaacaacaagcattagcacatggtaatatagtatcaatttgaatacatgtgcatgagtgaggttgttgggattttaaattttctatcacaacctcatgagcaatgtttaatatgatatgatcatctataagattttcatgagaacatagaagcatatcatatttattttgaaaagctagattttcaacttttagcttttctatttggtccttaagcaaggtatt

SEQ ID NO: 80948 - DNA, 370 bp, Zea mays
tgagagctgagagtctgagtctaagttttttctgattgtgtcccagtttgtgtcgcgtgccctcccttttatagctcaaggggggcacgtacaacgacactgaaccccgacatgtgggcccagggacataacggatagaataccttgtgccatcttcttgtgccccgatatccaccgcttgagttgcttcacttgaaatcctaagaaatacttcaactcccccatcatagacatctcgaatttttgaatcattatcctactaaactcttcacatgtagatttgttaatagacccaaatatgatatcatcaacataaatttggcatacaaacaaatcatttgcaatagttttagtaaagagtgtaggatcg

SEQ ID NO: 80949 - DNA, 374 bp, Zea mays
ttatcaaatggacgtgaaaagtgccttcctctatggaccattcaaggaagaggtctatgttgagcaacctcccggctttgaagatagtgagtaccctaaccatgtttacaaactctctaaggcgctttatgggctcaagcaagccccaagagcatggtatgaatgcctaagagattttcttatcgctaatggcttcaaaatcggaaaagccgatcctactctctttactaaaacaattgcaaatgatttgtttgtatgccaaatttatgttgatgatatcatatttgggtctactaacaaatctacatgtgaagagtttagtaggatcatgattcaaaaatttgagatgtctatgatgggggagttgaagtatt

SEQ ID NO: 80950 - DNA, 381 bp, Zea mays
tcgtcttgaccatgcttttgtatatctgcaacctgattccgaagacacctgctcgcatacttggaaaacattgtcaaattatgtttctgaggacctttggaagccgaaggcccccaacagtcttgaatataattttccttcacggaactccagaaaactagggtttgtggagtcagtattttagttcatagggcacacactacttagaagttttagggttttggggtttaggtatcaaacattgtctaaaccatgccaaactttacccaagacttctaaatatcattttaagcttatccataaagtttggaaatttttggagttactaaataatttttaaaattccaggagtatgggttttaactattttaaatattccat

SEQ ID NO: 80951 - DNA, 385 bp, Zea mays
tctaggattctaagatacgcagcagacgacactctatagtctggtcttgctacacgggaatcggctctagctcgatttgatggtctggattccgcaaatacttcctcaacataaagacatggaatacatggtgtactctgatcatagactccaacaattgtaggagctaagccaagctgccaactcgggctaagatagtagacggtcctatataactcggaccaagctttcctgacaccaaatcaacattgacacatgcaagtacttcaatgaatatatatataaatacatattgtgctcaaatagcctaaaccaaacctatacaaacaagagtaacttcaaaagatcaatttaatgcttgcatatttctagacagcagcacaac

SEQ ID NO: 80952 - DNA, 369 bp, Zea mays
tggacctactatgtcctacttgtaaacaactagtgtccaattattgataaaacaactagacagtttaaccagcaatcgaattttaaaacagaaacatcctgcaatagttcattgttgggggcttagaaactttattgccctggaatatgctaaccctggttgaagctcagcagctagcgaaggaaggcatgcatttttttgtgatatcttttttaaaccatctgtttcctcataatgttttacccttgaagtttctgattccatctttaagttatccaacacttgtcgaagttctactttttcttgcttctcattctcaagctcaacctgaagatgctggacctataaataaacataacttattacttt

SEQ ID NO: 80953 - DNA, 375 bp, Zea mays
tcggagccgaagcaactctagctttgaacgaagccatcagctcagcaagtggatgtgagttcactggaagtgggcaccaatgttggggacatgttctcaaatactatgaatcaagaacaaggcaacacataagaaggttaaatggttaatgcccttcgtccttcgaaacattatttcccttgggatataacgatcttcagacgaaggtcatgaaggacataccttcatcattatgatatatgatagtgttaatgggaaacatatgaaatacaaaagatagcacaaacatttatatattattattaaatcatttctattttattaacacagaaaaatagaaatgacattaaattacaagtgtaccttcggcttgaa

SEQ ID NO: 80954 - DNA, 378 bp, Zea mays
tatggcacatatttataaaccaacataaagataataatgcaatggtttttatctccaggtttggtggtttgccagccacttaatctctattgagccaagctcaaaattaccgtccaccctcttactaatggtaatcacacaaacaagatcactctctctatcaaagagagcgttcacacaagagcttatgacactcagacccgatcagaccatttggtgctcataacacctcattctaccattagttgtcctccgtgaacttccgtgggctgagccataatacccctcacaataacaattatttgaaggtggaaacaattaccaagagcctctcaaggattctccccaaacacaaagctagatgggtgataaaattca

SEQ ID NO: 80955 - DNA, 370 bp, Zea mays
tataataaaagaatagaggcaagagctcgtccgtatattattatagaaggggagttatacaagcatggagtttgtgccccgctgctcaagtgcttgtctagagccgaaggtatagagttgatgaaggagatacatgcaggcctttgtggatcccacatcggatccaggccgttacttggaaaagtgttccgtcaaggattttattggccgaaggcagcttcggatgcagctgagttagttcaaaagtgcgaaggttgtcagaaatgtgcaagagatcaaaaacaaccttcgtctttgacacagctaatacaacccatctggccattgcaaaggtggggcctcgatttgctgggcccattaccaccggctc

SEQ ID NO: 80956 - DNA, 370 bp, Zea mays
agctgaagactgctcggcagtaagcttccgagcgtttttgctctttctgtccacggagtcgctctatccgagcgcatattacttatcgcagaaagcgatgagtgtagtatccgcatcccggaggcgtatgatgccctcggctcggtcagccttggctgcttacgtgtacctcgtcgattccaggaccccgttttccgaagtagtcatgaagcacgaaagaaatcctgctaaaaagagatcctttttcgaggaaaaattcgacgcacagggggtctcccccctttcatcccccgagggagggactggctttgaccaggctacgtcgacccttccttagacgactaaactttgcgtatgtgcgaagtctata

SEQ ID NO: 80957 - DNA, 381 bp, Zea mays
tcacatctctagactaactcggttgcatcactctttgctgttggccaatagaaaccagacctgaagactttccccgccagagttctggatcttgcgtgtattccacactgtctggcgtgaatctcatctagtagctgtttcctagtaaccgaggaaatgcacttcatgaggactcctgttgcaccccttctgtaaagtgcctcccctatgagggtgtagtgggccgactgtcttacgatgcgttctgctatggccttatcatccggttcttcttcattctttatatacctgatgataggctctctccagtcactagagtctgactttggctggctcaaagcgttgcactcttctgcctgatctgagggaatgcttgggcgc

SEQ ID NO: 80958 - DNA, 387 bp, Zea mays
tgcacatagctgtccatactagcactccctcaccttgtttttgtaatgggagttctagcctaatggactaatagtcttaatctctactcctttaaaacacgagttttgtgcgtcgtgcgtcacacgcgtagagtagatctatttttctccccatgtctcgcttaacaaacaggtcgttacctctcagataggtagtgagaaaaacactcaagcccaacatatgacacgaagctacacacagcgcagcgctcccggatagtaccacgtctctaggtgaaggaggacgaccaagcgagctataaaaatggacatgtctccttttcaacttacctttctcccttttggctaagataaaatgcagtatctacagtttacgagcgaccaagt

SEQ ID NO: 80959 - DNA, 365 bp, Zea mays
tctttcgaatgattttctgttaagaatattcctgaggggaaaatgagcatgctgatctgctagccaagtcagcggcacaggggctttctctaccttcggaagtattttttgagacaattagagaaccttcggttgaactcctcgaaagagcagtacttacaatatcacctgtccatagtgaagattggaggactgagattatatcttttgtccaaggtaattatctttcagatgacgaagcttataataagagaatggaggcaagaacaagaccatatgtgataatagaaggggagttatacaaacatggagtttgttctccacttctcaagtgtttatctagaaccgaaggtatggagctgacg

SEQ ID NO: 80960 - DNA, 373 bp, Zea mays
tcaaagggtgccatcttgatactttcttggtagctattattatatgaaaactccgctaaaggtagacattcatcccattttagtgagaaatccaggacacatgcccgcagcatatcttcaagtatttggttcactctctcagtttgtccactggtttgaggatgataggccgaactgtggagcagtttagtacccaggaatttgtgaagttcttcccagaatttagatacaaattgtggtccacgatccgacactatagtctttgggataccatgcaaactgagaatacgggcgatgtacaactccgcatagatattgacgtgatattttaccttgaccgggagaaaatgggcgatctttgtaagtcgatcga

SEQ ID NO: 80961 - DNA, 380 bp, Zea mays
tggagtcacgtaagctgactactgaagcagctgtcttaagatgtgtgggaatccggtggtgttagcgaggtgtgcattcaaggtgcttgtgaaggaaggacataagcagcagacaaagcaaatgcccatccgggggggactgccccactggtgccagagcaacagaatgctgctgagctcgaggagaagcagaacatgaagcggaaaattcttggatacaacgaaaggtatgaagaagaagaagaactgaacggagcgttcgccaggaagtgggaacggctggtgtcaaggaggaaggactgacgagcaccctgctggtcgcgttatctgggacggcccaaacagaggtggtggtgtacagtgcagcacagcggcactac

SEQ ID NO: 80962 - DNA, 383 bp, Zea mays
tgatgtttagaatgacatcagcttctcccaaatctttcatttcgaagttgctcgatagaagatttttaacttcctcaatcacattgagatttgatccaaagatcaagatgtcatcaacataaaggcacagcataacagactcacccccaccataccgataatacacacacgtgtcagattcatttacagcaaagccagcagctgtaagagtattatcaaacttttcatgccattgctttggtgcttgttttaggccatataatgattttatcaacctgtacaccttgttctcttgaccatccgcaatgaacccttctggctgatccatgtagatctcctcatccaactctccatttaggaaagttgtcttaacatccatctga

SEQ ID NO: 80963 - DNA, 369 bp, Zea mays
  unsure (1)..(369): unsure at all n locations
tctaaagggagaacacattttgggactaacaaatgttcattntgagaaagacagggtttgtagcgcatgtcaagcaggaaagcaagttggtattcatcatccacacaagaacatcatgacgaccgacaggccacttgagctactccacatggacctattcggcccgatagcttacataagcatcggcgggagtaagtactgtctagttattgtggatgattattctcgcttcacttgggtgctctttttgcaggaaaaatcacaaacccaagaaactttaaaaggattcatgagatgggctcaaaatgagttcggattaaggatcaagaaaataagaagcgacaacgggacagagttcaagaactctca

SEQ ID NO: 80964 - DNA, 391 bp, Zea mays
ggacctataaaactcagctttgtttcagttctgatattattgcttcatcttcctccagtaaaccttcggctgcctggagctcaaagttctttttctcaaaagcatctgattgctcctttattttgttttccaaatttccaattataacttcatgctttttatcttcaaggtcttgctgcatttgcaaggctttgctcaatagcatgctctacataaacacaaccttcgtcagacgtgtttttattagaagcaataaaagttaagggacaagttatttaccttgaagttggagtaaaataaactaccaacgacatgttgtcgtcggtagcggctgatatctgtttctagcttcgggaatccaatactcttggacagggtgctgataactttg

SEQ ID NO: 80965 - DNA, 378 bp, Zea mays
tataacaagagaatagaggcaagagctcgtccatatgtcatgatagaaggggagttgtacaaatatggagtttgtgctccgttgctcaaatgcttatccagaaccgaaggtatagagttaatgaaagaaatacatgcaggcctgtgtggatctcacatcggatctaggccgttacttggaaaaattttccgtcaaggattttattggccgaaggcagcttcggatgcagcagaattggttcaaaagtgcgaaggttgtcagaaatgtgcaagagatcaaaaacaaccttcgtccttgacacagctcatacaacccacttggccattacaaaggtggggccttgacttgttaggtccgttgccaccggcccaagggaac

SEQ ID NO: 80966 - DNA, 375 bp, Zea mays
tgatggtcaagtcaaaaggcaggccccaatatattttgtttccgaggtccttagtttatcaaagaaaaattatacagagttggagaagatactgtatgctgtcttgatggcctccaggaagcttcggcactatttccaagcttacaacataattgttccttcatcacaacctctgaaggatattatgaggaacagagaagctactggaaggattggaaaatgggctgcagagctcaatgaattttgtattgaatatgttcatagatcttcgattcagtcgcaggcactggcagactttattgctgattggacaccaggggctcaggaggaggaaacaaataaagacaacgaagcctggatagtgttttgtgatgg

SEQ ID NO: 80967 - DNA, 385 bp, Zea mays
tgtgaagagtattgtggcctttgctgctgactcccttcatcatcagtttgagtagagttatgaattgacctaacgtgcctcgggtgaaatcttcctccgaagcccctggtcatttcagagaacctgaatgcttcctcccttctttggcggaagtcattgtcagctcgaatgtatttgtccatcttctggagcagcttctccaacgtttgtggtggcttcctggcaaagtactgcgctgaaggtcccggccgaagccccttaatcatggcctcaatgacaatttcattgggcactgttggcacttgtgcccttagacgcagaaaccttcgaacatacgcttggaggtattcttcgtggtcctgggtacactgaaataaagcttgag

SEQ ID NO: 80968 - DNA, 386 bp, Zea mays
tgagtcaatcattttgcaaaggataattgatgctcaaaaagataatctgggtatgaagcacatacgagagaagataagggctggagtagccaaatgttttaaggaagacgatcaaggtgtgatatggtttaaaaaccgcatagtagtgccaaagaacgaagaactccgccagcaaattcttgatgaagcacatcttagtcgttattctattcatcccggaagcactaagatgtaccaagacttaaagcaacattactggtggacaaagatgaagatcgaaattgcacgctatgtggctaagtgtgacacttgcagacgtgtcaaggccatacacatgaaaactgctggtccattacaatctttgccaatcccaacatggaaatggg

SEQ ID NO: 80969 - DNA, 386 bp, Zea mays
tctaaagggagaacacgtgataggtttgactaacgtgcatttctaaaaaaatagaccttgtgcagcttgtcaggcaggtaaacaggtaggaggagcgcatcacagcaagaatgtgatgaccacctcaagacctctggagctgctgcatatggacctcttcggacccgtcgcctacctgagtataggaggaagtaagtatggtctagttattgttgatgacttttcccgcttcacttgggtgttctttttgcaggataagtctgaaacccaagggaccctcaagcgcttcctcaggagagctcaaaatgagtttgagctcaaagtgaaaaagataaggagcgacaacgggtccgagttcaagaaccttcaagtggaggagttccttg

SEQ ID NO: 80970 - DNA, 372 bp, Zea mays
tcttcaccatgtaatcacgattatcttgagaaggttgagcaatacacttcccttttagttgtgtcaagctcatctttagcctctcattttcttctttgagcttttgatatatatcatcttttgttcctacaaattctagctcaaaggaaggtttgcttgttgacgaacaacaagcattagcacatggtaatatagtatcaatttgaatacatgtgcatgagtgaggttgttgggattttaagttttctatcacaacctcatgagtaacatttaatatgatatgatcatccataagattttcatgagagtataggagcatatcatatttttcttgaaaagctagattttcaacttttagcttttctacttggt

SEQ ID NO: 80971 - DNA, 371 bp, Zea mays
taaagccatggtaagtagcataggcaagtaatatacgaattgacttaagcctagctacgggtgcataggtttcaccgaaatccaaaccttctacttgtgaatatcccttggccacaagtcggactttgttccttgtcaccacaccatgctcatcttacttgttgcggaatacccacttggttcctacaacattttggttaggacgtggaacaagatgccatacctcattcctcatgaagttgttgagttcctcttgcattgccaacacccaatccgaatctcttagtgcatcctccacccgttgaggtggtcacaaagtgtaatatcccaaaaaaaatgttgaccaaaagttaatctctggtgcgtggatg

SEQ ID NO: 80972 - DNA, 381 bp, Zea mays
taggaatgaactaaacatcttagattctcagaactttggttgaaatcttgcacacattgctcatgtatatacctttgatcatgcctctttcatttggtacagatgcatatttcttattcttcttgtgccacaggtaagactaatgtgcttccaagtgtattactattgttagccttagattgaaagggaaatggagtaatcggcaaagacaaggcttccactactactttgtcggtatcatctatcctttgccctactcatgaatttacattcctatctttcttgtaaaagacctctagttctcttcatttttgatgcttaatgccaaagagggagagagtaataggcccaaagtaaaaggaccacaccaccaccctgttt

SEQ ID NO: 80973 - DNA, 388 bp, Zea mays
ctcaagcttctaaagggagaacacgtgataggtttgactaacgtgcatttcgtaaaggatagaccttgtgcagcttgtcaagcaggtaaacaagtgggaggagcacatcacagcaagaatgtgatgactacttcaagacccctggagctgctgcatatggacctcttcggacccgtcgcctatctgagcataggagggagtaagcatggtctagttattgttgatgacttttcccgcttcacttgggtgttctttttgcaggataagtctgaaacccaagggactctcaagcgcttcctcaggagagctcaaaatgagtttgagctcaaggtgaagaagataaggagcgacaacgggtccgagttcaagaaccttcaagtggaggagt

SEQ ID NO: 80974 - DNA, 384 bp, Zea mays
tgtcaataatataagcacaaaagagagaaggctgcttaagcagatcagccaaagcctatgctcctatgtgaagatatagcagatcaaagggtactgctgggatctcagctatatgatgagcaagaaaatactctactaagattcttcttcaacaataaagatgtcttcacttggacaaccaatgatctttgtggtgtcaacagagatgtcatttaacattcacttaatgtggatccatctttccggccaaggaagcaaagactttggaagatgtatgaggattaagctgaaggtgcttggaacaaagtaaagagacttctcagtgctagtgttatcagagaagtaacatatctagaatgactagccaacactgttatggtgaag

SEQ ID NO: 80975 - DNA, 369 bp, Zea mays
tatgtcgatgatgtggtaatcaaaatagaaaacccagaaaacttcatcgaagatttacagcaggtcttcaagagcttgaggcgctaccactggaagctaaatccagagaaatgtgtgttcggtgtaccagccggaaatctactcgttagccatcgaggaatcgaggctaacctagaaaacattgaagctatattgaggatggaaccatcacgatcacagaaaaggcgtagaggctcactgggtgcatggcagcattaagccgtttcatttcaaggctcggtgaaatgggaatgtcaccctataagctactcaagaaggtaaacaaattccactggactgtagaagcccaagaagatttggaagcactca

SEQ ID NO: 80976 - DNA, 369 bp, Zea mays
tcaattggaagtctacttggtgtagattcttccttcttctcttctggtgctttgaatgcaactggttgcacctcgggtgtagaggtggcgccttgctccaagttgacaatatgtttggagtctttgatcataagttcaaagatcacaaacttgccaatcacctcctcgggagacatctgtttgtatctaggatccccacgaattaattgaacttgagtaggattatgaaaaacgagggatcttagaataaccttgaccatttcgtggtcatcccatttggtgctcctgaggttgcgcacttggttgaccatcgtcttgagccggttgtacatggcttgcgactcttcccctttgatgaggacgaatcaa

SEQ ID NO: 80977 - DNA, 376 bp, Zea mays
taatatgaagaagctactgtggtttcatatgcttttgagcttggtgcaggatattgacatatttatttcaggttagggagcctccttgttcacatccttgccctttgccatgtcatctgaacgattgtccttcttgtaaagtccttgttaaaagaccatgccattgtggtgctatggtgcatgcttttgaatgtgtgttttataacaacttaaatgcaaaggatcagattaaaataagatcttgtggtggcccatgtcataggtcagtttggctcctaactgtttccgtatcgaaaattgtacaatttttctgttgttactaaactcctatcacaaatttccttaaatttatttgattttaccaagcatctgaaca

SEQ ID NO: 80978 - DNA, 380 bp, Zea mays
ttcttctcgtcgtcgatgagcgacgccaacgcgagcgcctcctaccagtggtgtttgttcggggtttccaagtaagaaacatggattcatctttagcgttggtttatgaaaatgactcacaagtcagatccatggaaaaatattacggagaataaatgtcacacatataaaaaagaatttaagttgaaaacattattcaaacaaaaagaaattgtatgcaaggctcttctttaaatactactcgctccatccaaaaatataattcaggaatctcgttgataattatctactactacacattgtgcaaaagtagcaggtaggctttgggagagatgtagtagatatttttattgtaacagatattgacataaacacacatg

SEQ ID NO: 80979 - DNA, 394 bp, Zea mays
ctcaagcttttacttttacacaacaattcataaaaaaccaattctcttttttgtcgaagcaaccactttggtacataaatgctatgaatgaatgcttatgtatgcaaatgccatgatgtaatgtaatgtgaaaatgaatgtccgaagcgtatatccgaagccacactcatccatcattttcttaggagcaaaacacacgtcagctctgcattcccttaggaacgactttggagcatctttgccttttacttaggcagtatcagcgttgacttttcgctgtaagctctgcatccccctagggacgtctttggagcttcttcgtcttttacttagacggtataagctctgcattcccttaggaacgactttggagcttcttcgccttttactttcg

SEQ ID NO: 80980 - DNA, 386 bp, Zea mays
  unsure (1)..(386): unsure at all n locations
ntgcattattttaagacctacaaagctgaagttgattatctactcgagaggaaaattaaacggttaaggtctgatcgtggtggagaatatttttcgggtgatttttctgatttttgtgtggaacatggtattattcatgagaggacaccgccatactcaccacaatccaatggggttgctgaaagaaagaaccgtactctaactgatttggttaacgccatgttagagacttcagggctatctaaggaatggtggggtgaggcgatcttgacggcgtgtcatgtcctgaataaagttcccacaaagaacaaagaaatcacaccattcgaggaatgggaaaagaagaaattaaatatctcctatttgcgcacctggggttgtttggc

SEQ ID NO: 80981 - DNA, 378 bp, Zea mays
gctttggaaatcccatattcttcgccatctcccggcttacagatatttccttgttgtttgggagacaatatagaaaatcatcttcgtcggtgccattgtacaccaaggccccctttgggtactccaactcccgggcgtagtgtttggcttccgcaatttcctcttcagacaaccttttacccaaagcatgtcgaataataaagtcaatatctttagaaggtgcttcgggagtagtagatttaactttctcaggcacgtcttttttctccagagccaaaccaacatctgaagattcttgttcagttctctgctcagcgccagcaggctctgcttcagtgggcaccgtgggcccagcttcgggtttagcgcgaactgtag

SEQ ID NO: 80982 - DNA, 377 bp, Zea mays
gccttccagattgtatttaaacttcaaaatcgaatattatatgtatccgtggtggcaaaaacgaaccagagatgtttttggtgatggtggatctcgtggtgaccaaaacgtggtagaactcaaaactctaaaggaataaactaagaccagcaactcgacacaaccgatgcaaccaaaaactcaacaagccctaactaagtagtactagtaaatgctcaatggtttataggattgcggtaaaactaatctactatttttttggctttttctggactataggagataagaaaacagcgaagaaaagtaaatctctcaccgataaaccttgctctgattaccaactgatgtgcacccgttgggtgattgcccgatctttc

SEQ ID NO: 80983 - DNA, 378 bp, Zea mays
tgccttcgcctcagtgtaccacccgcaatccaactgagtcgtggaacacgccaatggtgaaattttcacagccatcaagaaaatgctcctcgatgacaagaaaggcaagtgggccgacctgttacccgaagttgtctgggcgctgaacacgactgagtgcagggcgactgggttcacccctttccgccttctgtatggatcggaggccatgaccccgcaggaaataaaacatgggtcacgttagccgtccccgacgtagacgagcctactttgaaggacctcatcgacggagaccgcgtctttgccctacaggctctaaacaaataccaagctcaaacaaaagcatggcgcgaccacacagtcatcccgagggaattt

SEQ ID NO: 80984 - DNA, 382 bp, Zea mays
tctgcaatatacatgaattatcatatgaaacatattcttgtggtaaggaacagtatcacaataattttggctgctacagtttcgtttcccggtccgggtcaagctgccccgtgccaacctttcggaagagatggcccggagattggatgacagaatggttttatgtgaagaatgatctgacagtacgagaagatatcaaaggtataatcatgcgccctatttggcaaagcttcggccttcggaggccgaaggttgaaatgaatgaagctgccgaagaatgccagagggccttcggcgttatctgttcttttattggaacgagagacttagtacaagagcatattgccttcagggtatggccgctcgcggagaaatgggaaat

SEQ ID NO: 80985 - DNA, 381 bp, Zea mays
tcaactccatctatattatggattgccttggaatcagtccagcttccttcggcccttctggcagcttcctgactcccatgaatagcaataggcccttggtccgaaggtatcttcatgcagagataagctgggtgaagaattgcttcaaaagcatttagggtaccacgaccaatgatggcgttgtaggggtattccatgtcaacaatatcaaacacaatttgctcagtccttgtgttattaacaaatccgaaggttaccggcatggtaatcttcccgagtgccacaatctgccgccctccgaagccacaaagagggtgcgtagcatcatgaatcttgtcttcaggctcttgcatctgtctgaaggctttggcaaatataatg

SEQ ID NO: 80986 - DNA, 366 bp, Zea mays
  unsure (1)..(366): unsure at all n locations
tctccgagggcaggacggngttgaggatggctctgctagccggtctacggtggcagagggattgggcggccgcggactcgctgcgcacgggcaaacggcgacgagctaactccggcgaggtgtggagggtgcgcggaagggtgtagtcgaagcctgggagggctttataagctcgggcgcgggccacagcgcgggtttggcttgggcgcggcgcggggcacgcgagggcgcgcgcgagcgtgctctggcgcgggcagaaggcgtcgaacacgtggcagtgagtttcttccaatgttcaaacgcttccagagatcgcaaacgtgcgaatctcgccatgaatccggcgcagacctcctcctggcacct

SEQ ID NO: 80987 - DNA, 174 bp, Zea mays
  unsure (1)..(174): unsure at all n locations
ntgtgtggagttgggaaaggatttgatctctttgttgtgtcttgtattgaatgctatagctcttgtaaggtgtagaagtgtagaaacttggatgctattgaatgtggggtggttggggtatttatagccccaaccaccaaactagccgtttggtggaggctgctgtcgacaggc

SEQ ID NO: 80988 - DNA, 378 bp, Zea mays
tcggagcgccgaaggtctcaaaaacaccttccctgagctcgttgtcgagaaacgattcaatttccctgcgcgtagcggccccaccttgcagagttactgttcggtctctgcggtccaccgtacagcgagtgtgagcggtagtccgcctggtgtaaaacttctggcgcttcgccttcttacctgcgacactatataaacagacgagtaggtgtgaagttaccacaacatttactgctatttgcactgttttgctgccaaaatttttaaccgtcgccgaagcttgtttgtcagaatcgaacgaagctccatcttaaagcctgcttcggaggagaaaagtattaaagtttcacaagttcatagttaaatggccagagtccg

SEQ ID NO: 80989 - DNA, 345 bp, Zea mays
  unsure (1)..(345): unsure at all n locations
cgantgacatatacatcccataacgatgactctanccctttgtgttcatctcgccatactctcttatcgtgcatgttatgcacaaagtctaaagactacataagctctccaatgaatccatctcatcgctattaatgccttacgatcagaacagggaaatgtgagtatctcggcaatagacatccgcttcctactcaacctccatatggtaattatactacctctcttacccggtattaattcttcgcacattctcttcccattttcgcgtttaatccttacactcatatacttgccttgattgtaaccgcccccgaatttctgcacgctgaattatttccatct

SEQ ID NO: 80990 - DNA, 384 bp, Zea mays
tgatggccaagtcaggaagcatgtcccagcatattttgtatctgaagttcttagtatatcagagaaaaactacacagaattagagaaggtgttatatgctgttttgatggcatccaggaagcttcggcactattttcaagcttacaacataattgttccttcttcacaacctctgaaggatattatgaggaaccgagaagctactggaaggattggaaaatgggctgcagagctcaatgaattttgtattgaatatgttcatagatcttcgattcagtcccaggcgttagcagacttcattgctgactggatgccaggggctcaggaggaagaaacaaataaagacgccgaagcatggacagtggtttgcgatgggtcttgggg

SEQ ID NO: 80991 - DNA, 281 bp, Zea mays
  unsure (1)..(281): unsure at all n locations
nttgggttttctcaatatgggtcatgttttaccccctttatccctattcagggttaagtatcctattctagggttctatttgcaaaacaccaaaaaatacaacttgtttgaaatttttacctagtgaatgtactctaggtgtgtcaaacatatgcaatgcaaatgtttatgatgtcatgctcaagttttagtagcagtaacaccaggggtgttacattaggggtatttatagccctaaccaccaaaatggccgttggggatggcttctgtcgacgggcgca

SEQ ID NO: 80992 - DNA, 377 bp, Zea mays
tggtgccaatggagaagaagaaatccttgtagtcttggctgtcaaatagcttgccattgtcaactgtgagttcggacgggactctgaagtggcaaacaatgttttgccagaagaatttctggacagtctttgatgttattgtggatacagccctcgcctcgatctatttggtaaaatattcgatagcgacgaaggtgaacttgaggttcccctgggccgtgggtaggggcccgacaatgtccaggccccagcgctgaagaggccatgtgtgggcgattagcttcgtgaactgcgaagggcttcccgatcgtggagaaaatttctggcaggcttcgcaggaccttgtgacccgatttgcggcgcagatcatggcgagc

SEQ ID NO: 80993 - DNA, 373 bp, Zea mays
taacgacgagcttgattgcagggacgagagactatggcctcacattatttatgcctctgcacatgctagatagagaccgtgctaaaaatagataggcgacaatacatggaagccatgtagacagagcttccctattatttgaagcatacaaagaaagacttggtactttgacctcgacgacctgctccaagccacagaagacttgagccccccatgaagtgcctttcacagaaaatgaaatcaacaactcagttatcacagaactaaaagcaccatatgtcaacagaagcacatgaccgtctggctcgtcaggcagaaacctagctcgtgcgccaggtcatggattgtccggcctctgggcatggactgtccg

SEQ ID NO: 80994 - DNA, 376 bp, Zea mays
tgctgcggatacacctcttctgacagggcaggtttgtctattagttgccttagcttggttgtctataattgtcagtttttgctaaaacttgaaatcgccaagcattttcagacgatgtttccctttatcttactccattaaatcttgaagtcttgtatgctttcaaatggtttcagcgtgtactggatgcactattcccctcagttctgggaggcacttgtgctattccaggggcatttggttgtggtaaaactgtcattagtcaggcactttccaaggtgatttctcctcaccctttactactgctccatatgttgtagctgtacatattttttcttttttattggcctgatggtctcatctagcttcccctaat

SEQ ID NO: 80995 - DNA, 381 bp, Zea mays
tctacatgtaacataataattcctcaaccaatgatcttttttatttcactctacatacccaatagtggtaatgaagctagtggtgaatgatccatctgaaaaccgtaacaggaggcaactttttccaacgcctacacaagtacaaaaaaattgtaattatagctacgcagattttgcaataccctttcctgaagcacgccattgacagcctgcagtatggcctcctgcaaaacacaagcgcaaagaaccttcggtgacggaaattgctgagcctgagctttgttgcaggaacagagcaacaaatactgaaccagaccttgtttctgagcatgtcaatctccctggagatgatctgcatctgttcaatacatgaggtcagta

SEQ ID NO: 80996 - DNA, 381 bp, Zea mays
tctaaagggagagcacattttgggactaacaaatgttcattttgagaaagacagggtttgtagcgcatgtcaagcagggaagcaagttggtgttcatcatccacacaagaacatcatgacgactgataggccacttgagctgctccacatggatctattcgtcccgatagcttacataagcatcggtgggagtaggtactgtctagttattgtggatgattattctcgcttcacttgggtgttctttttgtaggaaaaatctcaaacccaagagaccttgaaaggattcttgagatgggctcaaaatgagtttggcttaaggatcaaaaagattagaagcgacaatggaacggagttcaagaactcttaaattgaaggctt

SEQ ID NO: 80997 - DNA, 381 bp, Zea mays
tgcacctagtgaacactctcgtctataaacaaccgccaattaatataagcagcagctagcacaatatataggagaatcctgaaagcagcacagctctaacttgcaccaacgaaagcatatgcccttttccatatacctcctaccattttagtatctgctacggcttcaattcattgccacaagttggtagtagtatgaatcatgtgaaacgaatcgaacctgcaagctgcagcttaactaatctcaataaaagtcaggaagatgagtcgagcatatttcttaccaccgtgatcgatagtccctctcagcaacagtatatattcttgtttgtaacttgtaggcaacaggtttggtttcagccacaaaaatatgtatggttgg

SEQ ID NO: 80998 - DNA, 370 bp, Zea mays
tgagcaaaataaatagcttcgggtgcgaaaacagtttcaagcttcgactttggtcaatattttggcagcaaaacagtgcaatagcaatgaatgttgtggtaacttcacacctactcgtctgtttatatagtgccgcaagtgggaaggtgaatcgtcaaggtcttccgcaccggacaaacaaccatccgcactcactgaacggtgagctacagagtccgagaaggtgaatcgtcagtgcgcgcataactgctgcaagatgaggccaccttgcgcgtggattattttaatcgtttctcgccaacgagctcagggaaggtgtttttcggatcttcggcgtcccgatgcctagaagactttttcacggatcaag

SEQ ID NO: 80999 - DNA, 378 bp, Zea mays
ttctaaattcattgtttctactcgacttctaagtatagaattttcagttttaagttgagcaacattagatagagcgtcataattattactttgctcaattaacattgaatcataccgttggaccaagacatcatgagagcacctcagctcctcatgttctttggtcatcttctccaggctgttgtttgttttgatgagagtctcctctagcctgagaagcgtctcaccttgttccttgttccttctcaacaacttaaccaagagagctttgtccgctttgttgagatggttgtagaaacggcgaatctcctcttcttccacatcatcgatctcattttccctgtcattaatgtcagtggaagcaatataggaaaaagt

SEQ ID NO: 81000 - DNA, 434 bp, Zea mays
ttgtactttaatgcctaaattcttaaaacaagctttatattcaaatggcaacccactgtactttttacagaatttttggaaaatattaaacccctgtcatagttcatacctaccctataaaccataagtagaaaataaaagaaagggaaaagtgggtaataaaaaaatggtgccatcctaaaatcctttatatcttatccactgaaggatacaagagcaatacaaattccctatgtttatcctcgacaaaaacctaagcctaaaggtgataagtctaacccactagaagccccacataaccaagaaaccctaagttacttcttgacttagtttctttttagcataatgttattaaatcctgtataatcatgacatacatgttcattgcattcgatagactgtaaccttgctgacggagagtacatcctcgtgcc

SEQ ID NO: 81001 - DNA, 301 bp, Zea mays
ggtcctgctggttcattgcgagctgcttcaggtggtgaccctattccataccgatcattgatgcgctcatgaattgggagacccttcattcttctacaacctacaagtaccgtgatatattctatcctgactcttacaaccgatgaactgccgtcattacgctcatctgttctcaatatcatgcattggcggacgggatggctagtcaactgaaggtgcaaggagtttctgttccacaaggagcttcgtctgtggcacgattggaatacagtgctgcttcaacagcgtggcgttgacttgg

SEQ ID NO: 81002 - DNA, 354 bp, Zea mays
cctgaaccttttttgtctcttcacatatctgtttgtagaatacctttcacctagttgagccaatttgtggagtcgacatcgtcgtccatataagcttcaatggtccatcttatgctttcttgatagctgtattatcaaaactccctaatggaaacaatcatccatattgtgggaacaagaacacatgctcgtacatatttcagatttgattaaccctctcatctgccactatttgagagatggccgactatggacaatttatcccaggattatgaagtttctaaattggaacaatgagctacgacacactctatcttgaacacgcaacgaaattgacattacagtccattgcag

SEQ ID NO: 81003 - DNA, 418 bp, Zea mays
tactaagctttcaattgagagttcttgaactccgtcccgttgtcgcttctaattttcttgatccttaagccgaactcattttgagcccgtctcaagaatccctttaaggtttcttgggtatgaaatttttcttgcaaaaagaacacccaagtgaagcgagaatatatcatccacaataactagacagttcttactcccgccgatgcttatgtaagcgatcgggccgaataaatccatatgtaggagctccagtggcctgtcactcgtcatgatgttcttgtgtggatgatgagtgccaacttgcttcccggcttggcatgcgctacaaatcctgtctttctcaaaatgaacatttgttagtcctaaaatgtgttctccctttagaagcttatgaagattcttcattccaacatgggct

SEQ ID NO: 81004 - DNA, 283 bp, Zea mays
  unsure (1)..(283): unsure at all n locations
gctatgntgaatcagtcaccttctttctataagacagctatcacgcagtatcatgtaaaatagacatgttgtagcccgattttacataattgtgaaacagaaagcgagatggaatctaatgaatcaacaagaaaaacattggaaatggaatggtcaggtgaaatagcaattgtacccaaacctttgaccaacccttgatntgcatccccaaatgtgatagctcgctggggttctttgtttttctcatatgaagagaacatacttttctccccggtcatgtggt

SEQ ID NO: 81005 - DNA, 397 bp, Zea mays
  unsure (1)..(397): unsure at all n locations
tcactgagctctgggaagctagccgaaaggtctttgttttgtatgacngctggagtggccggtctacggtggccggggcttgcacagacgctggcacgccgttctctgggcaaacgccggtgaactcgtgctctggcaaggttgggagtgagcggtgacatactgtcgagaccggggtgggctttatagcctctagcgcatgtgtgggcgtggggtctacgcatcgcggtgccgatcgtcggggcatgctctatcgttgctagggcgcgtcgaacacatggccgtgttaatctgaccgagttcttgcgcctgcaaaggtcccatatgtgcgaattgtgccatatgccttgtgtaagatttcttccctgcacctagagctatctagttcatgtgagtt

SEQ ID NO: 81006 - DNA, 470 bp, Zea mays
  unsure (1)..(470): unsure at all n locations
tactaagcttaccaatggacgtgaagagtgccttcctcaatggacctatcaatgaagaagtctatgttgagcaacctcccggctttgaagacagtgagtaccctaaccatgtctataagctctctaatgcgctttatgggctcaagcaagccccaagagcatggtatgaatgcctaagagatttccttattgctaatggcttcaaagtcggaaaggacgatcctacactctttaccaaaacacttgaaaatgatttgtttgtatgccaaatttatgttgatgatattatatttgggtctactaacgaatctacatgtgaagagtgtagtaggatcatgacacanaaattcaagatgtcaatgatgggggagttgaagtatttcttatgatttcaagtgaagcaactccaagagggcaccttcatcatccaaacaaagtatactcaagacattctaagcaagtttgggatg

SEQ ID NO: 81007 - DNA, 394 bp, Zea mays
  unsure (1)..(394): unsure at all n locations
gatcaacggaacaagatggaaaagaagaataattacaagaatgccaagggcgatgcacatcttggaaaggagtgggattcggattgctcttcgtccgactccgacaatgaatgactcgccgccaccgccttcaacaagtcatccctctttcccaacgagcgtcacacatgccttatggcaagggagaagaaggtatgtactcgagactctacttatgcttcttcaagtgaggacgaatctagtgataaggatgaaatagattattcatgtttatttaagggcctagatagaaccaatgtagataaaatcaatgaattgatngatgccttgaatgataagaatantgctttataanaacaagatgacttgttgtatgaagaacatgacaaatttg

SEQ ID NO: 81008 - DNA, 379 bp, Zea mays
acgatggttacattttatatcatgccggttatgctgatgataagattaagagaattcatgcaaagaagactcattcttaccatgcttttatttataagaatgatgcttttagctctacgcgctctacacatgtttaaatgcctaaaaagaaatctcctactacatcaaatgatcataatgcttgattcaaaacctttgatgcttcttatgtgctaactaacaaatcatgcaatgtagttgccaaatatgttgggggcaaacacaatggatccaagaacttgtgttgggtacccaaggtgcttgtttctaatgtcataggacccaataccgtttgggtacactaaaacaaggcctaaatgtattttgtatgtttatgcat

SEQ ID NO: 81009 - DNA, 437 bp, Zea mays
  unsure (1)..(437): unsure at all n locations
ttctttggattctataaagctaaggggcattattaattagttcgcttcatgcgttattaattagctttctttttatgccggctagactagagagtgcatgcatggttctgtttacaaatgccattactcgctgtttctttttgccgcacttctagctagctttgagctgatgtatatgccagtggaatgcattatgaatgcatcgatcgccacctccggcagggttcatgtcgtggctcatgggtttacggttgttttttatggggctttgtttggcactcgttgtggcagtttgcctcacacgatcgatgcgctgacatcagctctgtttatatggctaaaacttatctgacccaattntagctggcatgtactagatcttctaaatgaataaataaatgcaattaatgatgcctggggatgtagtgttgattctt

SEQ ID NO: 81010 - DNA, 403 bp, Zea mays
  unsure (1)..(403): unsure at all n locations
acacttaaaactcagcttttgtgacagcgccttttctattgtcgagcttggatgtcgctattggttgtcgacttggtgtagactactacttcttgtactgcgtcgctttgaatgcgatgggttgagcctcggatgcatatggatcatcaagctcgttgatcttcctcgagccttcgatcatgctctcaaaacttacaaaatgcccgattacttcctccgcggtcattntagtatatctaggattaccacggattaattgaacttgagtagggttaaggaaaataagagatcttagaataaccttaaccatgtcatggtcataccattgtatgactccgaggttgcgcacttggttcaccaatgtactgatcccggtgtacatgtgttgtggctcctccccttt

SEQ ID NO: 81011 - DNA, 388 bp, Zea mays
cttcttttcttccgtcgccttaaatgcgacggcgtgaacttcagatgtggtgggttcgtcaagctcattgattttcctcgagccttcgatcatgcactcaaaacttacaaaatgcccgataacttcctcgggggtcattgtaatatatctagaattgccacgaattaattgaacttgagtagggttaaggaaaataagagatcttagaataaccttaaccacttcgtggtcatcccactttacgctcccgatgttgcgcacttggatcaccaaagtcttgagccggttgtacatgtgttgtggctcctcccctttgcgaagccggaaccgaccgagctccccctcgatcgtttcccgcttggtgatctttgtgagctcgtctacctcg

SEQ ID NO: 81012 - DNA, 381 bp, Zea mays
gaagttctcagtttatcaaagaaaaattatacataattggagaaggtgttgtataatgttttaatggcctccacgaagcttcgacattgttttcaagcgtaccatataattgttccttcatcacagcctttgaaggatattatgagaaacagagaagctactggaaggattggaaagtgggctgcggaactcaatgagttctgcattgattatgtgcatagatcttcgattcagtcccaggcgttagcagatttcatcgctgactggacgccaggggctcatgaagaagaagcaagtaaagatgccgaagcttggatagtattctgcgatggttcttggggaaccttcggtgcatgtgcagctgctgttttaattgcacct

SEQ ID NO: 81013 - DNA, 449 bp, Zea mays
cagctggaaaatcggttgaatcggggtaaaaccagctgtccaatgttattcggactgatgtacagggtgggggttccactccaaataccttgacttgctgggatccaccgcaatccccttggagatatacatgtcccagaaattgaatctcctctagccagaatgcgcacttactgatcttagcatataattggtgttcccctaagcgcgtttatacgatccacaagtgttgagcatgctcctcttcattctcggagtatattaagatatcgtcaataaataccaccacaaacttgtccaactcgggcataaataccgagttcatcatatatgtgaagtgggcaggagcatttgtcagtccgatagacataaccaaatattctaataaccatatatcacttcgcatagcacctacgcttatcaccaagtgattctattaatcacttggg

SEQ ID NO: 81014 - DNA, 346 bp, Zea mays
  unsure (1)..(346): unsure at all n locations
gtgtgcatcttgtctagcatgtaaacaggtgggaggagcgcatcacaacaagaatgtgatgaccacttcaagacccctggagctgctgcatatggacctcttctgacccgtcgcctatctgagcatanggggaagtaagtatggtctagttattgttgatgacttttcccgcttcacttgggtgttctttttgcaggataagtctgaaacccaatggaccctcaagcgcttcctaatgagagctcaaaatgagtttgagctcaaggtgaagaacataatgagcgacaacgggtccgagttcaagaatcttcaagtggatgagttccttgaggaggaagggatcaag

SEQ ID NO: 81015 - DNA, 460 bp, Zea mays
tgccttcgcctccgtgtaccaccctcagtccaacggagtcgtggatcgcgccaacggaaaaattttcacagccgtcaagaaaatgctccttgacgacaaaaaaaggcaagtggcccgatctgttacccgaagtggtctgggcactgaatacaaccgagtgcatggcgactgggtttaccccctttcgcctattatacgggtcggaggccatgaccccgcaagagataaagcatgggtcgcctcgaacagccgcgtctgccgtcccatacgtagatgagccaacttcgaaggatctcatcgacggagaccgcgtcttcgccctgcaggccctggacaaataccaagcccagaccaaagcatggcgcgaccaggcagtcatcccaagggaattcatcgaatgggacctcgtcctcatccggacagctcgaacggagtccataagcaagctggagcccatgtg

SEQ ID NO: 81016 - DNA, 424 bp, Zea mays
  unsure (1)..(424): unsure at all n locations
cgagaaacccctgtccagaccaagaattcttggaccccatactgaacatgccatatgaaggccatagattatggagtagagaattatgagtttttgagacgacgcactcaccatatccggccacgcctggaagcccttcatcttggtaagcacgatgtcgcccaccttccacttggccacgacctcgaccacggcggcacctgctgtgcgcttcctcttcgccagcgcctggaagcccttcatcttggtaagcgcgctgtgcatgatgcctgcagctgtgcattgaacagcccatggtggtggtcctcatggaggaggcagagatgtacccgatgcgattgtgtatgtcgtactgatggngatcgatgggatgggtcgggtggcggtggccccgacgctcgctcgtctccggatctcttcttcc

SEQ ID NO: 81017 - DNA, 405 bp, Zea mays
ttctgtttgtcgccacatgtaacagtgtctgctatgtccgctaatgctcagcttgcggccctccaagcctatgtgagcgtgggtctcttgaaacatgtgacgttacattgcatgaaaaagtcggagcaaaacaataatagtatctgctgcccttacttggagcatacgcaagagacgaactaccgattggccgtccagatctaccgagtacgcagacattcaaaattatgcaaacctaagccctaccaggtggcgctcaaaatatagcaatgatgaaagtaagtacatataaacatgcaacatgtggcctaccagttggcgctaacaatctagcagtgatgaacgtaagtacatacaagcatgcaacatatagcctaccagttggcgctgaaatctacaagtatg

SEQ ID NO: 81018 - DNA, 355 bp, Zea mays
gcagccagaatggggccaatatgagcaacgtcaaagggacttcagagaacaatccgaagctcgtacagtcaatatcactgtgccagagtcgaagcacatctattaacaaatatcctaccctgattgcagtcttttccattcagttttattttctgtgtaataaaggacaccttttgaatttcaagtaatagttttgttgtttgtcacaaggtaaacatatcttctacacacgcttatagtgctggagcttgagaatttgcaatagcaaggaggaccttcggattattaattgttttgtaaaatatatacgatatgaattcttcgaaacaataaaaagccgttccaaaaggagcgc

SEQ ID NO: 81019 - DNA, 460 bp, Zea mays
  unsure (1)..(460): unsure at all n locations
tcgacatccagccgatgggaagcagtggcaagatttcttgacaaccaccgagactttgccgatgaaccgagaaatgttatgttcgcactgagtactgatggaatgaacccatttgctgagaggagcatcaagcatagcacatggccggtgatcctcaccatatacaaccttcctccatggttgatgcagaaacggaagtacattttgctaaccatccttatttctggacctacacaacctggagttgacatggatgtatttttggagcccttaatggaggatatgaaaatattgtgggaaacaggtgttcaaatgttggatgagtatcgtaaaggttcattcacgctgagagcaattctttntgttacgatcaacgattaccctgctctcttcacattatcaggccagtttaagggaaagggtggttgcacagtatgcattgatggaactgcttacgtat

SEQ ID NO: 81020 - DNA, 407 bp, Zea mays
tcgctgtggtgacgcggatgtcctcgacagtgaaggatctcctacgtcgacgagctatgatgcggtgactccgaatatctgggatgcggtggctgtggcgtggatgaaccgttccataagaagcctcacagggatgagctggatcttgggctgtagcgtcaaggaatgctctaaataaccctatttccccacgtcaaattgtactttgcaatatgcgaacgtctaaatattttgtcaaaaaatacgttttctaaaatttctattaatttcatagaaaaaatcatagaatataagatatagagaacgaagtttatataacgttgcttgagacgatggagatatagatgacggaatcttttatagagtgctgttgaggacagagaatattcttttaggagatgaaatat

SEQ ID NO: 81021 - DNA, 446 bp, Zea mays
gacacttaaaactcagcttgaaatgcacattatctgttagacaagaaacatgatattgttattgaaaatttataaggcaaaattaaagagcaatcagctacctattgaaagaagaacttcgagcttcaagcgactgaatgcttattggctgaagccgaatcttaaattacagaactgaacacgaaacttctctgccaatctgaacagtttgaacaagaaaagcaagaacttgatgcaaaacttgaagccgaagtccaacaaaatttatttttgaaaaaactattggcgggccttcaagacaaatgtttagaatttagcaacaaatgtattcaacgactaagaaaaattttccattcagtcggagctagcagtgagaaattcaccccgtcagcggaagatttaccaaagaccttcgaacatattgagggtgaaattgatgagcttga

SEQ ID NO: 81022 - DNA, 439 bp, Zea mays
tcatcatccgagctatcatccgagtcccattcaactaagtaggctttgccatctttcttcttggtataggatttctttttcttcttgtcactttcatctttgcccttcttcttcttgcttggacaattcatggcaatgtgaccgggttccccacactcaaaacattttctatcattgaaagcatttcttctagatgtttgacctcttctaggttgacctcttttcatcttcatgaatttattgaatttccttacaaataaagccatgtcaccatcactctcactttcattttcttcatcattgctatcttccttttcaattgcctttgatgccttggctttgagagcaatagattcatttttcaccttctttgccaaacttaaagcatcggcttgtgacttcttaaatatatcttgagtgagaatttctcccaatactt

SEQ ID NO: 81023 - DNA, 443 bp, Zea mays
  unsure (1)..(443): unsure at all n locations
ctcagcttatgtaatgctgccaaagtgagaggaaactgggtgcctctatccgatattatcttctttggaatgccatgcaagcacacaatccgagacatgtattattctgctagcaccgcactgttataggtgatcttgactggtatgaaatgggccgcctttgttaaacggtccactactacccaaatggagtcataaccagctcgagtgcgatgcagaccgactataaagtccatcccaatctcatctcatttccactgaggaatctgcaacggctgcaacaaacctgcaggtctctgatgttctgccttgatcctctaacaactatcgcatctggccacatactctgctatctctcttttcataccataccaccagaatctcttctttatgtcttggtacattntctcgctacaagggtgtatagaatatgttgtctcatg

SEQ ID NO: 81024 - DNA, 390 bp, Zea mays
tacacagctacacaccttctcaattctgtttatttctctttgacaaactcaagacttcagaaaccaaggtcactggatcttgctttttgacttggccatttagcttctcctgtacaagcgccgcacttactgcagagtgcgaaactaccacatataagatcaatggagcccctatcaaatgtggagttagtgttgttaaatcaatcaaagattgcttcaactcttcaaatgcattttattgaaccggaccccattgaaaaacttccgctgacttcagtatttcaaagaatggcagatttctttctgctgatctatatatgaatctgtataatgatgctagtctacctgcttgccgctgggcacctttctttgtgcttggcggcttcatct

SEQ ID NO: 81025 - DNA, 467 bp, Zea mays
tctaagtgcaaatggcaatattatctctatgacatttgtaaacctttgttgtaatatttgggggtaagaatgtaatatcgtacaaagttgtacgattgcctataaatagatgaacagtaacctcgtactgttcatgctgaatcgaaattatattcacgtctcttccttcgagcaagctgaaggtaccaatgtactatgagttgtatgtcattttgttaatatataaaatgtatcttaacattatcagtacattcgatatgagataaataaagggcataacattacaattgttaattatgtcccaataatcgtgaatattgaagatttgttcttcaagatctccgttcaagactcattatgcccgaaggaaaataatgcttcaaaggacgaatgtctttaacgtttaacatatgtgttgccatgttcttgattcacagcaataaaaaacgagtgaccaacaacactct

SEQ ID NO: 81026 - DNA, 354 bp, Zea mays
gtcaagcacgtgaacaagtgggaggagcacatcacatcaagaatgtgatgaccacatcaagacccctgtagctgctacatatggacctcttcggacccgtcgcctatctaatcatatggggaagttagtacggtttatttatggaggatgacttttcccgctccacttgggtatggcttttgcacgataagtctgagacccaaggaaccctcatgcgcttcctaatgagagctcaaaacgagtttgagctcaacgtgaagaatataaggatcgacaacgtggtcgatttcatgaaccctcaagtggaggagaaccctgaggaggaatggatctagcacgaatggtccgctccct

SEQ ID NO: 81027 - DNA, 317 bp, Zea mays
gaacaagtaggagaagaagaagaactataagaaggcaaatggcgaggctcatactggcaaggattgggattctgattgctcctcgtccgactctgacaatgatggactcgtcgccaccgcctctaacatgtcattcctcttgaccaactagcattacacatgcgttatggctttggagaagaatgtatgtactctagactctacttatgcttcctcatgtgatgacgaatctagtgatgaggatgaaatataatattcatgttcattgaatggcctagatagaaccaacgttgatgaaatgtatgaattgattgatg

SEQ ID NO: 81028 - DNA, 407 bp, Zea mays
  unsure (1)..(407): unsure at all n locations
atgttcattttgagaaagacaagaattgtagcgcatgtcaagcacggaagcaagttggtgtccatcatcgacacaacaacatcatgatgacttacatgccgcttgagctactccacatggacctattcggcccgatcgcttatataagcatcggcgggagtaagtactgtctagttattgtggatgattattctcgcttcacttgggtattctttttgcaagaaaaatctcatacccaagagaccttaaagagattcttaagataggctcaaaatgagttcgaattgagaatcaaaaagattagaagcgataatggaatggagttcaagaattcacaaatcgaatgatttctngatgaggatggcatcaagcatgagttctcttctccctacacacctcaacaaaat

SEQ ID NO: 81029 - DNA, 464 bp, Zea mays
actcaagcttagcatacgatccgaagctcaacagatgatgattatactctgtttcctagctgggaaaaaattctaagaaaactctggtattaacctttgctaagaatattgtaatcagattcggcttctgtaaatttgtccataccttgtaacatattgttacctttccatcaatatatgaagtgctttgatgtggacgaaacatgtatttgtttgagtcgaaggcgaaaaacaccttcccttcttttcgtacacaacgaagcataaatctgcttctgaaactgtatgcttataaccgaaacaattgtctatatttgtatggtatgatgatgatgatcctatgtatgtctaaatgaatgtttatgaatgcactgtatgatgtaatgtatcatgcaaatgaatgcccaatcacacacatacgaagcttatccatagccttcattccctaggaatgtctgaatctc

SEQ ID NO: 81030 - DNA, 439 bp, Zea mays
ctctgatctagatcttcgtacgattttcctacgtgcgcggccgttcgggcgcataggaatatagtcgtcaacgggctgtgggtggatgacaacttggatcgcggggtgcttgctgatgctgataaggtcggcttttgatgctaattgctcgagcacttgtgctcttatttcttcatcatagccccagtttagttttgtgacccgatatgttcagccttttcgaggttatgtattggccgatgagacattcgaagggaataccgggtgctcaatcgttgcttatatgcttgacgagttaccataaacgcaatcgcgaagacatgatggtagcaccctcccacgtttatctatatggctacgagtgtatctatttcacgcaatatgatagttccacatccaaatgttatatagatctgaaatgccacgtctttggatctgg

SEQ ID NO: 81031 - DNA, 443 bp, Zea mays
  unsure (1)..(443): unsure at all n locations
tcagcaacttcaacactctnntttggaattgtgcttgattacttaattgtctccaagacgtctagtacatttaccattcttttcctttttggggtcattgatggccccttttggttttttgctgtttcaatatttactgcaagactcaaaacttctaatgttttttccttattcggctttttcgcttcttccattttttctgtggatggtgcttcggccatctctgcagtttctggcagcaaggttggctgttcagcttctgtggccgaagaagcttctccggtgaactcatgcaccgaagctggttcaatataacgcggtcgatgcgtaagaacctttatctttttccttttcggttctggctcgctatgagcagctgcagcttcttcttttgcagagaatgtgttttttctcttctgccttcgaatgggatagcagtaatc

SEQ ID NO: 81032 - DNA, 390 bp, Zea mays
tcgaagtccaacaaaattcagatttgaaaaaattattggcaagccttcaagacaaatgtttggagtttagcaataaatgtattcaacgactgagaaaaatcttccactcagtcggggccaacagtgggaagttcaccccgtcaactgaagatttaccatagaccttcgaacatattgagggtgaaattgatgagcttgacgaagttatagccgggcacggtgacttctgtgcctgtgtagcttctcggggcactgctgcagcttttctgatagctggctgcgaccatggaaaaattgttaatatgtccaatttcactttatcaccatcaattgtagatgatattcctgacctcgcctgaagcatgtctaatagatgtgaaagatgatatg

SEQ ID NO: 81033 - DNA, 417 bp, Zea mays
  unsure (1)..(417): unsure at all n locations
gtcacagctcaggctttgtttcaatgcacgcaagatcacgatgagtatctccaggcatacgtccgaatgttcttgcatctgagagcacaagcgcctacagtgcccaatgaaattgtcattgatgccatgatcaatgggcttcgtccatgacctactgctcagtgttttgctagaaagcctccacagaacttggagaagctgcttcgaaagatggatgaatacatccacgctgataatgactttcgtcaaagaagggaggaggcctacaggttctctgagatgaccaanggcttcggaggaagaatccacccaaggcacgtcagatcgatccactccacccagaatgacgacagatgaagtcagcaacatatgccacaatattccttgcatgcttcggtgcaccaacaaagctatctt

SEQ ID NO: 81034 - DNA, 405 bp, Zea mays
atagtgacaaacgttctgaaggggtgcccccttggccttatatactcgaccgtggggcaatacatgtggatttgataacaacgagtagctaaaagataatgaatctgcttgatgttatctccatgtaattctgccgacttatcctcgcatggctctgttgcatgggggctccagcgcgggaaagtcggatctctgttgcggtcactcgctcgacgttgtgggtcgtccgggtttgcaccaatccggcctcatgtcgatctgctctgctggttatctctccccaggcccacgacagaatgaccttacgatttattgggcccttgggcctttcgtgaggtattttactcttttaatggacccgtgggatatctatcccccacaagcccccgatctttgtgtaattta

SEQ ID NO: 81035 - DNA, 402 bp, Zea mays
  unsure (1)..(402): unsure at all n locations
gcagcttgtcaagcaggttaacaggtgggaagctctcatcatagcaaaaatgtgatgaccacatcaagacctttggagctacttcacatggacctcttcggacccgtcgcctacctcagcatcggggggaagtaagtatggtcttgttatagttgatgattttcctgcttcacttggtattctttttgcaggataaaacagaaacccaatggacccttaagtgcttcctaaggagagctcaaaatgagtttgagctcaaggtgaaaaagataagaagcgacaatgggtccgagttcaaggaccttcaagtggaggagtacctngaggaggaaggagtcaagcacgagttctacgctccctacacaccacaacataacggtgtggtagagaggaagaacatga

SEQ ID NO: 81036 - DNA, 448 bp, Zea mays
  unsure (1)..(448): unsure at all n locations
tcgcatctctgaactaactcggctgcatcgttcttcgccgtctgccaatataatcctgacctgtataccttcccgactagtgttctggatgctgcatgtactccacactgccctgcatggacttcctccagaagttgctttccggtggacgggagaacgcacttcatgatgacgcctgacgcgcccctcctgtataatacctccccaatgagtgtatagtgagctgattgtttggcaatgcgctctgccgagttcttgtcatctggttcttcttcattccttatatacttaataatcggttgtctccagtcatcagagtctgactccggttgatctatgatgatgcactcttctatntgatccgtcgagatgctcggctggagaatttcttgcacgaagacccccggcgggacctgagtctgaccggatccgagcttggacagtacat

SEQ ID NO: 81037 - DNA, 436 bp, Zea mays
tggacgtgaagagtgccttcctcaatggaccaatcaagttagaagtctatgttgagcaacctcccggttttgaatatagtgagtaccctaaccatgttgtatgaaacgggtgacgcctaagagggggggggtgaattatgacttctaaaactttcgctaaactatgccacaattaaatccctagagcaaaacctatgcaaatagtcaaactagaatgtgcaaactatgttttgtctaagtgttgctgaaagtcgcctagagggggggtgaatagggcgaaactgaaatttacaaatataaacacaactacaagccggggttagcgttagtagtaaagaaacgagtccgcgagagatggcgcataaacaaatcccaagcgagttaacacgtgagacacggagatctgtttaccgatgttcggttcttgcaaacctac

SEQ ID NO: 81038 - DNA, 462 bp, Zea mays
agtgtcgcggtggccacaacgttctggcttgtccgtggaatcgtgggggtccacttccatcatggattatgcggtggcggacatttgccgtctcaacatgtgtttgtccaacctctcatcgcgatcgctatcgtggtgctcctcgccttctattcatggggcactagtggctttaagaaggactctgtccagtcgacgacttttggaaagataggttgagccgtggtggagcgaataccactgcgcgtatcattacgccagtgggggttcccttatggcttcttgcgagtaaggaacgatcttccggggtgccgaccgtgatgcactcctaagtcgggtcacgacttgcccctctcgatggggatctatgttcatttgctgatctcgacaagaggaggttgtgtaatgaatccctaacgatgtccatcattcccatgaacttgacatgagtcagtcctatcg

SEQ ID NO: 81039 - DNA, 424 bp, Zea mays
tctaagctagccttaattcatctagtctggggcatgagtgtttggctctaagttcacctcccggtgatcgaattaatagtttcttcttcaagggatagttttgtattgtatgcttttccacaaatgactttgttacgaatgagtgagatgctccagaatcaaataaaactgatgcaagtatggagtttaaaagaaacataccatacaccacgttggcatcctcatgaactgattctgctgtcacgtgattaactcttcccttactctggttctgcggagtcttgttttgtgcatatccatgatcaagtgtattctgatcagacctctggttgctgttcctctgggatgtttgttgattatgccttgggcagttgttatcatattgtgcaagttctccacacttgaaacaactttgggttcgact

SEQ ID NO: 81040 - DNA, 458 bp, Zea mays
  unsure (1)..(458): unsure at all n locations
gaatggaagctagaacaagaacctatgttatcatatgaggagagttgtacaaacaaggagtctgctatccattactaaagtgtttgtctagaatcgaaggtcaagagctaatgagggagatacatacaggactgcgtggagctcatattgggtccaggcctttactangaaaggtttttagacaaggattntattggccgaaggtagcttcggatgcagcagatctagttcaaaagtgtgaaaactgccagaaatgtgccatagaccagaagcaacattcgtctctaactcaactaattcagcccacctggccattgcaaaggtggggtttagatttgctgggctcacttccaccagcgcaagaaaatttaaaatatgttgtagtagtggtgaaatatttctcanagtggatngaagctaaacctctagctacaatcactttgatcatagttcaaaag

SEQ ID NO: 81041 - DNA, 424 bp, Zea mays
cggctcgaggtcggctcactaaccgtctctactcgattcgcgagctacaccttaataaataatattgtattatataataacttaatagtatataaatgtgaaatatataatcatcatacaattataagtaatctacattataaattatcatatatcaatcatcaaaagttaaagaacaaatcggatatgtataaaattatcaatatccatcattattttatatattggttaatttgacatagctcacgagccggcttatgatccataacgagccggctcggcatggctactacaactccgggccggcctgcaagatgagctcgactgatccgtacgtccctccctgaaaaatgtccacctcatcgatggacggatccagcgcgaatgtcgtccattgaaatctgcgccgctttggatttgtgca

SEQ ID NO: 81042 - DNA, 465 bp, Zea mays
  unsure (1)..(465): unsure at all n locations
ctaagcttaacaagttaaatctctaagcgtctgcttgtatttattttattgcataaatagaattgcatctacattagttcatattcaatcctaaaaattagagtgcgcagtcagtaagtgaacctattttatttaaacagagaataattctatgaacattttacaattttaatcactaaactttgagttcatatgcaaaagttatgaaataaacaagtttgggaattcaaaatatgaaattagggctaattctgtgaatatttaaaagtccagggctaaatctgcaagattacaggggtctacgcgcgaaaaccagggacggcgggttgatttctagtaaaccaagggtctctntaagaaaactaccgcgcgaaggggtatcgagtgaatcttaccggcagatctaaaaccaacgactgagattatatntgcggtcgatggcgcgcgcgcaagctggtgatcact

SEQ ID NO: 81043 - DNA, 359 bp, Zea mays
agcaactatctttgttccttgaccccttgcgtacaacaaggagtacttgtctgaaatcacccccgaacacaacagttctcccaccaaatggcagctcatgccgtcccattatatcacgcatgctattgtctaacgcctcaattgcttgtctcttaatcatcgatgcctcgtcccagataatgagcgatgctttttgtatcaactttgctgtcccgctttgtttcgtgaagctacatacagcaccatcatcaatagtaagtggtatcttgaagcgtgaatgggcagtcctccccccatgcaatatggaagccgcaacaccagatgtatgctgtgcaactgcaatcttgtcctgactgcgt

SEQ ID NO: 81044 - DNA, 392 bp, Zea mays
  unsure (1)..(392): unsure at all n locations
ctcaattggttcaacgttccatgttgaatcattcacatgttttatttctccatgtcttgacataatgtggtgtctggagtctgtacttgtaatcagtggcaagaagccttgcgacttaatgcatctgccaccacgttggtcttccctgggtgatagtggatttctaattcataatccttaatcagctcaagccatctcctctgcctcatgttagttctgactgggtgaaaatatacttcaaactttgatgatctgtatatatatggcaaacatttccgagcagataatgatgccatantttaatggcatgaaccacagcgactaattccaagtcatgagttggataatgttcctcatgccaacgcaactgtcttgatcatatgctataactc

SEQ ID NO: 81045 - DNA, 443 bp, Zea mays
gcctaatacatcatacatggcattctactatatggctatttctctatatatctaaagacacataatagattgtttcccccatttcaactgccagaaacttgcgtcatgttactcatcgttcagctaaactgaactcgctcccacgctgcaaactgcattattcaaagatgcgtcttcagcttagctggctacagtagccaattggcatgtctcatgtggtgtagtgcacaagcactgcacatctaatgatgctggaataaagactattccttctttgtctaaaacaaaaaaaaaagaacagagaattgatcagcgtccttttgtctgcaacgaaatgcgctgctgaatacagatgctgttgatcagttaatgtgggtgatcctcgctccgagaccaacataagaatggtagagatctccaagagaattggtgctctgcgtatg

SEQ ID NO: 81046 - DNA, 455 bp, Zea mays
  unsure (1)..(455): unsure at all n locations
ctatgttatggatngcttttgagtcagtccaattgccttcggaccttctcgcatcttactgacttccatgaatagcaatgggtccctgatccgatagtatcttcatgcaaagataggcaggatgaacgattgcttctaacgcattgatggtaccacgaccaataattgcattgtaaaggtattccatgtcaacaatgtcaaacacaacttgctcagttctagtgttgttgatgaacccaaaagtcactgacatggtgatcttgcccagtgctacaatctgccttcctccgaagccacagagaggatgtgtagcatcatgaatcttatcctctggctcttgcatttgtctgaaggccttatcatatatgatgtcagctgcactgtctgtgtcaaccaatacattgtgaaccatataatctttgataacacaagagatgaccatggcatcgttgtgt

SEQ ID NO: 81047 - DNA, 451 bp, Zea mays
  unsure (1)..(451): unsure at all n locations
aaatccaatcaagcttctcttgtgatggttcaatanggatttctgaaattcagaatcctgaatttcagcccttgagccaaagaccgagcgtgttcaccttgatccctagctccaatcctaatgaccccacggacaaaattgtgcctaactaacccctctacctcataccagatgttggcatcgggatgcgtgctctggacacatcaaacccgggatcttctctctgtgtgaggcagtgagacaaacccaatttctcccctctctatctctcgatccattcagcaaaacctgcaagcctccacacacaaacgacaaaggaatgttaggggaagagatctctcaacaggatcatggccataatctcaaagatttggagccaatccacgctggaactcgacctctctctgcgttgcctcgtgctcgatgccatgccatgcaccatatcgcacat

SEQ ID NO: 81048 - DNA, 447 bp, Zea mays
aactctattctacattttaaaatctctcatgttgtagctgatccatttattgctttggcctttattttctccccctttggcatcaagcaccaaaacggaatcaattgtggccctttaaccccattgcctcaccaaaatcttcaattaatagtacaaaggcaataagatcatagagatgaaacttgactgaaataccctcttatcggagtgcagtggaagtcttgcatggaccaagttcacctttcccctttcaatccaccttcgagactaaatcaagcaagctcaagcaaatggttagtctcacagggtcaagttgtaacacatctccccctaaacatgtgcatcactttgcaacggacttgtgaggtccatggagtgtttgacaacttgagcaccacagtatgcaacattatgcataatgaacatgatcaaatgcataaacacatg

SEQ ID NO: 81049 - DNA, 331 bp, Zea mays
tctcagctttgaccaatctgactcaccaatatttttctttctcctataatacacgtcacgccatttcgatggcgaaaagtctggacaaatatggcgtgctgcttctctgagattaagctcgcactaaaacacgctgcaccatgatgcttcaaagttaccgtacatcagcaccatgcatagcatctattacaacaacatcctggtgtatatcgtcatcctcaccgtggaacactaatgtaccatcatcatacatgttgttcctgactcgcaatccttttacgtgaccaatcccatgaaacggtgctacaatcccgaaaacgacactggatgt

SEQ ID NO: 81050 - DNA, 380 bp, Zea mays
ctcttctcccccgaatcgtaatagcttcttctgattttcagtaaaaaagcccgactttaccatcttggagagatcagccttagaaacagtagatttcccaaagtccaagtggctgggtttgcttggcatgacaatgcggtagtcatcttcgggatcagtttcctcaatatcctcttcttctgcttcggcaattgcttgttttgcttgatttgcatcatcactggggatcttttccgaagataccagtccggacctttgcatcgcttcggagatgggtacagtctccgaaacctcagctttgtccccctcacgctcaaccctagcggtagaacgtactctggccatttaattctgaatttgtggaaatttagtactttttc

SEQ ID NO: 81051 - DNA, 453 bp, Zea mays
  unsure (1)..(453): unsure at all n locations
cttcatccacacatgtgctaatcggcgatttcacaaccagcccatgcaagtcttatcaattaatcatgcatctagaccggcctcttcttttgcaaaatcaaccaaataaagtttgccgtctagtacacccttaaacgctagtgaaccatcacaccttctaaagacagacacatctacatttgtgaatagacaattatatcccatattgcataattgactaacagataacaaattatatccaagcgactcaactaaaaacacattagaaataagtgctcggatgaaatagcaattgtacctaacccttgtaccttgccttggttcccatcaccaaatattattgaatcttgnggatccttgctcttgacgtaggatgtgaacatcttcttctcccccgtcatatggtttgtgcatgcgctgtcgataatccatcttgaacccccggatgcatat

SEQ ID NO: 81052 - DNA, 440 bp, Zea mays
  unsure (1)..(440): unsure at all n locations
ctaagcttctaagggagaacacattatgtgactaacatatgttcatttngagaaagacaggatttgtagcgcatgccaagcatgaaagcaagttggcgcccatcatccacacatgaacatcatgacgaccgacaggccgcttgagctactccacatggatctattcggccctattgcttacataagcataggcgggagtaagtattgtcttgtaatagtggatgattattctcgcttcacttgggtattctttttgcaggaaaaatctcatacccaataaaccttaaagggattcttatgacgagctcaaaacgagttcagcttaaggatcaagaagattagaagcgacaacgggacggagttcaagaactctcatattgaaggctttcttgaggaggacggcatcaaacatgagttctcttctccctacacgccacaac

SEQ ID NO: 81053 - DNA, 408 bp, Zea mays
cttctagagctaggaatcgaactctacctcgccggagacactctatcgacgtcgtcggtcttctcccgaccgtcggcgtagtataccgagctccacggatagtattccttcaattccttgcacgggtagtttccttatcaccccatgaagctccctgtgcccttggattgaactctaccaacgtgagcaagcatgatcacacgccgtcgactagcccacccgcctgcgcacgtggaccgacagattccggccatcaccatctacgaatcggacctcgacgtgatcgccaagacttcccagagctaaccccacccttcgccggacctccctcaccgccggtaagccgagccgccctgttggagaaagaagaagtcggagggtttgaacagtcagagactcatatgaata

SEQ ID NO: 81054 - DNA, 414 bp, Zea mays
tgtgaagggtcttcattcccacatgtgctaagcggcgatgcctcagccagcccatgcaagtcttagccatttagcatgcatctagaccggcctcttcttttgcaaaatcaactaaataaagtttgccgtctaatacacccttaaaagctagtgaaccatcacttcttctaaagacagacacatctatatttgtaaacagacagttatatcccatattgcacaattgactaacagatagtaaattatatcctagtgactctactaaaaacacattagagatagagtgctcattagaaattgcaattttacctaaccactttaccttgccttgattcccatcaccgaatatgattgaatcttgggaatccttattcttgacgtaggaggtgaacatcttcttctcccccgtcatat

SEQ ID NO: 81055 - DNA, 404 bp, Zea mays
cttgctgatagtcctgcatataacagtctaaaggtatgaagattgtacactttaacatttgtggattttgaatgaatcctttacttgttgtgttaaaccattcattccttttgaatagggcctaattctcagcaatgccttaagggcacaaaagaatgctgaagacgagagctgcaccattgctctcaacaaccttcgaacagaggttattatgctacgaaacgaagccttggagaaagacagaattctgcttacattagtggaaaaaatgaaggaggacgaagctaactctaaaactcaagccgaagcacagaggcttgagattgaagatcttcgtaaacaactagcccgagtcatagaagaatgtattcttgaagaaacaaaacgagagttatgtgaacaat

SEQ ID NO: 81056 - DNA, 383 bp, Zea mays
aattgcctaattcttaagagaacagattctacacagaattatgagacttaagaactgttataatcaatctacaataactttctgatctgatgtccgattgaggtgttcttcacagcccacgaaaaagatcttcatattatctacgactcatatataaactgttcattttttgaggccactaataccatataaaattagcatgaacagaaactgttgaatctgccattccgccgaatactatattctagatcaaaacctaaccccacatctaatccaacctctaatcctataatccccatgatccacaacctgcaaaagcacataattatatgaaggaacaaggatttcatccatacctatggttttcccaaagaaaatcttca

SEQ ID NO: 81057 - DNA, 473 bp, Zea mays
  unsure (1)..(473): unsure at all n locations
actaagcttctaagggagaacacgtgatatgtntaactaacgtgctattcgtttctatagaccgtgagcagctggtcaagcaggttaacaagtgggatgagcgcatcacagcaagaatgtgatgaccacttcaagacccctggagctgctgcatatggacctcttcagacctgtcgcctatctgagcatacgatggagtaagtatggtctagtcattgttgatgacttttaccgcttcacttgggtgttctttttgcaggataagtctgaaacccaagggaccctcaagcgcttcctcatgagagctcataatgagtgtgagctcaaggtgaagaagataaggagcgacaacgggtccgagttcaagaaccttcaagtggatgaagtccttgaggaggaacggatcaagcacgagttctccgctccctacacaccacagcaaaatggtgtggtagagacgtagaacatgacgc

SEQ ID NO: 81058 - DNA, 378 bp, Zea mays
  unsure (1)..(378): unsure at all n locations
agctggagtccatttccacacagaacgtcatgacgactgtcatgccgcttgagctactccacatggatctattttgcccgatcgcatatataaacatcgatgggagtaagtactgcctaattattgtggatgattattctcgcttcactggggtattctttttgcaagacatatctcataccgtaaagaccttgaagagattcttaagatgggctcaaattgagttcggagtgagaatcaaaaagattagaagtggcaatgggttggagttcaagaactcacaaatcataggatttcttgatgagggcatcaagcatgagttctcttctccctacgcaccccaacanaatggtgtattggagatgaagaatacaactc

SEQ ID NO: 81059 - DNA, 447 bp, Zea mays
tctatagggagaacacgtgatatgtttgactaacgtgcaattcgaataatatagaccttgtgcagcttgtctagcatgttaacaagtgggaggagcacatcacatcaagaatgtgatgaccacttcatgacccctggagctgctgcacatggatctcttcggacccgtcgcctatttgagtatatgaggaagtaagtatggtctagttattgttgatgacttttcccgcttcacttgggtgttctttttgcaggataagtctgaaacccaagggaccctctagcgcttcctcatgagagctcacaatgagtttgagcttaaggtgaagaagataatgagcgacaacgggtccgagttcaagaaccttcaagtggaggagttccttgaggagggagggatcaagcacgagttctccgctccctatacaccacagcataatggtgtggt

SEQ ID NO: 81060 - DNA, 422 bp, Zea mays
  unsure (1)..(422): unsure at all n locations
tactacagcttatgaagattcttcatcccaacgtgggctagtcggcgatgtccatttttcccatgttagtcttatctattaagcatgtgacgagttcagctctatcaaaatcaaccaagtatagctaaccctctaatacacccttaaatgctattgaatcatcacttcttctaaagacagtgacacctacatcagtaaagagacagttgttacccatctgacataattgagatacagatagcaaattgtaatctaaagaatctacaagaaaaacattggaaatagtatggtcaggtgatatagcaattttacccaatcctttgaccaaaccttgatttccatccctgaatgtgatagctcgctggggatctnttgttttctcatatgacgagaacatcttcttcttccctgtcatgtggttt

SEQ ID NO: 81061 - DNA, 313 bp, Zea mays
ggtcatcaacgggcccggcaaagatattcgcctatcgatccttatgtttaatgtaagaaatctccatatcccccttttggtggtgatccctaataaaatgataccgaatggctatgtgcttagtgcggctatgctcgactggattgtcggccattttatggcactctcattatcacatagcaacaggactgtgggaatttgtaacccgtatcccgccaggtttgcctcatccaaaacaattgcgcgcaacaatgtcctgcggcaatggactcagcttcggcggaggaaagagcgaccgaattttgcttctttg

SEQ ID NO: 81062 - DNA, 341 bp, Zea mays
  unsure (1)..(341): unsure at all n locations
tgtatatatattgcgattaattacaagatccatcgttgtcgatctatggntctagatttatcttggtcttgcaatcgggattgccataatgctggtgtacacgctgatgtgaacggtacgggtgctgagtcccgactggagcgggggaaccaccatccagatgacgacgttccgcgcgctcatcccgcatcatggcaatctcagcacgagccctactcagctcatctaatgcatggtccatctccgtgtttatcacggctgctaggttgactgtgctgctcaacctatgattgccctcaccgacaggtgagacaatcacgccttctgtgctgccagatgaa

SEQ ID NO: 81063 - DNA, 395 bp, Zea mays
tactcttcttataagatggtgcggacgccggcgctgtgtcttctccagtctctgccgccggcttctttccacgacgatccacatcgtcttgcccgggataaccgccatacggcagacggttcaactcgtagaccctgttcaagcggtcgttggacccgcgtatatcccatctacgctggccttccgtcttcagcacgtaccgaccaacaatgctgaccgccccatccttcgtctcacgcacatacgcggcatgatcgcggctatgcagatccagtgcgaatgcgggacttcgcaccaacattccaccacgggaatgcatctggcgagggcatacttcgcccagcgcccatccatgcgccaaatgccacaccccatacgccacaaactcctcaacc

SEQ ID NO: 81064 - DNA, 438 bp, Zea mays
  unsure (1)..(438): unsure at all n locations
tctcaatctatattgttgcttattaaatatacttcaacttatataattggctcaactcaaatatttgaacttttcattccctgttgcttattttcttgaattttgttcatggggttcacttaaagttcttaattacgggtgcacattcttatcttttcaaagactcaattgttttgatcatgacacttttaaccatatacttggtgaattctttatcacttaagttattttgatgctcatgcttactttggttcacatganataatggttcttggcgtggctttttaagagaaaccctacgtgatactggtgtgtcacagaatgtgccctcttggagtgcttcacttgaaatcctaagaaatacttccactcccacatcatcgacatctcgaatatctgtgtcatgatcctactatgatccccttttgaatgtcgccg

SEQ ID NO: 81065 - DNA, 434 bp, Zea mays
tctatagggagaacacattgtaagattaacaaatgttcattttgagaaagacaggatttgtagcgcatgccaagcacggaagcaagttggtgctcatcatccacacaagaacatcatgacgactgacaggccactggaactcctacacatggatctattctgcccgatagcttacataagcatcggcgggagtaagtactgtctagatattgtggatgattattctcgcttcacttgggtattctttttgcaggaaaaatctcatacccaagagaccttaaagggattcttgagacgggctcaaaatgagttcggcttaaggatcaagaaaattagaagcgacaacaggacaaagttcaagaactcacaaatcgaatgcttccttgatgaggatggcatcaagcatgagttctcttctccctacacgccacaac

SEQ ID NO: 81066 - DNA, 359 bp, Zea mays
ctgggtcaatattgtaagtttttataaagggcatacttgtaattcctcacaggctgcgtcctgtgcctataaatatgtgaacagttcccccgtactgttcacgctgacttggcatttgtttttgtgtcacacttgatatttcatctgcttccaaaccgaatgtacatttatgattcaatattgtcactatttctctatgatgaaataataaagttaaataaataatgttatatgattatgcatgttatcttttatgtttcatatgcttcgtctttcattaatgtaaactgtaatgatgaaggttaatccttcatgaccttcgtccagagatcgttatatcctaagggaaataatgcttc

SEQ ID NO: 81067 - DNA, 438 bp, Zea mays
tgtacaaagcccgctggaatttatcttcggagaaacccgtcctcgctgcaacatgacacccgtaggtccaacacaacaagcaatgagtgaatttagaattattgcagagcatatcaacacaagggacctggttcaagagtttttagcattcaaagtttttcccagtttgaaagaatgggaaatgccgaagctacacggggaaaaaaagaaggtgaactcgtacgtttaccttactatttcaagtttaaaaagttctttaaagcaccttgccaagagtggctagatacgattgaagcaatgtgcaatgaaatacttgggaattactctaaataagaagatcaattgatgactgcggccttcggcacccgtccgaagcgaatgctaaaccgagtgttggacgctctggagtttgaatacccagactatgataatctaaac

SEQ ID NO: 81068 - DNA, 336 bp, Zea mays
agccagtatgctccacaccatatggacttccgagagcagtccgaagctcgtacagtcaacagcaccgtgccagagtcaaagcacatctattgacaaatatcctaccctaataacaatcttttctatccagttttgttttctgtaataaaggacattgtttacgtttcatataaatactttcgttgattcccacaaggaaaatatatttttctcaggcttaaattgttaaagtttaaagacttgtgataatcaagatgaccttcggattaccgaaaattattcgaaacagcaaaaagtcgttctaaggaacgcagagtaagttgccgaagtcataaa

SEQ ID NO: 81069 - DNA, 441 bp, Zea mays
  unsure (1)..(441): unsure at all n locations
ccgcgagaccttcntccgtttctttctaaccttattgtatgcgatatcgaatgtcatacttgatgcatattcactttctttgttcccttgtatgatgtactgtttgtttcccaatttgaatggatgaatgtatgtatgcttgcaatcgcataaagaacgatccggtcgaagagcccgaagagctcgcatgagaagcccctgatcaacagtcggttggtggaagcaagtgtcccttgacctatctatgtcctattcattatttaattcacctcccgctttacacatttatgcctaaggattgactagcttttgtgatccatgtccttgttcacctatttgggttggattattactgtttagctttatgctattgctcaactataatcaatgaacatgatgagattacctatgatacgctgttttcccctttcttatgatgat

SEQ ID NO: 81070 - DNA, 285 bp, Zea mays
  unsure (1)..(285): unsure at all n locations
attggatgtttcagtacctcaacaacataattgctcatggggaatctaaacccggccttgaagaagcttctgaaaatcacaacttcatcttcttcaagggtggggagaagtcttttccccggcatcagctctcacaatagatatgtctcggaagtatcgccccctcatattatcaatgtgactctgcttgatggttgctntaccaaatactgagtgacttggtcgccacggtcgatcttctggctcttccccatcactttccacatcatatctgtcgctgtgatc

SEQ ID NO: 81071 - DNA, 480 bp, Zea mays
tactaagcttatgcaactctacgctcatctaagcctagaagataaggcggtcatgctcaaacttctaacaagagcgagagagcatagcgaagctcgtcaaatgctagaagatgttctctccatgaaaatgatacgctctgatgagttgactaaagaacataagaagctaaagtgctctcatgttgatttggtccaaaggtatgaaactatttcaattgagcaagataactctttacattgtatcgctcaattagtaaaaaggaatgccttgcttaaggaccaaatggaaaagctaaaaaatgaaaatctagcttttcaataaaaatatgatatgcgtctatattctaataaaaatcttatggatgatcatatcatattaaacattgcccatgaggttgtaatagaatactttaatcccaactacctcactcatgcacatgtattcaaattaaaactatattaccatgtggtaaagcttgg

SEQ ID NO: 81072 - DNA, 376 bp, Zea mays
ctcagctggcacacatagctcatgtgaatacccttgatcatatctcttctattttctatgactaacgcgatttcaagtccatgtcaaccaagtcataggtatattgaaagaaaatcggagtcttcggcgaagacaaatgcttccactccgtaactcatgcttcgccatcactccaagcaactctctattccttggggagaaatgagcatcaaagaaaaggatctcatccttgtgggagagagcaaaagctcaaaagcttaaggaccggacttcactcttggtataatctttactcacctatctatgaccaaaggggaagatggcactaagaaggctctaatgattccgcttttggcgattcatgccaaataggggg

SEQ ID NO: 81073 - DNA, 336 bp, Zea mays
cgcgccaatggataaattttcacagatgtcataaagatgctcctcgacgaaaaatacggcaagtgggccgatttgctacctgaggcagtctgggcgcttaacaccactgagtgcatggcgactgggttcacccctttccgccttctatactgatcggatgccatgactccacatgaaataaaacatgggtccccgcgaacagtttcgtcagccgtccccgacgtcgacgaacccacttcgaatgatctcatcgatggagaccgggtcttcgctctacatgctctaaataaataccaagcccagactaaatcatggcgcgaccacgcagtcataccg

SEQ ID NO: 81074 - DNA, 387 bp, Zea mays
tctaaagggagaacacgtgatatgtgtgaccaacgtgctattccgaaaggatagacctcgtgcagcttgtcagcatgtaaacaagtgggaggagcacatcacaacaagaatgcgatgaccacttcatgacccctggagctgctgcatatggacctcttcggacccgtcgcctatctgagcataggagggagatagtatggtctagctattgttgatgacttttcccgcttcacttgggtgttctttttgcatgatatgtctgaaacccaatggaccctcaagcgctttctcatgagagctcaaaatgagtttgagctcaatgtgaagaagataatgagcgacaacgggtccgagttcaagaaccttcatgtaaaggagttccctgag

SEQ ID NO: 81075 - DNA, 426 bp, Zea mays
tactatagcatgcacacatagctcttagaattcctatgatcatatctctcttatatgctatgactattgtgttttcgagtcgatttctaaccaagtcatatgtatattgaaagggaattggagtcctcagccaatacaaatgcttccactccgtaactcatacttctccatctcaccgagcaactctctcgattttgggggagaaatgagcatcaaggaaaaagacttcatccttgtgggagagagtaattgctcaaacgcaacaggacttcgtctttggtataatcttaactcacttatttatgaccaaatgggaagactgcgcttcaagggctataatgattccgttttggcgatgtatgccataaagggggagaaatgagcccaaagcaaaatgaccgcaccaccaccaccaaattcaaaaaa

SEQ ID NO: 81076 - DNA, 403 bp, Zea mays
  unsure (1)..(403): unsure at all n locations
attcaattcttatcaactcaagctatcaatcttcaaatgatctacatattcaaaattgacccaaggttacttcaatttattgtattcaaaactcatatcatctcgggaagatattaatgttgtaggaaataaagaatcatcatgtgcggaatatcaaagcctacaacatggaggaaaatcaaaggatggtaacatttatattcttaagtgcaattatcttaaattgtcgtgtgtcttgtgtagtcacatagaaatagaaagcacttaagcatgttttaaaattatgtcatcattctttgaagaaattcctctcatatggtagaatgtgtatntatcaattctatattatgacaatctacatgctctaaattgttgcaagttcccatggcatgtctttacatta

SEQ ID NO: 81077 - DNA, 445 bp, Zea mays
  unsure (1)..(445): unsure at all n locations
taacattaacattgttatgatacacagcagtnacatatgttttaaaataacaattatgaatggaccacaaaaaattacaaatacgattcctaatttaggccaatacagacatataagtatacagctaatatggcaacacaagaaagcagtagtgtgttgaagtacctccggaatttcatcaatgttagattcaaaactattctttttatgattgtttgcagatgcccaagcatggttcaacaatgtctgggttgtgatgccagagttcctatcttcgatataagagatgatactcgaagggaagtgaagctgcaagccacattagagtagtgttttcacccttctctaaagcaagtatatgagacacaaaaacaagagatgcaagtgtgtcaatntaccttggttatgttgactgtatggaaggagatcccaaacaggtaaccca

SEQ ID NO: 81078 - DNA, 438 bp, Zea mays
ctggatctactgccttgcaactcttgtcaacatgaccatatataactcgagagtctggtttaaagactgcccttcttattaccattgcctttaactttcgaagccccaaaagtaaagcttcgtattcagcaatattatctgtacagctgaagtcaagccttgctgcatagcatgttctgactttggaaggtgcaactatgacaacagccgcacctgcaccgaatgttccccatgaaccgtcgcagaacattgtccaagcttcgacatctttatttgcttcttcttcctgagcccctggtgtccactcagcaatgaagtctgctaacgcctgtgactgaattgaggatctatgcacatagtcaatactaaattcgttaagctccgcagcccactttccaatccttctagtagcttctctattcctcataatatcactta

SEQ ID NO: 81079 - DNA, 361 bp, Zea mays
tgaccggagactggctacacacgcaaaccaaccctatattcttatccactgtgcgcattttgtaatataatgacatggcgaacacagagggatggttcctcaccgggagtgacgaattatctatgtctaaccacggataatcttggtccgcggaggagatcaatgtccgacagcaatctcaagggtcctggcggctaatctcccgtgctatggtcactcacccccttcttctatagtccgatctagcacctatgcacgaccttcaatgctcagcggtgaacaatccacagggagacctctgcgactatcttatcaccactctgtctgacgatagcgacaagatcttgtcacagtgaataaa

SEQ ID NO: 81080 - DNA, 376 bp, Zea mays
atgaactaattgttacatgtgatttagctaacaattagttaaagtattattggggtatttagaacctcttacaactaatttaacggctaactattaactttagaagttgcaaataatgcctttcgaatcatcatactagttttatttccaactttttatctatataaataattttttgattgaatcaatatgtatgcaaactatacacaagatactttctaacatgttggttttgggtatactagtctggcatgaccacaatactaaggccctgtttgaatacactaaagctaaatagtagctgctaaaattaagtactgacatccaaacgagccaacttatagttcagctaccagctacttttaacataatttgc

SEQ ID NO: 81081 - DNA, 435 bp, Zea mays
tgccttcgcttcagtctatcatccgcagtccaacggtgtcttttttcgcgccaatgggaaaatattcacagctgtcaaaaagatgctcctcgatgaaagaaaaggcaggtggaccgatttactaccagatgcagtctgggcgctcaacacaaccgagtgcagatcgaccgggttcactcctttccgccttctatactgatcggatgcaatgaccccgcatgaaataaagcatgggtccccgcgtacagttccgtcagccgtccccgacgtggatgagccaacttcaaaagatctcattgacggagaccgggtcttcgccttacatgccctgaacaaatatcatgcccataccaaagcatggcgcgaccgtgcagtcatcccgagggagttcatcgagggggacctcgtactcatccgaacagctcggacggagtc

SEQ ID NO: 81082 - DNA, 401 bp, Zea mays
agtatttgctacacgtatgcgtggtgactgaggacacatatattgatggcgacatctgtcttcctgaccaggtatgtgtgccctatagtgtgagtgacagcgatcttgaccaccttatatactctcgtttcccaaatctcaacgaaaatattgttgattcgacctacatcacttcaagggcgatactgtcaacgcggaatgaccgggtggatatgataaatgctaagatgatcgatcgttttcatggggagcatatggtgtaccatagattctattgcgtcatggatgatccccataactactaccctcctgagttcctatacacactgacgcctaatgggctgccaccaacatgtttgatactcaagattgcatgccctatgatattgcttcggaatata

SEQ ID NO: 81083 - DNA, 455 bp, Zea mays
tgacttcgcttccccgcttatacaatcaataacaccctcatggtcgtctcgaatgaagttctcttcggaagaatatgcgcttactttgacaaagatggttcttaattttttcacgcaatccaatgatttctcgaagcacctttccttggattcacgaagctcctctacatttttctctatcctagttttcaaccatacactaatttcttgactatcttttgcacatgcaaagttctcattggcttcagcaagttttttccgaaggtcttcaatttatgctctataaatttcggattgagtgttaaactttgcttcatcttctttcactttatccaccaatgaaagtagaatgttgtccttctctaaggctttgtttctcagtttaatgacttctgatcgaaggttgctaagagctatcgtgcagctctcatactctgcattcttttgcgccctca

SEQ ID NO: 81084 - DNA, 334 bp, Zea mays
acttcaccggatgcccgagatcgacctcacctgtcttctgtcttacgccgccgcacgtggaccgagctatccagtgagtctccgaccaattccttgcgcccacatcttctctggcgtcccatgaacctctctgacccatccaattgctctatctcgccgtgaccaggccggactcctcgccgccgacgagcatccccgcctacgcgcgtggaccgaccgactccggccatctccgacggcgacccgcacaccgttgtgatccccgagacctcccctacgtcctcgaccacttcaccggagcaatctcgccgccggtaagcccctccaccctttc

SEQ ID NO: 81085 - DNA, 296 bp, Zea mays
cagctgaatgactgcttctgcaggagagcttccgatctttgtttacttgttcggtccacggagtcgctttatccgaacgcgagttacttatcgtaaaaagtgatgagtgaggtatccgtatcccggaggcgtatgagtccctcggctcggtcagccttggctgcttacgtgtactccgtcgtttccaggatctgctgtccgaagtattcaagaagcacgaaagatatcctgcttaagagatccttttttcgagaaaaaattcgacgcaaagggggtctccccccttttatcccccg

SEQ ID NO: 81086 - DNA, 428 bp, Zea mays
tctgcaatattcatgatttattatacgagacgttttcctgtggaaagagcaataccacaacaactttgggtgctacagcttctgcgcccgctccgggtcaagctgccctgtgccaacctttctgaaaatgtggcccggagcttggatgactgaatggttttatgtaaagaatgacctaacgactcaagagaatgggaagagtatcattatgcgaccaatctggcaacgcttcggtcttctaatgccgaatgtcgaaatggacgaatctgccgaataatgccaaagggccttcggagtaatctgctcgtttattgggacaaaggacttggtccaaaacacattgacttatggtatggccacttgagaaagtgtgaatgccaatgaaacatcaagaatcgacaagcggcagtcaattaaaacacattcaa

SEQ ID NO: 81087 - DNA, 395 bp, Zea mays
  unsure (1)..(395): unsure at all n locations
gtagcgcatgccatgccggaaagcaagttggagtccatcatccacacaagaacatcatgacgaccgacaggccgcttgagctactccacatggatctattcggcccgattgcttacataagcatcggtgggagtaaatattgtcttgtaattgtggatgattattctcgcttcacttgggtattctttntacaggaaaaatctcaaacccaagagactttaaaaggattcttgagacgggctcaaaatgagttcggcttaaggatcaagaaaataagaagcgacaatgggacggagttcaagaactctcanatngaaagcttccttgatgaggagggcatcaagcatgagttctcttctccctacacgccacaacaaaacggtgtagtggagagg

SEQ ID NO: 81088 - DNA, 255 bp, Zea mays
  unsure (1)..(255): unsure at all n locations
gaacgtgaatacttgttcggtccacggagtcgctttatccgagcgtgagttacttatcgcaaaatgtgatgagtgaggtatccgtatcccggatgtgtatgagtccctctgctcggtcagcctcggctgcttacgtgtactccgtcgatttcaaggtccgctttccgaagtagtcaagaggcacgatagaaatcctgctaaaaagagatcctctctcgaggaaaaattcgacgcagagggggtctccnccctttt

SEQ ID NO: 81089 - DNA, 228 bp, Zea mays
aaacttatcaactctctatcaaccatatgtcatcttcttccatatcaaactgatggaaaaattggtatgcctgtgtgatgctttctttatctgttaacattgatcaacgaacacatttgtgtctgggcaagacaatgatagaagtacgcaatactgaaaagaggtgaaatcgctggacctacggtagttttaccaccgaacaaaggtatcctattaatatgttccttt

SEQ ID NO: 81090 - DNA, 59 bp, Zea mays
ttactctgtgcataatctatttaaatgccagctatttatctcttattcctttctatttc

SEQ ID NO: 81091 - DNA, 187 bp, Zea mays
atggagccttaactcgcatctacaggggaatcttcctcaagtgtcagtgaccgctttgtaagctttaatgctgacggcacacaaagggagaagaaaaaatctcatataggcgcatccatttgcggatggatcacaactaacatctcacaagactcactgcgtacaggattttccacttgccaatgct

SEQ ID NO: 81092 - DNA, 85 bp, Zea mays
ctactgccgtagtgattttaacttggagttgcaggttatgtttactttgatcgtttcctttcatatctcaagccgcggtttatgt

SEQ ID NO: 81093 - DNA, 321 bp, Zea mays
tgttggcgcattctcgctgtcagtttctgcaatacaagaatgtcagctgatgctacagagattgagttcttacaataaacctgtatctggttatatcagtacgattattgcatctcattgctctcaccagagctgactattgctcgcctgctgcagctaaaatatactcgcgtacaaattgcaaactgtacaaatacaaatggggactatgaacctgaagatgagaacctatggagctgccctcgccttgctcttgttgtgtgtacaaccttgagcctgcacacattagtaactccaatgattcgcgcaggatgtatctaa

SEQ ID NO: 81094 - DNA, 338 bp, Zea mays
cttgacttaacactgcaatgggctgtcacgcatacacacaatatcggctcttctatagcgggggtggagtaacaccgaaagtaagaccgttcatttcttacgatccaacctccagggaggtctatttttcgaacgacaccagggggcatgaatgtctgccatgacatgtgagatcccgacagctgaagggatgacagctgctacacacccccactgcggcagtaatatgtacatgcgcctcgtacaggcgtacacactcacccccgtatcacacgtgggagcgtaacctccgagtacgatgcagtcatacacggttttttattatttttcactaatat

SEQ ID NO: 81095 - DNA, 58 bp, Zea mays
ccaagttcattgtacaatctgacgtgtattgttgtctcctttaaccgaacacaccccc

SEQ ID NO: 81096 - DNA, 166 bp, Zea mays
atcaaaggtgcagccgctggaagggactcccatttatgttaacacagaggttgttgtccacaaatttacacaccgtcaaaatacccaggccgtggtcttacaactaaaaatctgcactcacctgcagtctaatgcgctgtaaaggacctaaaaacaactgttggtt

SEQ ID NO: 81097 - DNA, 106 bp, Zea mays
ggacaaatacttgtgcacaccgctggggttcaacaaggctggttatgcaaagaaacgtagttgtcataagttgtggattgctggataagagttgcccccagttctc

SEQ ID NO: 81098 - DNA, 68 bp, Zea mays
cgataattctctttaactgtgaatatgcctgtttgaagtgacaacgctttccaatgctatcacacaca

SEQ ID NO: 81099 - DNA, 317 bp, Zea mays
  unsure (1)..(317): unsure at all n locations
agctcgactctgatactcgtgctactttcgtgtggcatatatctgcctgagacttcgatatgctggtgcgtngttccatgctactggacattaagtgttccgtgataagatgcttatagacccatgtcctttgtatgctccatatggatggtatgctacatcccgtgtttgattgtcttttttttttggcgcttctataattattgtgtaaatctttacgctgagcgtggtcgcaaccggacgttagacatgacatcgcgtactttataaatcactattttatcgcgggagttcatgagtgacactttgtttgttat

SEQ ID NO: 81100 - DNA, 136 bp, Zea mays
tctcgctcactctcaatatacttcgttatcatacttaacagcctctgatccttatatctcctgattgtttgtatgactacaatcacagttttctcagagcttctctactcactcttacacacttttggtgaacatt

SEQ ID NO: 81101 - DNA, 209 bp, Zea mays
cttacctctaagcatgacatactttaaacgtacactctatataacgtgtgcatgctatggatcgagaatgattagactcaaaaatgaatttgcaggataattccatctgacactgatcatccagaactggggattgttttttagaaatttttcctgtggtggccctgggtcatgcccgacgtaccaaatttttgcttgccaacgtggct

SEQ ID NO: 81102 - DNA, 213 bp, Zea mays
gactatactatctttatcgcaaagaaactccactcgtaccttccttcgatccaaaatagtcgtagtagaactattaattttgactctagctacaatctcaacttcatatcataactctgccatctttaacactgtctgttcaagcaacactttcaagtgattatatatacatggtccacccacttcttttatttgctgtcttccgtctcccta

SEQ ID NO: 81103 - DNA, 99 bp, Zea mays
actcttttctaatcttcggtttctaacttatctctgtctcttctttttttgctcttttttcttttttcttctatctcactgactgcgcggagggggggt

SEQ ID NO: 81104 - DNA, 200 bp, Zea mays
tctcagtagccaacgtcgtcgtctatgtacatctaaaatgtctgcactatcacaatgcaggttcacttcacatgtcttctcatgtctattgccgcaaccttgttgtcagcaaaataatacgcctcgcgaatctaatcaagcatacacgcagtagacttctgtgtacatactctcttgcggataatcggttgggtatacta

SEQ ID NO: 81105 - DNA, 152 bp, Zea mays
gtttcaattgcccatctggtccaatacataatttccagtcatgggtgcatcaaaatatcaatgagattacaggcatttttggcctctcgtattctacactaactgaatctctctgttacgccatagaatttttacaactgtatggcaacata

SEQ ID NO: 81106 - DNA, 320 bp, Zea mays
tatctccttacccccggtttgaagtgcatggcttctgtgcttgttgtcccattttgtactgctgtgtttaaatggttttgaccaggtgcctggtgatttaatggctgcagagagtactattatcgatcacttgacctactgttgttcaaattatgacaactgttttttgaacagttatataattatgtcactaattcattatgacgtgtatctatattttgtataacattacggacatctgatctatcttgttgcttacacgctgttgaagtctacgacgtcttctgtttaactacaaactgcgtgtatggaacgatctt

SEQ ID NO: 81107 - DNA, 124 bp, Zea mays
ctatcactttagttgtaattccagaaatactgcgtcgttccatctcgcaggctcttactaagatttgacataacactcggacttaaagatgtcattcttgctatgaatgagagaatttttctca

SEQ ID NO: 81108 - DNA, 76 bp, Zea mays
aaaacgcttcctgatttgttgttgcgtctaactaaagtgccttttatctttctccgtttttctatttcatgcactc

SEQ ID NO: 81109 - DNA, 160 bp, Zea mays
tatctctaaattttggtcgacaatgtacatgcacatatgacatgtatcatgttttgttagcgcgggcacatcggaggatcctgggaattatattagccaacacggactaactacatcatcgttatcgagttaatttatgtccaagatattctttgtctta

SEQ ID NO: 81110 - DNA, 209 bp, Zea mays
ccggcacttggatcgcgatacccgacagaatgtgcggagtatcggcaaaggccgggtttaccgcaacgcagctggccggatacgaccttacccccgtggacttgtcactgtaacttgctcgttgcattgcgggcgtatcactttgctgttgaaactttctcacacacttggggaagatcacgtgaatgcaaacgtgtctcaacacatag

SEQ ID NO: 81111 - DNA, 330 bp, Zea mays
ggctcggtccagctcctggtatcctcacggctctgcaccgaaatccgctcccgctggcctcagctgatgtcaaatacgatgctggttgacgtattcactgcaaagcgctttcgcctagaacatgtatgacctagcagacctcgaacgagctctcaccccttgtccccccgaaccttttcatgccacatcggtgcccatggtaaacaaaggtctgctcagcttcttacagtgtcacaattccataactgtcgatcacggatcactctattcgacgggtatcgtcggcttgatgacctcctcaccatgcattagcttaaaagcctttttctg

SEQ ID NO: 81112 - DNA, 174 bp, Zea mays
tatgtctactcttatatctctctatattttatactcgcgacataagtaactaattctttgctgtctttgactaggtaaaaaacagtcaagttgtcttgtggcaacagtcgagattctttgaacctattgaacttgacgcgtccttaaccatatggaagtatttgattttttact

SEQ ID NO: 81113 - DNA, 249 bp, Zea mays
cttcgttgcttaagttgctcgtattcacgtgtgccaccccattaattcactccattttggtatcctgtgcctcggtggtgtcatctttctttacaacgtctattgcccctgtgccaactgcgcattcttgcatggacggcacgtcccaccactgacattgtccctgataatggcttccatgtgcaattgctacccatgaatacgtcccacatgcacgacagtggtgctgttgtcagctctctaaacgcg

SEQ ID NO: 81114 - DNA, 254 bp, Zea mays
ctatccctgttatattagcaagcaaaaagttacattcttaaaatggtttcttaacccaaacagattgagtgtggtgaaacttatgctggaatcaatctgacactattgataataaattttcctagagttatctagccaggaatcccctaaagtatcactgcgcgatctcattgggaatcatctctccgttatatttgcaacgtactcattgttattttaactggataatgtttttcgactcctaaggagaagta

SEQ ID NO: 81115 - DNA, 204 bp, Zea mays
tttgagtgctgtcattcccactgcaactgtttattttaccacctaatttaacatcttctgattgcaagtttcacgttttctagatgcatgtctatctgtactatcatgcacttttctcgtgtgttcaagctcattcatttggctaatggttgagtactcgactcttacttgcacatgtacaatttgtttcaactctctactata

SEQ ID NO: 81116 - DNA, 81 bp, Zea mays
gaagaccactctatccctaaattagttcacacactggagaataatcaatcgaaagcatactcttgtacctcctgtatgtga

SEQ ID NO: 81117 - DNA, 435 bp, Zea mays
tctaaagggagagcacattctaagattaaccaatgtttattttgagaaagacagggtttgtagcgcatgccaagcaagaaagcaagttggcactcatcatccacacaagaacatcatgacaagtaacatgccactggagctcctacacatggatttattcgacccgatcacttacataagcatcggcgggagtaagtactgtctagttattgtggatgattattctcgcttcacttgggtgttctttttgcaagaaaaatctcatacccaagagaccttaaagggattcttgagacgggctcaaaatgagttcggcttaaggatcaagaaaattagaagcgacaacgggacggagttcaagaactcacaaatagaaggcttccttgaggaggaaggcatcaagcatgagttctcttcttcctacaccccacaact

SEQ ID NO: 81118 - DNA, 431 bp, Zea mays
gttgagggagaacacgtgataagtctaactaatgttactttcgaaaaagatagaccttgtgcagcttgtcaagtaaggaaacaggtgggaagctctcatcatgccaaaaatgtgatgacaacatcaagacccctggagttacttcatatggacctcttcggacccgtcgcctatctaagcataggaggaagtaagtatggtcttgttatagttgatgatttttcccgcttcactagggtattctttttgcaggataaatctgaaacccaagggaccctcaagcgcttcctaaagagagctcaaaacgagtttgagctcaaggtgaagaagataagaagcgacaatgggtccgagttcaagaaccttcaagtggaggagtatcttgaggaggaaagaatcaagcacgagttctccgctccctacacaccaca

SEQ ID NO: 81119 - DNA, 394 bp, Zea mays
tcagcgacaagggctgctactctgcagctgatggacctcaatcacgatatcctttctcttagggaggcccgaagccaaaagaggaaggctgctagtccaacgcctccggaagacgacttggatcaagagatccaaaacctggagatccttcagcaacaggtgcaacgaaagaaagagaaaatggctcgtttagctgaccttcagagacagatagatgaagcttccgaagaggttcgtcatcttgttcaagatgaccagaaccgaaggccttcgcgcagagagcttcatcaagaaggctcgtacaatgaggacgactggtatgaagaattccatcatggaaatcttgcttttgatgatggcttctctctatcaacagaatggcacgctacaccat

SEQ ID NO: 81120 - DNA, 414 bp, Zea mays
  unsure (1)..(414): unsure at all n locations
tgtgaaggttcttcatccccacatgtgctaagcggtgatgccacagccagcccatgctagtcttagcaattaagcatgcatctagaccggtctcttcttttgcaaaatcaactaagtaaagcttgccgtctaatatacccttaaaggctagtgaaccatcacttcttctaaagacagacacgtctacatttgtaaaaagacaattatatcccatattgcatagttgactaacagatagcaaattgtaaccaagagactcaactaaaaacacattggagatagagtgctcattagaaattgcaattttacctaacccttttaccttgccttgattcccatcaccgaatataattgaatcttgggaatccttattcttgacgtaagagtngaacatcttcttctcccccgtcatat

SEQ ID NO: 81121 - DNA, 422 bp, Zea mays
  unsure (1)..(422): unsure at all n locations
nttgacctacatcatgtagtccatctcacccatatctgtcttaaccatcttccccaactccgataaaatacactaaccttgaatcaatgagactaagacccaaaaatgacaagaccaacctcgtcaaggaaggaaagaagtcaaactcgatcttcagatgcattaccacccaacaaggagttcttccttaccataagctttcttaccctggctattcttgccctaacctactgagagcacctagagggggggtgaataagtgatcctgtaaaaacttgcaacttaatccacaaagcttgattaggagttagcacagtaaagccaagtggctagagaggagttcttgcaaaacacaataaccacaagaagatcaacacagataggcacagtggtttatcccgtggttcgaccaagtccaacac

SEQ ID NO: 81122 - DNA, 413 bp, Zea mays
  unsure (1)..(413): unsure at all n locations
tcgtcatctganagaaaattaccctgaaagatttatatgatctcagttctccaatcttcactgtgaataggggatatgttaaggattgctctttcaagaagctcgaccgaaggtgcttttattgtttcaaaaaatacttccgaaggtacaggcagcccctgtgctgctgacttagccaatagatcagcgtattcattttctccacgaggaatatttttgacagagaaaccttcgaaagaagcctcaatccttcggactgtatctagatacttttcaagcttcgggtctcttgctttgtaacttttttcaatatgaccagaaataacttgggaatcaattttaaagatagcccttctgattcccattgcctttaatttccgaagacccaaaagcagagcttcatactcggcgat

SEQ ID NO: 81123 - DNA, 428 bp, Zea mays
tgtcgaagaccaaatcatcgaagcttataagtttctggatgagaagtggtcacccaagttttgttgatgaagcaccagaagaccaatcaaggaaggaatccatgtgggagttcgcaagagaaaggtttgcgtgttggcatcgatgcttcctcaataagctaactgccaagcgaaagctgaagcctgaagatgatccttgagtagccagaatcagtgttgcaatcggcaaccggatgctcctgcaaggccaaattttgttgaagttccatctcctcgaagagttgcaaagtgaagatatgtagctgaagtaaagctatacccataacccttctaagccgaatctcgaggacgagattccttttaagtggggtagaattgtagcatcccaaaaattcaaatcctgaaatttttctcaaacttcctctaaa

SEQ ID NO: 81124 - DNA, 428 bp, Zea mays
gtgacctatataaactcagcttgagccttcgaactgtatgcaaatatgtctcaagcttcggatctcttgctttgcaacttttgtcaacatggccagaaataacttgggaatcagttttgagaaccgcccttcttatccccattgccttcaacttccgaagccccaaaagcaaagcttcgtattcaacaatattatttgtgcaactgaaatcaagtttcactgtgtagcatgttctgactttggaaggtgcaattaaaacggcagctgcacctgccccgaaagttccccaggaaccatcgcagaacaatgtccaagctttggcatctttacttgcttcttcctcctaagcccctggcgtccagtcggtgatgaagtctgctaacgcctgggactgaatcgaagatctatgcacataatcaatgctgaac

SEQ ID NO: 81125 - DNA, 396 bp, Zea mays
tgtggaaagacaccgaacctaaagagcatgtcttaagtgaagggcattgttgtacggagggaaaacgggaagaggcgcgcagcgaccggctgcatggctgtttggccttgcgttagggctgaaaacgaagggttcgccatggcgcacgggccgaaaactgatgctggggcacgaccccgaaaataatctaagtccaagcatgtggaaagacaccgaacctaaagtgcatgtcttgagtgaaaggcacggtggaacggatggaaaacgggaggaggcgcgctgtcaccggcagcaaggctattccgccttgcgtttgggctgaaaacgaagtgatcgccatggcgcacgggccgaaaactgaagctcgggcacgaccccgaaaataagctaatttcc

SEQ ID NO: 81126 - DNA, 421 bp, Zea mays
  unsure (1)..(421): unsure at all n locations
tganagaaagaggatggaaagagggaatgaattacctatttttgatctcaagaattgcatttgggaaaagtgtgtatattaaagggaagaaagagacgcttctggccaggcctgagtgtggaggcccaatttgtagcccagcaaagaacccgccaacgtatcaaggagagcactcctctgactcgtagcaaatggcttctgatgcgcagaaaggcaaacgaccgcttgcaccgactcccacttttagagtgtaaacacccaaaatcatagtttggtgatctagaaagtactataaaaagtttggagttgaaaatgcctttttataataatttccttataatgcatatgtccctaaagtaaataaataataatattaagagtttggtagttcaacacttagatccaaatcttgaatctaaaa

SEQ ID NO: 81127 - DNA, 398 bp, Zea mays
  unsure (1)..(398): unsure at all n locations
ntaccatgtcgcagaaagctgttttatgtagctggttcatcacctgagacactgccccggtgaaagccacgacagctcgcaccagtgaacctcccatccctccggccgccagtgcgccttctccaaactgagcgccacctctgatggactctataaattgatgccctagtgagctctgctaggttattacgcatccaaagcactagctctcgcctctcatcgttcaccagagcctcccaatttcatatttcctgcaaaacaatcagagtagttgttgaagaagaagaagttgcaccaccagctgagattccacctgctgggaatagtttttattttgatatctatggaacagaatctgaatccctacaacacaaagcagccccgatgcattacccttt

SEQ ID NO: 81128 - DNA, 398 bp, Zea mays
  unsure (1)..(398): unsure at all n locations
ttaccctgcagacagggctattagttggttgcgcttttgtgtcttatgcagngcgaccatttccagcatttgcgtaatgaggactctatggagaagcctcgtattgagaccctggccattcacctcggaagtgaatacgggtctagctaacccgggctagaagggaatcgcgactcatgggtaaagatgcgccacctctgcagagtgtaaaactgatatatcagccgtgctcacggttatgagcagcctggactcctcacatgataattgaacttgaagatggaaataaatcgagatccgatgatctgccaatggtttgcttaagtggtttcacttaagtgtttttgatatactcataatcctttgattaaatgggatactcgggattcacacttatt

SEQ ID NO: 81129 - DNA, 430 bp, Zea mays
tccccactgtcgaagccgtcagcgccgctcacggacttatcttcggctctttggctttaatgtctggttcgcgtcccttgagtggggacgcgaacgagagccttccggtagctgcgtccgtcctgggaccatggctgctgctgcagaggtcgctggcgagtcgcccggagcttgtcgccccacaggccccccagtgtggaggttgttcatacccgcggggacggaaccagagttccatttgtaatggcaccttgagtgtcggtgtttcattcattgtggttgtcggggcctgaacatgtatgtatttttggcacgaagccgtgttttttcctcatttcgagcactaagactcgcctgtcagatatctggaccgcttcaccaagcgtgagttgcctcgtgcgaaagtgacgagtgaggtatccgtattcca

SEQ ID NO: 81130 - DNA, 402 bp, Zea mays
  unsure (1)..(402): unsure at all n locations
cctctgcaatattcacgaattatcatatgaaacagaacctttgtgtaaggaacattttctatatnattgcggctgctatagtttcgtttcccggtccgggtcaaactgccccgtgccaacttttcggaaaaaatggcccggagattggatgacagagtggttttatgtgaagaatgatttgacagtacgagaagatatcaagggtataatcatgcgccctatttggcaaagcttctgccttcggaggccgaaggttgaaatgaatgacgctgccgaagaatgccaaaaggccttccgcgttatctgttcttttattggaacgagagacttagtacaagagcacattgccttcaaggtatggccgctcgcagagaaatgggaaatgccacaagaaaccgtaaa

SEQ ID NO: 81131 - DNA, 372 bp, Zea mays
tcagctatggtcaaatttttggcagcaaaacagggcaatatctatgaatgttgtggtaacttcacacctacccatctgtttatatagtgccgcaggtggggaggtgaatcgtcaaatctttcacaccaaacgaacagtcggccgcactcactgagtggtaagccacaaaacccgaaaaagtgaatcgccaagacgcgtttacccgctgcatggtgggaccatctcgcgctccaaattttgtgattgtttctctgcaacgaactcaaggaaggtgtttttccgatctccgaagcctaagagactttttcacggatcaagctcgttacgaaaaacgatctatcaccgcgaaagggctactgttgggggtatgct

SEQ ID NO: 81132 - DNA, 440 bp, Zea mays
gaccttaaaactcagcttctaagggagaacacgtgataagtttaactaatgtgcaattcgaaaaagatagaccttgtgcagcttgtcaagcaggcaaacaggtgggaagctctcatcacaccaaaaatgtgatgaccacatcaagacctttggagatgcttcacatggacctcttcggacccgtcgcctatctaagtataggaggaagtaagtatggtcttgttatagttgatgacttttcccgcttcacttgggtattctttttgcaggataaatctgaaacccaagggaccctcaagcgcttcctaaggagagctcaaaacgagtttgagctcaaggtgaaaaagataaggagcgacaatgggtccgagttcaagaaccttcaagtggaggagtaccttgaggaagaagggatcaagcacgagttctccgctccctac

SEQ ID NO: 81133 - DNA, 426 bp, Zea mays
ttatctagtaagttttactaaagaaaatatagatctagatgcatgtttacttgctaagaccaacaaaggctggctttggcatcgccgtctgacacatgctgggatgaagaaccttcataagcttataaagggagaacatttgttaggactaaccgatgtctgttttgagaaaaatagaccttgtgcaacatgtcaagcaggtaaacaggtaggaacaagtcatccaagcaagaatgtgatgacgacatcaagaccatcggaacttctcaacatggatctctttgggtctattgcttaccttagtattgatggaagtaagtatggtctaataattgttgatgactattcctggttcacttgggtattcttttttacaggataaatctgaaacccaagaaaccctcaagcactttcaaagatgtgctc

SEQ ID NO: 81134 - DNA, 386 bp, Zea mays
tctaaagggagaacatgtgttaagtctaacaaatgttactttcgaaaaagatagaccttgtgcagcttgtcaagcaggtaaacaagtgggaagtgctcatcacatcaagaatgtgatgactacatcaagacctctggagctattgcatatggatctcttcggacccgtcgcctacctcagcattgggggaagtaagtatggtcttgttattgttgatgattttttccgcttcacttgggtattctttttgcaggataaatcagaaacccaagggaccctcaagcgctttctaaggcgagcacaaaacaaatttgagctcaaggtgaaaaagattagaagcgacaactggtccaaattcaagaacctgcaagtggaggagtttcttg

SEQ ID NO: 81135 - DNA, 351 bp, Zea mays
  unsure (1)..(351): unsure at all n locations
ntgataaaccctgcgaccatcagctagtggatctcctctcctatggctctgcgcttttcttcgtcgaatcggcgaagaggctgcttcacgggtcgggctcgagctcggatatccagcgagtgctcggcgacatccctcggtatgccaggcatgtccgagggactccatgcaaagacttcggcgttcgcgcggagaaagtcgacgagcactgcttcctatttggggttgagctcggagtcgatccgtatctgcttggaggcgtcgttgctggggtcgagagggacagacttaaccgtctctgctggctcgaagttgccgacatggcgcttcacgtctggcgcctccttggag

SEQ ID NO: 81136 - DNA, 405 bp, Zea mays
  unsure (1)..(405): unsure at all n locations
ttctaganagtcctagcttgctatttgtgaattaatctttgaaaagttatgattaaaacaagtgactgctgtattgctgtccaaaaattctgctagtgcgcttttgattgtttaattcacccttgtcgctaaaaatatttggtttgctcttaagtaatgtagacttaccatggttaagctagagatgatatgtgtgtcttgctttatatgtttcttctttaattgattgtgacatagaatttccatagccattgatgcctatgtcatcggttaaacttgtgttggatgcttttgtgtgataaatagaagaactaatgaaaatccgtagcaaattaaataaacgcttgtacctatggggtcgtatttgtgttgcgtaagtatacgaaatgtttgtcgtcttttaat

SEQ ID NO: 81137 - DNA, 406 bp, Zea mays
tgtgccagcagctaagaaaatttcagcggctgctagcactgcaccttcatcatccacatctcattgtgatgctgtctctgtctctgtagaaaaggtattaacgtatgataaatttcaatatttcatacatgaatagatttgatttatgataaataatgtttgtactggtttttccgcaacaacttgatgctgtgatggaggagggacaaggggaggaattggaggttatgttgtcggaatcagatgacagtgagtttgataatgatgatgagtttccaccttccactgatggagatgaattgtcaaaaacttaaaagactaatagaggaggaaagaggctaagagctggtattcagctgttcccctccaagtgcaaagcgaatagagtaaagaggctggttgctgg

SEQ ID NO: 81138 - DNA, 378 bp, Zea mays
tatgaaaggtcttcatccccacatgtgctaaacggctatgccacagccagcccatgctagtcttagcaattaagcatgcatctagaccggcctcctcttttgcaaaatcaactaaataaagtttgacgtctagtacacccttaaaagctaatgaaccatcacttcttctaaagacagacacatctacatttgtgaataaatagttatatcccatattacaaagttgactcacagacagcaagttatatccaagcgactcaactaagaacacattagaaatagagtgctcggatgaaatagcaatttttcctaaccctttcaccttgccttggttcccatcaccgaatatgaatgagtcttgtggatccttgttcttga

SEQ ID NO: 81139 - DNA, 428 bp, Zea mays
  unsure (1)..(428): unsure at all n locations
tatcttggacaagtgccgcacttaccgctgagtgcgaagctgccacatataacaacagaggagcccctagcgttggtggagttaacgtcgttaggtctatcaaatattgcttcagctctttgaaggctctctgcagaactggttcccattgaaaaacttcggctgacttcagcacttcgaagaatggtaaatttctctctgctgatctagatatgaatctgttgagagatgccaatcttccggtcaatcgttgagcccccttctttgtgcttggtggttccattcgaaagatagcttcgattttatttggattagcctcaatccctnttgttgaaactaggcagccaaggaatttccccttctttaccccgaaaacacacttttcttggattcagtttagaccagtctgtctaaaattagcaaaagtc

SEQ ID NO: 81140 - DNA, 437 bp, Zea mays
tctaagcttcgcagcacaggataacacacatgcaagcaagagcatgctattatcacctacatgtgtcctgcagatttacatactatgctagtagcaaggccttaggcggcacatgctagactcctgctagtctagagagatggatagagggagagactataccaaaccatcgagctaggataagcaaaaaattcccaagctagcaaatgattctaaaccgaagagacaaaaaaattacaagccacagcgcttagaaactactacctccattttcttttatttgacccagcaaacgtcaaataaaaaaagattggagagagtacgaaacaagatattccatacaaccatataataccataatcaccaaataaaagaacaaaaagttgcgaccaaataaacaagatcacatgactagaaattaagtttgagattgggca

SEQ ID NO: 81141 - DNA, 422 bp, Zea mays
tgagtcgattcttctgcaaagaattattgatgccccatctaatgataaaggtatgaaacatattcacgagacgctatattccagcaaagctaattgcttcagaaaggatgatcaaggcatagtatggtttaatgatcgcatagttgtgcctaaagatgccgacgtccgccagcaaattttggatgaagctcatcttaatcgatatcccatttatcccggaagcactaagatgtatcaagatttaaagcaacattattggtggacaaaaatgaagattgagattgcacgcaatgtggcaaaatgtgacacctgtagacgtgtcaaagcaatacatatgaagactgctggtccactgcaatctttgcccatcctaacttggaaatgggaggacattagcttggacttcattgtgggaataccta

SEQ ID NO: 81142 - DNA, 421 bp, Zea mays
  unsure (1)..(421): unsure at all n locations
agtgaaaccaatcacaagtttattgaagtatgatacttaatttaattggtcttcaagatgtaatgaagcctttgagcagctgaaagtattattgaccactgctccggtattagctcaaccggacattgaaaagccctttgatgtgtattgtgacgcatcaggcaatggtctaggctgtgttctaatgtaagagggccgagtgatagcctacgcttcaaggcagttgcgccggcatgaggagcattatccaactcatgacctggaattagctgctgtggttcatgccctgaaaatatggcgtcattatctgctgggaaatatctgtcatatctacatatatcataaaagtttgaagtacatctttacccattcagagttgaatatgaagcagangagatggcttgagctgattaaagaatat

SEQ ID NO: 81143 - DNA, 427 bp, Zea mays
tcagtagatcacaacttcgttttcttcgggaacaggaacagacctgtctgcgtcagccctcacaatagacatatctcgaaaattccttcctctcatattatcaagatgactctgtttgatagtcgatttcccgaaaactgcctgacttgctcgccgaagtcgatcttcaaagtcttcgcctccaatttccgcatcataaatgtcgctgtcatcagtatcttcagataagccttctagaatctccttagtaatcttttctatatttgtctttgctattgattcaacaaatccagcagtcttctcctcaaggagcttctcctcttcgctcagcttcgtctcagcaacaacttttttgtcttgagacatcttttcttcggaaatggtgaaaaagagaccttaaagccgaagcttataaagtctaagaaac

SEQ ID NO: 81144 - DNA, 428 bp, Zea mays
  unsure (1)..(428): unsure at all n locations
taccaaaacaaataaacattctattcaaataatacctttagtcgccacatgaaaatgataagtgaaatattaattatgttgaaactttgatacataaaatgatttcacatgtaactcacgcaataagtgggagtagaatggaagaaacaccaacatcttgtggattttatagtccaaatgttttttagaactatatgtggatatatgttgtgtccccgtaaaaattcatgaattttttaggctatttggtgtattattaatttcttgttgtagaaaatcatcaaaatacaattaaattcataaaaatattgtagcgtcgaccgaaaattgcaaataagttaccaatattaataaatagtttataaaaagataatcctaagttcccacatggatataatcttaagtccccacatganaatgataaagtc

SEQ ID NO: 81145 - DNA, 429 bp, Zea mays
  unsure (1)..(429): unsure at all n locations
tgagttatgttattacagaccagactaaaagtgagtgcagagtagtaatattatacaagacaggggaggcacaaactcctcccgataagtttaataaacaaaagatcctaagtggaggaccgagtcctcccgcacttcagtcttcttttccctcgtttggtaccaccttggagcagaagcaacaaaagtttgtcgcttcttcacctaaaaacaacaaagggataaaccctgagtatggaatactcagcaagtcttacccgactaaggaaaagactctcaagggtatgctggataagtaggagtcaaggagaggctttagcaaaaatcaacttatacttttgcagaagtagcttactaaagtgagtccttactttcaaacttttaacgccatattaagtattaatagactctanttgcatctagtctaat

SEQ ID NO: 81146 - DNA, 385 bp, Zea mays
gcaaggtgaaagatggagagaccaagtggttgttttattaaagatatccgctagagggagtaaatagtcggtttcaattaaaatcaaagacatttgaagattttaattagaatgacaatagaattaaatcctctagcctatatctagctaaaattcgctctacaacctaagatgaacaagtgtttaaattaattagcaggacaatgataagtacaaaggataaagattgtaataattaaatcaacaaggacacaccagatgttttaccgaggtctctatgttttacggatcacctctaatataaattgtggcgaattcaatgcacgcacttgctccttgagccaagtggttaaggaatcactcaaacctcgattccactaattat

SEQ ID NO: 81147 - DNA, 276 bp, Zea mays
tattgctgctatttgggccaagggctatatagcgggtaattgtactcacgaaccaggaaccccagactaattattgagctgggctaaacatttagaaaactgttggttatattccaagtataaaatactcacgggtacactggtaccgggttaatgagtacgtgctcgtacccatctattcattgggtcctattttctttagtaacaaactctgaagataatcgcgactaaaaacgccccctcatgaacagcatccgttgtcattttatggcaagc

SEQ ID NO: 81148 - DNA, 425 bp, Zea mays
tatgaagattcttcatcccaacatgggctagtcggcggtgccagagccaacccatgttagtcttagcaattaattaagcaagtgtcgagttcagctctatcaaaatctaccaagtatagctgaccctccaacactcccttaaatgctattgaatcatcactccttctaaagacaatgacacctacatcagtaaagagacagttgtagcccattttgcataattgagatacagaaagcaaattgtaatctaatgaatctacaagaaaaacattggaaatagaatggtcaggagatatagcaattttacccaatcctttgaccaaaccttgatttccatccccgaatgtgatcgctcgttgcggatcttggtttttctcgtacgaagagaacattttcttctccccagtcatgtggtttgtgcaccc

SEQ ID NO: 81149 - DNA, 405 bp, Zea mays
ttcagatgagggatttgtgctctagtgcaccggtttggtacttcgcgggtgatggtgcgacgccggcatggcaacggtaccgcggtcagccggggtttgggcgggctactcggtgatcgtcggattgggcagcaatggtccggattagggtaagcatacacaatcagctggggaaaatcatggccgtagatcttgaatcctgcagacgaaagtcagatcgcggtgattttaaatctcgagcattgatgcgtgatcgtgtggctcagctcatgcgataccccttcgccattttgcgtataagccccccgactttctaagaaaccaacacgtcgtcctttggtattgaaagaatattacgctgaagtctttgaattgcggttaagccctgagctctctggaatcata

SEQ ID NO: 81150 - DNA, 363 bp, Zea mays
  unsure (1)..(363): unsure at all n locations
tcacatgtctcgtatgattcaaaatcaaacgaagtttaaagcccatcagaatgaagcttcttcatgcgattctcacttatatgtcccaaacgacagtgccacatgtaggtaggacttaaatcattaggccgaggccttttatcactaatattacagataggtgcatcatcaagaattaaaatgaataacccattcataatggatgcaaaagccacaaacatgccattcttagagatcacacaaccattgttttcactcgcaaatgaataaccatccttcatcaaacatgaaggagacataatgtttcgactcatactangaactagataacaattatttaactccaaaataaatcctgatggg

SEQ ID NO: 81151 - DNA, 428 bp, Zea mays
  unsure (1)..(428): unsure at all n locations
ntaactgtgtcaaaggtccgtgacgtatcattcccatgttcaacttttccatttcttgacataaggtggtgttaggtgtccttactggtaaacaatgataggaagctttgcgactcaatgcgtctgccaccacattagcttttcctgggtgataatggatttccaaatcataatccttaattagctcaagccatcttctttgcctcatgttttgttctgactggataaagatatatttcagacttttgtgatccgtatacacatgacatatatttcccaacagataatgacgccataccttgagggcatgaacaactgcagctaattccaaatcatgagttggatagtgctcctcatgccggcgtacgtgtcgtgaagcgtaagctatgacttgaccctcttgcattatgacacaaccgagttcacta

SEQ ID NO: 81152 - DNA, 422 bp, Zea mays
  unsure (1)..(422): unsure at all n locations
ggaccttaaaactaagcttgacaactttagcaccattaaatatacaacgaagaatgctctttgtnacttgaccaaaggcatagactacatgtatgctatagatcaatccaagttacgcgaatctaagacatttagctcactacgcagcctacaaaaggttttctcatccaacggcttggtgaagatatcggctagctagttctcagtgctaatatggtacacctcaatatctcccttttgctggtggtcccttaagaagtgatgtcggatgtctatgtgcttagtgcagctgtgttcaacaggattatccgccatgcggattgtactctcattatcacatatgagtgggactttgctcagattgtatccaaagtcccggaggggttgcctcatccaaagtaattgtgcgcaacactgttctg

SEQ ID NO: 81153 - DNA, 403 bp, Zea mays
tgaaaaatatttagatacagtccgaaggattgaggctttcttcgaagggatttctgttaaaaatattcctcgtggagaaaatgaatatgctgatctactagccaagtcagcagcacaggggttgcccttaccttcagaagtatttttcgaaacaataaaagcaccttcggttgagcttcttgaaagagtaatcctcaacatatcccctgtttatagtgaagattggagaactgagatcatctcttttcttcaaggcaattttctttcagatgacgaagcttataacaagaggatagaagcaagagctcgaccatatgtcataatagaaggggaattatacaagcggggggtatgttccccgttactcaagtggttatctagaaccgaatgcatagaattgatg

SEQ ID NO: 81154 - DNA, 395 bp, Zea mays
tccatcttctggtcgcggtagtgggagttcttcatgacttggtcgatgatgagctgcgagtcaccgcgagcgtcgaggcgtcggacccctagctcgatggtgattcgcaacccgtttaccaaagccttgtactcagccacgttgttggacgccgggaagtggaggcgtatcacgtaacgtatgtgctttccgaggggcgagatgaagagcaggcccgcgccggcccccgtcttcatcagcgacccgtcgaaaaacatggtccagagctccggttggatcagagctatcgggagctgggtgtcgacccattcagccacgaagtccgccaaggcctgagacttgatggccttccgaggggcgaatgagatcgtctcgcccatgatctccaccaccca

SEQ ID NO: 81155 - DNA, 339 bp, Zea mays
  unsure (1)..(339): unsure at all n locations
ttacggaactatgaaactcacttattccaaaactaaatgggcggcttctccttagtccgaanaacaccttcccgaatctcgttatgaagtgggaccttgtcgtcagtgagcacaacggttaaagttaaaaaatgtgcgcatataaaaagggcggtggccaccgcgccatcgttacggctatggttgttcgcattcttttctaccaaaatttcttccactttcaaaggtggcttcaaccttttcttaaccttcgcaacaaccttagttgtcagccgcattttcatcttacaaatgggccgagagcaacctgttgctgatctgacgctctcgtctagtatg

SEQ ID NO: 81156 - DNA, 427 bp, Zea mays
tcaagcccaagctccggcggttcaagatgaaatcgttatctaagccatggtcaaggggctcaggctaggaccagctgctcagtattttgcaaggaagcctcctcaatccttgaaaaaaggttgcaaaaaatggacgagtacataagggttgacaatgatttccgccaaagaagggaggaatttcatagatacatcgaagtcgccaaaggcttcagaagaaggtttcatccaaagcatttccgaagtatccataacccggtgcagggtgagaaaaaggtgacccagtttcaaggtcagtcgggccagcaacagtcaagctcttagcaacaaccttcacacaacacgtttcgtccacctgctccgatatgaagaaagggatgttgaagtcttggtggtagattaaatgcacctccaaagaaaccattct

SEQ ID NO: 81157 - DNA, 427 bp, Zea mays
  unsure (1)..(427): unsure at all n locations
tctttcatcctcctcatcctcgttagagcttccacaatcattttcattagccacacaacatatgtgggaatcaaaattggaagacaaatcttttggagaggtggattcatcgtttggtctccatcgttcattttcttcttcattcaaagggttagtttcacaaggaccaaaggaagtagaagcacaaaatgaaccatcatgtttggactcatcaaatttatttttaattctagtctaaatatcatgcgcatcacgaatagattcattataattcatatgaaggcacgataatcttctttgctaagagaattacttaagatgtcataagctaggtagtttaagcgtatacatctttgatcttcctcggaagcatttttcctatcataactagaaggtataatactcttgtctantaattgttctattt

SEQ ID NO: 81158 - DNA, 420 bp, Zea mays
tgatagactgattgcacctggttaaccagttataaatcttaagacaaattagttaggcatgcccacaataacttgtagaaagccaggtgtatgataaatattgtttcttaaaagaataactgggattttaggaacttatccatccaattagtagatggtaacctttgattctatgaataggaagcatccggatgctcaattcaaagcaggcaaccaacagtttattaatttttttggggtcagaacattttaaatgcatttgttgtcaaataaaactgttttttgcatgcaacttgtagaactcaagttctgtccttggctctgttttattttgagttatcttcagagcttgtggtttaaaactgtttttattttaagtatgctccaaacgcccctgttcactgatcatgcaccttattg

SEQ ID NO: 81159 - DNA, 414 bp, Zea mays
tgtgacaatatagcctatttgatgaaaggcaagcggtgtttattgcctcagcccaataagaatctgacacattatattccgctaacatagacctagccatatcaatgagagtcctattctttctttcaacaataccattttgttccggggtatatttggaagagaattcatgtttaatacccttgtcatcacaatattcatcaattcttacatttttgaatttcgacccattatcacttctaactttcttgatatcaaaatcaaattgattttgagccaatatagcaaatgacttgaatgtttcaaacacattagatttatcccgaagaaaataaacccaagtgaatctagaataatcatccacaatcacaagacaataggaattaccatcaatactcacaaacgatgtgggcc

SEQ ID NO: 81160 - DNA, 364 bp, Zea mays
tgagcttctttcaagttgtgtcttatacgctggactttttcttccgtttccttaaccaaatcaagcctgaaaaccatcgttctttgggttctgaccaatttaaaggtgttctacatcgtcgtccatacaatgcctcaaatggtgccattttaacactttcttgataacaattatgataagaaaattttgccaacggtagacaatcatcccatttctgtgggaattcttggacacatgctcgtagcatatcttcaagtatttgatttaccctcttagtttgtccacttatctgatgacgataggccgaactgtggagtaatttagtacccaaagatttgtgcaacttcttccaaaacttggatac

SEQ ID NO: 81161 - DNA, 346 bp, Zea mays
tgaacttggcctatctgcaatgtcgaaagatcaacttgcagacagtcttgcttacaacaacctgaaggtgtgtatactttgaattatctactggtatggtttttcttgccattggtacattctcactcttcgctttcccaggcttaattttaagcaaagctttgaaggcccagaatgatgcagaagatgagagctaccgcatagctcttaagaatctacgctcagaatttatcacgctaagaaatgaagctcttgaaaaagaaaaaaatattactctccttggtagataaactaaaatctgacgaggccaagcttgcagcccaagccgaagcttacaaagttgaag

SEQ ID NO: 81162 - DNA, 426 bp, Zea mays
  unsure (1)..(426): unsure at all n locations
actcagctttccagggcgtactcagatgggctcttatttaaaagtggaatccgaccctctctctgttcccctcaatttcaagctcccctggcgtttctttttgccctgcaaaaattccccctgggcactggaggagccaagctcgcgctggagcacggcaaggcttgaccgacgccctttccatggctggctntaagcagtgggtcgagcccctcttcttgccatggcacttgacccctgctcttctctgccccacgacacccagcctttctacaggagcaagcgccctctgcatctccctagcgcaagaaatccccaagtgcaggcgcccaggactcccatggccgctagcctctccatgcaaccgagctcccttacttcccagccatggactagcctccggtgtgcatcgagctcccccacggg

SEQ ID NO: 81163 - DNA, 421 bp, Zea mays
  unsure (1)..(421): unsure at all n locations
tgacaatgaagagatggctcttatcatcaagagcttcttacttattcttaaacaaaagaaggggaaggactacaaaccccgcaccaagagggtttgctacaagtgtggtaagttcgatcattttattgctaaatgtccatatacaagtgatagtgatagggacgacgacaagaaagggaagaagaagatggacaagaaaagatattacaacaagaagaaaggtggcaaggcgcacatggggcgggaatgagactctgaagagagctccaccgactcctcctccgacgaggacgccaccaacatcgccgtcaacaaaggccttctcatccccaatgtaggccacaaatgcctcatggctaaagatagcaaaaagaagaaagtactttctagagatacccccanatacactacttccgatgat

SEQ ID NO: 81164 - DNA, 422 bp, Zea mays
  unsure (1)..(422): unsure at all n locations
ctcagcttgnatgctagcctagtccctcgtggagttagccacatcttggcttggagtctatttcaactccttcctccgtttgctcagatctgtcgggcgacagatagagccttccactatgttgatatcagttacaacgatgtcctggctacttacaatcttttcaacagcacttccacagagtagcaatgcgctcaagattttgctctagctctcagcagcactttccctctctctaaaggcttataacttcgcctctacacaaactagagagatacacaagagagggagagaaagaattgatccaaatggtgtatggacttgttggcagcacttgtgttcttgtttgaggcgcctaaaggttccttttatagccccaaagggcctaagagccgttggagcttcatttggaagctcccaac

SEQ ID NO: 81165 - DNA, 421 bp, Zea mays
tcgcacctctgaactaactcggctgcatcacttttcactgttggccaatagaatcccgacctgaagaccttcccgactagtgtcttggacgttgcgtgtattccacattgtccagcatggacctcgtctagaagtcgcttcccagtagacgatagaatgcatttcatgaagatgcctgatgcgccccttctgtatagtgtctccccaatgagtgtgtagtgagctgactgtctagcgatgcgctcggttgcatttttatcgtctggttcctcttcattcttgatatatctgatgatcggccttctccagtcatcggagcctgactctggttgattcatgatattacactcttctgcctgatccattgagatgcttggttgtggtatttcttgtacaaagactccaagtgggacctgagttc

SEQ ID NO: 81166 - DNA, 397 bp, Zea mays
tatgggctggcccgtaaagtcccataattattatgtattgatatggcccgcctaggaaacatggcaaaccgttttacgcttggggtatgtcacgccgactagcccgaatgtacacatattatttctgtatttcaaaaaaaatccaagtgatcagataaacattcaatggttatagtatgtgctttactaagcgcttaagctagctttatctctggcatatcatctagtttatgctaatatctaattattaaaagtgatattaaacaccgtcaacttcttggtggttgtctgcatggagtatagtagcgaaaggggcttatagactagcgatattacaccaattgtgttatggtgtggacaacaccgtataccggaaagaacaagacccgtgacattt

SEQ ID NO: 81167 - DNA, 423 bp, Zea mays
tctaaagggagaacacattgtgggactaacatttgtttattttgagaaagacaggatttgtagcgcatgtcaagcaagaaagcaagttggtgttcatcatccacacaaaaacatcatgacgactgacaggcaactcgagctcctacacatggacctattcggcccgatagcttacataagcatcggcgggagtaagtactgtctagttattgaggatgattattatcgcttcacttgggtgtcctttttgtaggaaaaatctcatacccaagagaccttaaaaggattcttgagacaggctcaaaacgagttcggcttaaggatcaagaaaattagaagcgacaacaggacggagttcaagaactctcaaattgaaagctttcttgaggaggagggcatcaagcatgagttctcttctcccta

SEQ ID NO: 81168 - DNA, 411 bp, Zea mays
  unsure (1)..(411): unsure at all n locations
ttgacgggatcccctaacacggagcgacgccaccgtttttgttggtgaccttgccactaccggagctacagaggttgggcatgctgccagtgcccttggggaggagcggcagctagccctatgtggagtgccctggtgccttctgtgcaagaagggcgatgaacgcggtggcaagagatataagtcgtacaactatacatttgatttgtctctgaagattcagagttatctgagttatatcaagccacaatttagtgatctatatagaattggagaaatcctgcttcaataatataaactcgcaataggttccttgcatttntntgtatagtaatgcagatggcaactagctgcaagctatatgaagagcttatgatagttntaacatatgcacaaccttgattgaaagtg

SEQ ID NO: 81169 - DNA, 387 bp, Zea mays
ttatcaaatggacgtgaagagagccttcctcaacggtccgatcaaggaagaggtctatgttgagcaacctcccggctttgaagatagtgagtaccctaaccatgtgtataaactctctaaagcgctttatgggctcaagcaagcctcgagagcatggtatgaatgccttagagattttcttattgctaatggcttcaaagtcggaaaggtcgatcctactttattcactaaaactcttgacaatgatttgtttgtatgccaaatttatgttgatgatattatatttgggtctactaacgaatctacatgtgaagaatttagtaggatcatgacacaaaaattcgatatgtcaatgatgggggagttgaagtactttttaagatttta

SEQ ID NO: 81170 - DNA, 419 bp, Zea mays
tcagctccatctatattatggatagcttttgaatctgtccaatttccttcggcccttctggcagcttcctgacttccatgaatagcaatgggcccttggtccgaaggtatcttcatgcaaagataagctggatgaagaattgcttcaaaggcattgagagtaccacgaccaatgattgcattgtaagggtattccatgtcaacaatatcaaatacaatttgttcagtccttgtgttgttaatgaatccgaaggttactggcattgtgatttttccaagtgctacgatctgtcttcctccgaagccacaaaggggatgtgtggcatcatggatcttgtcctcgaactcttgcatctgtctgaaggccttatcaaatatgatatcagctgcgctgcctgtatcaaccaaaacattatggac

SEQ ID NO: 81171 - DNA, 420 bp, Zea mays
tcagctccatctatgttatggattgcttttgagtcagtccaattaccttcggcctttctggcagcttcctgacttccatgtatagcgatgggtccttgatccgaaagtatcttcatgcaaagataggcaggatgaagaattgcttcgaaagcattgagggtgccacgaccaataattgcattgtaagggtattccatgtcaacaatgtcaaacacaacttgctcggttctagtgttgttgacgaacccgaaggttactgacatggtgatcttgcccaatgctacaatctgcctccctccgaagccacagagaggatgtgtagcatcatgaatcttatcttctggctcttgcatttgtctgaaggccttagcaaatatgatatcagctgcactgcctgtgtcaaccaagacattatggacc

SEQ ID NO: 81172 - DNA, 378 bp, Zea mays
  unsure (1)..(378): unsure at all n locations
ntttggaanaacaagccaagcgcggaccgtccgggctcttgcggcggaccgtccgcgacacgaggatgtcactcggccagaaccaatgcaaaaatccaagtctgtgctatggactgtccggaggaaaagcaaagaccgtccgagcccttgcgcggaccgtccggcctctggcgcggaccgtccggtaggtgaaaaaccaaaaaacccgaaggtaacgggttcggagaaatgaattatagcggtctcgcggaccgtccggaccaggcgggcggaccgtccgcgactggctctgtctgacatctgacgacgcattaaatgcaatatagccgttgatatagcccgtactgctgaccgttgcattttcagccgttgatctac

SEQ ID NO: 81173 - DNA, 412 bp, Zea mays
tggacaatattctgcgatggttcttggagaaccttctgtgcaggtgcagctgccgtcttaattgcaccttccaaagtcagaacatgctacgcagtgaaacttgatttcagttgtacaaataatattgctgaatacgaagctttgcttttgggtcttcggaagttgaaagcaatggggacaagaagggcggtcctcaaaactgattcccaagttatttctggccatgttgacaaaagttgcaaagcaagagatccgaagcttgaaaaatatttggatacagttcgaagacttgaagcctccttcgaaaggttttctgttaagaatattccacgaggagaaaatgaacacgctgatctactagccaagtcagtggcacaggggctgccattaccttcggaagttttctttgaaa

SEQ ID NO: 81174 - DNA, 442 bp, Zea mays
  unsure (1)..(442): unsure at all n locations
acctataaaactcagcttctaagggagagcacattntaagactaacaaatgttcattttgagaaagacagagattgtagcgcatgccaagcaggaaagcaagttgggactcatcatccacacaagaacatcatgactagtgataggccactggagctcctacacatggacctatccggcccgatcgcttacataagcatcggagggagtaagtactgtctagttattgtggatgattattctcgcttcacttgggtgttctttttgcaggaaaaatctcatacccaagagaccttaaagggattcttgagacgggctcaaaatgagttcagcttaaggatcaagaaaataagaagcgacaacgggacggagttcataaactctcaaattgaaggcttccttgaggaggagggcatcaagcatgagttctcttctcctacact

SEQ ID NO: 81175 - DNA, 349 bp, Zea mays
ccttcattcaatctcactcttggaaaaaggtcttaaaacctaaaatcccctcttaaagccctccaacccttaacatgtgaattaatgggaaagaatgggccaatgggccaatcataaaagggaacctttacccaaagatgaagtatattagtaaacctacaccatgggttaaaggagggatttcaaaaagggcccatcaaaaccccaaaaccattcaccaagtggggagcacacttgaccatttcaatttttttaattcccaaaccaccctatatcaagataaatgtgttaccttgtgctgcgccaaaccactggaccaatagcaaaaatggccaattacccacgcaca

SEQ ID NO: 81176 - DNA, 425 bp, Zea mays
  unsure (1)..(425): unsure at all n locations
tcggcccaacagcagagttcttttcagtcaccagcgctcttgtgcagangtgctcagggcttcaggggaaggtttggagaccacccaagaaaaatatattgcctattctgtggtgaaaacaagggccctactaccaagatgtgccatgttaccattcagaagcagaatgaaatagcggaagcagcagcgcaacagagtcaaccgaagcaagtcatgcatactgcttcgtatcactcaccttacattccagaatatgtaggcaaccaccctgcagcttctgttgcttcggcgagccaaccccaagcatcttggcagcaacctgcaccgccaccgccaatccagcgagggcaatagccagaagggagccagcacaatcatcttcaaagggatttcagagaagagtccgaagctcgcacagtcaacaa

SEQ ID NO: 81177 - DNA, 413 bp, Zea mays
tcgacatctattgggtgcacttcttcatgagcccctatcgtctaatcaacaatgaagtctgctagtgcttgagattgaattgaagatctatgaacaaagtctatggtgaactcgttcagctctgcagcccacttgccaaccatcttctaacttgtctgtttcttatgatatcctttaaaggttgggacgaaagtactattatatgataagactggaaataatgccgaagcttcctgaaggtcatcaatacagcatacagtaccttttccaactctgtgtagtttcttttcgatgggattaatacttcgaagacgaagtaaattgagacttggttctttgtttgttcctcttgcttttcttgaaccaacgctgcactgattgcagcgtgggaagcacctacatacaatagcaat

SEQ ID NO: 81178 - DNA, 377 bp, Zea mays
tttgagtttctgtttgaaagacatgtttttgtcattttcgattagaagatgtctcaagacaagaagacagttgctgagactaagctaacccaagaggagaagcttcttgaggagaagaatgttggatttgttgagtcaatagcaaaaactaacacagagaagattactaaagagatactggaaggcctgtctgaagatactggtgatagtgacagctatgatgtggagagtggaggcgaagactctgaaaatccgccctggcggccaagtcatgcagtctttggaaaatcaacaatctaacagagtcatcttgataacatgagaagaaggtatttttgagatatgtctattctgaggactgactgagacacggctgt

SEQ ID NO: 81179 - DNA, 370 bp, Zea mays
tctaagggagaacacattttgagactaacaaatgtttattttgagaaagacaggatttgtagcgcatgtcaggcaagaaagcaagttggtgttcatcatccacacaaaaacatcatgacgactgacaggcaactcgagctcctacacatggacctattcggcccgatagcttacataagcatcggcgggagtaagtactgtctagttattgtggatgattattatcgcttcacttgggtgtcctttttgtaggaaaaatctcatacccaagagaccttaaagggattcttgagacaggctcaaaacgagttctgcttaaggatcaagaaaattagaagcgacaacaggacggagttcaagaactctcaaa

SEQ ID NO: 81180 - DNA, 336 bp, Zea mays
ttttatgccgacgacacactattgattgggaatgacattcctatgttggaatttgtcaaggcttcactgaaaaagagtttctattaacgacttacgggaagccccatttatgttgggcataatgatctatagagataggtctaagaggcttatcagattaaggctaaatacatacattgacaaggtgttgaaacatttcaacatggaacaatctaagaaaagggttcttacctatgtgtcacacccgggtttagaaggctaaccgcatgcgaaccatgtacgtgccaggatcaattattcacggacacagcaggtacataaccatggacatcatta

SEQ ID NO: 81181 - DNA, 379 bp, Zea mays
tcttcttgtcggcatcaactttgagataaaacctttttgatttctagcctgccggtcacttgctttggtagctgatcacaagaaaatttgtagttttccgataggccaaattgtaacaaccaaaattttcatgtagcccattctttctggccttaatttggtagtgtaactcgtgtactcggcagaaaccttccgcaaatggctccaccccctggctttggagagcccaaatataaacactaagcctaacaataacgttaggagttagttgataaaaataaatccaaaacttttttagcacatcagcaatcatcctattcaaaggaaatctcaaaccagctttgaagaaactcttgaaaatcactatttcatctttctg

SEQ ID NO: 81182 - DNA, 392 bp, Zea mays
  unsure (1)..(392): unsure at all n locations
tcccaagctgaccnctctgtcagggcgaccattgtgtctgggagaccgctgacgcggtcgtggccccaagctcgcctgacctgttgccggcgccgacatcgacttctgccggggccgtcgctgattcgcccgcggagccgcccagcgctttcgacgtcaggatggttgaggtgccatcgctcgtggttcttcccgacctccccgttctcggtcatgaggagagggcgaccgccgtcgcccaagtcggtgatcggaagctcgccaccttatccgaggggaggcccagtacgttgacagtgatggtcttcaacgtgtctgctacagggggacccgacgccttattgatgggcacgcagaattgtggactcgtttgggagcaatcgtacttatcc

SEQ ID NO: 81183 - DNA, 427 bp, Zea mays
tgaagccatggtaagtagcataagcaagtgatatactaattgactcaagcctagctacgggtgcataagtttcatcaaaatccaaaccttcgacttgtgaatatcctttggctacatgttgggctttgttccttgtcaccacaccatgctcatcttgcttgttgcggaatacccatttggtacctacaacattttggttaggatgtggaactagatgccatacatcatttctcgtgaagttgttgagctcctctagcgttgccaacacctaacccgagtctcttagtgcatcctccaccctgtaaggctcaatagaggacacaaaagagtaatgttcacaaaaattagcaactcgagatctagtggttacccccttatgaatgtcaccaaagataggagtgacggggtgatctatttgaattgcttg

SEQ ID NO: 81184 - DNA, 413 bp, Zea mays
ttacactaagcacatgtccaacagttttcacacctgttaatcctttaatttggttttcattcaaaccaccaaaacccacaagagagcttttaatctcccccattttggtgattgatgacaacacaattaaaacttacacaagattaagatttaaagcataattttgaattctaagctatagaatgctccccataaatatgggtttacatgaaaatctcaactgtgaccacatattccaaatagcacatacttatgctaattgcaaagcattactacaccttatcatccatgggaagaatgtttgattatgggaaaaggaggagtttttgaatctttgatcaatttctcttggaatacctttctatatgcctaaacaagtgaatttgacttatagataggaaattgagtttgat

SEQ ID NO: 81185 - DNA, 401 bp, Zea mays
tgactttcgaaaccaaacgaagcttcatcttgaagcctacttcgtcagaagaagaaaaacttcggaagaaaagtatttaattcccaaaaaatccagaattaaatggctagagtgcgctctaccgctagggttgagcgtgaaggaggcgaagctgaaagatcagagactgttcccatcttcgaagcgatgcaacgattcggactagtaatctcggaagaaatccccactgctgaaacagaacaggcaactgccgaagcgaaagaaagagacattgaggaaactgattccgaagatgattatcatattgccatgccaagtaagcccagccacttggacttcgtaaagtcgactgtctctaaagctgatctctccaagatggtgaagtcgcgttatttcagtga

SEQ ID NO: 81186 - DNA, 421 bp, Zea mays
gacacttaaatactcagcttgcctcgtcgaaccatccagaaggcaacacctttgggagtggagagatggcgagagtagcgtgtaccctccgttgcaagaggctggacggaggtgtatctgtgctctcggttggcgtgaacctggtctggtcttgagaaacccggtggcgagttgacatatgcagggttaagtgctacatatgtcattgtgatacccggtttgcaaaaaaaagttggggggtgttcatttgtttttttcctcatccggctgttgttttggggatttgggattttgtggaaaacattcacaatcagggcagtagaatttatttggtttgacgcttgcgttgcagtcgggagctgtcgcgtgggttagttgggccgcaattggagtttcggcccattaaccctcccaaacccta

SEQ ID NO: 81187 - DNA, 328 bp, Zea mays
actctatttataaggggctaaaagacacaaagccatctatagtgcacaaaacctaggcgtcaaaccattccatactacaccttaaaaaatcatacaggtcctcgttgcatcatactaccacaaacgtacctcattggaccattggttacagcctcactaatcataaaaaactcctcacgcgtctggcaacgaaatcttttttaataacgatgaatacaacctgtcaaatgtcacccgtgttaacagcgttatacaacctgactgaagctcttcttatgcagaattagaccaaaaggccaccaaaggcatcagactggtgtgacaccct

SEQ ID NO: 81188 - DNA, 393 bp, Zea mays
  unsure (1)..(393): unsure at all n locations
ttaactctcgcgagacnatttcccatttctttctaaccatggtgagttcattatcgtatgtgatattctatgcgtgttcactttatttggtcccttgtatggtgtactggttgttttctaatttgaatggatgaatgtatgtatgcttgcaatcgcatagaaaacgatccggttgaacacacccaagaactctcaagagaaacccctgagcaccaattgctgggggaaacaaatgtcccttgaactatctctgttctattcattctttaattcaccttccgctttacacatttatgcctaaagattgactaactttggtatacacagtcttgtttacctagtttgggtgggactattcaatgcttaagctttatgctattgcttcgacctcta

SEQ ID NO: 81189 - DNA, 406 bp, Zea mays
taatgccgctaacaaagtgtctagctctgttaaaggcatacctcccatggttcaagataacgagggctatattctatattctgctggctatcccgaacacaaaattatgagaattcattctaggaaatctcactctggctctcatcatgcttttatgtataagagtgaggcatatagttctaggcaatcaacccatgttaaattgcctaaaaagaaatctcctattgcatcaaatgatcataacatttcatttaagacttttgatgcatcatatgttttgactaacaaatcatgcaaagtagttgccaaatatgttgcggccaaacaaaaaggctccaagacttgtgtttgggtacccaaggtgcttgtttctaacatcaaaagaccgaagaccgtgtgggtacct

SEQ ID NO: 81190 - DNA, 359 bp, Zea mays
tgaagccatggcaagtaacatacgcaaacaatattctatttgactcaagcctacctacgggtgcagaggtttcaccgaaatccaaaccttcgactcgtgagtatcccttggccacaagtctaactttgttccttgtcaccaaaccatgctcgtcttgcttgtagcgaaacacccatgtggttcctacaacattgtggttaggaccgtggaactcacatgatatacctctatttagtgaagttgtaaacttctcttgcataaccaccacccaatccgagtcttgtagtgcgtcctctaccttgtgtggctcagaagaggaaacaaaagaataatgctcacaaaaatgtgcaacactagat

SEQ ID NO: 81191 - DNA, 420 bp, Zea mays
  unsure (1)..(420): unsure at all n locations
tcataagagccaaaggtatgatacatattnttttgtttctatttcctaactagntgacttcgttcatttagttattcctatntttttgcagactaactctagggatgacgacgttgttgaattacccattcttgagaaaactcccctagaaagtattgcttctgagccgaaggaggctccaacttcagagttctttccaagcactatagaggaggatggacacatagctctagtgatgagcgcactctttttttatggggacgaagaggacggcgaagatgtaactaatatgaagggttcatagggggcgacagccacaacaaccaaggtgacgaaggtcatcagcatgcctttcgtagctgcagcagcactaggcattatggaagtccttacgacaccctcgacagtgacactttcttt

SEQ ID NO: 81192 - DNA, 397 bp, Zea mays
tctaccatcaatgccccccctccaccatctacttatacatacccttctccataactgtatgacatacggtggtcctctatatggatcgtatggtgctcctcctcaattcccttctgcatttggagcttctccttcatatgatgctcattctcattttgtcctccgacatgcatgaaagtgccccaagcagtgataatggggatttgaatcggtcagtttactccaatgctcctcaattctaacgacgaagggaccgacaaaagcatataatgaaaggctagtatatgtatatatttcaaaatccacatatttttaggtccacaatgattttttgagttcataaatttctaagtccacatatggctatttcactcactggacgccaatgatgaaaact

SEQ ID NO: 81193 - DNA, 369 bp, Zea mays
tgccaattcttatcaaagcagcagcatttaccatcatatcaactgcataccatacccatgacatggccatttgcgtgctggggattggacatgattagacctttcaagaaagcttatggaggatacactcatgtgttggtcgccattgacaaattcaccaaatggatagaatacaaacccattgcttctctgacttcagccaaggtagtggagttcatacaagatataatattcaagtttgggataccgaatagcatcataaccgacctgtgatccaatttcactagctctgaattctttgatttctacgaacaacgaagcatccagattaaatatgcatcagtatcacatccaagggctaacggtcag

SEQ ID NO: 81194 - DNA, 412 bp, Zea mays
tactcccccctaagaaaggccgttcatcatcgccaagtatttgaagcccgggacatacaagctggccaacgatcaaagtgaggtctacaacaacgcttggaacatccgacagctacgtcacttttacccttaagatgttttcaagtcgttcatatacctcgttttctatacatacgcaaataaagtctaaccatcaaggaaaggtcagccttgcctcggcaaagcccgaccctccctcgggggctagaaggggggaaccccctctgcgtcaaaattttcctcacaaaaagtctttctgcgagaacatctttcgcgctttttgactgcttcgatagcaggatcctgaaaacggcggagtacacgtaaacggcaaggccgaccgagccaaaggactcctacgcctcccggatac

SEQ ID NO: 81195 - DNA, 404 bp, Zea mays
  unsure (1)..(404): unsure at all n locations
ntcataaactttattggtgcttatttagnatactttaatgtttatatttggcctaagccttgattttatatttttcatagncttttgcccctttcttcatttctacttaaagagctcaattaagtttggtattaagggttcaaacatttgctcttctgaaaatcttacttgtttagaacatgattctctatatatacacttagtagattctttattctcaagttaatttgatgctcatgctcaacttggttcacataaaatgatggtttttgggttagcacttgagagaaaccctaagtgacactggggtgtcacacctaaataaagcttaaatgatgagtacatacagaatgaacgagtccctggtcgtggatggactggcttttagactaaacagttcggtt

SEQ ID NO: 81196 - DNA, 303 bp, Zea mays
agagagcgtgattcgcgtttcattttttgctcttgttgcttggccgtgctttcttcatcttcttctaaactctcaagtgacttataaagctagcaagagacacctaagcgcgcggtgatccttgtggggtctttgtgacccttgagattaagaagaagcaatcagtctgtctaagtgatcgattgagagagggaaattgttgaaaaagacccatcctccgtgttctcctcaacagggagtaggctcattggaaccgaacctaaggaaacaaatccgcgtgttcatttgtgttgataattactc

SEQ ID NO: 81197 - DNA, 426 bp, Zea mays
tatggagatttcacaagtcaaacaactacattcattgttatcacgagagatgtaagtgcatggcctatatagatacatggacgacataaacgtcttatctttataaagtgctataaaacatatagtccaaaaaaacaaatactttttagtcaaaatttaaaaatgaaataattatatatccactcaaactaaatcaaaacatttgtattctatctataattcattgttcatgctagagataggtatccatggtcctgctatagctagatagatatcatgatgtcatcaagtgctaaaaagaagaaaatgtaaaaaatggaggtttataaattagtaggactactctaatatttgtacacgatcagaatattatacgtaatttgggttcattgtcaatcatatcacaagagatattatgtagaaagc

SEQ ID NO: 81198 - DNA, 432 bp, Zea mays
gaccttaaaactcagcttaagagaacaaaagcttcacatgaacttgatatcaccacaaagtactcaaaggttactcaactctagtttactcacacacaaccttacaaggctcaaatgttgctctctaattcaaaggatgtgattaaatgcactcgaaacccataatgataaaatgtgagcacttactaagctctgctagttggtatgagcatggagaagctttggtaaccacttaaagaaataagagtggtataaataggtatccataaactagtcattgggctacctagtcagacaaaactggcttagccgatttctctgacactagccattggatcactatcataagtgtaggaaaactggcctagacgattttgtagcctgtgttggccccaaactctacaagtgttttttctctcgaattttttactt

SEQ ID NO: 81199 - DNA, 294 bp, Zea mays
  unsure (1)..(294): unsure at all n locations
caaggggagaggccaccggaacaccggnncgaccgaggcagacacccccggaacacgcccgnncgcgcaccgcgcctcccagagcacgcccgcgcgcactcgccggggcacgaccggccgtgcaccgcgccgcgcctaaaaaagccgtgccaggcgcgccccacaacggcccacactcacccgcaccggccaaacactttcccttagctccggcgagcacaaaaccgcccgccatagccgccagggcgtcggccatcgaggccagcccactccagccaacctctgggcaagcca

SEQ ID NO: 81200 - DNA, 421 bp, Zea mays
  unsure (1)..(421): unsure at all n locations
ntcatccttcttcttcacaaacagtgctggacattctcaaagcgaagtgcttgggcgaatgaaacccttatccagcaactcttgcaactgcttcttcaactctaccaactcagcgggtggcattcggtagggcctcttagaaattggggtcgttcccggttgcaactcgatggcgaattcaatatcccggtccggtggcattcccggcaattcatcaggaaagacatctgcatactcacagaccactgggatcttctttaggggtaactccgtcatagagaaagtacatgactgagaagaaccctgactaggcagaatcaaagtgaaattcccgcagaaaggagaattaacttccatggtacgactggctacatcaagcacaacttggtgcaaggtcatccaatttgcccctagaataatg

SEQ ID NO: 81201 - DNA, 401 bp, Zea mays
  unsure (1)..(401): unsure at all n locations
tgaactaagcttgtctgcaatgacaaagaactagtttgcagatagccttgcctataacagtctgaaggtgagaatattttaacttgttggaaaatagattaattttatagcttatttctttatcagtatgtgctcatcctttgtttttgtagggcttaattctgagcaaggctctaaaggcccaaaagaaagcagaagatgaaacctgccagctggctcttggaaatcttcgatcagaggttattacacagatgaatgaagctcttgaaaaagacaaaatactgctctccttagtggataagatgaaaaccaatgaagccaagcttaacgcacaagccgaagctcacaaagccgaggttgaagatttaaagaanaaacttgctgaaataaatgaaaatttc

SEQ ID NO: 81202 - DNA, 414 bp, Zea mays
tctccaccagccgtggcgcgcgctggctagttttctgtgtccatatgattgatctgcatggggaattgaggaacgaacatataattccagtggtacgtgcacctaaacttgagagcagctgggactgggagctgcccagtctgagtcgatgaacacaggcggtcgtcccaacaactcctcccaaaagtgagtgagcctctttcctgaaggttttagtaggaccgatcgtttggaatgtattgttacagaatcgcaaacgtcgtacgtatatatgtgatctctcagccattcagtatcgtagatgatgttcacggcgtcacctgcttaattggatggatttcttggacaggttagatgtgaagatcacacagcaacctgaaaaaacacgcacacaccagcagatgtttttggtac

SEQ ID NO: 81203 - DNA, 382 bp, Zea mays
taatgcccttcctaaaagattgtcaaactttggtaatggcaaagctcccatggctcaagataacgagggttacattttataccctgccggttatcccaaacacaaaattaggagaattcactctaggaattctcactctggccctaatcatgcttttatgtataagagtgagacatctagttctaggcaatccactcatgctaaattgcctaagaagaaaagtcctattgcatcaaatgatcataacatttcatttaagacttttgatgcttcctatgtgctgactaataaatcaagcaaaatagttgccaaatatgttgggggcaaacacaaagagtcaaagtcttgtgtttgggtacccaaggtgcttgtttctaatgtg

SEQ ID NO: 81204 - DNA, 218 bp, Zea mays
  unsure (1)..(218): unsure at all n locations
atcgagttcagctctggtaaaatcaactaagtatagctgaccctctaatactcccttanatgctactgaatcatcacttcgtctaaagacagtaacacatacatctgtcaatagacagttgtagcccattttgcataatngagatacagaaagaagntataatctaataatctacagaaaacattggaatnaatggcatggaatagcatttaccagtc

SEQ ID NO: 81205 - DNA, 147 bp, Zea mays
accacttaaaaattccatggaggtttgtggtatgctcgaactttctctcacttcatatggccttccacttgagaaaatagataaaactctgagacgaagggtgcactatgaattttgattgccaatcttttatcagcgtcaattatc

SEQ ID NO: 81206 - DNA, 324 bp, Zea mays
ttacacttagaaccttggctcattcttaacacagtgtgcttacagaacatgccctatcccgacttgcactgcgcctataccctgtttcgcaactctacacacgagaactgtgatggaatatctctatggtttttgcgaatcaccgacctaggttaacactacagtgtagtaaataacattgcggtcatcatagtttagtagctgcattttctccctaaagtgtgagaatattctctgagcgtgatcacgcgtggacctacctttctacgtttacacaaatttactcgtacagtttactacagattgaagaaatgtaggagtttg

SEQ ID NO: 81207 - DNA, 288 bp, Zea mays
atgctactgttcgaccattcgcttacatccagaatatgatgcaccacctgagttctgtgttcgcagtaactcacttctggacagctcgctcacacgtgacaggcacagcgaagggcattgctccataagactcaacattcactcgcacatcctggcaagcacatttatgcaaatcactccaggcttcatcattatttggtaaagcctttaatcagatagttgtgtgcgaggaactatttccagtagtgcactgaatgctacaagctcgtatatcataccgtgattcac

SEQ ID NO: 81208 - DNA, 340 bp, Zea mays
ccccttggcttaatactgcacagatggttttgaagttctaatctagaatgaggatgatcaacccgtcaaagggtgtcaatgtgtagtcagcattcatgcaaatgtcatatcagtgaaggaccggcacgataaaaggagaaaaatggaaaaagtctcaaaaaccgacagccctggcggatgactcataagtcacgctcttctgcagacctcactgcgcacagactgctccacgcgccatgtttgtagactaatagaggccttaacaccaattcacttatgcagtgttaccataatatattttttgcactactgtcagaaaatatgtatagactacaagtgc

SEQ ID NO: 81209 - DNA, 265 bp, Zea mays
  unsure (1)..(265): unsure at all n locations
tgtagctacatttgcatgtagcacttttaatgactattgcgccttaaccctaaacacgactactcttaaaatcacttatcgaaagangaccttgtatgaatagcatgattaaattcaaaactgaagatgcaggttacattacagcttacaactgttcatccgatgatactcttggatcatgttctatagagaaactcttttccagcatggttgcaccgttaattcattgcacgtctactcaaaatagctgttagacaatgctggc

SEQ ID NO: 81210 - DNA, 54 bp, Zea mays
cctggcctgcttctaatccggataggtaaaaaaaaacaagcctaactccccaaa

SEQ ID NO: 81211 - DNA, 162 bp, Zea mays
ccttgactatctctgtctatcattcttaattacctccgcttaccattatcctaggatgactacttgaatcatgtcttgttaccattcggttggatattatggtagcttatgctatgtcaacctatcatgacatatagatatttgatcctgttcctcttatat

SEQ ID NO: 81212 - DNA, 271 bp, Zea mays
cagtgactctatccacagaactatgcacgcggcgtgctctcctgttattgccatgtataaatggagaatgctgaaggagaatcctatggttttgagaaataacaaactaaggttgacctaatatcgtagacaaataacacaggcgatagattaacgagtctagagggtagctattttctcaccacatgggtgagaatatttgctgagcattgagcaactgtgttggggcgaactgcctacgtgttccactaaattcactacgaacttttta

SEQ ID NO: 81213 - DNA, 91 bp, Zea mays
ctcactactcagctcctcgtgtcaatcaaatatcgggcatttgggttgcagggacctcctagtgctaattgtgacgtactatgttgtcttt

SEQ ID NO: 81214 - DNA, 229 bp, Zea mays
ccttggactaactacgccagtgttgacttgattttagcttggttcagaagaaattgaacttaatgaatttcctgttaagctttttttacaatcctataattttgtaaggtaaacataaacattccttaccataatctgaattctcactttctcttaatgggggctgtgcacttccttgtagcaacgtctagatactgagcttcctgacattgatcaagattgccgagaa

SEQ ID NO: 81215 - DNA, 81 bp, Zea mays
tgagagtgtgtgctgatgctcagaatagctctcactacacaatgtctatacactgagatatagatcaaatctgagatgaat

SEQ ID NO: 81216 - DNA, 236 bp, Zea mays
  unsure (1)..(236): unsure at all n locations
ttaatgcatgatatacttcttaaacacgcactaatcgtaaagaagtgagccattgacataatgggatcaaaagcagtgtatcaggaaccaggaaacttgaaggatgtagaaatacatttaccagcttgacaacctgattcataccgatggacgtcttgggacttgtntctatatagaaacatcttctcctgctgtgttggaccgtgcagatcactgaccccgtctaactcaacatt

SEQ ID NO: 81217 - DNA, 316 bp, Zea mays
tcttgttggtagcttgattgtcactccttacctctgcagttttactatggaacacaaggccttgtccaaagatctcatgctaatatgctgatgaagaatgcttcaagcattagcgtctcaccatgatgctgatgataccctgcacatgcaaacaatgtcaatttggtatgcgaacaagacgactgttttgcaggtacatctgttctcaacccaaaggtggtgacaaatagctttgcctgcttgcgagcttgaaatgagcctcctgtggtacaacatgaaccaatcctgtaccaaatactaatatgagtatttacta

SEQ ID NO: 81218 - DNA, 122 bp, Zea mays
ccacgcatcgcgagccgccgctgatggcgtgcctgtcgaccgactttccacaaagcccctctcatcgtgtgtgtgtggcactgatgctgggtaccaacgctgggctgcgctggaattgcgct

SEQ ID NO: 81219 - DNA, 216 bp, Zea mays
aattgagcgactcactgcacataagcagttcacacctggaatcacacactcgtttccttaagttagcatatattccgttcttcacaataagctaccgcaagaaggcaacttgctcgcaaactaacttctcgggtgaagggacccttgcgaaattctcaaatttgcgaaagctttgcgacgcttctacctcacgttatgcggcctaacacaagacct

SEQ ID NO: 81220 - DNA, 402 bp, Zea mays
  unsure (1)..(402): unsure at all n locations
actttatttacaggtaagatctntctgaactagatatgctaatctagacattccttgactacactactcatttagctcgtagtgccttgtatctacatgaggtcaaatctagctcatatacaaagtcgcgactgatcgatatcccactgggactcacccacactatgacactaatcttgcttgtaacaccaccggtttaagacaatggtcccgcaccgaactatacccactcaccttgcagtgatccaatttcgcttctcctccatgcggtgcttctgttggcactagtactacctgatagtgtgcgtaaggctatacagcacatctgcgctacacagcggacttcttaattgtcatactttgactgctgaagccttgaaaaatagcttacttatcgttttg

SEQ ID NO: 81221 - DNA, 205 bp, Zea mays
tgtggtcttagccgcttgatgttttttttttttgcacactaatgatcagcaaaacatggggggctgcggagtgtccatgtgaaaaatatgtcagacgtaaaggaggtgaaaaccgctttgacctacggagagtgaaaaccactcgaacaatctggctattttttctgcatgttccctttggctattatttacctactgctgagtg

SEQ ID NO: 81222 - DNA, 233 bp, Zea mays
gattgagctgacgctcctggctagctgtcgtgcatggacttacaccgctgaatttgatatgaggcattcttatcgttagtcaccgctaattgtgcacttgctagtaccctcttgtttagtgcttgaagcgaagtgtgtcgtgatggacatcagcgcgtcacatattgctcttgcatattgccgtacaattccaaactttcggcgaactgggtcctggatttacgttatgtaca

SEQ ID NO: 81223 - DNA, 355 bp, Zea mays
  unsure (1)..(355): unsure at all n locations
taatagttngatgtcaacatttgaatgatttggaactatgtgaatgtggatggactaaatccaatgtgtggaactttttgatactttgtgatatgtgaactagatgtgggatatgtggttgtgaatgccgatttatcgaaaaaaatatgtgttgtgaatgtgaaaatgtatgtgattgttaaatctggatgcatgtggttgtggatatatgtggttgtgaaatctggatatttatgattacgaaaatatatgttgtgggaataattaaaaatctgtgagacttttgatctccctgaaattcattatgtccgacggcctagccatggtcgtcagaaataagggtataacgtctgac

SEQ ID NO: 81224 - DNA, 363 bp, Zea mays
cttgcccttcaagcgaccggtaaggcaactgaggagttctcccttcttatgatcttcacatccacatccaaaaataaacaattattacccattccacaaagttgtgaaacggacaacaaattatagcttaaagaatctaccaataaaacatttgaaagtgattgttggtcaaagataggaattttaccaataccaatcaccttactcttgccactatctccaaacacaatttcttatgcttcttgagttagttgcaatgtatgaaacatgtctttctccccggtcatgtgatttgtacatccactgtcaagcacccaacttgacccaccagaggagtagaccttgcaaacaagtttaggctat

SEQ ID NO: 81225 - DNA, 78 bp, Zea mays
accccaaacataatacaccgcggagccaagtaaacctaaccacctggatttcgagaaatccaccatctccgaagatga

SEQ ID NO: 81226 - DNA, 367 bp, Zea mays
tcaggtaccccatatttttcataatttatcggtagacagagatctctttattgtcttgcaaacaataaaggaaatcatcctcgtcattgccactatacaccaaggatcctcgggggtacttcagatccttggcatattgttttgcttcggcaatctgctcctctgataattgcttccccgaagcatgtcacacaatgaactctagctcttcggtaggtgctccgggagtaagagacttagatttctcaaggacagtctctttttccagggttagtggtgcaatttccgaaggtcctgctttggcagaaactgagggtccagcctcagaaacagtttgcgccatgccagcctcgtcaaatttctttga

SEQ ID NO: 81227 - DNA, 360 bp, Zea mays
tgccgcttacgagcgggagctgatcggcttggttcatgcggtgcgccattggcggccctatctttggggtcgtcatttcgccgtccgcactgaccactacagcttgaagtacctcctcgaccaacgactgtctacagtgccccagcaccagtggctgagcaagctcttcggcttcgactttgaggttgagtatcgtccgggccgcctcaatgtcgccgcggacgcactgtcccgccgcgacgccgagctactccaaccatccgcaggggagctgggggcagcagcagccctggccctctctgggccttcgttcgccttcctcgacgacatccgccgcgccacagcgacatccccggacag

SEQ ID NO: 81228 - DNA, 361 bp, Zea mays
tgtgaaggttcttcatccccacatgtgctaagcggcgatgccacagccagcccatgctagtcttagctattaagcatgcatctagaccggcttcttcttttgcaaaatcaactaaatacagtttgccgtctaatacacccttaaaagctagtgaaccatcacttcttctaaagacagacacatctacatttgtaaatagacagttatatcccatattgcataattgactaacagatagtaaattatatcctagagactctactaaaaacacattagagatagagtgctcattagaaattgcaattttacctaacccttttaccttgccttgattcccatcaccgaatatgattgaatcttg

SEQ ID NO: 81229 - DNA, 362 bp, Zea mays
tgtgaaggttcttcatccccacatgtgctaagcggttatgtcccagccagcccatgctagtcttagctattaagcatgcatctagaccggcctcttcttttgcaaaatcaactaaataaagtttgccgtctaatacacccttaaaagctagtgaaccatcacttcttctaaagacagacacatctacatttgtaaatagacagttataccccatgttgcataattgactaacagatagcaagttataaccaagagactcaactaaaaacacattagagatagagtgctcattagaaattgcaattttacctaacccttttaccttgccttgattcccatcaccgaatataattgaatcttgg

SEQ ID NO: 81230 - DNA, 361 bp, Zea mays
  unsure (1)..(361): unsure at all n locations
tgctcattgcttccgcgaccgaagctatttattttgctcaagcttcgtaacaagaaaaagctttgacaaagtaaagaaaaattttcaacttcattcaaaaaaacaagaaattcaatcatcagatggccagagtgtgttccacagctagagttacacgcgacggagaagaagccgaaagtgctgaaactgccccaatctctgaagtgatgaagcgctcanggctggtagcatcggaagatgcacctgccgctgaagcagaacaggctgatgttgaggagactgagcctgaagatgattacagcgcggtgccaagtaaacctagccacctggatttcgagaaatccaccatcttcgaagatga

SEQ ID NO: 81231 - DNA, 354 bp, Zea mays
tgaaagcttttctgccgaaacgatttttcgggccttctcgactatatcgataacagaatccaacggacgagtaagagtacacgtaagcggcgaggccgaccgagccgagggactcctactcctccgggatacggatacctcactcatcaccttccgtgaaaagtaacttttgctcggataagcgattctgttaccgacaaataagtcctgatactcgaaacaaagggaaaagaaacgcagctttacaacacgacgatgatatgtttgggcctcggcggccacaaaaaacatacgcacactacagataaactactcctgcaggttcaaacatcaatagggggagcagcagcaccc

SEQ ID NO: 81232 - DNA, 355 bp, Zea mays
tgaattgtctgtgaatgtaagtgaactacaataccggtgggagccattgggttattgacagtggatgcacacaacatatgacaggcaacccacggatgttcacctcattaaatgaaaatgttgatggtcaaaataaaatcacatttggagacaactcaaaaggaaaagtacaaggacttggcaaggtggcaatctcaaatgacttatcaatatcaaatgttctcttagttgcacctttgagcttcaatttattatcagtgggacaactctgtgatcttggacttcaatgcttattcactccatcagaggttattgtaacaaaaatggatgatgaatcaatggtattcaagggatt

SEQ ID NO: 81233 - DNA, 356 bp, Zea mays
tcatgaaagctagtttacgggtctccctacataagatgttggttgaaatcttgaagtttggaatattgcttctttagcttacgcctgaggctatgataaaaattggaattttcatttgggacataagaagtcaagggctagaaccagatgccaattgtttttttaatattgatgaattgtcctatcagacgaaggccactgaaaaagagcaatatcacaacaactttagatgctacaccttcgtgtactgatcagctgtctgatgcccaatgtcaactttcaggaagaaatggctaggttcgtggatgaaacaatggttttatgtgaagaatgacctgagtcagaggaatgatgtg

SEQ ID NO: 81234 - DNA, 363 bp, Zea mays
tgaaagagggtcggcgatggtaaaccccgtgagttcaccattgatgagaatgatttggttcgtttcaggggccgcctttgtgtgccacagaaatcagaggtgaagatggatatcttgagagaagctcataaaatgccttacaccgtccaccctggcgaaaccaaaatgtacaaggatttgaagcaaaacttctggtggaagagaatgaaggttgacgtttctaagtatgtggaaacctgtgaggtgtgtcagcgcgtgaaggccgaacataagagacatgtaagtttattgaagccgttggaaattcgagagtggaagtgggagcatatcaccatggatttcgtggttggcttacctcgttcc

SEQ ID NO: 81235 - DNA, 360 bp, Zea mays
tcagctccatctatgttatggattgcttttgagtcagtccattttccctcggcccttctggcagcttcctgacttccatgaatagcaatgggtccttgatccgaaggtatcttcatgcaaaggtaagcaggatgaagaattgctttgaaagcattgagggtgccacgaccaataattgcattgtaagggtattccatgtcaacaatgtcaaacacaacttgctcggttctggtgttgttgatgaagccgaaggtcactggcatggtgatcttgcccagtgctacaatctgtcttcctccgaagccacagagagggtgtgtagcatcatgaatcttgtcttctggctcttgcatttgtctg

SEQ ID NO: 81236 - DNA, 363 bp, Zea mays
tctccaccatgtcgctgctagccaagttgttgcagctaccttcatcaatgatcaaacgacatgaacgctccttaatgacacactttgtttgaaacaacgtatgtcgctgattctgctctgccttctccatttgggcactaaacacacgctgtacaatgaagctctcataatgctctgcatcatctgcaccaatctgttcttcgggtggtttcttagtgcctacatcatcagccgcaagcaaagcaagtgtagcttcatccaaatcactagcagaagaatacccaccatcgtcttttaccaccaaaacacgctgattaggacaatcacgctgcacgtgtccatagcccttgcatcgaaaacaca

SEQ ID NO: 81237 - DNA, 358 bp, Zea mays
tcgtcatctgaaagaaatttaccctgaaggaggagattatctggttctccaatcttcgctaaaaacaggagatatattaagaactgctctttcaagaagttccaccgaaggggcttttattggttcaaagaacacatccgaaggtaaaagcagcccctgtgctgctgacttaactagcagatcagcatgctcattttgtcctctagggatatttttgacagaaaacccttcgaaagaagcttcgactcttcgaaccatatccagatatttttcaagcttcggatccttagccttacaacttttgtcaatatgacccgaaacaacctgggaatcagttttaagtatggcccttctgatt

SEQ ID NO: 81238 - DNA, 367 bp, Zea mays
ttgaaactccatgtccaacgacaagcgtgcaaagcaaactggtcatgtagtcatgcatgtagccaacaatttcctatgcaaggaagcggttgactatatatcataacacgctgtgaattaagtcagaacgttttcttaattatgatgatagccagcaacagccagctgaggttaaaaaattgagtacgcgtggccgtagcacggcgcgcggtttgaatataatccaacgcgtcctgtaaaagctagcctgcggtgttcctactgcatgcgtctttagatcccaccaaaacggcgtacagtatattcatgcgtgaatcacaagccacaaacataagaaacaaacagtcaaaagttcatggtatggtag

SEQ ID NO: 81239 - DNA, 362 bp, Zea mays
tggttataaagatgttagtgcaatagaaccaagtggctatttagcgagctcttgcgaatcacaataaacacacagaaagacaacacaagagacacagtggtttatcccatggttcggccaagtataacacttgcctacctccacgttgtggcgtcccaatggacgaaggttgcactcaacccctttcaagtgatcctatgatcaacttgaataccacaatattcttccttatggttttcttcccatttgcgaggaatctccacaagttggagcctctcgcccttacaagattgatcacaaagaaagcacagagtaaggttgggaagagcaacgcacactagaattaaatccacaccacaaac

SEQ ID NO: 81240 - DNA, 360 bp, Zea mays
tatgaagattcttcatcccaacatgggctagtcgtttgtgccagagccaacccatgttagtcttagcaattaagcaagtgtcgagttcagctctatcaaaatctaccaagtatagctgaccctctaacacccccttaaatgctactgaatcatcacttcttctaaagacaatgacacctacattagtaaaaggacagttgtagcccatttgacataattgagatatggaaagcaaattgtaatctaaagaatctacaagaaaaacattggaaatggaatggtaaggtgatatagcaattttacccaatcatttgaccaaaccttggtttccatccccgaatgtgatcgctctttggggat

SEQ ID NO: 81241 - DNA, 356 bp, Zea mays
ttgagtgtttgaatattttgcatacaccttttacttttatttggcactttaggttgctctctaacttggtttgtaaagaaagtgccatttggggccctacttgagaagaaacagataagttgaggagaggttgagaaatagtatggttctagggtttagtcaattggattatactagtctaagtcatatgaaagtcctccaagaagttcaagttgaatagaaaagaaatggagaagaaaatgactggaaggggtgtgggtccaccagaccctctacagggtcaggccggtgtgcaccagaccgtctacagggaactgtatggtcttgggaatttttgctaaaattcatcggatcgt

SEQ ID NO: 81242 - DNA, 365 bp, Zea mays
ttcaaagccctaaaaggacagcttcgaattctgctatgttgtttgtgcaattgaactctaatctggctgcatagtaggttttgatttttgatggtgaaattagaatagcagctgcacctgcaccgaaggttccccatgatccatcacagaatattgttcaggcttcggtatctgttgggtgtacttcttcatgagccctaggtgtccaatcgacaatgaagtctgctagtgcttgagattgaatcaaagatctatgaacaaagtcaatggtgaacttgttcaactctgcaacccacttgtcaacccttcctatagcttctttgttccttatgatatcctttagaggttgacacaaaggtactatg

SEQ ID NO: 81243 - DNA, 351 bp, Zea mays
tttgaacgtactaagcacataccgggaaaaatggtttctggtaaacctagtacctgagtgaagccgggcgtggactttatccctcatgcgacctgagactgggtctcccatgctagctatggtgggtacaagtgcggtcactgcacgcggcagccggggtcagtggagcattgtatgccaaggcggtgaggcctggacgcgaacggggaatcgatggggacggttgtcatgtgtggggtcagagtaccctgacatgtcgtgtgtttaggtttaccttgcaaggataaaactcgattcgaatcgtctgcttctcgcagctaatgagactgcttgaccccttgtactgcatcg

SEQ ID NO: 81244 - DNA, 358 bp, Zea mays
tgctctttgttatttggtagaccatggcaatttgattatgacaccgtgcatcatggtaaaacaaatcactactcttttatgcataatgagaagaagcttgtattgcaccccatgtcccccgatgctattttgaaggatgaagttgctagagcttgcaaagagaaaaataaatctgttcataataaaaatctaagtgctgcaaaggagttggtacaacataagaagtgacaattctaaatctgctcaagtgaggaagacagaaatacaactgaaaagtgcttgttttcttgcttccagatctgatttgcttgaattaaatgatgttgcttcaatctgttatgtatttatttgcaaggat

SEQ ID NO: 81245 - DNA, 365 bp, Zea mays
taacaagtgcgaaaacgactacaccgaactgttcgcgcaaagaccgactacatgcgcaccagaccaacataacaaatacaccagaccaagtatgtaacgccttcgcaagtatagccgaatgtgcgaaggcacacaaccttatcttacaagtcatcacacatgtacaagcgagggcatcacactctacatcggctcaaccttcggaataatccccatctccctacgcccagtactcggaccaggcacaacttcagcatccgcagcatgcggcgaagcctccgccgctgccacatccaaggccgcaaagtagtccaagtcctcatccgacgactcctcagtccactcaaccgagctcccagagtcac

SEQ ID NO: 81246 - DNA, 362 bp, Zea mays
tccgctttgctgtcagatgacagtaccgaatgggcaatgtttttttatccaggtaaaaagaccaatctcaatgatgaccaatatattgtcattaatgcatctgtcggaatttctgaaagttatgtagcaactcccgataaagaagccgcgataaaaattgccaatgataaaatggcgaaaggggataaaaagggcgcaatggaagagcttcgcctggccggtgttggcgtaatggaaaaccaatatctgatgccacttaaacagactcgtaatgcacttgctgatgcgcagaaactgcttgataaaaagcaatactacgaggcaaacctggcgcttaaaggtgcggaagatggaatcatcgt

SEQ ID NO: 81247 - DNA, 358 bp, Zea mays
  unsure (1)..(358): unsure at all n locations
tgaaggactgcttcngcaggagagcttccgagcgtgatgactcgttcggtccacggagtcgctttatccgagcgcaagttacttatcgcaaaaagggatgagtgaagtatccgtatcccggaggcgtaagagtccctcggctcggtcagccttggctgcttacgtgtacctcgtcgtttccaggaaccgcttttccgaagtagtcaggaagcacgaaagaaatcctgctaaaaagagatcctttttcgaagaaaaattcgacgcagagggggtctccccccttttagcccccgagggagggtcgggctttgtccaggctaagccgacccttccttgacgactaaactttgcgtttgtg

SEQ ID NO: 81248 - DNA, 364 bp, Zea mays
tctaaagggagagcacattttaggactaacaaatgtttattttgagaaagacaggatttgtagcgcatgccaagccgggaagcaagttggcacccatcatccacacaagaacatcatgacgaccgacaggccactggagctcctacatatggatctattcggcccgattgcttacataagcatcggcgggagtaagtactgtctaattattgtggatgattattctcgcttcacttgggtattctttttacaggaaaaatctcaaacccaagagaccttaaagggattcttgagacgagctcaaaatgagttcggcttaaggatcaagaaaataagaagcgacaacggaacggagttcaagaac

SEQ ID NO: 81249 - DNA, 366 bp, Zea mays
tgtgctttgagcctttgagcaagtaagaagatatcgggctatgcagccagtcgggggtgacgtacggcaaatgactcggaggcaccatatccatatgggggccacgcacgcactatccctcgcgtgcagcaggtgcaacgactgtggcagcagaacaaagtagctaggtggatgctgtccgttcgtctctttctttgtcccttgtcgtcaggtgctggccttcttctccaaggccggtgccgcggctggccatccaagaggacttgcagggggcgtggctggggtggcgaatgacgccgcgtccgtggtggatgcggaagatcaagcgcggcgaaacaccgatcgatgaagtaaagaacaaacgtg

SEQ ID NO: 81250 - DNA, 358 bp, Zea mays
tttgtaatcattttgagagctaaccaacttatttttcatagttttaagttgagctttttgcttagcgcaaacatcctgaaaaaattctacggcttccgcaagctcatctagagagggctttccctcaccttcatcatcactactactttcattactagaagatggaatgcttttgttacctcttgccataaggcatttgtgtgatgaccgtgatgagcgtgatgaggaccggtggctgcgcgtccttggaggttcatcttcacttgaagaatcatcccaagttctaacacttgttagcgccttgcctttgctcctctcctttttgggtttggccatatttggacagatgtccctgaag

SEQ ID NO: 81251 - DNA, 358 bp, Zea mays
tgccttatcacaaaaggatttaaacaaagatatggatttcttttacacttttagtctaattgttaaagcagctactatcaggattgttttgtcaattgcagtaactaaagcctggtgtttgagacagcttgatgttaaatattctttatttgcatggtgttctagaaagaagtatatatgaattaaccacttggttatgagagtttggaatatcatgatcatgtgtgtggactgggcaaagttatatatggattaaaacatgcacctggggcttggtatgcaagacttattactaattttgtacacccttggttttgttgtttcaaagggaggtacttccttgtttatttatagtaaa

SEQ ID NO: 81252 - DNA, 355 bp, Zea mays
taacacatatggattatttactgataaaaggcctcctttttacaaaacaatgttgtttatgttaaggaaatatgtgtggggtaactaataggaaactctcactcttgatcaatgcacatatggtcagcattttcagccgaaaatgaccaaagagtaagtcctcgttagtatccgaaggctaacacctacgtatttttgacagccaaacggtctctaccaaaagccaaataatatggtttatatcaaaaaaacatgtgtcatgtaagtaataggagactctcaatcacaatcaatgggcatatgaccaacatttttggccgaaaatgcctgaagtgtgagttttcgttaatatcaa

SEQ ID NO: 81253 - DNA, 358 bp, Zea mays
ttacacagatcaaagacattgacccctattaatagtactactatctagcctactaatacggtcaggtatcttctctaaactcctcaataccggcaaaaacaaaacctatattatacctttgccttcatctgatccacaaccaatgcttatgattctccaacatttgctgttctatgtggtccaaccctgcattcttatttctccaagaaccgttagtccacaagcagttatcattaattaccaaaacatcaccaaaggggcctagatgattcacaatctccccctttttggtaattgatgacaacactacataatatattaaagagaagtttagtttttcataggacttatctagatt

SEQ ID NO: 81254 - DNA, 364 bp, Zea mays
tctaaagggagaacatgtgttaggactaatcgatgtctattttgagaaagatagaccttgtgtagcgtgccaagcagggaagcactcatcaaagcaagaatgtaatgacatcatcaagaccactggaactcctacacatggatctcttcgggtccgttgcctatctcaacatcgggggaagtaagtatggtcttgttatagttgatgatttttcccgcttcacttgggtgttctttttgcaggataagtctgaaactcaaggaaccctaaagcgcttcttaaggagagctcaaaacgaatttgagctaaaggtgaaaaagataagaagcgataacggatctgagttcaagaatcttcaagtcga

SEQ ID NO: 81255 - DNA, 350 bp, Zea mays
  unsure (1)..(350): unsure at all n locations
tgcaagnngcaaccccgcggggagcccgttttttttctgaaaagaacggcggcgatgcgtggacgacatgggccgcgtggcgtgcggagcaggacagaattgcttttttggttcccggcgtggagaacgggcccatcagaacttggatcgcggaagcccatgggagacccgtctcggcaggattttggaccggcaaacgactgatcttcggtggaacgtaggccgcgcctgctcccacacacccactttcagggaaaaaaaacacactatcaaaatatgtatggaaaaatcaagcagacattatataactatttgggtagatgatgcaagtatgcataatcatcatccat

SEQ ID NO: 81256 - DNA, 358 bp, Zea mays
tgtttttaggggcattaagcttgatgttgctttggctcccttgttggaagctaatgccatccttaatgctggggctatggtagaaccgcccgaattatttcagcttaagtgcccaagtcacgtgatacacccagcccatgtggggttggccgaagcccaacaaattatggttgcccggagcccaacagttcattaagcacacccaactcagggaaaggcccaatcgccccaaaagactagtccagtgggggaagggtggctctccttttaaagtggcttcctcctcccaagttaagcgaggtggaataattctgaggctcacacggtcgtcgtccgactacaattgggccaactgggg

SEQ ID NO: 81257 - DNA, 363 bp, Zea mays
ttatgggctcatagaatatctaaacatagtgctactaatgtatctccttttgagcttgtctatgggcaggaagcagtattgcctgtggaaataagtttggatgctgtcaagttcgctagacaaaatgatctaactgtcactgattattataattcaatgatggataatattgatgaagtgactgaaagggaaatgtgcctttgggccatttctaagtattttggtgattgagtgccaacacaagtgcttaaatgtgaatctatgcccatggatgaacaaagtgcaaatcacaagtaaaggtatgtttctaagccttagtacattgggtttgagtactaatatatttgtctaagtgttagaaac

SEQ ID NO: 81258 - DNA, 362 bp, Zea mays
  unsure (1)..(362): unsure at all n locations
tgtgatttatccaatgtaaaacaagcaccatctcttaattatattntctatggataaactcaacataagagatggcattagtagcacaagcactagtttcttatttagcaaccctttatatgtgcgagttgctaaaatagagaaacctcataatatggactaaatttccttgaaccctcatgcacaatatattttgaatgacatggataatatgcatggttattcaatgaagtctaaagggttgacttaatccatgttatggtgagtgtctaataaagaagaatcaaatccaaattaactagatagagaatacgtcacatatttttggattgttcaccatatgataatattcattcaacttc

SEQ ID NO: 81259 - DNA, 364 bp, Zea mays
tgcttcggccgagggggcttttatatcttgaatagatatggcagcttcggtatgcgccaaagattttacatgttcgcaacctctccaagatagctgcaactcttcacgcgccaaagaaggcgcagacatcttcacgaccatttaaactttcctcgaaagcatcggcttcgctgctgatccattcaattgggccctcatgatcgcctcttacgaaagtgtcctcgctggagtatgcgccaacgctggcgaagctagtcttaatttttcccacacattctatggatttttcataacatctttcttttgaagaccaaagttctacagctgttttctcccaataatatttccagtagttactggcgtc

SEQ ID NO: 81260 - DNA, 363 bp, Zea mays
tgtcctttaaaatatactagatgattatgcaccattcaagcgtcctataacgatttgaagacaaaagattttgtccttgctagataggaagtgcgtatcttgcaacaaatctgcaaaccaaacttggtgtatgactacaatgagttgagtggcattggaatacaaacatgtcaatcagaaaaatgaagcattaaaacttacggacagatcctaagcaagacaatagagctggtttgtcttggagctagagaatagaacatcaacataccaaacttgaataatgtataaaatgtgcaaaggcacatatacatcaagggtacaaaagcaacaacctgtggaaagacctaaattcataaagacggt

SEQ ID NO: 81261 - DNA, 368 bp, Zea mays
tgaagttggcctctctgctatgtcgaaggatgacctctcttacagccttgcgtacaatagtctgatggtacaaaagttattgacttataaacagattatttttttgtcttttattcttgtgctgatcctttgtctcctttcttcgtgcagggcttaattctgagcaacgctttgagagcacaaaaaaatgctgaggatgaaagtttccagatagcacttagcaaccttcggtcagaggttatcagactgagaaatgaagttacagagaaagacaaaattctgctttccttgctggatagagtcaaggctagtgaagccaatcttgctgcgcagtccgaagctcatagagccgaaattgaagatttaaa

SEQ ID NO: 81262 - DNA, 359 bp, Zea mays
tggagatcttgggtaggcatgatccgcatgagcttgttttcacgcgggatgcgacgctctgggctccgacagaatgtcactagcccaccaaacgtcctttgagggtaatgatgatgacgagccctaattggaatctggcaggggaggtcttccctttgtcgacttatagtggttgtcgtggtggtggtgttggtgtatgagaccatggcccccaacgtatttcggggtgactattatgggcccactttggtcaaatgtcctcaaaacaatagtttatcagttatttctaagtctatttcaagtgtaatagggtgaatgtcgaagggctacttcgtatagagatgatgtgcatttatcac

SEQ ID NO: 81263 - DNA, 361 bp, Zea mays
tgccttcgcctcagtataccacctgcaatccaacgaatttgtggaacgcgcaaatggcaaaattttcacagctgtcaagaagatgctcctcgacgataaaaagggcaagtgggccgatttgttacctgaagcggtctgggcattaaacatgactgagtgcagggcgactgggttcacccctttccgccttctatatggatcggaggccatgaccccgcaagaaataaaacatgggtcaccacggacagtcccgtcagccgttcccgacatggacgagcccacttcgaaggacctcatcgacggagaccgcgtcttcgccctacaggctctaaacaaataccaagcccaaacaaaagcatgg

SEQ ID NO: 81264 - DNA, 354 bp, Zea mays
tgccaatacttgtcaaagcaacaacacatgccagttcttcaactacagaccataccaataacctggcctttcgtgtgctggggactggatatgattggacctttcaagaaagctcaagggggatatactcatgtattgggggcgattgacaaattcaccaaatggatagaattcaagcccattgcttctttaacctctgctaaagccgtggattttatacaagacataatattcagatttgggatacccaaaagtatcatcactgacctaggatccaactttaccagttcagaattctttgacttctgcgagcaaaagagcattcagatcaagtacgcatctgtagcacatccc

SEQ ID NO: 81265 - DNA, 360 bp, Zea mays
tgaaggacaaactaaaaagcaagtgccagtatattttgtttctgaagtattaagcttatcaaagaaaaattacacggaattggagaaagtggtgtatgctgtggtaatggcatccaagaagctttggcattattttcaagcttaccatataattgttccttcgtcacaacctctgaaggatattatgaggaacatagaagcttctggaagggttggaaagtgggccgcggagctcaatgaattcaccattgactacgtgcacagatcttcaattcaatctcaggcgctagcagacttcatagctgactggacgccaggggctcacgaagaagggacaagcaaagataccgaagcttggat

SEQ ID NO: 81266 - DNA, 362 bp, Zea mays
tccatgcatgctgattttccttgaatttgtgattaatgacttcaaccagtttactggtgaaagacgcaaggcacatatatttgagccaaaagtgacggctcaaacatggagtatgagacggcatctatactcacctctaatcaggagctagcttttcgtcattctctagacacatcagttatatctaggtagacatatatatgattatattccgcaagattatatcctgggtactcatgatccacataaacgctttgcccgcaatatatatttggatgccctagttggaaattttctaggtttttggcctatatcccagctatcttacttcatcaatgtttatgaagctagatttttttttt

SEQ ID NO: 81267 - DNA, 353 bp, Zea mays
tcatcttcctcgcttatccactcaatgatgccttctgtgtcacctcgaatgaagttctcctcaaaggaataagcacctactttggcaaagctgtttttcaaatttttcatgcaatccaaggatttttcgaagcacctttccttggactcgcaaagctcctcaatatttttctctagcctagcttgcgaccattcactaatttctttactggcttttgcaactgcatgattttcattagcctcggcgagctttttccgaagttcttcgacctcggctttttgagctttggcctgagcattgtatctagcttcatcttctttcactttactcaccaatgaaattaaaatcttgtc

SEQ ID NO: 81268 - DNA, 358 bp, Zea mays
tgatgtattcaaatgttagatacatttatacctctgccttggcaaagaataatttccgagtgatgcgattgcaattgcaagaatgcgtgaacagtaaaggaatactgttcactatttataggcacaggacacaacctgtgaggaattacaatcatgcccctcataaaagtttacaacatcgactcagacctttatggactaaaaggtcattctatctttaagtcggttcgtcccttcaccttcggatatgttgtattatcaaagcttcatgaatgataccttcggtctgcaggaccttcggcgacgaagcatggtcccaacacccagattacttctacccttcgcgaaagcaagggaa

SEQ ID NO: 81269 - DNA, 364 bp, Zea mays
ttatcaaatggacgtgaaaaatgccttcctcaatggacttatcaatgaagaggtctatgttgagcaacctcctggctttgaagatagtgagtaccctaaccatgtgtataaactctcaaaggcgctttatgggctcaagcaagccccaagagcatgtatgaatgcctaagagatttccttatcactaatggcttcaaagtcggtaaagccaatactacactctttactaaaactattgcgaaagatttgtttgtatgccaaatttatgttgatgatatcatatttgggtctactaacaaatctacttgtgaagaatttagtaggatcatgatacaaaaattcgagatgtcaatgatgggggagt

SEQ ID NO: 81270 - DNA, 361 bp, Zea mays
  unsure (1)..(361): unsure at all n locations
ntacactaagcacctatccaacacttaagacacctgtttgtcctttaattaagttgtcatccaaaccatcaaaacccacaagagagatttcaatatctaagcttccacatttatttgtgtacctcagttgtatgttttacctttctaacttaattgttaggctagtagataggcttggaacataagttatataacttatttttgcgaaaatataacaacacacttaattaaaactgtagtggcacataagatagtttatttacttattatatatgtattgattggacaaaagattaagattttagttaattcaatgaaagttattgtcggtgtttcgagaccggggggtccctgagccgac

SEQ ID NO: 81271 - DNA, 362 bp, Zea mays
tcgcaaaatgtcagacgagaagacagaggccgcccatgctgttgtgcatcgcctcctggaggctaaattcatcgagccagtggcttaccccacgtggctctccaatgttgtgatggtgcaaaaaaaaacgaaaaatggcgcatgtgcatagacttcaccagtcttaataagtcctgcccaaaggacaatttcccgttgccgcggatcgacaaaatagtcgatagcgcggccggatgcgaagtcatgtccctcctcgactgcttctccggctatcaccagatatacatgaaggaggaagacaaagctagcaccagctttataacaaccttcggcacctattgctttgtcagaatgccggaggg

SEQ ID NO: 81272 - DNA, 365 bp, Zea mays
tgtgatttatccaatttaaaacaagcaccatctcttaacatatattttctatggataaactcaacacaagagatggcattagtagcacaagcactagtttcttatttagcaaccctttatatgtgaaaagcaaacgaattgctaaaatagaaaaacctcataatatggactaaatttcccttgagccctcatgcacaatatattttgaatgacatggataatatgcatggttattcaatgaaatctaaagggatgacttaatccatattatggtgagtgtctaatatagaagaatcaaatccaaattaactagatagagaatacgtcacataattttggattgttcaccatatgataatattcat

SEQ ID NO: 81273 - DNA, 364 bp, Zea mays
tgtgaagattcttcatcccaacatgggctagtcggcggtgccttagccaacccatgttagtcttagcaattaagcaagtgtcgagttcagctctatcaaaatctaccaagtatagctgaccctctaacactcccttaaaagctattgaatcatcacttcttctaaagacagggacacctatatcagtaaaaagacaggtgtagcccatttgacataattgggaaacagaaagcaagttgtgatctaaagaatcaacgagaaagacattggaaatagaatggtcaggagatatagcaattttaccaagtcctttgaccaaaccttgatttccatccccgaatgtgatagctccgtggggatcttg

SEQ ID NO: 81274 - DNA, 356 bp, Zea mays
tcggatcccttgccttgctacttttgtctacatgtttttaaataacttgggaatcagttttaaggattgcccttcttattctcattgcctttaacttctgaagccctaacagaagagcttcgtattcagcaatattatttgtacaactgaagtccagctttactgcgtagcatgtcctgactttagagggtgctgtcggtgttttgggtccgaccgcgcacccggggttgcccctcgaggtgctttttagagtaggatggtgttaccgactgtagctcgatggttcgtgctaaacgcacgagaaacaatggacaattttatacaggttcgggccgcttagagaggcgtaacaccct

SEQ ID NO: 81275 - DNA, 355 bp, Zea mays
tctaaagggagagcacattttaggattaacaaatgttcattttgagaaagacaggatttgtagcgcatgccaagcagggaagcaagttggtgttcatcatccacacaagaacatcatgacgactgacaggccattggagctcctacacatggacctattcggcccgatagcttacataagcatcggcgggagtaagtactgtctagttattgtggatgattattctcgcttcacttgggtattctttttacaggaaaaatctcatacccaagaaaccttaaagggattcttgagatgggctaaaaatgagttcgacttaaggatcaagaaaataagaagcgacaacgggacggag

SEQ ID NO: 81276 - DNA, 359 bp, Zea mays
tctaaagggagaacacattttaggattaacaaatgttcattttgagaaagacagggtttgtagcgcatgccaagcaggaaagcaagttggcactcatcatccacataagaacataatgacgaccgacaggccactggagctcctacacatggatctattcggcccgatcgcctacataagcatcggcgggagtaagtactgtctagttattggggatgattattctcgcttcacttgggtattctttttacaggaaaaatctcaaacccaagagaccttaaagggattcttgagacgggctcaaaatgagttcggcttaaggatcaagaaaataagaagcgacaacgggacggagttca

SEQ ID NO: 81277 - DNA, 361 bp, Zea mays
tatgaagattcttcatcccaacatgggctagtcggcggtgcctgagccaacccatgttagtcttagcaattaagcatgtgtcgagttcagctctatcaaaatctactaagtatagctgaccctctaacacacccttaaatgctattgaatcatcacttcttctaaagacagtgacacctacatcagtaaaaagacagttgtagcccatttgacataattgagaaacagaaagcaagttgtaatctaaagaatcaacaagaaaaacattggaaatagaatggtcaggagatatagcaattttaccaagtcctttgaccaaaccttgatttccatccccgaatgtgatagctcgttggggatc

SEQ ID NO: 81278 - DNA, 363 bp, Zea mays
tagcaaaagaaatttctagaatcaagaatattgagctcatgcctaagtctggtaaaagattgttcatcaagtggcttggtaaagatatcggctaattgatctttagtattaatgtaagaaatctcgatatcccccttttgttggtgatccctaagaaaatgataccgaatggctatgtgcttagtgcggctatgctcgacgggattgtcggccattttaattgcactctcattatcacatatcaaagggactttggttaatttgtaaccgtattcccgcagggtttgcctcatccaaagcaattgcgcgcaacaatgtcctgcggcaatgtactcggcttctgcggtggaaagagcgaccgaa

SEQ ID NO: 81279 - DNA, 353 bp, Zea mays
tgacaatgaggagatggcgctcgtcataaatagctttcttcaaatcctcaaacaaaggagggggaaagactacaagtcccgctccaagaaggtttgctacaaatgtggtaagcccggtcattttattgctaaatgtcctatatctagtgacagtgaccgaggcgacgacaagaaggggagaagaaaggagaagaagaggtactacaagaagaagggcggcgatgcccatgtttgtcgggaatgggattccgacgagagctcaagcgactcctccgacgacgaggacgccgccaacatcgccgtcaccaagggactcctcttccccaacgtcggccacaagtgcctcatggcaa

SEQ ID NO: 81280 - DNA, 359 bp, Zea mays
tcggagccgaagcaactctagctttgaacgaagccatcatctcagaaagtggaagtgggttcaccggaggtgggcgccaatgttggggacttgttctcaaatactatgaattaagaacaaggcaacacaaaagaaggttaaatggttaatgccattcgtcctttgaaacattatttcccttgggatataacgatcttcggacgaaggccatgaaagatacaccttcatcattatgatatatgatagcgataataaaaaacatattaaatacaaaagatagcatagacatttatatatcattattaaatcatttctattttattaacacggaaaaatagaaatgacattaaactacaagt

SEQ ID NO: 81281 - DNA, 362 bp, Zea mays
tctaaagggagagcacattttaggattaacaaatgttcattttgagaaagacaggatttgtagcgcatgccaggcagggaagcaagttggagtccatcatccacacaagaacatcatgacgaccgacaggccgcttgagctactccacatggatctattcggcccgatcgcttacataagcatcggcgggagtaagtattgtcttgtaatagtggatgattattctcgcttcacttgggtattctttttacaggaaaaatctcaaacccaagagaccttaaagggattcttgagacgggctcaaaatgagttcggcttgaggatcaagaaaattagaagcgacaacgggacggagttcaaga

SEQ ID NO: 81282 - DNA, 362 bp, Zea mays
tcggctatggttaaaaattttggcagcaaaacagtgctatttctttgaatgctggggtaacttcacacctacccgtctggttatatagtactgtaggtaagaaagtgaatcgtcaggatttttgcaccaggcaaacagctgctcacacccactgcgcggtggaccgcaaagatcaaatagtaaccctgcagggtgggaccgctatcgtttctcgacaacgagctcagggaaagtgtttttggaccttcggcttcctaaagcctaagagactcttttcacggatcaagctcgttacgaaaaacgatctatcaccgcgaaggggctactgttgggaccatgcttcgtcgccgaaagtcctgcag

SEQ ID NO: 81283 - DNA, 364 bp, Zea mays
tgtgaaggttcttcatccccacatgtgctaagcggcgatgccacagccagcccgtgctagtcttagcaattaagcatgcatctagaccggcctcttctttttcaaaatcaactaagtagagcttgccgtctaatacacccttaaaagctagtgaaccatcacttcttctaaagacagacacatctacatttgtaaatagacagttatatcccatatgacataattgactaacagatagcaaattatatccaagactctccactaaaaacacattagagatagagtgctcattggaaattgcaattttacctaacccttttaccttgccttgattcccatcatcgaatataattgaatcttggga

SEQ ID NO: 81284 - DNA, 366 bp, Zea mays
tcagcaacagacacttcagcaagtgcctcagaagtttcaacagttttctttggagttgtgcttggaagtttaattgtttccaaaacatctaacacattaaccattattttcctttttggggtcactgtcggccccttcttaatttttgatgcttcaatttcttctgaaggacttaaaatttccgatgccttcactccctcagctgatgcattcgcttcttccgtctctggttcttttatcttttctgtcgctggcacttcggccatttctgcgacttctggcagcagggttggctcttcagcctcggtggccgaagaggtctctccggtaaactcacgcactgtggctggttcaatgtaacgtggc

SEQ ID NO: 81285 - DNA, 358 bp, Zea mays
tcgggtctttagccttgcaacttttgtcaatatgttctttaacaatctgagaatcagttttaaggatcgctctcctgatccccattcgcctttagtttccgaagacccaggagcaaggcttcgtactcagcaatattatttgtgcagctgaaatccagtcttgctgcatagcaagttttaatcttggtcggtgaaaccaaaacagcagctgctcctgctccgaaggttccccaggagccatcacaaaacactgtccatgcttcggcatctttattcgcttcttcgccctgaacccctggcgtccagtcggcaataaaatctgccaatgcttgagactggatcgaggatctgtgcacat

SEQ ID NO: 81286 - DNA, 359 bp, Zea mays
tattgtcacacatggttttaggggcaaaactaaatgcatagcatatgtgtgccaggatccattttccacacataagttgacgtcacaagtgtagtattgtcacactcgggttttgggacaccaaggcccggacgcgaacataatcatcaagtgtgctggaaccaagtctcacacatatgatgaatagtggtacataaacgaatgtcacatctttactatataataggagttctgtacaaaataaataaataattacatcataaggagacggcgatctagcaatcccaaagttgattgggagacgacgacctagacctctcacgaactcatcacatcatcctccatgcgcctcgtcttgt

SEQ ID NO: 81287 - DNA, 362 bp, Zea mays
tgtgaagattcttcatcccaacatgggctagtctgttgttccagagccaacccatgctagtcttagcaattaagcatgtgtcgagttcagctctatcaaaatctactaagtatagctgaccctctaacacacccttaaatgctattgaatcatcacttcttctaaagacagtgacacctacatcattgaaaagacagttgtagcccatttgacataattgtgaaactgaaagcaaattgtaatctaaagaatctacaagaaaaacattggaaatagaatggtcaggagatatagctattttaccaagacctttgaccaaaccttgatttccatccccgaatgtgatagctcgttggggatct

SEQ ID NO: 81288 - DNA, 229 bp, Zea mays
  unsure (1)..(229): unsure at all n locations
gacacttanaaactcaagctcagtggggataagtagaacagaagcgagaagctggtcatattacaaacaccacgacagaaagccaacgctcccaattaacccccggtattaaccctaacgcacccctttctcaacggaaagagtacccacaaccatcaccagattcatgaccaaaaccatcatccgcactgccaccagaaacccgaacatcactgagcaagggccccca

SEQ ID NO: 81289 - DNA, 364 bp, Zea mays
tctaaagggagagcacattttatgactaaccaatgttcatttttagaaagacaggatttgtagcgcatgccaagcatggaagcaagttggagctcattatccacacaagaacatcatgacgacccaaagaccgcttgagctactccacatggatctattcggctcgatcgcttatataagcatcggtgggtgtgagtattgtcttgtaattgtggatgaatattcttgcttcacttgggtattctttttgcatgaaaaatctcaaacccaagaggccttaaagagattcttgagacgggctcaaaatgggttcagattaagaatcaagaagacaagaagccacaatggaacggagttcaagaat

SEQ ID NO: 81290 - DNA, 357 bp, Zea mays
tgtgaagattcttcatcccaacatgggctattcggcggtgccagagccaacccatgttagtcttagcaattaagcaagtgtcgagttcagctctatcaaaatctaccaagtatagctgaccctctaacactcccttaaatgctattgaatcatcacttcttctaaagacagtgacacctacatcagtgaatagacagttgtagcccatttgacataattgggatacggaaagcaaattgtaatctaaagaatctacaagaaaaacattggaaatagaatggtcagaagatatagcaattttaccaagacctttgaccaaaccttgatttccatccccgaatgtgatagctcgttggg

SEQ ID NO: 81291 - DNA, 386 bp, Zea mays
gtatatgcgacatactgtaaacttgtcgactcaccttgagagcgctgtattagggtctatacagcctgtagcgaaaaaggatgacgacttttgggtgaagtgtgcgacactttgcatagggttagaaactggtatatcagtcctgctcatggttatgaacgaccttgatagctcctttgattatagatattctagacacctttgaggcgatgggataatgacgatgataataattatggatattctagactttcctctctgagggagtaccctttgatataatacttggggtttgtactaaaacttgggtcctactaataatctatatcttacatactagaagctactgcttcgagcttcacccccgcatgatgctagtgcacttt

SEQ ID NO: 81292 - DNA, 363 bp, Zea mays
tgagaatgacttgatgaagcaacaaaagttgtaggttgttcatttcctatgtactctgggatatacggatagtatcacgaagcagtatgaaggacctgcttccgctgattctgccgtgcttcgacttcagcaatttccttctgcttctggatcgtgacttggcacgtccttgtggtgtgccccttgtcttcaccacagaataggcagaacaacttcctgggatgattaccataccttcctccgccgaagcttctccccctctgcctctcggggctggtggtctataagattttgttgcatgcccaaagactgtgaactgtgctagcttctctgagcgttattggctctgtcttcgttggcatt

SEQ ID NO: 81293 - DNA, 361 bp, Zea mays
tgagtccgttcttctgcaaaagattattgatgcacaatattattatttaggtatgaaacacattcatgagaaaataaaagacggttaagcaaactgtttcagaaaggatgatcaaggcatattatggtttaataaccgcatagttgtgtctaatgatgatgatgtccgctagcaaattttggatgaagcacatcttaatcgatattccattcatcccggaagcactaagatgtatcatgatttaaagcaacattattggtggacaaaaatgaagattgaaattgcacgctatgtggcgaaatgtgacacatgtagacgtgtcaaagccatacacatgaagactgctggtccactgcaatct

SEQ ID NO: 81294 - DNA, 344 bp, Zea mays
cgagcttttgagcaaaattttggcacctactaacaagcataatacattcaagatccaacgctaaatatatatgcagcaagtgacaattagttacctttactggtgataacttttactcctacaaaaaatggtaggacgtatttttggtgcctaccacatctaaaaatatgcttttgatgagtgcgaacaactatcttgagaaatcccttatcatggaacacatatttgacgcgaatgaccctttacctaccgttaccataatcatggtgcacaaagcttgcgcattacacgttgaatactagagaacaacaatcccatatataacatgtccagtctacctattt

SEQ ID NO: 81295 - DNA, 361 bp, Zea mays
tctgcgcgtcgatccgtcctccgtccgagcaggcgctgcgcccttccacgggatcattcctgggaagcgcgtccagccccttcggcgactcgatctcccaatctgctttgggacacccttcaacttccgaaaggagaccctgacgttcgaaatggtccggttccgaagaacctaccacgccatgttagggaagccatgctacgcgaagctcatggccgtccccaactacacctacctgaagctcaagatgccgggccccaacggggtcatcaccatcggccccacgtacaaacacgcgttcgaatgcgacgtggagtgcgtggagtacgccgaggccctcgccgagtccgaggccctcatc

SEQ ID NO: 81296 - DNA, 367 bp, Zea mays
tatcaatctcgatctcatggttggttcctcctcattaaatatcgtatcaatctttggctgacaatccccgtgatgatcataaaatagttctctaagttgaagaaaattctcatgtgatgctcttttgccaacaatctttgcttcaactttagtcacattttctgagccatactctcatcggctccatctatctatgatatgtggattcctcattggttgcgttgggtaatggtattatggctaacgactgatggtgccgcgatgaaaccgagagtctactatggtgcacacatggttgagcttctcggcacgcgctggtatcgctgttaatagtcgtgatccgttacgagactatactgatgtgcta

SEQ ID NO: 81297 - DNA, 359 bp, Zea mays
  unsure (1)..(359): unsure at all n locations
tgtctaattcagntagtagagttcaaggcacttttctcttttgttgtgggttcaagccccaccatgggtgttctcaatactttttgtctttgtcgctgatttgttttttttttgtcgagattttttcgtttatgccgctgatttgttcgtcctaacctcgtctcttacgagctcctgctaattaaactttccaactatgatattacggattctattgagaactatataacttttatatagacaccaagattgtgtgatattctataaacttacaacaacattttggaatcctaaagaattttagcatatcttggccgcctccgtcaatattttagcatatcttgtacaaaagcatttat

SEQ ID NO: 81298 - DNA, 358 bp, Zea mays
tcaacatggcttctcatgacttggggttgccttcattcttttctaatcttcaagtaacttaactcttctcgttctatcattcctcctggtgaatcactttctttgtactcatttgtttttaataataagctttggttgacgggatgtctgctcaattgaaatcacatggtgcctctatcccagaaagagctctgtctctagcgcagtggaatccattgctactctagaagcagatagctgatttgaaagtgtcaaatgctggttggtatctttgtttctcccttggctgattgattaatttgtttttaaccatgtatccttcttcaactactttttgtcagatatggcccggcggtat

SEQ ID NO: 81299 - DNA, 361 bp, Zea mays
tcagcaacttaagccttcggagaaaatagattttccttatatccaaccacaaaactattacatgaaaatcgaaatgttctttattatacagaaaatagaactaaacggaaaaaactgctatcaaggtaggatacttgtcaataaatgtgctttgactccggcacggtgctgttgactgtacgagcttcagactgctctctgaagtccctttggtgtggagcatattggctcccttctggctgttggccttgttgcatcggtggtggaggcggaggttgttgccaagaagcttgaggttgacttgccaaagcaacagaaactgcagggtggttacctacgtattctgggatgtaaggcacat

SEQ ID NO: 81300 - DNA, 361 bp, Zea mays
tgtgagcaatacaagtacagaagggagaaggctgcttctttcgatcaaccgaagcccatgctcttatgtgaagatatagtagagcagaaggtgttgctgggatctcaattgtctgaggaacaggagaaaaacctaacaaggtttctgttcaacaacaaagatgtcttcgcatggtccgccaacgatctctgtggtgtcaacagggatgtcattgaacactcactcaatgtcgatccatccttcagacccagaaagcaaaggctttggaaaatgtctgatgacaaagccaaaggtgctcggaatgaagtgaaaagacttcttagtgctggagtcatcagagaagtaaaatacccagaatggc

SEQ ID NO: 81301 - DNA, 361 bp, Zea mays
tgtcactacaacggttccattctaccctgacgttgtcttcattggaggaagagtggaatcaacccccatctctgacgatgaaccaaccgcgccaggagaagaacctcttcagcgggaatctcgccgacgaaggaaccgacgccgaaatatccggcgacatcatgaagccggagagcgggacccggcgcagcctgtgtcaagagatgagatctcagagatgggagaaactccagaagaataggtcttcagggaaaggaggaattcccgatgacgtgatcgtcggcaagctcaagagcaggccgaacaggaggcgagacaacgccgacagaaccctcttctcggacagaacttgaaccccgac

SEQ ID NO: 81302 - DNA, 356 bp, Zea mays
tagctagctgacctaggtgcgtagtcgtccccatagttagttgtgcgcaatcaaggtgtacgccaccccaaggttgtcaccgcccccaaggtcgtcgtcgccctgcaacatccgcaaaggtctatgcccttgcctccaacctattgtgtcccaagatccgcgttgtggccatgttgattggtggtcccctttgttgctgctacagccttgttcattgctctaaggccctctttgttgttgcggcagcccctattggttggtggtttcctaagtctgtgccatgccaaggatctgaagttgttttgccaccagcatgctgaagacacggatccacgttttgaagatgaagagaccag

SEQ ID NO: 81303 - DNA, 366 bp, Zea mays
cttgatatattctggctgctgcttgagttgatagacgaacttgtttaattgaatttttctaaggactcttgctgagaatctacacacgcatgctgggaagaacctgatactgcaaaacctttaactgctgttaattcacataatttattccacattgccactcgacgactcttttaatgtaaaagctgaaaagtgacttgtcaaatcagactctgcaagcaaaatagcaatgcctttgtgaccattttctgatgctaaatcaacaggagttcttccagatggatactgctgagttggatctgttaaagcaccagatgcacctccgcttgctataaaggcaccaactgttcgctccctaaaattaca

SEQ ID NO: 81304 - DNA, 365 bp, Zea mays
tcggaatatcacgacttcattctcctcgggagccggactttttttttctccttcggcagccctcacaatagacaagtcccgaaaatatctacccctcatattgacaagatggctttgtttaatacttgatttcccaaaactgcatggcttggtcgccaaagtcgatcttcggaatcttcaccaccactattcaacatcatagctgtcactgtcaccagtattttcagataaaccctctaaaatctccctagtaaatttctctgtatttgtctttgctattgattgaagaaagccaagatgcatctcctcagaaaggctcaacttcgattcagcaacagctttcttatcttcagacatcttcaaaa

SEQ ID NO: 81305 - DNA, 385 bp, Zea mays
  unsure (1)..(385): unsure at all n locations
cactatanaattgttaagctataacaagtatgcaacaaggagactgatcatatacttttcttaattgtatgagaaaacctgcgtaactatgcgctgcgtaatgcataatatggaaaccctgtgtaccatgactgtacaataaatgactctgcggtggagtctgctaactggcataactgactgtgtaatatgtcataagctttaacaatggtgccacatactggattgtacatatactaccgccaataagtatttgtcaacattgcgacattcctataagttatgcagctatgcaacaatctgactgtacagttatgcaccaatcttgcttgtcatatgcaccaatctgactgtacagacatgcataagcctttctatatttata

SEQ ID NO: 81306 - DNA, 365 bp, Zea mays
tcactaggttggttatggcataaaagacttggtcatgttggaatgaagcaactcaatcggttaaccaagcatgacttagttcgtggcttaaaagatgtgaagtttgagaagaacaaattgtgtagctcttgtcaagccgggaagcaagtggcaaacactcatccaaataaaagtcaaatgtccactcatcgacctttggaattacttcacatggatttatttgggcccacatcttttgtaagtattggtggtaattcttattgtcttgtgattgtggatgattattcaagatttacttgggtttattttctttgagacaaatctaatgtgtttgaaacattcaagtcatttgctatattggctca

SEQ ID NO: 81307 - DNA, 360 bp, Zea mays
tctcctgtacaagcgccacactcactgtagagtgctattctgccacatacaatagtaatggagcccctggcgcaggtggagttaatgttgttagatcaatcaagtattgcttcagctcttcgaaggatttctgttgagctgggccccattgaaaaacttcggctgactttagtatttcaaagaatggcaagtttctttctgctgatctagatattaatctattcaatgatgccagtcttcttgtcagtcgttgggcccccttctttgtgcttggtggctctatccgaaggatagcttcaatcttgcttgggttagcttcaatctccttcattgaaactagacagccaaggaacttaccct

SEQ ID NO: 81308 - DNA, 358 bp, Zea mays
tagataccaccgaaatataaggggaagaagctccttagtcgttactaaggggatgcaaagcttaaataccactgaaatataaagggaagaagctccaaagtcgttcctaaagggatgcagaacttaaagactccaaagacgtccccaaggggatacagagtcttgggtgttccaatgtgggtgagtgtgtgtgttcggcataaccatcatattgcatcatatcatcacatcattccgcataacattacatcatacatcatatcgcatcaacaacgaagattggatacgaagcaagtcttcgacaataacttgaactaaaatgtgctgaggcacaaaggcaaacttcaaaaaatacaat

SEQ ID NO: 81309 - DNA, 362 bp, Zea mays
tgtgaagccaatcacaagtttattgaagaatgattcattttttaactggtcttcaagatgcaatgaagccttcgaacagctgaaggtgttattgaccactgctctggtattaactcaaccggacattgaaaagccctttgatgtgtattgtgacgcatcacgcagtggtttaagatgtgtctggatgcaagaaggccgagttatagcatatgcctcaagacagttgcgccgacacgtggaaaattatccaactcatgatttagaattagctgctgtggttcatgccctgaaaatatggcgtcattatctactggggaatatctgtcatatatatacagatcataaaagcttgaactacatct

SEQ ID NO: 81310 - DNA, 364 bp, Zea mays
tgcacacatagctcatttaaatacctttgatcatatctcttttatatgctatgactaatgtgttttcaagtctatttcaaaccaagtcataagtatattgaaagggaattggagtcttcggcgaatacaaaggctttcactccgtaactcatgcttcgccatcactccgagcaactctctattccttggggagaaatgagcatcaaagaaaaggacttcatccttgggggagagagtaaaagctcaaaagcaaaaggaccggacttcatctttggtataatcttaactcgttacttatgaccaaaggggaagaaattacttcgagggctctaatgattccgtttttggcgattcatgccaaaaa

SEQ ID NO: 81311 - DNA, 362 bp, Zea mays
tgtttaagatttatgtgaggaaaatgatgaaaatgccataaaccctaacttgttttcatctatttggtggtttttgagagtttaacaaaattttattttattaatgtaccttaaagtttgttaattagaaaacatagtataagtcatgtaatttgcactgaagtaaatgtgtgacaatgttttggtgcataaataatttgtttgtgctctaaattttgaatcaagttcagtttcttgtgagacttacaatgtttccaagtatgaaagttctttgacgcttctagtttgacactccgctttctctagtttttgttaaacaactgtggttgggccaaaacaaagttgttctttgaacttaaaaa

SEQ ID NO: 81312 - DNA, 354 bp, Zea mays
ttccatgttgtgcttgaacattccaatccgagcccgcatctgaccgtggtgaccgtcacaagttggtgttcttctgcagtccgaatccagcatgttcaaatccttttccctttcggtcttctccctgattcctaagcaaaacaagagtgcacgggtctccatggtctaaatatgatggacatgaactcaagagtgtaatcacctgatggttgagttgacgagcacgagcgcgagtaatgggaccagaaattggtacttgtattggtatagatgcatcagtagtgtggatgtcttcatcaactttggctacaatctgagcaaagtcccactcctatgtgataatgagagtgctat

SEQ ID NO: 81313 - DNA, 358 bp, Zea mays
tgcccactgtatctgggttggccactctacgaatcaccaaatgtcctggcttgatgttcttcagtttcaccttacggtcgcgtcatttgattgttttcgcctagtacttattgatgtggtctactgcttggagcctagtcccttctatggtgtcttttgttattttgtaaccctcttcatcttttgctgaagccaaggtccttattgagccccttcttgcttctttcggtgttattgcttcatcaccaaacagaagcttgaatggtgtaaagcctgttgaccttaaaacagtagtgttgggggccttcatctttcgaagatcctcaaaaacatgactaacatgttttccaaaatagta

SEQ ID NO: 81314 - DNA, 459 bp, Zea mays
  unsure (1)..(459): unsure at all n locations
tgtgaaggttcttcatccncacatgtgctaagcggcgatgccatagccagcccatgctagtcttagcaattaagcatgcatctagaccggcctcatcttttgcaaaatcaactgaataaagtttgccgtctaatacacccttaaaagctaatgaaccatcacttcttctaaagacagacacatctacatttgtgaatagacaattatatcccatattacataattgacttacggataacaaattatatccaagagactctactaagaatacattggaaatagagtgctcatttgagattgcaatcttgcctaaacctttcaccttgccttggttcccatcaccgaatataatngagtcttggggatccttngtcttgacgtangaagagaacatcctcttttcccccgtcatgtggtttgtgcatccgctgtcgataatccagcttgagcccccggatg

SEQ ID NO: 81315 - DNA, 436 bp, Zea mays
  unsure (1)..(436): unsure at all n locations
nggtcattntattgctaactgtcccgacaatgatagtgatcattatcaagggaacaagagggagaaaaagaagaactataagaaggccaagggcgaggctcatcttggcaaggagtgggattcggactgctcctcgtccgactccgacaatgagggactcgccgccactgccttcaacaagtcatccctcttccccaacaagcgtcacacttgcctcatggcaagggagaagaaagtaagcactcctaatactagtacttatgcttcttcaagtgaggatgagtctagtgatgatgatgagatagattactcatgcttattcaagggattagatagaactaaggtagacaaaattaatgaattgattgatgccttgaatgataggaatatactgttagaaaagcaagaagatttgttgtatgaagaacatgataaa

SEQ ID NO: 81316 - DNA, 453 bp, Zea mays
  unsure (1)..(453): unsure at all n locations
taaaggggaaaagaaagaggggaattggtccgactgtcctattattataagttcaagaaatattntaaagtaccctgccaagaatggcttgatacaattgaaataatgagtaatgaaattcttgggaattactccaaaaaagaagaccaactgatgacagcggccttcggcactcggccgaagcggaggctgaacagggtgcttgatgccataggatttgaatatgctgactatggtcgactgggcggagatgctggaggcctgaagcgaaaaagaattgccagcgctactgacgaagaggtcggcaaggtagccaaaaagaaaaagaaagattctgaaaaacttatgcctgaagagtcgaaccctgaaccgaaggtggccagtacaaaaaagagaaaaaatgcatctccagagtcggaaacgctggttcgagaagaaaatactcctgctact

SEQ ID NO: 81317 - DNA, 468 bp, Zea mays
  unsure (1)..(468): unsure at all n locations
tgggaaggagtctatcaaagaagtccggcgacaaatacaaggaggaatcctcctcctccatcaagtcacataggaagggtgacaagaagaaaaagaaaatgaagaaggtggtctactacgagaccgattcttcatcaccttccacatccggcgccgagtctacaactttgaagcaccacgagcgtaagaagtacagtaagatgcatcttcgctatcctcgcattcctaaacgcgctcctttactctcggtacccctaggcaaaccaccatactttgatggtgaagattattgcatgtggagtgataaaatgaggcaccatctaacctcactccacgaaagcatatgggatattattgagtttgaagcgcangcaccacaagtgggcgacgagggctacgactcgaacgaggtcattntaactcccaagcaacttctatactcctcgcctncttgtgtcgagaggagta

SEQ ID NO: 81318 - DNA, 443 bp, Zea mays
tcttggaagcacgcacatccttgatggtggaatcctttgtcgatgacagctgtccaagtcacagaacctcatcttggaatacttggagctcatggcggagatgatccatgtcagacatggcgaagcggtggctcctctccaatatggtcaaggagttgctagcgtctcggtacagcctgtccagattgtcacaagaggccgcgactgcttgtttctcatcctacgaacagaaagcaacattcagtaccaaggcaacaatagcatggcagggtcaaccaaggaagtttacctcatgcgccattctttcagagtcaagctgggcattaagtgaggaattcaaagaacgtgcaccgtccaaaaaagcagaagtttgggccaagtccgctcgactttgagaatacttctcctcaatgtcagagcattggtgggccatatccgacaac

SEQ ID NO: 81319 - DNA, 459 bp, Zea mays
  unsure (1)..(459): unsure at all n locations
gggagagcacattttgggactaacaaatgttcattttgagaaagatagggttggtagcgcatgtcaagcaggaagcaagttggtgttcatattccacacaagaacatcatgacaactgacaggccactcgagttactccacatggacctattcggcccgatagcttatataagcatcggtgggagtaagtactgtctagttattatggatgattattctcgcttcacttgggtgttctttntgcaggaaaaatctcanacccaagagactctaaagggattcttgagacgggctcaaaatgagttcagcttaaggatcaaaaagattagaagcgacaacggggcggagttcaagaactcacaaatcgaaggcttccttgaggatgagggcatcaagcatgagttctcnttctcctacacaccacaacanaatggtgtagtggagaggaagaatagaact

SEQ ID NO: 81320 - DNA, 461 bp, Zea mays
  unsure (1)..(461): unsure at all n locations
ngcatctgaatcccattcaactagataggctttgtcgtccctcttcttgtgatagaacttctttttcttcttatcatctccatccttacccttgttcttcttgcttggacaattcatggtaatgttaccgggttccccacactcaaaacattttctatcattgaaggcatttcttcttgatgtttgtctccttctacgttgacccttctttttcctcatgaacttgttaaatttcttcacaaagagagctaactcctcaccactatcacttccatttccttcatcttcactttcttccttttcaatttcctttgaaactttagctctgagagctattgattcccctttcaccttttttgccaaactcatagcttcggtttgagatttcttgaatatgtcttgagtaagaatgtctcccaatactttggttggagaggtagtggtcaaatcgctccttacta

SEQ ID NO: 81321 - DNA, 473 bp, Zea mays
ggacctatgaaactcagcttataccactttcgattcttagtccccccgacatgatcttttcctcacgcggctaagcgttagaacgaggattaggctctgataccaattgaaagttgcctagagggggggtgaatatgcaagctaaaactttttcaaccaaaactagaagcaaactgggtaaaactgaattgatctcgaaattcaccttggtaactttggaaatgagatgttctaaatgatccacagggttcaaagtagtagatctgagaagggcacttctcaaaatccacacaccataaagatataaacaaatctttcacggaatagtgagagaacgaagaacacgtataagcacaatgaacaagaacacaagagacacaagatttatcccgaggttcggtcacaccaccaaggtgccctatttcctcgttgaggcgtccacaaagagccgggtctctttcaaccctaatcct

SEQ ID NO: 81322 - DNA, 454 bp, Zea mays
  unsure (1)..(454): unsure at all n locations
tatttgtagaanattaatataaaaataataatatttgtatttcgtgtactctagaagataagtcgtgggccgtagcacttttgtcttctaatgcacatgcatctacgaaatattgtttcatacatttttttttctaaattgattttgcatctaataattcctatatgtgagtgaagataaactgtagtacttttgtcttctaatacacatgcatctggaaattattactctcatacagtttttttttcttttctagatgggatttgcacctaataatttctatatgtggggtaaccaagtatttatgtggattcgttaggaacgtggcttgaaaaattttgagtgaacaaaatatttttcttggagttggctttcatacattcgaaaagataaaaaataaaaggcctatatgttgagtcctaatcctaacacaggaatatgggaataagttttt

SEQ ID NO: 81323 - DNA, 404 bp, Zea mays
  unsure (1)..(404): unsure at all n locations
tcggaagattacgacttcattctcttctggagtaggcacagncttctccccatcatctgccctcacaatagacatgtctcaaaaataccttcccttcatggtatcgagatgactcttttaatactcgattttccgaagactgtgtgacttggtcgccacggtcgatcttcggagtcttcacccccactttctacatcataactgtcactgtcaccagtatcttcagataaaccctccaaggtctccctagtgatcttctccgtattggtctttgctattgactgaagaaagctgagatgcatctcctcagaaaggctcagctttgattcagcaacaactttcttatcttcagacatcttcgcaaatgctgagaaagtgctcccagaaccgaagcttaaaagtct

SEQ ID NO: 81324 - DNA, 446 bp, Zea mays
  unsure (1)..(446): unsure at all n locations
tgtgaaggttcttcatccccacatgtgctaagcggcgatgccacagccagcccatgctagtcttagcaattaagcgtgcatctagaccggccttctcttttgcaaaatcaactaagtaaagtttgctgtctaatacacccttaaaagctagtgaaccatcacttcttctaaagacagacacatctacatttgtgaatagaagattatatcccatattgcataattgactaacagataacaaattatatccaagagactcaactaaaaacacattagatatagagtgctcatttgatattgcaattntgcctaagcctttcaccttgccttgattcccatcaccgaatatgattgaatcttggggatccttgttcttgacgtaggaggtaaacatcttcttctccctcgtcatgtggtttgtgcatccgctgtcgataatccagctt

SEQ ID NO: 81325 - DNA, 454 bp, Zea mays
  unsure (1)..(454): unsure at all n locations
ctttgacaagcttatacttgagccttttgatggatatgcaagaataaaagtggacaacaattcattaacaacttttgacgatcggaacttgaggattgtttttttggtgatttgctggtctcttcgacatggataggattccttcagtctctgtgtagagctaatgacatcagaagtttttctgtcaccgtttattaaaaaattaaatacaaaagaagcagctaatgacttctcgattatgctggacaacatagaaattgatctccgatgggaaggttccctctttgcatactttagcaggtcagaaacactttcaaaaacccgccttttcttgtatggtcttgccacttctgatggcattntagatattaaattgataagaacaaatattataccttaatattgtgaccatatatttattntgatattaactttattntntataagtattaaa

SEQ ID NO: 81326 - DNA, 469 bp, Zea mays
  unsure (1)..(469): unsure at all n locations
ctaagcttatcaaccgtgcctgtagccgagcaacatggccggatcgcctgtgtcgtcgtggaactctggcaacctcagttacgccacgccgtagttctttaccacatagtagtaatcagggcgcacctggacttgccatttcaagagccgttacacaggcaagcaccacgactgaaccgccagtgatcttctttctctctggcctccatcgtgccatctaaaaattagctgccaccgncgatgaaacctataaattgccgccccagtgaactccgctaggtaattgcgcatccaacgcacgagcccttgcctcagattatccactagaacctcccaatttctcacttcccccaatcagtcagagcaccgccgtgtgacatctcgccgtggccaaaagtctacaggttatctcatgctcttctgtacgatgttctagcctccctcatgtcccatgtgtctcatagaacca

SEQ ID NO: 81327 - DNA, 465 bp, Zea mays
tgcatgatcagaaagtacgatctgctatttgagaggttatgatcggaaaagattcaagacgccgcaaaacttacaacgtcagttcctacaatgtaatcaaatggaggttcaacggccttgatatgttctttgttcccccagtccaattctgcaactgtaattgagccaacggaatctgtttttgtgtttgccaatatatctgtcagaactaaagaacaatttacttaacataatccctatgtatttatttcaaaaactacaataccatatgattatatctaaaactacagctgtgagaactaatgaaacagaactaggaatggcataatagatggttctcttaacaaaacctgagtcggtgttcgattgtgagatccaagatctgttccgttcaacatttctcataagcagtgggagcacctcggcttggtcagttgttgtaacatcaccacccaacaaggccat

SEQ ID NO: 81328 - DNA, 466 bp, Zea mays
  unsure (1)..(466): unsure at all n locations
nttctagtgatgaagctcctataatattcagtagtatgctgaaagcaaatggttagccgtgtttttgaggaccttcggaagtggaaggcccccaacagcagcccctcgcagtattagtttatttctttgtaacaaatttagactgcaaaaagaacaaaggcctttagctgaaggtccaaaaaacaccttccctttgctagaatagcgaaacattctgtattgcgagccccaccactcaatggtgcttggcgtatatatacaagggcttgcgctgaaaatattttttgtgctatcaagctctctgttgtgtttgtcattttagcttcctacctctgtgactgcaattgttttttgagcttcaactntttgttgtgatcatcgctaaaatggccgaagagaagaaaagcgtggaccccgcgcttgctggtttctacgaagctatggagaggaccaatgttgagaaaat

SEQ ID NO: 81329 - DNA, 467 bp, Zea mays
  unsure (1)..(467): unsure at all n locations
ntaagctcnttgacaatagaatcacttcatctagttttagcatagatgcaataatgcatgagtgaaattntaagaggttaaactaggtatgaagcagggataaatgcaaaggacatgctttctcttccttatgtataagatatgcaaaggatgcttataagaggaagatttatgtacaagttcaaatgaaaggaagtggttttaccctttttgtaccttctcatagagacgctctcttcattgagttttgtccttagtcttagttgcttaagacctatactcaatgacaatatatggaaatactttgcacaagagagagttctacaactggtgatctttttcaagttattgttagcatatatcaaatggatcacaagttgcataaatgaatcatgaattctcctttttccttagtgcatatcaggatagatgtcaattaaaattaccaattgatatcaaattgaaat

SEQ ID NO: 81330 - DNA, 463 bp, Zea mays
  unsure (1)..(463): unsure at all n locations
tcgtctatctgcctctgcagctcagctagcctggccatcttctccttcttcctctgcacctgttgatgtagcatctccatgtccctgatctcttggtctagttcatcctcctgaatcgtcgggctgacagccttcctcttctggtttcgggcctcccggagagagacggtctcctggttggggtccagtggttgcagtgttgcagccccagtcgctgaagctttcttcggtgccatagcgagggtctatagcttccgaaggtgttcaaaaaactcgaagtggaagtgagttcaccggaggtgggcgccaatgttggggacttgttctcaaatgctaagaattaagaacaaggcaacatataaagtgttaagtgttaaagtccttcgtccttcgaagcattatgtcccttcgggaaataatgagtntcggacgaaggtcataagagacataccttcgtaaacat

SEQ ID NO: 81331 - DNA, 448 bp, Zea mays
  unsure (1)..(448): unsure at all n locations
tggcagagcgagccacatacaccgagccctattgattgctcaacggctaagcgaactacaccccggatcctctaattattcagctaagaggatcccattccaccctcatggntgcactgctttcccaggcggtcatacatagaacaggaccttacgaagaggcactcgagaaaccgctctgagcccccttgatggccacaagtataacatcataataagagacgggaaaacagcagatcatatataatctcatcatgttcgctgattgtagttgaacaatatcatatagctaaacaataataatccaacccaaatatgcaagcaaggacatggataacaaaagctagtcaatcctaacgctaaatgtgtaatgccggatgcgaattacagaatgagtatgacagagatacgctaatggacactngcctccaccaaccgactgctgctc

SEQ ID NO: 81332 - DNA, 451 bp, Zea mays
  unsure (1)..(451): unsure at all n locations
ntatggacatacttgtaatttcatgtgaagctatacatctcccctataaatagatgaatattattgtgcatagcttcacctttttcgggggaagataacactctcatttgttcatctcccgaagttaccttcgagctctcattcgtgtaaagccgaaggtatgcttgtaattgtttatcatattgccaggagtaaaatttgagataaatgtgcagataagttggtcttgttctttattatttgcactttctattcttgttagatatacacagtcttcacttgtcaccctcttccttcatatgaccttcggaaaggggtcaggtgaaggaagaagcgggcaacacactgattcatggtcttgtttttgatatcttgaaggattcaaaaacaagtgtccaacactaccttcatccttggatcattatcccgaagagataatgctccaaggatg

SEQ ID NO: 81333 - DNA, 443 bp, Zea mays
  unsure (1)..(443): unsure at all n locations
taagaagggtttcttttgatttgcctttcaacaacgacacaacttcaagcattgttgttctgttttcaaattctgaatgagtacagaatagcccaaactatgaccattcttctcagttcagattcagataacttgtcgctcagttttgagtctgcaatttcatcatatctaccctgccttgccagcggaagcacccagtttagaattccatatgtatgtatgaaacaagctgaactgcaatgtgtcggcgtttcgaccccggggggtccctggaccgacgagtgaattgtcgccgcgtgccccagcccagatgggtcggcgcgagacagagcaagaaggggaagaaaacaggcaaagggggaactcgcagccttcgtgttgccctgcgcccaggtcgggtgcgcttgcagtanggggttacaagcgtccgcgagggagagaga

SEQ ID NO: 81334 - DNA, 454 bp, Zea mays
tgacaacgaagattgtcgtcagtctcccgctgatgccttgccacctcatggacatcagcagaaatgttgcggcacatggagaaaaatgccgcaagcccatggaccaagcgagcacccatcccgcggccacgacctcgaccacgaccacgagcacgtggcatgggagatccgcggccaggagagggacgcgaggcagcagcggggggagaggaggaaggatggtggggaggctggcgaggtggctcaaaggaggaggcagggcctccagaccgtgagggaacccgcttcgtacgagcagctgggttggaggaatcaacccagtagggtacgtagcgggagtgtttgacgggtttttcgaagtgggtctgggtgaccacttcgatcatcttcatgatatagggtgcatgaagacaccctctgtgaggagaccaggaagcacgaacgatctctttcc

SEQ ID NO: 81335 - DNA, 454 bp, Zea mays
ctgtcaaatggacgtgaagagtgctttccttaatggaccaatcaaagaagaggtctatgttgagcaacctcccggctttgaagatagtgagtaccctaaccatgtctataaacactctaaggcactttatgggctcaagcaagccccaagagcatggtatgaatgccttagaggtttccttatcactaatggattcaaagtcagaaaagccgatcctacactctttaccaaaacacttaaaaatgatttgtttgtatgtcaaatttatgttgatgatattatatttgggtctactaacgaatctacatgtgaagagtttagtaggatcatgacaccgaaattcgagatgtctatgatgggggagttgaagtatttcttaggatttcaagtgaagcaactccaagagggcaccttcattagccaaacgaagtatactaaagatattctaagtaag

SEQ ID NO: 81336 - DNA, 470 bp, Zea mays
  unsure (1)..(470): unsure at all n locations
tcgacgccgattgttggggacttgttctcaaatgctatgagttaagaacaatgcaacatagaaaatgttaatcggtaaagtccttcgtccttcgaagcattattccccttaggatataatgatttttggacgaaggttatgaagggcgtaccttcataaatacactatataatgacgaagaatgaattataaggaatatgaaggataacatagacaattgcatattattattaatttatctttgcattattattatgtagaaacagaaataacatcgaattacaaatgtaccttcagcttgaaggagatgaaagtacaagcgtgacgcacaagcgaatgtcaaatcagcgtgaacagtacggnggtactgttcacctatttataggcacaggacacagcccatacaaaattacatttatgccctttacatttgataataattctatagtaatctatcgaggtctgaatag

SEQ ID NO: 81337 - DNA, 460 bp, Zea mays
  unsure (1)..(460): unsure at all n locations
tcttcaaagctgggcttcggnttcctctaagcagatttgtgtgttgaagtttgaagatatttgaaatctgcctttatcaaattactcccgaagcaatcataagaatgggaatcttcgtatgggccgtgaagagccaaggtttggagccaaatgcaaaaagtttctgcaatatgcatgagctgttatatgagacgaaaccctcgggtaaggaacaantatcataacaatttggctgctatagcttcggtgctcgatctgggtcaagctgtcctgtgccaacctttcgaaagagatggcccagagactggatgaaggaatggttctatgtgaaaaatgatttgaaagcacgagaagatattaaagatatcatcatgcgccctatctggcagcgcttcggcctccggaaaccgaaggtggaaatggatgaagcagcccaagaatgccagagagccttcagcat

SEQ ID NO: 81338 - DNA, 343 bp, Zea mays
  unsure (1)..(343): unsure at all n locations
tgaagctgacattagcagttaccggcgatagagtatcgtcgacagcttattctattccaactntaaggtaaagcgnttttcctgatctttttaatttttgtgatgaagcaaaatttttttgatgaagactattttgtacagagtatgctactaagcanagcactgaggatgcagcaagatcttgaggataaaaagaatgagattataatcgagggcctaaaaaagaaaatcaaagatcatgaagcttctctagagaaaaaggacttccttcttcagacaatggagggttcattggcagaagcccaaaccaaagttgctagattaactgatgaactcctacgta

SEQ ID NO: 81339 - DNA, 287 bp, Zea mays
ggacctataaaactcaagctggttcggagctatgccttgatagaagcttctggaaagatggaaaggaatgagacatcagctggtactggagtggcccgatgagtccctctaggaactgctcctgcttcctgtcatcttcaacaacctcttcaggggcatatctgcacagctggacaaatttatctctatattcactcactgacatgtttccctgcttgagggaaaggaatttcttctttttaatctttcatcacccaacaggaatatgataaaatctgaattaactt

SEQ ID NO: 81340 - DNA, 467 bp, Zea mays
  unsure (1)..(467): unsure at all n locations
gaccaaagctgacaagaggaatgtacgccatggcgttgaacctttctgacattgtgaagtaagatattcatattttcacagttggttatgcacacttacacagttggttactcacagtcactacaattttatttctagttccgaagctcgacggagacatgctatgcagttggacctaagatcgatcgccaatctgaggcaagtatatgatgtattatatacattgtttatgattatttatggaacaaatagaatatgaaggtggacatggattcttattaattcttgctgaacaaccagccggagtgcaggaccaatatttttgatgcaccgcgccctgcccccatgcctcggccaacttttaacatcaaacttccatctatcanagagatgatgtcaagtaagatcaacgatctcccacatcgtcatcgatctacattcacagatattcttgctgcatatgactt

SEQ ID NO: 81341 - DNA, 456 bp, Zea mays
  unsure (1)..(456): unsure at all n locations
ttgtctcataaggcactttatgcccggcttctgttcttcctggctctttgtagcttcggtttcggtcagttatgtcttagctttgatttgtatttttgtagccttggcaattttccctggagtagagcttgaagcctttaccgtttctagcacatcctgtacacttgccattcttcttcttttgggagtggctgcaagacctctttgtatcttcggcattggtacttctgccgaagggctgagaacttctaacatttttattccttcagtctctggcttttcggccttatctttaccagactttgcctcagcctgctcggttgagggtgccttcggcatgatagcccggttcttcaaccttcttgatatgagcaattggttccttctgctcagtcactaaaggcgtttnccggccagactcatgcactatggncggatcaatgtatcgtggtcggt

SEQ ID NO: 81342 - DNA, 413 bp, Zea mays
gacctatgaaactcagcttaataaaccatctggacccactccgtcgctctacagtcagcagagttagagctcccttcaggcaccctccgttgcaagcaaccaaccgccagcaaatgcctgttggcactgcggggaccccagtcactttaagaataactgccctcagttaaaggcacccggaccgacttactccaactcggtgaatggccccaagattccctcggcacctacctccaaagcacctccttccaacagccagcagagcaggactcagtaccagggcagagcccgagtcaaccacgtcgacgctcaagaagcccagcaagccccggtggtagtgctcggtgagttccttgttgaatctactccagctactatgttttttgattcgggagcattccattcttttatag

SEQ ID NO: 81343 - DNA, 461 bp, Zea mays
tgtcacctagtaggatatgaggaagtgttataagaatcaaagatcttatcaaaaacaaaatgttcatcataaaatgcgtgtgataacaaaagaaataacctttgcctatgactactgctcgtcgctctccagctgtagctttaagaagtgtattaagatcatacgaagtgtagggcccgtctgtcaatcttccagccctgcaaacagcttgtaccatgtcagaataatatatccacgtgtacccactgaaacactttatctgtaaacaaacctaataatcgtgaatggtatccctgaattgcagacaaagtcttctcccatcttcttgtacttaagcacaccaaagagattcatgatgctgaaaaatacatagcatgattgcttaaggacaaagccaacatgtttaaagttatggtaacgtaagattcagtggaatagcaagtttaatattatggtaacat

SEQ ID NO: 81344 - DNA, 375 bp, Zea mays
gttaactgtaaaggttctagatatcatgtattggtcatgagaggtggaaacttctggtctagtttcagacgcaatcactaccatgcaatgtagatatctgtattacaaatggctattatttattttttccctatagggtcaattcgagatactgtcgctgtcggagtcattcttcctggctgaggatggtgtccagcgcagccgatacggaagccttagcgtgtcgctggctaggcctgatggccgtctgttgtgtggtggggtcgcaggacttctactatcggcttcacccgctcacgtattatcgttcctctggcgcaacttccctcgttttcatacgtagcgagggtagtgctccaacatgggttcatattg

SEQ ID NO: 81345 - DNA, 437 bp, Zea mays
  unsure (1)..(437): unsure at all n locations
tncacacgcttgccccagtgatcggctaagcatgtttgaatggctctctgataagtcgctccagcgtttttgaggccaaatggcatggaggtataacagaaagcaccaaacggagtgatgaacgccgtttttttcctcgtcttcctttgccaaactaatctgatgatacccggaatagcaatctaagaaagacagcacagaacatccggcggtagagtccaccacctgatctatccttgggagcccgaagggatccttcggacagtgtttgttgagatcagtatagtcgacgcacatgcgccaatccactttattctttttgagtacaagaacagggttagctagccactcggggtgtaatacttctctaataaatccggccgcaaccaaacgagctaagtcggcgcgaatggcctctctcttgtcgggcgtgaaac

SEQ ID NO: 81346 - DNA, 464 bp, Zea mays
  unsure (1)..(464): unsure at all n locations
taacatgctngattcaagtgcattcctttcatttgcaaggttatcaatagaggttttcaagttaattacttctatatctttattgtgaatcaactcttgaagctctaggtttctttccttttcaaggataagcaagtcttcttgagcatcaagagttgcctttcttttatctagcttttccattaattttgtgataacattgtatccatttaagccaaattctctaatcattttatttttcatggcaatttgatcatcatcatcatcatttgaaaaatcattactaaacaaagttaccttatctccttttgccatgaggcaagttggaatgtaggagtcgtcttgaaagttggtgaagagttgcgcgcttgaggtagattggatggccacatttgccaccacttcctcttcctcggagctagaactctcatcatcggagttccattcttcaccaatatgagctt

SEQ ID NO: 81347 - DNA, 389 bp, Zea mays
tgctggccatttgaaggatgtctgcaagagcctcgagaagacttcaattgtgtgtgaagaagatctagagaataaatgtcctggttgggaccttcatcatcccccttcagatgttgaagaccacaccaacccttctgatgttgaggacccaatggatggatacgtgtcagtgagagcacctagagtgggggtgaatacgtgatcctgttaaaacttgaaacttaatccatcaagcttgattaggagttaacacaataaagccaagtggttagagatgagttcttgctcaacacactacccacaatatgatcaacacagatacgcacaggggtttatcctgtggttcggtcaactgctacactcgcctactccacgttgtggcctcccat

SEQ ID NO: 81348 - DNA, 445 bp, Zea mays
  unsure (1)..(445): unsure at all n locations
actcagcttctaagggagagncacatttgggactaaccaatgtttattntgagaaagatatgatttgtagtgcatgccaagcaaggaagcaagttggtgttcatcatccacacaagaacatcatgacgactgacaggccactggagctacttcacatggatttattcggcccgatagcttatataagcatcggcggaagtaagtattgtctagttattgtggatgattattctcgcttcacttgggtattctttntacaggataaatctcaaacccaagagactctgaaaggattcttgaaacgggctcataatgagttcgacttgaggaacaagaaaataagaagcgacaatgggacggangtcaagaactcacanatggaatgctntcttgangagganggcatcaagcatgagttctcttctccctacacgccacanaaaat

SEQ ID NO: 81349 - DNA, 238 bp, Zea mays
  unsure (1)..(238): unsure at all n locations
ctatcttattgacttaatcatttcaccatacgttatcattattttatngcatatcatggcataaatttatcttactcattgcattcattagattgcaacctcggtgacggagagtacgtgctcattcccgagcaaggagttgcccaagatgaagttaaggagccagctcaagagcctgccccgaggatctccccgcagccccacttttcgaaggcaagccctatggcggaaccacccg

SEQ ID NO: 81350 - DNA, 461 bp, Zea mays
  unsure (1)..(461): unsure at all n locations
tgaccttagaaactaagcttanaaatccatattttgccatctcccgacagacagtatatttccttgntgtctaggagatagtacagaaaatcatcttcgtcggtgccattgtataccagggcccctttctggtacttcagctcccggacgtaatgtttggcttctgcaatttcttcttcacacaaccttttgcccgaagcatgtcgaataataaagtcaagatcttcagaagctgcttcgggagtagcagatttagctttctcgggcgcgtgttttttctccagagccaaaccaacgtctgaagatccttgttcagttctttcctcagtgccaacgggatctacttcagtaggcactggaggcccaacttcgggttcagtgcgagctgtggcagcttcggcagtcctctttgcagaagcaagagttgacggccttgccgactccatgacagcgtctagcac

SEQ ID NO: 81351 - DNA, 458 bp, Zea mays
  unsure (1)..(458): unsure at all n locations
acacattaaactcagcttctataggagaacacgtgataagatcgactattgttttattcgaacaagatagaccttgtgcagcttgtcaagcaggtaaacaagcgggaggagcgcatcacagcatgaatgtgatgaccacctcaagacctctggagctgctgcatatggacctcttctgacccgtcgcctatctgagcataggagggagtaagtatggtctagttattgttgatgactnttcccgcttcactcgtgtgttctttntgcaggataagtctgaaacccaagggaccctcaagcgcgtcctcaagagagctcataatgagtctgagctcatggtaaagaagataacgagcgacaacgggtccgagttcaagaaccttctagtggatgagttccttgaacaggaatggatcaagcacgatttctccgctccctacacaccacagcaaaatggt

SEQ ID NO: 81352 - DNA, 461 bp, Zea mays
  unsure (1)..(461): unsure at all n locations
ggcatacaagtattntgggcctattgaagtgttacatcacattggtactgttgcctacaagctcaaactaccagcaactgcttctgtacacctagtctcccatgtatctcaattgaagcagtcagtcaagtcttcttgcccagtgaggctatgttcggttccaagattttaattccccaagtggatctaatccaaggagggattgagtggatccctccctttcactcaacccccttggggtttaattcctccttggtctaacccctgtctaaaaaagcctattcggttaatccctaacatgtataactgagctcttacaagatgcatcgggtgtaaatgctgcagggaccctcgctattgggaggcgagatgcagatgttgtgcaatacggaaacttcatcaacggatacatacataacaatgtttatgaaagcatgcaagtcatgaagttgcaaatatgc

SEQ ID NO: 81353 - DNA, 458 bp, Zea mays
  unsure (1)..(458): unsure at all n locations
tatcatgttcatcatacaacaaatcctcttgcttttctaaaagcctatccttttcattcaaggcatcaatcaattcattgattntatcaattttatttctgtccaatcccttgaacaaactagagtaatctatttcatcatcactagactcatcgtcactagaagaatcataggtgacatcattacgagtgattaccttcttctctcttgccatgaggcaagtgtgacgctcgttggggaagagggatgacttgttgaatgcagtggcggcgagtccctcattgtcggagtcagacgaggagcagtccgagtcccactccttgccaagatgagcctcgccctttgccttcttataattcttcttcttctccctcttgttcccttggtcctgatcactatcattgtcgggacagttagcaataaaatgaccaagcttaccgcatttgaagcacgaacgc

SEQ ID NO: 81354 - DNA, 436 bp, Zea mays
taaagccatggtaagtagcatacgctaataatatttgtattgacttaagcctagctaccggtgcataagtttcaccgaaatccaaaccttcgacttgggagtatcccttggccacaagtcgagctttgttccttgtcaccacaccatgctcatcttgcttgttgcggaagacccatttggttcctacaacattttgattaggacgcggaactaaatgccatacctcattcctagagaagttgttgagctcctcttgcatcgccaccacccaatccgaatcttggagtgcttcctctaccctgtgaggctcaatagaggaaacaaaagagtaatgttcacaaaaatgtgcaacacgagatctagtggttacccccttatgaatgtcgccgaggatggtgtcgaccgtgtgatctcgttggattgcttggtggactct

SEQ ID NO: 81355 - DNA, 461 bp, Zea mays
  unsure (1)..(461): unsure at all n locations
tctaaagggagagcacattntgggactaaccaatgttcattttgagaaagacagggtttgtagcgcatgtcaagctgggaagcaagttagtgttcatcatccacacaagaacatcatgacgaccgacagggcgcttgagctactccacatggatctattcggcccgatcgcttacataagcatcggtgagagtaagtattgtcttgtaattgtggatgattattctcgcttcacttgggtgttctttttgcaggaaaaatcacaaacccaagagaccttaaagggattcttgagacgggctcaaaatgagtttggattgagaatcaaaaagataagaagcgacaatgggacggagttcaagaactctcaaattgaaggctttcttgaagatgagggcatcaagcatgagttctcttctccctatcacacctcagcaaatggtatagttgagaggaagaata

SEQ ID NO: 81356 - DNA, 455 bp, Zea mays
  unsure (1)..(455): unsure at all n locations
tgaatgaagtaaaacctgttgaccttgagatagcagtgttgtggctccacaccacttttatcaactcatctgaccactttcctctaggctgattgatgattaacttcattattcctgtcattataattccatttgctctctctactaacccaattgattctggatgccttactgatgcaaaatgtattcttgtaccaatccggtcacaaaaaaccttgaacgtttcagcatcaaattgagttccattttcaactgtaatagccttcgacacaccgaagcgacaaacaatatttttncaaaagaacttctgaactgttgctaaagttatggtagctaggggcttagcttcgatccactttgagaaatattccaccgctactacaacatantttaagtttacttatgctggcggaagcggccctaacanatctaggccccatctctgcaatggacaa

SEQ ID NO: 81357 - DNA, 346 bp, Zea mays
  unsure (1)..(346): unsure at all n locations
tnccgttagccttatgaacgaagactggattggccattcatactggatgatggacctcttcgatgaagccagcgcgcagcagcttccggacctcctcacggatgaaatcctgtcgttcaatggactgtctttgaggcttctgactcaccggtttggcatcagggtggatcttcagatggtgctcgatcacctccctggggatcccaggcatctgcgacaattcccatgcgaatacgtcggcattttcctagaggaaggcgacgagtgtgatttcctatttctcctccagattgcccgcaatgcgagtggtctgggaggaatccacgccaacctggatatcttattg

SEQ ID NO: 81358 - DNA, 464 bp, Zea mays
  unsure (1)..(464): unsure at all n locations
taccctgtcccatttccagggcatgtggctagttaagatagtccttgatcaacaggcctacatatgcatccaatccttaactaacctgngtagaacatcacctattcctagcccaagtcccgaattaagtacttccatccttaggattgtttgtgttccttaggatgaaaagagcattatagagaactttgcagtaagatcccaccatgctcccgatgaaaatattattgcaggtagaagtcatccttcctcagaataaccccagagctaggcattattgcaaaagacaacctctatccacaagatctaagcagggctaagcatttntgtgaatcatattttgatacttcatcagaagtatctataaaggtatggatatcaaggaagtcaatgcatcaaagggtttccaagcaactcctataaatctaatgcacatttcactagacttaaagtgtgcanaaatt

SEQ ID NO: 81359 - DNA, 483 bp, Zea mays
  unsure (1)..(483): unsure at all n locations
ggacctatgatactcaagctggacagggacgctggagtagctggaaaaatctatgtttgcctcangtttctaaacgagttggcaatgaattgagggtaccaaagaatacctcctctccttgtgtgaaacccatggttttcatcagatctctaatgatcaacacgacttttcctacttaacgtgccaactgtcaaggattttttagtactccatttatagggtaggtcgtcatatagacgacttaaagtaaatgcataagaaattcgaagatttagacaggttcagattctcgatacgagataacaccctacgctcaatttatggcaatgtctattgtctatgtaatataatgtgatgatctgtcattccgacacttcttttatagtccaaaaaggaacaatgtttataaggtatgtgtctgggtcggttaagtcgtgatcgagtttgtctagaaccgtgtacaagctatattctgtcattttg

SEQ ID NO: 81360 - DNA, 458 bp, Zea mays
gagcacattagcctccacactactgaatgtaccaaatgtgcttacaatgatgattgttggtcttggtattcagaatggtatccataaaggatatgatgaatctgtgatagattcaaaaaattcagatcattaatgaccatcagtaatgaattgtcatttccaactggttatggttggagtcaggaagttttgcacgctcctgacttgtgattaactgcatgtactgttgtacaagttcccctatggtttttagtacgtgggaatccgtgaaagatttcccatgcgtacattgggtatgttcccaatctcaccaccgcagcgtacatatatgggcacacagaaaactggggatctatgtgagaattcattctccgtcgatcattaagttttagaatctcttcatgagaatctatttacggcccgtacgcttgcttgaatcatgagcttttccaggcatt

SEQ ID NO: 81361 - DNA, 465 bp, Zea mays
tcctccagaattttgagcccctcgggcatccgaaggtagcattatgtaccactaggagttatgaagcttgtctttggctcatcctctttcttcatccaaatttgatgatagcccaagtagcagtccaataggctcataagttatgaagaagttgttgcgtctacaagggagtctattcttggtaaagggaactcatccttcggacatgccttgttgaggtctgtgaaatcaatgcacattctccatttcccattagccttcttcaccataacggtgttagccaaccactctaggtatgttacttctctgataacgtcggcgctgagaagtctctttacttcatttcgtgcacttttggctttatcatcagacatttttcgaagcctctgcttccttggtctgaaggatgggtccacattgagtgaatgctcaatgacgtctctattgacaccacagatatcatta

SEQ ID NO: 81362 - DNA, 453 bp, Zea mays
  unsure (1)..(453): unsure at all n locations
ntaactgtacgtttccgaactctattatttatccctttccaatataaactctattactactttgagcacaggaaatccatttcattttgaaaggaaacttactaaggcccgtttgattcctttagttcatggaataaaatttagttatgagactaaaatttagtctctacctttttggttctagggactaaaaatattcaaaacacatttaatgaatcataaaaggagcaaaatatctcttattattctcattagtgcaactgaaataaaagagggtcaaaagtacaatttatatgatttagttcattttagtcactcattaagggcctagagactaaaatattntagtccctattttagttctatcatttagcaatttagggactaaataggactaatatagagaaactaatctttagtcactaagcaaacggcattagtacggaacaattc

SEQ ID NO: 81363 - DNA, 449 bp, Zea mays
  unsure (1)..(449): unsure at all n locations
tgacccgaggaccctcgtcaccggaatagtttattttctctcaccggagttcaagaacccgccggcgcacgtggaccgggtaagcccctgcaccgntttccaattcgttgcgcgcatggcctctatgtcaccccgtgaagctcctcgtgcaccctaattgaactataccgccgtggtttggccggagcatgagccgccgtcgacccccgccgcctgtgctcgtggccagagtagcttcgaccatctccgacaccgacccgcacaccgacatgaccgtcgcaaccttccggacgtcactgaccaccccgccggagctctactgtcgccggttagccccaccgtcgtaatctatgccgtgggtactgtttaagccagacatagagcgctgatcatattctagtatagtccagcgtgctatggtcaagattagtgactcaagccaatagtgg

SEQ ID NO: 81364 - DNA, 459 bp, Zea mays
  unsure (1)..(459): unsure at all n locations
tgcttacttggtaagatgaccaatgcgcctttcacggttttaccggagaggacattagatttattggaactcatacatactgatgtgggcggaccaatgagtacgacagctaggggaggattccaatacttcataaccttcactgatgattttagtagatatgggtatgtctacttaatgaaacacaagtctgaatccttagaaaagttcaaagagtttcagaatggagtataaaatcagcgtggcaagaaaattaaagcactgcgatcagatcgtggtggtgaatatttgagtcatgagtttagcaatcatctaaagagttgcggaattgttccacagcttacgccgcctggaacgcctcagaggaatggcgtgtctgagcgacgtaatcggactntattggatatggttcgatcaatgatgagccagtctgacctacactttgtcgtttggggatac

SEQ ID NO: 81365 - DNA, 451 bp, Zea mays
  unsure (1)..(451): unsure at all n locations
tgactcctttcgccttgagacaccggaatgttacttttggtccgagaggaggttgggagccttccgtgtcttgactacgatgtcatcgacgtaggcctcgactgtgcgaccgatgtgttggccgaacacatggttcatgcaccgctggtacgtcgcgcctgcattcctcaggccgaacggcatggtgacgtatcagtacatgccgaacggcgtgatgaaagaagtcgcgagctggtcggactctctcatccggatctggtgataccccgagtaggcatcgaggaaggacagggtttcgctcccagcagtggaatccacgatttggtcgatgcgaggcagagggtanggaaccttcggacatgctttgttgagaccagtgtagtctacacacatccgccatttcctcctttcttctcacaacacagggttggaagccatcgggatggatacc

SEQ ID NO: 81366 - DNA, 415 bp, Zea mays
  unsure (1)..(415): unsure at all n locations
ntgagttatgttattacagacgcagactaaacatgagtgtttagtagttatattatacaaaccagtggaggcacatactcctcctgataagctataagcaaaagatcctaagtggaggatcgagtcctcccgcacttcagtcttggttttactcatttggtaccaccttggagcaaaagcaacaaaaatttgtcgcttcctcacctaaaaacaacaaagggattaaccctgagtatgggatactcagcagtcttacccgactaatgaaaagactctcaagggtatgctggataaataagagtcaacgagaggcttttagcaaaatcaacttataacttctgcagaagtagcttactaaagtgagtccttactttcaatcttttaacgccatattaagtattaataaaactctttt

SEQ ID NO: 81367 - DNA, 463 bp, Zea mays
  unsure (1)..(463): unsure at all n locations
tctaaagggagaacacantttgggactaaccaatgttcattntgagaaagacagaatttgtagcgcatgtcaagcagggaagcaagttggtgttcatcatctacacaagaatagcatgacgaccgacacgccgcttgagctactccacatggatctattcggcctgattgcttacataagcatcggcgggagtaagtactgtctagttattgtggatgattattctcgcttcacttgggtgttctttttgtaggataaatctcaaacccaagagaccttaaagggattcttgagacgggctcaaaatgagttcggcttaaggatcaaaaaagattagaagcgacaatgggacggagttcaagaactctcaaatagaaggctttcttgaagacgagggcatcaagcatgagttctcttctccctacacagcacaacaaaatggtgtagtggagaggaagaatag

SEQ ID NO: 81368 - DNA, 445 bp, Zea mays
  unsure (1)..(445): unsure at all n locations
tatcaaagaanaattacacagatttggagaaagtgttatatgttgtattaatggccttcaggaagcttcggcattattttcaaacttaccatataattgttccttcgtcacagcctctgaaggatattatgagaaacagagaagctactggaagggttggaaagtgggccgcggagctcaatgaattcaccattgactacgtgcacagatcttcaattcaatcccaggcgctagcagacttcatcgctgattggacgccaggggctcacgaagaagggacaagcaaggataccgaagcttggacgatattctgcgatggttcttggggaaccttcgttgcaggagcagttgcggttctagtagcaccttcaagagtcaaaacatgttttgcagccaaacttgaatttacttgcacaaacaatgttgctgagtacgaagcacttct

SEQ ID NO: 81369 - DNA, 341 bp, Zea mays
  unsure (1)..(341): unsure at all n locations
ngcaccccggtatattggtcctttccctgttcttgaacaatgtggaccagtggcataccgactccagttacccgaaaccttgtctgcagtgcataatgtgttccacgtgtctcaattgaagaagtgtcttanggttcccgatcgaaccattgaagtaacggatgttgccctagaaccagacttgacatattcagagcaccctattcgagtcttggatcanaaggacaggattacccgaaggaaaactctcaagttttacaagatactgtggaaccaacatacagaaaatgaacctacttgggaaactcaaaactttttaaataaaaatttttcaggctttt

SEQ ID NO: 81370 - DNA, 490 bp, Zea mays
  unsure (1)..(490): unsure at all n locations
ttacggacctataaaactcagcttgtgaggttcttcatccncacatgtgctaagcggctatgccacagccagcccatgctagtcttagctattaagcatgcatctagaccggcttcttcttttgcaaaatcaactaaataaagtttgccgtctaatacacccttaaaagctagtgaaccatcacttcttctaaagacagacacatctacatttgtaaatagacagttatatcccatattgcataattgactaaccgatagcaaattatatcctagagactctactaagaacacattagagatagagtgctcattagaaattgcaattttacctaacccttttaccttgccttgattcccatcaccgaatatgattgaatcttgggaatccttattcttgacgtaggaggtgaacatcttcttctcccncgtcatatggtttgtgcatccgctgtcaataatccagcttgaacccncggatgcataaacct

SEQ ID NO: 81371 - DNA, 469 bp, Zea mays
  unsure (1)..(469): unsure at all n locations
tgtgaaggttcttcatccncacatgtgctaagcggcgatgccacagccagcccatgctagtcttagctattaagcatgcatctagaccggcctcttcttttgcaaaatcaactaaataaagtttgccgtctaatacacccttaaaagctagtgaaccatcacttcttctaaagacagacacatctacatttgtaaatagacagttataccccatatgacataattgactaacagatagcaaattatatccaagactctctactaaaaatacattagagatagaatgctcattagaaattgcaattttacctaacccttttaccttgccttgattcccatcatcgaatataattgaatcttgggaatccttattcttgacgtaggaagtgaacatcttcttctcccccgtcatatggtttgtgcatccgctgtcgataatccagcttgaacccccggatgcataaacctg

SEQ ID NO: 81372 - DNA, 466 bp, Zea mays
  unsure (1)..(466): unsure at all n locations
tggtgcctatgatcctgttctctgcccttgtgtaggctgtcatcttcctgatcagctccttagccaggctgtccacctatcttttctgctgctgctcctctccttgcttcagccatagcaccctcacgctcctgagaaaattcctcatggtgaacgagacccgcttgctcggatacttggacatagtagtgtaccagtcatggcacatcacaactagagttggagcaccagctatatctggagcaatcgacgagatcccccgcgagtaccggatggtgtcggtcagaacaaacttggatagccagccatcaagagcctcgatatacgctctctgagcattgaaatacctagtaaagcaggatcttcagttcctcagctcaacctccaacttaatagttgcatgacgctgtgcatcagtgctaaattngccataagcacggcatgtaaatgaattcacctcgaacat

SEQ ID NO: 81373 - DNA, 448 bp, Zea mays
tcgcacctccgaactaactcgactgcatcacttttcgctgttggccaatagaatcccgacctgaagaccttcccgacagtgtcttggacgctgcgtgtattccacattgtccagcatggacctcatctagaagtcgcttcctagtggatgagagaatgcatttcatgaagatgcctgatgcgtcccttctgtatagtgtctccccaatgagtgtgtagtgagctgactgtctagcgatgcgctcggctgcatttctatcgtctggctcctcttcattctttatatacctgatgatcgaccttctccagtcatcagagcctgactctggttgattcacgatattacactcttctgcctcatccattgagatgcttggctgtggtatttcttgtacaaagactccaggtgggacctgagttcgactggatcctatcttggacaatacatc

SEQ ID NO: 81374 - DNA, 471 bp, Zea mays
cgaagtatatcttcacccagtcagagttgaacatgagacaaatgcggtggctcgagcttattaaggattatgaactggagattcattagcacccatgcaaagctaatgtagtggcacatgccttgagtcacaagactttttgtcattgtcttacaatggaaacttctgacattatgttatgccaagaaatggagaatttgaacctgggaatgattcagcatggaactttaaatcaattaaagcttgagtcaatccttttacaaaggataattgatgctcaaaaagataatgagggtatgaggcacatccgtgagaaaatagaggccgaaaaagccaaatgtttcagaaaagatgatcaaggcattgtatggttcaacaaccgcatagtggtgccaaagaatgaagaaatccgccaacaaattttggatgaagcgcatcttagtcgctattctattcattcttgaagcacta

SEQ ID NO: 81375 - DNA, 476 bp, Zea mays
  unsure (1)..(476): unsure at all n locations
acactatannaaactcgacgctgtaaagggagaacacatggtgggactgatctttgtntattcagagaaagacagggcttgtagcgcatgtcaagcatggaagcaagtcggtagtcatcatccacacaagaacatcatgacgaccgacaaaccgcttgagctactacacatggatctattcggcccgaacgcttacataagcatcggcgggagtaagaactgtctacctattgcggatgatgactctcgcttcacttaagtattctttctgcacgaaaaaactcacacccaacagaccttaaagggattcttaagatgagctcaaaatgagctctgactaaggatcaagatacaaccaagcgacaacgggacgaagctcaagaactctcatatcgaaggcttgcttgaggacgagggcatcaagcatgagtgctcgtgtccctacacaccacaacacaatggtgtaccggagagga

SEQ ID NO: 81376 - DNA, 462 bp, Zea mays
  unsure (1)..(462): unsure at all n locations
ttagtgattagagagagtgattgttgtgttcatttgagctcttgcgcttggattgcttctttttctcattcttccttgcattgcgatcatctcaattgtaatcaaggcaagagacaccaattgtgtggtggtccttgtggggaagtttggttcccgtttgattgagaagagaagctcactcggtcggagggaccgtttgagagagggaaagggttgaaagagacccggtctttgtgaccacctcaacggggagtaggtttgagagaaccgaacctcggtaaaacaaatccttgtgtctcacttctttattcacttgcgatntgtttttacgccctctctcggactcgcattatatttctaacgctaacacggcttgtagttgtgattaactttgtaaatntcagtttcgtcctattcaccccccctctaggcgactttcaattggtatcggagcccggtgct

SEQ ID NO: 81377 - DNA, 114 bp, Zea mays
ctgtgtggagttgggagaggatatgatctctttggtgtgtcttgtattgaatgttatagctcttgtaaggtgttgaagtgtgaaaacttggatgccattgaatgtcgggtgggt

SEQ ID NO: 81378 - DNA, 472 bp, Zea mays
  unsure (1)..(472): unsure at all n locations
actnaagcnngggggctggcgcggcgcgccaagtctttcgtcttgctgggagactttatggagctctaccaccacagccccttaggcatcctccagcgatgcatttccatcgccgaaggccaggagctcttgcaagagctacactcgggggcttgcggccatcacgcagcacctcgaaccctagttgggaacgccttccgacaaggattctactggccgacggcggtggccgacgctactagaattgtccgcacctgcgaagggtgtcagttctacgtgaggcagacccacctgcccgctcaggctctgcagaccatacccatcacctggtcgtttgctgtgtggagtctggacctcgttggccccttgcagaaagcacccgggggctacacgcacctgttggtcgccatcgacaaattctccaagtggatcgaggttcgacctctaaacagcatcaggtccgaacaggcgg

SEQ ID NO: 81379 - DNA, 450 bp, Zea mays
  unsure (1)..(450): unsure at all n locations
tctaagggagaacacattntaggattaacaaatgttcattctgagaaagacaggatttgtagcgcatgccaagcagggaagcaagttggcacccatcatcagtggcggtcctaagatttttacatagggtgtgccgtaacaaaattttcatgtataattatatctaatgtacatataatttcatacgtaaattggtaaacaatttgatatatagatataaagtttgacactcaacaaataaacatgaaaattgcatacattaaacataaaaattccaataatactacttatctggcctgcgcttcctcagtgccataaaagtttcaattataccttcttcattcacttcgaagaanatatccctctcgatgtatgtaacaagacaatcatccaaaagactatcacacatcttgtttctcaatntagtcttcaccaaactcattgcagaaa

SEQ ID NO: 81380 - DNA, 442 bp, Zea mays
  unsure (1)..(442): unsure at all n locations
ntcccgctcacatcttcggcgctgtatcaaccttcgtattggtttgggcttctcctactgtgataccgactcgagtctgaagatacctgttcacacattatactccagaaatactgttaaatcctgtttttgaggaccttcgtaagccgaaggtccccaacagctgttgtgccatcaatgggggcaggacatagtgctngctctgctaagggtgcgtgtcgaggttcatttgatttggttttgttagtgacccaccttatggaggagtattatgtttgtacgactggtgaaacctaacagacgactacacactangggaatctttgtaaaggctacggagtgtattcctgaccattcatcttggtaatgaagatcgagtcttgcaaacctaggttggaaagggatcacatctcatgggtaaagtgtgtaacctctacagagt

SEQ ID NO: 81381 - DNA, 446 bp, Zea mays
  unsure (1)..(446): unsure at all n locations
aactaagcttctaaaggagaacacgtgatggactaactaatgttttattcgaaaaagatagaccttgtgcagcttgtcaagcagggaaacaggtgggaggctctcatcacaccaaaaatgtgatgacgacatcaagacccttggagatgctgcatatggacctttctggacccgtcgcctatctgagcataggaggaagtaagtatggtttagttattgttgatgacttttcccgcttcacttgggtattctttttgcaggaaaagtccgaaacccaagggacactcaaacgcttcctcaggagagctcanaatgagtttgagctcaaagtgaagaagataaggagcgacaacgaatccgagttcaagaaccttcaagtggaggagttccttgaagaggaagggatcaagcacgagttcttcgcttcctacacaccacagcaaaat

SEQ ID NO: 81382 - DNA, 466 bp, Zea mays
  unsure (1)..(466): unsure at all n locations
tgtccacttcaaccaaacgggacatttgctgagtacgttgatgtgtactcacccttgctttcacaaaacaccaggttgcctttggtgcaatctatgctcaagtaaagaagaaggcaccgaggcggatctctaggagttccaggacttcgacgagttcgatgattaggctagcgacctcccctagtcagctgcctgtggtgggtttatttacattggctaagtttctattctgtgtactttgattatattatgtaaatgactctagtctttcatattattacttactctntattgttattcgaagcattgtgctatgatgagtcagttatgtaatcgccgtgtatgtgaatttctgatcctggcacgtacatggttcgcattcggtttaccttccaaaaccaggtgtgacaatgcccctacgctatcctcgtatttcaaagcgcgctccattactttccatacccct

SEQ ID NO: 81383 - DNA, 469 bp, Zea mays
  unsure (1)..(469): unsure at all n locations
ccttgaactaacttgcattgttgaggccgcaataagttccaattctatttttccctagtgtcatatcgtgcagattggttcagagcaatgcttcatataaaatttcagcacagagatgttcaattcaaatgacaaacttaatgaacttatgtgttttgggtgtaatgaatctgggaatgtacaacaccattaaataccccttctcctgagaggtctcgaggggttaattgaaaaaaattagaggaccgtctctttgcgaaaagtctgtctcttactcgttttttcaagcataatagactcactctgtacactgtacaaccctagttaatattcatcttttgagctaccttagagttaatgcattcatgttntagagacactctcgtctaagcattgtacatgccctaagctccatnntaatcattttgctctatgataggaaagttctcaatgatacgctttgctttta

SEQ ID NO: 81384 - DNA, 443 bp, Zea mays
agaccaagcgcctttcacggtttaccggagatgtattatattatggaactcatacatactgatgtgtgcggtccaatgagtacgacagctaggggaggattccaatacttcataaccttcactgatgattttagtagatatgggtatgtctacttaatgaaacacaagtgtgaatccttagaaaagttcaaagagtttcagaatgaagtagaaaatcagcgtggcaagaaaattaaagcactgcgatcagatcgtggaggtgaatatttgagtcatgagtttagcaatcatctaaagagttgtggaattgttccacagcttacgccgcctggaacgcctcagaggaatggcgtgtctgagcgacgtaatcggactttattggatatggttcgatcaatgatgagccaatcggacctacctttgtcgttttggggatacgctct

SEQ ID NO: 81385 - DNA, 467 bp, Zea mays
  unsure (1)..(467): unsure at all n locations
taacagaagggacgagcaactccgactccacaagacgggccgcacatggccaaaggaacatcgtggtgcactatcgttgccaagcctcatcacacctcatgcgagacagcaacgctttttcaccaacgagtttgatcctccaccctatctctagcatttgcccaacctctgaaaaaatctagtccacaaagaagatgggttttgcgtcatgtcatcgttgtcgagccacatcccctaacgtagtagtttcgacttcacattgtaaaaccccacctccacccgcataccagatgctgagaagcaaaagcatcaactaaaggtgacgtcatggccaagatgaacttcaaaagcgatgccttcaggaagggactgacgtctatgacgccatcgttgcttctctgagatggaccgagctttcacccataanagatagtgctacggaatacgacactctcaacaggggaaac

SEQ ID NO: 81386 - DNA, 410 bp, Zea mays
gaccttagaaactaagcttgggactgtataatagcccttggagctcacttgtgaagagttgaagagagtctgagagtaaatacacccgagtgcttcctcttttatctaagtagcttacgttagttgctggaagtcggagttgagcttgagctttacctcgcgagttttgaagttttcttcgaagtccttgggtataactttataaaggatatataccagggcacccaagacacgtcgataacgaagatgttgatttgtgggactaactcggacttggctataagacttgaactcggacttggaggaactcagcccacatgttaggataaaatatatgccctcaaatagataaggaagatgatgattcgtgagtgataaggactatcttgtaacaacggcatgtgccaact

SEQ ID NO: 81387 - DNA, 461 bp, Zea mays
  unsure (1)..(461): unsure at all n locations
tcggcgaccaagtggtcaggttctttgagttctactatngtgaagaccctaagcatctggttggtgaaggcaagtgtcctctgacctattatgtcccatttactttataattcatcaacccgcgtaccatgatcaacctaaggattgactagtattctattttctgtccttgtttaccctttgggaattgattattatgattagttctatgctagcgctttactttaatcaatgaacatgatgagatacaatgatgatactatgattttattctggatatgatgatatacttgtggcattttaggggactagagcggtttctcgagtgcctctccgtaaggaatggttcattggatgaccacccgggataacagtgcaaccatgagggtggtatgggacgtcatcatctaattaattagaggaactgagatgntagttgcttcaccgtcgtgccttcaatg

SEQ ID NO: 81388 - DNA, 464 bp, Zea mays
taatccaacttccgagattgaccacacctacttctaattgccaagtataccccaagaaccttaaataatggagctaaaacctgccctgctaacttaagtacttcacctcgtatttcaattattaatttacataccatggcatacatattgttgggggccttcggcttacgaaggtcctcaaaaacaggatttaacagtatttctggagtttaatgtgtgaacaggcatcttcggactcaagtcggtatcacagcagaccagaataatacgaaggttgatacaacgccgaaggtgtgagcaggaaagcttcggcatgatagcaacaaaatgaaaccgacttaaagatgaaaaggctattcagacctcgatagattacaatagaattattatcaaatgtaaagggcatgaatgtaattttgcataggctgtgtcctgtgcctataaataggtgaacagtacccccg

SEQ ID NO: 81389 - DNA, 444 bp, Zea mays
  unsure (1)..(444): unsure at all n locations
ntggcgataggctcatgagatatttatggttggccacattacttgtttgttngtaggctttgagtttgttttattattaataggtcaagcttcgattgctaaaatattctttttagtatgctcttttggtgtcttttgtttatttctggtatttaatcttatactaaattggctcgtttgattttcagggcatgttatggtgttctctggtttgtcatcgagaatagctctttctcttctgtcaagggttttaccaatggcttgtaacaactggatgtagaatgatttttgttttttaactgatgtagtgtgtttttgcattacaatccattgtggctaaggcggcagcacatgtagtgtgtagtcatcgtgaatttaatagtaactagctctacagttgtgatcggttataaatgtgtntggttggacctatcaattggatgt

SEQ ID NO: 81390 - DNA, 461 bp, Zea mays
tgtgaagagcactgcggtctgttctgctgactccccttatcatcattctgagtggagttgtggatggacctgacatgcctcggataggatcttcctccgaagcccctggtcatttcggaaaatctgaaggcctcctcccttctttggcgaaaatcattgtcagcacgaatgtactcgtccattatttggagcagcttctccagggtctgaggaggcttcctagcaaagtattgagcagcaggtccaggacgaagtcccttgatcatggcttcggtgacaatttcattgggcaccgttggtgcctgcgccctcaaacgcaagaatcttctaacatacgcctgaaggtattcttcatgatcctgagtacactggaacaaggcttgagcagtgaccggcttcgtctgaaatccttgatagctggtcaataacatatccttcagcttctgccatgaagagatcgt

SEQ ID NO: 81391 - DNA, 422 bp, Zea mays
tcatcatctcctagacgttcatcgtcttgagtccctggcgtccaatcagcaatgaagtctgctaacgcttgggattggagcgtagatctatgaacataatcaatactgaagtcatttaactgtacatcccactttcccactcttcctatggcttctctatttctcattatatgctcgagagcgtgcgaagaaggtactatgatatagtacatctggaagtaatgccgaagctttctggaagccatcattacaacatatagcaccttccaactctgtgtattttttataatgggctaagtacttcatagacgaagtacactggcacttgcttctttgcctggccatcctacttttattgcaccatcgctgctctaaccgtagcgtgggaagcatctacataccacagcaatggaggtccaatg

SEQ ID NO: 81392 - DNA, 450 bp, Zea mays
tgtgaaggttcttcatccccacatgtgctaagcggcgatgccacagccagcccatggtagtcttagcaattaagcatgcatctagactggcctcttcttttgcaaaatcaactaaatagagtttgtcgtctaatacactcttaaaagctaatgaaccatcacttcttctaaagacagacacatctacatttgtgaatagacaattatatcccatattacaaagttgactcatagacaacaagttatatccaagtgactcaactaagaacacattagaaatagagtgctcggatgaaatagcaatttttcctaaccctttcaccttgccttgattcccatcaccgaatatgattgaatcttgaggatccttgttcttgacataggaagagaacatcctcttctccccgtcatgtggtttgtgcatccgctgtcgataatccagctggagcc

SEQ ID NO: 81393 - DNA, 429 bp, Zea mays
tctaaagggagaacacgtgataggtctaactaatgtaactttcgaaaaagatagaccttgtgcagcttgtcaagcaggtaaacaggtgggaagctctcatcatgccaaaatgatgacaacatcaagacccctggagttacttcatatggacctcttcggaccagtcgcctatccaagcataggaggaagtaagtatggtcttgttatagttgatgatttttcccgcttcacttgggtattctttttgcaggataaatctgaaacccaagggaccctcaagcgcttcctaaggagaacccaaaacgagtttgagctcaaagtaaagaagataaggagcgacaatgggtccgagttcaagaaccttcaagtggaggagtatcttgaggaggaaggaatcaagcacgagttctccgctccctacacaccaca

SEQ ID NO: 81394 - DNA, 464 bp, Zea mays
tgtgtatgttagattcaaccatattcatgcaaagagaagaattagagcccaaaagaataaaaaggcagatcctcttgtagcaaccgatgtaacttttgctcaaggatggatggttgatggtgctgagaaggatgaagaagggtctgatgttgagccggtgaccggtctcacatggaaattgattgctgagacatgtggtgctgaagaggtcacaaaactacgtaggagtgcaagattgactgttgaaagagaggttgaagacacaccgctgtctgaaactgaaagtgaagaagaagcaccacaagaggaagatgttgactttgagtcggatcaagatgatgtgatcacagctggatatgagctagatgcggaggaagacaatgatggctgatgggaggctttagctgccatcatctatcttatattagcactatctaattatcttatctatttgtctatgttga

SEQ ID NO: 81395 - DNA, 468 bp, Zea mays
tcccagtatcttcttgggtaaggcacttttctcttcatatgggttaagatgagaatggaagcataaggtaaggattagctctaatttgtgatctatgtttttagagaaaacctttttaagaaaaacgaaaagaaaacacacaagctcagcaatgataagcacaaacaaatcaaatgttttgaataagggaagaatagagtttttccaacgcacaggctactcagatttgggggctaagcataactactattgcttggctcctgaattgagaactatgctaaatgcaacttatgagcactaacgttaaagcatcacatatgcactcaaaaggggagaaaacatcaagcgaaattcattttgaaatgccctagggggccacacaaatagagtttttcaaggcacgggactacacgattacctctcatacatgcagggctctagccaaagtgaagaataacttcactaccc

SEQ ID NO: 81396 - DNA, 458 bp, Zea mays
tctcctggacaagtgctgcacttaccgctgagtgccattctgtctcatataataacgaaggagcccctggcgccggtggagattaagctgtcagatctatcacatattgcttcagctcttcgaaggctatgtactggataggtccccattgaaagacttcggctgacttcagcacttcaacgaatgagatgttactctctactgatctggatatgaatctgactgagagatgccacccttcctatcaatctttgagcccccttttttgtacttggaggttccattctaagtataacttcaaggttgcttgcattaacctcaattacctttggtgaaactacgcgaccaagaaatgttcccctctttactgtgaatacacatttttgtggattcatctctagaccagcctgtgtaaaattagcgaatgtcttccgtgtatcagcactctgagtatcttg

SEQ ID NO: 81397 - DNA, 461 bp, Zea mays
  unsure (1)..(461): unsure at all n locations
gggtgccgatggagaaacaaanatccttgacatcttggctgtttaactgcttgccgctgtcaactgttagctcggacggtactccgaaacgggaaacgatgttctgccagaagaatatttgggcagactttgatgtgattgtggaaacagccctcgcttcaatccatttggcgaagtattcgacagctacgaaggcgaacttaatgttcccctgagcggtgggcaggggcccgacgatgtccatgccccagcgctggagaggccatgtatgggcaatcagctttgtatattgcgaggggttgcctgaccgatgggagaacttctggcacgcttcgcatgacctcgtgacccgcattgcggcgcagatcatagcgggccagtaaaacccttgtcggatcaccttggcagccagggcccttggtcctgcgtgcgagccgcacgtgccactgtggactacgcgt

SEQ ID NO: 81398 - DNA, 454 bp, Zea mays
tgagcggagagtagagggagaatacgagctacaagatggagatggcaacggctgtagaggagtggctgggcaccgatttcagcagaagagcacgactaggaaaaatcctggcgacggcatcgatcctcatccaagtgcttgagcggcggtggccgggatagagcaaaggcagtgagcggtgggaggatatctgagaaagaaaacgacgatagatttttttgttccaggacacagtgacgcggatcctgataaggctcatgcgaaaaaaatcaagagaggaagactatgggaggataaggagaagatatttctccttttttataatttcttttacagaattttgcagatatttttggatcacaattgtaagcgatgaaacataatggtcaacgccgtatacggctacacatttcagtctaatgatttacgaaccaatcattaccaattacttgtg

SEQ ID NO: 81399 - DNA, 462 bp, Zea mays
agactatccatggatagatcggcgccggatattccattgttaatgaactcgtcagcatcggcgccggcagcagcagcagcagcagcgcagagagcagggagcaacccaagtaggagacgacgacgcagctgcaggtgcatttttcttttatgtctatcgctagactagatgcatgagctagctagggctagcaaatagcaaaaattttgctcagatcaaaggcgaacacccgcatatgattatatatatgttaatgaagtccatgcatcctatatataatacagtagtccatggcgcggagcggagactgtcacacccaagtcgtgcttgccattttaatttggacgtatatgcttagcttgacttggactttagagaccgacgacgacgaggactgtagctatttgggcaacttcgcacgcagacctgagtgccggtcaacattggttgatcgggatgcac

SEQ ID NO: 81400 - DNA, 456 bp, Zea mays
tggcgataagttctataaggacagcaggacagctgatagcgagatcatctaggtcgccagccgccattacttgctgcagatttggcggagagttgaggaaatccaagcatgcatccttcagtccattgcaccggtgcttgtcagcaagctcaagcatatctgccaccgtatccgtgtcgatgtatgagcacatcatgtactcacagatcagtcgaagcctcgggatgtcatatctatctgcagccacaagcaggtcctgccacatatactcttcttcttcttcctcctcctcttcaatgtccggcacatgatcggtgtacatgaaaccgagcaacagcctgaataccttggcgtccatgtcatggatgtgcaccacggtgtctgccgccccctccttcatggagccaaagagctcggccctgaagacagcggagcgggcggcaaacacgcaccggt

SEQ ID NO: 81401 - DNA, 463 bp, Zea mays
  unsure (1)..(463): unsure at all n locations
ntatcaaatggacgtgaaaagtgccttcctcaatggaccaatcaaggaagaggtctatgttgagcaacctcccggctttgaagatagtgagtatcctaaccatgtttataaactctctaaggcgctttatgggctcaagcaagccccaagagcatggtatgaatgccttagagattttcttatcgctaatggcttcaaagtcagaaaggcagatcctactttgtttactaaaactcttgacaatgatttgtttgtatgccaaatttatgttgatgatattatatttgggtctactaacgaatctacttgtgaggaatttagtaggatcatgacacaaaaattcgagatgtctatgatgggggagttgaagtatttcttgggatttcaagtaaagcaactccaagagggcaccttcattagccaaacaaagtatactcaagatattctaagcaagtttgggatg

SEQ ID NO: 81402 - DNA, 455 bp, Zea mays
tggaggcgtcgattggttgtcgactaggtgtagacttctacttcttctcctccgttgctttgaatgcaacgggttgagcttcggatgtggaggcatcatcgagctcgctgatcttcctcgatccttcgatcatgcattcaaaactcacaaaattcccgataacttcctcaggggtcattgtggtatatctaggatcaccacggattaagcgaacttgagtagggttaaggagaacaagtgatcttacaataaccttaaccacctcgtggtgatcccactttacgctcccgagggtgcgcgcttggttcaccaaggtcttgagccgattgtacatgtgttgtggctcctcccctatgcgaatccggaaccgaccgagctccctctcaagcgtttgccgcttggtgatctctgcgagctcatcaccttcatgtgcggtcttgagtaaataacacatc

SEQ ID NO: 81403 - DNA, 411 bp, Zea mays
  unsure (1)..(411): unsure at all n locations
tttacagaagaaggatgagccttctgcatgccanaagtctgctatgccaaaaaggcggcgaattattactggtgatgaagccatttaagaaacactcaccgccggcctcggtgtcaaaaacaccagctggcgaaaatgctacagctaccgaagctgcccccgccgaagctgcaacggccgaagatacaaatctggagggcacattttctaattttgataaaatgcttctgaatatggccgtggaagaagctgctgcagccgccgaagagaccctggccacagtgcctggaaaagggaaggagatcgccggagatacttcagatgaaaaggattttaattttcaaaacataattggtcaagagttatcgaaggctgaaaaagaggagttgagagattatngctatatcctgt

SEQ ID NO: 81404 - DNA, 455 bp, Zea mays
  unsure (1)..(455): unsure at all n locations
tctaaagggagaacacatcttgggactaacaaatgtttatnttgagaaagacaggatttgtagtgcatgccaagcaggaaagcaagttggcactcatcatccgcataagaacataatgacgaccgacaggccactggagctcctacacatggatctattcggcccgatcgcttacataagcatcggcgggagtaagtactgtctagttattgtggatgattattctcgcttcacttgggtattctttttgcaggaaaaatctcaaacccaagagaccttaaagggattcttgagacgggctcaaaatgagttcggcttaaggatcaagaaaattagaagcgataacgggacggagttcaagaattctcaaattgaaggcttccttgaggaggagggcatcaagcatgagttctcttctccctacacgccacaacanaatggtgtagtggagagga

SEQ ID NO: 81405 - DNA, 101 bp, Zea mays
aacacataacactttcattattatttttgtactaactcaacaatcctggctgtttatggctcactctctccccgcgctatggaggaaccgccataacatga

SEQ ID NO: 81406 - DNA, 214 bp, Zea mays
gccactataactgcacctcattcagacaggttcagtttcacatctgttatgaggatggactggaacagtcctcgactatctgctctcacactttatctgggaagacataaaagactcatcttggggagagaaagccaagcaacgaccgcctggcttgttatttaaccatactatgacaagggagactactcaggcttatgttcgtttgcatatc

SEQ ID NO: 81407 - DNA, 270 bp, Zea mays
  unsure (1)..(270): unsure at all n locations
atcattcctcggctttcaaggttgttcctcaacaaggaaatagctctgcatatgacgtggccaaagaatggtgtacgtctcgtcactgatccagacataatggtccatccgtcggacggtgatgcgtggaaggcattttgacgagttgatcctgaatttgaaacgaccctaggagtgtacggcttgttctatcgacggacggattcacacctttcaataccagtgcaagccctttactcgtgtggcctgtcttcattgngccatatatct

SEQ ID NO: 81408 - DNA, 353 bp, Zea mays
  unsure (1)..(353): unsure at all n locations
ctacaccggaataaaagacactcatcgtctgagtgccaatgaagaggaagggtgaataacccgccttatgtctctcacgggacangtattggaaccaacctcgaaacaatcacggtcatcgcatctactgattgattcctttaagtcctgtaatgatagtgtcaagctcgttgtgcacttacagaaacattcgctcattattatgcaccgctagagtagtatattagtgcataccccctagaataccgctgtatgtgggctgctcccgcaaactgtggggtagaaattactgttggccgttagacgactctgtgccttgtcacctaaaagttccacgaattgcttgacctaat

SEQ ID NO: 81409 - DNA, 264 bp, Zea mays
  unsure (1)..(264): unsure at all n locations
tatgtgcaaacataatacatatgncgtttggatgatntgctgggtgctcgtgatggttattgatgtgattattatgtgcaactaataattgatatcatggatatatatatagtgttatgctataatggatatatcttataacgacataactggggcacttctgtggtgctaatgatagataacactcacatggtgtaatcttagacaacaactacggtggcctaaatcatatacacacgtcgcgctaaaatgcgcgtaagctta

SEQ ID NO: 81410 - DNA, 281 bp, Zea mays
  unsure (1)..(281): unsure at all n locations
aacagtgaagaccgtgactattcgaaaccgaccaggagatgaacattgtcaccaacgcgtggtgattaaatatgcgacacatgcactaggattggtgccgaattctggtttcnagtatttcaactatgaagaatggctatgccgaagctanaggagagaagaaagaggggagcttgccnactaccctatcattatanattcaagaaaatatttaaggcaccctaccaagaatggctcgaaacaatcganataatgagtactganattcttggagatactct

SEQ ID NO: 81411 - DNA, 254 bp, Zea mays
aacggtttcactaaaccattattatttacgacaccacacgttaaaaaattgcacgtaccgcagatataaaacggtgatgtgtgaatagataacggactcaatacccgcccatctctgattaaactaaaattactcaaacctcagaagagtcacttcagttatcagcagcataacctcttcattaggacactaacgatttagtttgaaatgcgttattttcctatagtcaatatacttgtgggaaaatttcagac

SEQ ID NO: 81412 - DNA, 335 bp, Zea mays
  unsure (1)..(335): unsure at all n locations
ttacactgggcggtcgcatctttctggtgcatggccaactccaaggtacgcctgcacgtcgtgtacaaaacaatgtttctgaaaaccctgggtgtatggctacgtgcctgagtctcttcttaggtgtcgtttcatcttgatgnggagacgtgaggattatatggagaacctatcttgtggtaccatgctgtttggtcacttccatgtttgtccgaccggctccatacctgcgaacaactgcactttattgttgaaacttgactaactctgaagagctcctgcaggacattgaagcactgcagaattacgtcgaatatgtgtaataaaagctctgt

SEQ ID NO: 81413 - DNA, 227 bp, Zea mays
actagctgtgcgtggaaacaaatctgaatctggtgcaactgctgcgatatctgttctcgacgactcgagcgcaacatgttgcaaaaatttggcagcttgaggatgggaacagctccttaatcttggaagatcacagtcaagcaacttagtcctgacggggccggccacatgcagcccacctggaagcatttggcatacttgatatgcaggtgctgacaggaactttg

SEQ ID NO: 81414 - DNA, 366 bp, Zea mays
  unsure (1)..(366): unsure at all n locations
cgtgagtgcagagtagtaatggtatacaagccagtgtatgcacannactcctccgataagtntaatanacanaagatcctaagtggaggaaccaagtcctccgcacttcagtcttctttttcctcgtttggtaccacctttggagcagaatcaacanaagttngtcgcttccccctaaaacaacanagggataaaccctgagtatggaatactcagcaagtcttacccgactaaggaanagactctcaaggggtatgctggataataggagtcaaggaaaggctntagcannaaatcaacttatacctttgcagaaatagcttactaaagtgagtcctactttcaatctttaacgcatattaagat

SEQ ID NO: 81415 - DNA, 245 bp, Zea mays
  unsure (1)..(245): unsure at all n locations
cagctcatgtgctgtcttttgttctcttaacatactggattatgcttgtaacttctttatgatcttanatntgtgtgctatcctgaatataaacattgcacttttatgctcagatactagtacaatgtatggagaagatgatctgaacatatgctcanagctctcnagataggctgatgggaaaaatgtggatatatatattctgtacgtgttattcgatatacttaatagatatcattcttcta

SEQ ID NO: 81416 - DNA, 194 bp, Zea mays
  unsure (1)..(194): unsure at all n locations
tgtacctgcaaatgagaatangacaacttctcctgtatcttacatgactgataacaatggaggcattatgttgcaagtggactgatcanacaacatggtatgggtatcttgtcatatattcttctctcactataagtgcgcagatgatcttcgcatattgaacctatgatctaatctgacatgttcattctctt

SEQ ID NO: 81417 - DNA, 196 bp, Zea mays
cgtcttactctctgccgttgtcctactgttgtcagtcgctggcggctctttatatttgaccgaatccgtactatcactcgaaatgcaattgtttagactgagaaagccccatccctctatatgaatatatcatgattgcaagcttacagcaaaacctctttgatcacttatgcacagctcatttaccctagctata

SEQ ID NO: 81418 - DNA, 333 bp, Zea mays
actgcaaaaatttcgccccaggaagcccggcttggtagtttacccaaaaaatgcatttggggaacaggctacacagagtgctttccttcaacaagaatccacccacgccatcacaaagctctacgtatatcctatcaaattgaccctatttgtttgagcatccactctgtaactcaccccgcttaagtccactaggtccgcaactccgctcaggaccaataaccttctgcaatcaccttcgcattcactacggtttgtttctccttacttgtaagacattaaggaagtatgatattgtctcgtactaaaagatcagtatcactcacatgtagc

SEQ ID NO: 81419 - DNA, 371 bp, Zea mays
  unsure (1)..(371): unsure at all n locations
gctgccttacttcgatgtgtctcaacaataaagacttcgggactcttaaacatctactattctgatacaaatggaaaccaatattttacttaggaattctttgatacaactatacagagataagcgactctcttgctgataggaggacactggagtgctcgtctcaggttatttaccaagctaagtgtaagaatcctcngctggtgattccttgattagcgtcttgaacatttcccaggtttatgccaagactcgatcgcgatggtaaaggcacgtgccaatgcataacaaacactttctaccagtatcacattgctgcaagggctgctgtggcttcacgccagaactaatggatgtggaattttatgtgg

SEQ ID NO: 81420 - DNA, 320 bp, Zea mays
ttcataactgggtacacttcgacctctcgataatctacgtcacgacgctggagtttgactacgctacgcaggtgacttaagggctcacaccctgggatccagcttgcacgttcatcaacatgggcaaccgccaatatcactaggctataccctagggcgaccattataaaaccgcgcctaacagctgtaagccttacgacaatccatctcagagggagtcgaaatcataccgggcctactaagctatttactacggttagtctaaagtcaaaagccgtataatcgacagatgagcacatttgtttctgtgatctaccacg

SEQ ID NO: 81421 - DNA, 385 bp, Zea mays
  unsure (1)..(385): unsure at all n locations
tgctgtggtacttacantacccgctgttattaggctgangtagaagtaatcgcagaatttacactgcaacagtgttaacccgtgcgcgggacgcaaaccaatataccctgaggacgaccgtccctcgaactgatgtcttgaacagctagaagtgtttcgacttcgctctaacctaaacttttacgatagctgtcaaaaattacacgaaggtctgggactctctcgcaagctgagaaacacttgtgactctgctatacgagtcttatactcgatgcacgctaagtaagactatccatgtagatgtgactttacgctatgatctaagtggtttcttatgacaatctactgactctgatgacctctgatgctgcagagtaagtattgt

SEQ ID NO: 81422 - DNA, 202 bp, Zea mays
  unsure (1)..(202): unsure at all n locations
ctcggtgtagaggtggcgccttgctccaacgtgacaatatgttntgagtctctgatcataagttcanagctcacaaactcgccaatcacttccttgcgagacatctgtntatatctaggatccccacgtattaattaaacttgagtatgactaccgaaaatgagggatcttagaataaccttgaccatctcatgaatcttcc

SEQ ID NO: 81423 - DNA, 190 bp, Zea mays
cctactgagctacttttttataacgactagagccctcttttttacaagaaaatctacacttaacagaacaccctcttaaactccattatgtgccatccccacagaaaattaaaacagccaaaataaaccatgttgtagactggtggatcttaacttgaaaggatcttgcttttctcaccacttttacaac

SEQ ID NO: 81424 - DNA, 60 bp, Zea mays
agaatcataacagaaactactgagctgatatactagtcggtttcagagtgttagtccaat

SEQ ID NO: 81425 - DNA, 163 bp, Zea mays
tatggattcatgtcacaatgtaacacaactgctagtctagtgtgtgatgaacccaagtactgactgggacttgccaatgctcatctgtttctcgaaccacaaaggatggacatatgaactatttctgcttgcattgtgaagcctacaaatatgcactgactac

SEQ ID NO: 81426 - DNA, 266 bp, Zea mays
  unsure (1)..(266): unsure at all n locations
tggatatgatggacctttcaagaaagctcaaggaggatacactcatgtatnggtagcaatcgacanattcactatatggatagagttcaagcccattgcctctntgacctcagctaagggccgtggaattcatacaagacataatatnntagattcgggataccaaacagcatcataactgacctangatccaacttcacaagttcagaagtcttcgacttctgcgagcaaaaaagcattcagatcaaagtatgcttctgagcaca

SEQ ID NO: 81427 - DNA, 338 bp, Zea mays
  unsure (1)..(338): unsure at all n locations
gaactgggagcttatatccaaagtagcacatcaaccgggtcttttgccttcgacccgctttactagagaaagaggctgtatagtgtatttccgctatggttatttgagaaattgaccatgactagcgctcatgaagtaatgatgactcaggagatatagacacatggtcaatcagacttaatgagagtctgagagggatcaccaatctcgtctcnaccacaaagtggaaagaacagcctatactgcagcatctgaagtaacacaccttgtgagcaatcgtgcgctcacggactacctctaaatcatactgtacgacacagtgattgattgagatgtct

SEQ ID NO: 81428 - DNA, 106 bp, Zea mays
  unsure (1)..(106): unsure at all n locations
atacactgtcacacatgggtgttatgggtcgtgcacgcttctggtactnnttgagcttgcgttgctgtgcaccaatatatcccatgtactagtgcagcagcagcag

SEQ ID NO: 81429 - DNA, 239 bp, Zea mays
  unsure (1)..(239): unsure at all n locations
gaagatagtgagtcccctaatcatgtatataaactctctaaggcgctntatgggctcaagcaagccccaagagcatggtatgaatgccttagagatntccttattgctaatggcttcaagtcggaaaggccgacctactctattcactnaaactctttgaaatgactnngttgatgccanattatgttgatgatatatattggtcactaacgagctacttgtgaaaattagtagatcat

SEQ ID NO: 81430 - DNA, 355 bp, Zea mays
  unsure (1)..(355): unsure at all n locations
gacaagaacgnaaganngaccaaaggcaatatacattaacatgagccggaaacgagaacggaaactaacgccnaacacacccaaacacgcactggaaccccgacaacagaccctgcaaccacaaacaaccccacgagaagaccaagaacaaggaaagcagcccagacaaacaggcgacgcaaggacagctgggacatggggacacgacgagaccaagcctcctggccccccacccccgcaacagggaccaacacaagacagagcgaacaaacagccgaagcagcggaaaccaaaatgaatccagaaccgccaacccagcacacgaactaaaccgggccccacgggaaccaaccgg

SEQ ID NO: 81431 - DNA, 176 bp, Zea mays
cttatcaattgcagatactgacttaccacctaatgtatgatatacttcttagacggcactcatatagaacgtgagccttgtatggacgagcatgattatgaaacaaaaattgaagagtcggatatttacaacctgaaactgatctccatgaagtgaggacggtttatgagaatttt

SEQ ID NO: 81432 - DNA, 71 bp, Zea mays
acattgcgagcgaacgtgccctaacagactatgctctaaatattacttacgacaaccaggtatttgttgac

SEQ ID NO: 81433 - DNA, 102 bp, Zea mays
  unsure (1)..(102): unsure at all n locations
acaagtgggaggagcacatcacaacaagaatgtgatgaacacgtcaagacctctggangctgctgcatatggacctcttcgactcagtccctatctgagcat

SEQ ID NO: 81434 - DNA, 176 bp, Zea mays
  unsure (1)..(176): unsure at all n locations
aacatatacctgtcaatctaatgattgactgacaatgttatactattaagaagaatgaacttcactacagcctgacattatggctggccttaccttntaacacactcngcactatcatcactataatatgcaacggaacagtacataacacgaatacaatatatattctagatatg

SEQ ID NO: 81435 - DNA, 218 bp, Zea mays
  unsure (1)..(218): unsure at all n locations
acgcatcngccatgcagaactgtgtcctctagcagacgtgcgcgacttctggcgcgtgggcatgaacgaccacgacacacgcacatcattcgacgtgggctanctggcacgtgcgtagaagcacatctgcgatcggagcttatcttgctatgatcacagtccgcatcatgaacattatacataccgatctatatcgtacaggagaaatccaagtctct

SEQ ID NO: 81436 - DNA, 132 bp, Zea mays
tcactgctttcgatgctacaccttatctatgttgaatggcaacgttctaatattgggtaatccactaaatgctacattgccaataaatcacgtcaagtcccaatataaaacagtagtaaaaagcaaactaaa

SEQ ID NO: 81437 - DNA, 100 bp, Zea mays
acatcgcacccggatgggttgtcacgctacatctaactgggtctggtctcattccacaaggacccacctctttagtaggaggatcgcccgcaaattgttc

SEQ ID NO: 81438 - DNA, 116 bp, Zea mays
cactatgacatctctgcctatcttgactgttgcaggaggggaacgaatactctctatgtacatgggaatgctactcaagggatttatgagtacaagagtacactgttaagtgcatt

SEQ ID NO: 81439 - DNA, 276 bp, Zea mays
  unsure (1)..(276): unsure at all n locations
gctctctgacagtgcgactaccgtgaggcnagctgcactatacacagagagccctagcgtggtggagtagcgtcgtaggctatcaatattgttcactcttcaagctcttgtgactggcccatgaaactcgtgattaccttcaaaaggaatttctctgtgacaaataactggaaatgcagctctgcatcgtaccccttttgctggggtcttcagaacttcattttgatacctatccttatgactagcgcaagattcctcttctcaaacccttctgat

SEQ ID NO: 81440 - DNA, 243 bp, Zea mays
  unsure (1)..(243): unsure at all n locations
atgcattaaccggctttctttgaaataactnataagttgccgctaataaccctaaagctaggaacatacttctttaagacaacacattacattgaataacagtatatccatattgataattgataaccgatagcaaatatatccaagagactctactataaacacattagagatagagtgctcattagagantggcatnttacctaacccttttacctttgctttgatcccatcaccgaatat

SEQ ID NO: 81441 - DNA, 202 bp, Zea mays
  unsure (1)..(202): unsure at all n locations
cccggggaaaccctganatcataccctangggcttatgtgtaaaagtgatgaaccttnggactagagtgtaaaactactatgttaaacatataaagtcatttggtcacaaatatgtggacttganagctaaaccctaagttttgactcatttgcaaaaggaccttgatttgattcctatgctaagtctgaaatcannggtat

SEQ ID NO: 81442 - DNA, 56 bp, Zea mays
agaaccttgactacagtattaaaaagattgatcttatcggacagtggtatatccca

SEQ ID NO: 81443 - DNA, 447 bp, Zea mays
  unsure (1)..(447): unsure at all n locations
taatcagaacctgtgcttttgtagcagactggagacaatanatcacctggttttcangtgtacttatgcgtctttcatctggcgtntggttcagataagcacagggttgagaaccacctcggatgcaaacgaatntgtttggggactgtgcannggtgctatcagtcanatcaccgtcgttactactaactgcgcatctgcattcctggctattggtagcangatatgtacttcataatctttctaatctgctgagtacttaggcacaattgtgcctttggccactcgctagatgagacagagtataatctctgccagatgaatgcctctaagttttccattcgatggactgctgcatacgtgagccttgctgcataggctggcggattttgcagagagtgttatgaactgcgactttagtagcgcttgtcttaanaactgatatta

SEQ ID NO: 81444 - DNA, 303 bp, Zea mays
  unsure (1)..(303): unsure at all n locations
gccttgagggcgctatcacaaagccggctgtgccgattacggcatcccatagctacgnggccgagtcgcacaggttcagcttgccatgcggaattgtggatagatgcctgcatcgatgctgcggctcaggatggtcgcacacagtcggctctaccagtgtggatggatcacaatagcacccacctacacgggcgatcagtgcgcagatgccgcgattgttcccatagaagtgtccggctgaaatgctggtaactgaaccatcgcgccattgcacaatacacttagcaacgcgactgtggccgc

SEQ ID NO: 81445 - DNA, 106 bp, Zea mays
  unsure (1)..(106): unsure at all n locations
cgatcgaggcgaagtctacaacaacgcttggaacatccaacagctacgtcgcttctacccttaaaatgtntcaagtcattcatgtatcttgctttctttacgtgta

SEQ ID NO: 81446 - DNA, 196 bp, Zea mays
  unsure (1)..(196): unsure at all n locations
aaacatgtgtcgagctcagctctatcagaatctactaagtatagctgaccctctaacacacccttaaatgctattgaatcatcacttcttctanagacagtgacacctatatcagtataaagaccagtgtagcccatttgacataaatgggagacagaaagcangttgtaatctaatgaatcaacaagaaaaacat

SEQ ID NO: 81447 - DNA, 343 bp, Zea mays
  unsure (1)..(343): unsure at all n locations
ctttataaagtctatgtgttgtctaataaatagggtgatagagataagacgataggaacgacgtnttcgcgacagagaacaacaagagaaaaatgagacttgtgcctttgccggatgctggaggaaagaagaaaaaagcctgggactgactccaccacaatgtttttcttttcaatttatttctttcttctaaatggattttataaaagtaaatatttactataattcatttaataatagagcattagaatataatgcttacaaaaaatataaatgtttgactttaccaaaacctaatgttcacatattacatatactatcgattttcaatcataatgataat

SEQ ID NO: 81448 - DNA, 175 bp, Zea mays
acagtctcaaatgaatctctagtggaacccgagtgagctgctagcctctatcagatatgcggatatgcctatctttagtggctgatggtctgataacaagcagaaccacagcttcgcagtagcctctctctttagcaatcaacttcagtagcacacacctgctcagcacttctga

SEQ ID NO: 81449 - DNA, 241 bp, Zea mays
  unsure (1)..(241): unsure at all n locations
atgtgttagagattctaacgctcacacaatntcgaaggatttgcagaagagctgggcgaagaatccctgagaaaaatcttgaccatgagtaagaaagttatcccacanatggcttnaagtttttctttacttcctgcagtnntttaattcatattatctttatgtcacgcgggtgatatgggtaggagatctgaactaccgaatttccttgagctatgaagataccanaanacttctgact

SEQ ID NO: 81450 - DNA, 294 bp, Zea mays
  unsure (1)..(294): unsure at all n locations
tcaactctgagagcactagccanacatgctcanggacatagcctcgaaccatcgcaggaagagtccgttcaatccatatgtggaagtcatgacttttcatccctaagactcgcatagtagataagttcacccccctactganggtagctgcatacctnatagggaacatcaacatcttgatccactaaagtacttcctttctctgggccctgcttangacataatcgcgcttaaagccttctccatgtnttccaccactangcggcttcatctctttggttggtctatcacata

SEQ ID NO: 81451 - DNA, 174 bp, Zea mays
  unsure (1)..(174): unsure at all n locations
cgtgcaattcgaaaagatagaccttgtgtttnttgtaagcanngtaacaagtgggaggagcacatcacagcaagaatgtgatgaccacctcaagacctctggagctgctgcatatggacctcttctgacccgtcgcttatctaagcatangaggaagtaagtatggtctagtta

SEQ ID NO: 81452 - DNA, 298 bp, Zea mays
aaactagctgattacatgggcctctcttctgatagagcatatttacagatgtggttcatatattcaggggggaagcatgaccatgcatgaaatgacaatctgacatttgctgcaaaatcgagtgcatcaagagatcaaagctgcgtgcctctcacaatgaaggctgttactcttattaatattaatatattgctcttatatatttaagctttgctatgctgaaacatgtcatgttagcagacacacatctgcatgaatctggcaactcagtcatcatttgccactgacaacaccttaa

SEQ ID NO: 81453 - DNA, 191 bp, Zea mays
  unsure (1)..(191): unsure at all n locations
ttcaccaaatccaaccttcacttgngagatcccttggcacaagtcgagctttgntccttgtcaccacaccatgctcatcttgcttgtgcagaagacccattggttcctacaacattntgattangatgtggaactaaatgccatacctcatntctagtcgaagtgtgagctcctcttgcatcgcaccaccc

SEQ ID NO: 81454 - DNA, 407 bp, Zea mays
tatcacagtgcctgtagccgtgcgacgtggccggactgtctgtgtagccgaggaaactctagtgacctctgttatgccacgccatggctcgctactatgcggaagtaaccatggcacacttagaattacaatccttgagccggtgcactggtgaacgccacgatgaagccaccagtattctcccctctctccggatgccagcgcaccatctcaaattcacgggccacctccctcgggccctataaattgagcatgccatcggctccgctaggtagtcacgcacccaatacacgagcccgtgcctcggatcgtcccccaaaacgcccaaatttgagatttcccccaaatcggtcaagaacaccgcgtgtttgagctcaccgcggtcagcccttcacaggtccgatcac

SEQ ID NO: 81455 - DNA, 407 bp, Zea mays
tggccaaatagtttgttaaaactccaaacaagccattcatgtggaggttcaatggggaaatctgaaatttagatttctgaattttcagcctttgaaccaaaaccgagcgcgttcacctttatccttaactctaatcctaatgcccccattgacaaaacgtgtctaactaacccctctgtcacatgtcagaagatgacatcgggacgcgagccctagacacgacaaaacctaagatttgcctcgggctcgggctgggagacagaccacacttcagagctccaaatctttgaatccactaggccaaatcctatgacccccacacaagaacggtagcttatatggaggagaagaggttttgtgcactgaccaaggcaagagcaggctcggatgaatgaccacacgcgcca

SEQ ID NO: 81456 - DNA, 353 bp, Zea mays
actccgtccgagctgttcggatgagtacgaagtccccctcgctgaactccctcgggatgactgcacggtcgcgccatgctttggtctgggcctgatatttgttcagggcctgtaaggcgaaaacccggtctccgtcaatgagatcttttgaagttggctcatccacgtcggggacggctaacggaactgtacgcggggacccatgctttatttcttgcggggtcattgcctccgatccgtatagaaggcggaaaggagtgaacccggtcgctctgcactcggttgtggttagcgcccagactgcctctggtaataaatcggtccacctgccttttctttcatcgaggagcatc

SEQ ID NO: 81457 - DNA, 413 bp, Zea mays
ggaccttaaaactaagctgttgagacatgcgcaaaacaggactatctaccttaatttgggggccacatggccacaggttttgccacaacatgttaaacccctacataacacttgtcaattaacatgcaattaatctatcttgtgtatatctgtgtaaagctttgctccacagggattggaccctggatccgccactgcaaagaaaaaaagggtgctaggtagcacatggctaatccttactattaatacatgactccagagcttcatttatattggaaaccctaaccctagaataggttggggtgatatatttataggcttggagttgggccatgcccattacagagggggcgagagggtaattacacagagagagttccaaacctaacgggtattctaatcccccccccagt

SEQ ID NO: 81458 - DNA, 408 bp, Zea mays
tggtagtctgtacaaggatatgaaagaattcacacttgctataatgcagtatgcaattaacaatgagttcgagttaggaattgagtccaactcaccttttagatatcgaggctattgtaagggtagtgattgcacatggggaatcaatacaagactagaaactgtcgggtctcccactatcgtagtgagtaatattttagtacacattctttgtattttggagtgtggatgaaattatctatggtcctaaaaagttgtactagaactaatagttaagtgctaaaattagccgaagtcatccaaacagctcaactaatagctcatttgttagctgcttttaggtggatgcatttaaacaccctaactaatagtctagctaacttttagttgtactctcaactactcatt

SEQ ID NO: 81459 - DNA, 407 bp, Zea mays
  unsure (1)..(407): unsure at all n locations
nggtgccaatggagaagcaaaaatccttgtagtcttggctgtcgaactgtttgccgttgtcaactgttagttcggacggtactccgaagcggcaaacaatattttgccaaaagaatttctgtgcagtctttgatgttattgtggaaacaaccctcgcctcgatccatttggtaaagtactcgacagcgacgaaggtgaacttgaggttcccctgagccgtgggcaggggcccgacgatgtccaggccccagcgctggagaggccatgtgtgggcgaacagttttgtgaattgcgaggggctgcctgatcggggagaaaacttctggcaggcttcacaggaccttgtgacccgatttgcggcgcagatcattgcggtccagtagaaaccttggcggatcacctttgcg

SEQ ID NO: 81460 - DNA, 405 bp, Zea mays
tcggccttcggaggccgaaggttgagatgaatgaatccgtcgaagagtgccagagagccttcggcgttgtctgctcttttataggaacaagagacttagtacaagagcatatcgccttcagggtgtggccgcttgcggagaaatgggaaatgccacaagaaaccattaaagaggccgacgaaggtggacttgtcaggcttaagtacacttttaaatttggagataaatttattgagccagatgatgagtggttgaaaagcattgacaatttaagtgatgagctgcttgggacctactcgaaggccgaagataatgcaatgtcggcagccttcggaggccgaaaaaagaagagactgaatcgggtatttgatgccatcgggtttgtctaccctgactattgctatc

SEQ ID NO: 81461 - DNA, 404 bp, Zea mays
tgtgaaggttcttcatccccacatgtgctaagcggcgatgccacagccagcccatgctagtcttagcaattaagcatgcatctagaccggcctcctcttttgcaaaatcaaccaaataaagtttgtcgtctagtacacccttaaaagctagtgaaccatcacatcttctaaagacagacacatctacatttgtaaatagacaattatatcccatattacataattgactgacagatagtaaattatatccaagagactcaactaaaaacacattagagatagagtgctcattagatattgcaatcttgcctaaacctttcaccttgacttggttcccatcaccgaatatgattgtatcttgggaatccttattcttgacgtaggaggtgaacatcttcttttcg

SEQ ID NO: 81462 - DNA, 404 bp, Zea mays
tcctaggaatggcagggtattaccgccgcttcatcttaggattctccagcatagcaagaccaatgacagaacttctcaagaaagaccataaatttgtgtggaccccaaaatgtgaagggagtttccaggtcataaaggagaaactcacaacagcacccgttctgtcactgccagatattcatcaagattttgtcgtcttctgtgatgcctcgaggcaaggcttatggtgtgtgctaatgcaaaacgagaaagtcattgcttacgcatcacgcctactcaagccgcacgaatagaattaccccacccatgatttggaattggcagccatagtgcatgccttgaagatatggaggcattacctaatcggaaacaaatgccacattttcaccgatcacaaagtctga

SEQ ID NO: 81463 - DNA, 401 bp, Zea mays
tctaaagggagaacacattttgggactaacatatgttcattttgagaaagacaagatctgtagcgcatgtcaagcaggaaagcaagttggctcccaccatggatttatttggcccgatcgcttacataagcatcgacgggagtaagtattgtcttgtaattgtggatgattattctcgcttcacttgggtattctttttgtaggaaaaatctcagacccaagagatcttaaagggattcttaagacgagctcaaaatgagtttggattaaggatcaaaaagataagaagcgataatgggacggagttcaagaactcacaaatagaaggatttcttgaggatgagggcatcaagcatgagttctcctctccctacacacctcaacaaaatggtgtagtggag

SEQ ID NO: 81464 - DNA, 398 bp, Zea mays
gtgttcagacaagtgtagtctacacacatccgccatttccctcctttctttctcacaagcacagggttggcaagccattcgggatggaatacctctttgatgaaccctgctgccatcagcttgtggatctcctcgcctatggctctacgcttttcttcgtcgaatcggcgcagaggctgcttcatgggtcgggctccagctcggatatccagtgagtgctcggcgacctccctcggtatgccaggcatgtctgagggactccacgcaaagacttctgcgtttgcgcggagaaagtcgacgagcatcgcttcctatttggggtcgagctcggagccgatccggatctgcttggaggcgtcgttgctgggtcaagagggacagacttaaccgtctctgct

SEQ ID NO: 81465 - DNA, 411 bp, Zea mays
ttgaaccaagagccttaagagatcaaccaccgttctcttaagtttgtggcctataagaagcatttgtttcttgaaggcctaattgtagttggaggtcgtgggcgagatgttttcaaatatccaaccattcatgcattttcatatgcaccacaacatactaatgatagtttccagtctccatttgttatttagttgttgcttcacccacaggatggccgactgcatgttggaggtgtttggggggggggataataccaactatactctagcaacttttcgcaaagttgcattcgaggaagagatgggctagagtttcatctctttggaggacgcaattctcacacgtgtaagatacaagctccatgcgccatttctctagcattgaccttgtgtttaacttcccttgcagag

SEQ ID NO: 81466 - DNA, 407 bp, Zea mays
cggtctataaggaaggaaataaaagtagtttatgattaagggtctgtttggtatcttggtaaatattattgtagccgtgaataagtttcaaatgtattttctggccgccgtcttttttgtgcacaacaatgccactgaaattactagatatctcataaataccattcaattcaatggcacacaagagtataaaatccaatgacatagggtataagaattttgaactaaacaccagtcttccaaaatagatcataatgagttaatccatacatccttccaaccaaaatgaacttggttcacctgtgaaaaaaaaaacatatagttttgcatcctcccattatattaagcgcgtaacaaaattaccagatgtatgtacgatagagtgatagaccattcaatgcacgtac

SEQ ID NO: 81467 - DNA, 407 bp, Zea mays
  unsure (1)..(407): unsure at all n locations
tggatattcttcatcagaacactatggatatcgntgtgattaatgaaaattcttcttcacgaagcatgaaaagaagggaaggtgttttttcgtcaaagactcaaaaacggtacgtatgtaaattctatgcatcgtaaagaattgaaccataaaaaacaagtatattacattcagggttacaagatattacgcatattacatttcagatgtttctacaatagcacctagtcttccctaagtactacttctgcagcttcgttcaggagttgattgacaacttgatccatgatagcttcagccatctttttaatttcatcatcatctttcgggtgagggcccggaggcgcttcagtaggatctgagggaggacaggatacggctacattgctattatcaattgcgaacga

SEQ ID NO: 81468 - DNA, 407 bp, Zea mays
tacaacataattgttccttcttcacaacctctgaaggatattatgaggaaccgagaagctactggaaggattggaaaatgggctgcggagctcaacgaattttgtattgaatatgttcatagatcttcgattcagtcccaggcgttagcagatttcattgctgactggacgccaggggctcaggaggaagaaacaaataaagacgccgaagcatgggcagtgttttgcgatgggtcttggggaaccttcggagcgggagcggctgctgtgttggtttcaccttccaaagttaaaactttctatgcggcaaaacttgattttagttgcacaaataacattgccgagtacgaagccctgcttctgggtcttcggaagctaaaagcaatgggaatcagaagggccatact

SEQ ID NO: 81469 - DNA, 407 bp, Zea mays
tcacaatgcttacaacggtccaactagtcatcctcctcttataatagcatgcaactgttgggacacacgtcgatcttctcatatgtgatcccaagaccagccaacatcttctttgcgaagcacatattctttggcaacttatgattctccgggagaacctcgcccataagttggacgatgtcgttgtaagcactgtttgatatgttgtgcttcgactttatcgccattagtcttgtgagagtcccaagaactgacatcttgatgtgctcgtgcatgatctcttcttccgcggcgagtagccggaagaattcctgagcatcacgtggaagctgccccggctcctcaacgttcatttcaacatccctaccaagatcatgcaacatgtgggtcatcctatcatgatcggc

SEQ ID NO: 81470 - DNA, 402 bp, Zea mays
  unsure (1)..(402): unsure at all n locations
tgtcgcgcgggagctagaggccgctcaactggctgtttaagctntagaggacagctgcaccgtcttgaaggctcaacacgacaaagctatgaataaaaccgttcgcgctggacagatcctgatgaggaggtccggcgtcgcggtgcctgacgatattgttgctgatgtcaaggccgcgctcgatgctgcaagtcgtccttcttattccgttgcacctgtgaaagacattgccagtaaagatgtttcgatgcagtgatgtcctgcaaagcactcttttttattgagttagcatcttttttagaagatgaaatatgaattctatgtgcatgtgacagttgtgttagaactcgaatattttgtgaacagggtgctagaacacggccctagcgccagcaagtaaaa

SEQ ID NO: 81471 - DNA, 403 bp, Zea mays
  unsure (1)..(403): unsure at all n locations
tatcaaatntcaaagactcatttttgcagaaaagcttactagtagtggatccttatgccaaaattttacatcacaagttaagtacttttcctgaatctagattttcctaatctagagcattcacttgtcctatactacctttcttttaaaatcaaaattttgtttcgcttgttatctacgatgaagggcagcgatccagtcttcatatctgagaagtaacggcgatccgaatcgattaatacccagctggggatctccaaccacacgacatatgtagcacttaacccttgcatatgtcaaccattcccacggatcctccactacatgaaccggtccgcgctacccgggagcatattaccctaccatccagcctcttaccaggagggtaactgctactcccacc

SEQ ID NO: 81472 - DNA, 369 bp, Zea mays
gatgttattctctacttgtcggtacatctacctgatgaggcaatacttagaggaccagtccaatatggatggatgtaccctgtagaaagaaggttatacactttggaacattctgtgaggaacatggcacgacctgagggttcaattgcagaagcatatgttgctaatcaatgtttgcatgcatgttcgaggtattttgacgatcttgagacaagacacaattacgagggaaggaatagagagcatgttgatatgagtaagggtgacttatctgttttccagcatggagtagaattacttggagccccaaggattacttatttagataaggattatgataagatggtttggtatgtgcttagcaattgt

SEQ ID NO: 81473 - DNA, 404 bp, Zea mays
tgacaatgaggaaatggcgctcgtcatcaagagctttcgtcaaatcctcaagcaaaggagagggaaagactacaagtcccgctccaagaaagtgtgctacaagtgtggtaagcccggtcactttattgcaaaatgtccattatcaagtgacagtgacagggacaacgacaagaagggcaagaggagagaaaagaagaaatactacaagaagaagggcggcgatgcccatgtttgtcgggagtgggactccgacgaaagttcaagcgactcctccgacgacgaggacgccgccaacatcgccgtcaccaagggactcctcttccccaacgtcggccacaaatgcctcatggcaaaggacggcaaaaaaaaggtaaaatcaagatccttcactaaatatgaaacat

SEQ ID NO: 81474 - DNA, 391 bp, Zea mays
  unsure (1)..(391): unsure at all n locations
ttgtgtggagttgggagaggatttgatctctttggtgtgtcctgtattgaatgctatagctcttgtaaggtgtagaagtgtagaaacttggatgccattgaatgtggggtggnnnntnnnntttnnnttctntttttttatttcactttttctgttttaaaattttcggttatatcttcttatttcttttttccttttcatttttattctctttctactcctcctttttctctctatctccttatatttctattttttttctctttgtctatcatttccatttttcgttttctttctcttatctttttttcttttctctcatttcttattacttttttctcttctctttttttcttcttttctatttttctatttctctctttttttttac

SEQ ID NO: 81475 - DNA, 397 bp, Zea mays
ttctctatttctcccatggggcacgtggcacaatattttcttactgaactatgactttttatatttttatctaaagctacactcacttaaatattctaagaaaatagggtttcttgttattttacatttttatatccttttccattttctaaaagaataggcagaaacataaatcaattgtaaatatctactttattgggtgaactaggatgttcaacatttttatatgggtcctctgttcattatgcatcaactaaatttttcttaaccatagcataaaagttctactatttttccttttattttcatactttaaacaatatcctaaattaaacaaaaactttcagaagtagtactggactagggtggttctcaattttcactctaaagtttacct

SEQ ID NO: 81476 - DNA, 405 bp, Zea mays
gtgacactgtatactactccatctaggtgccgatggagaaatggacttgcctgccctcactgcagacggactgactgcctttggctactatgagctaccactggactccgaatcggcactcaattttttgccagactaactgctgggaactctcttgcgatactgtggattctgacattgcctcggtccactaggcaaaggactcatatgtgacgaaggtgaactggaggttacgttgagtctcggggaggggaccaaacacatctaacccacagcgttgaactggccatgcttgggctatctaccttgccaactgcgaacggctgcctgaaccgagagacaacttatggtaggcttcttacgacctacggagtctatgcatggcacatagtatatcactcctgc

SEQ ID NO: 81477 - DNA, 405 bp, Zea mays
tgagctgtggtgagatccacatggagctgacggttgcgcttctctgtatcttctgccgggcaatcatctgacggtggtgccgagccaagaaatcatactatgcatccagggtgagtaggtatgcagtgaggtacacgactgtggggtcgtcctcaagcagttgctactcttccaatgcacgcatcctgaccaaccaaactggacggtttctctgaaagggtgaaaagaatttgagcggggtgtcgaccacttcttcataaatttgacacagggtcatcaatgccttgcgggcgacgacttggcaggtgtctttgaatctgtgcctagcagcagtgacactccattccacatggtgcaaactggatccaatgtatacagtcacgacacacttctctgtgccatgct

SEQ ID NO: 81478 - DNA, 387 bp, Zea mays
tgcgcatctcgcatggatccgtctgtggcggctgccctggtcatctccctacataagggaagtgggtccccttcccctggactctacggttccatccaatccactgttccagcgagaaatccttcgatctgctcgattccgggtgtctggtctcgtccgtatcgtcatctgtctgttgttctcggtggtggtggtgtggtgctgttgatgctccatgccttagtgctgctcgttggatctctggtctctgtccaccgtggcatggtgcttgggctccctgctgcacggtgttcctcttctcgggctggtgtcgtggacgtctccttcggctcccgcagcggctctagtatctccgtcaacctcccgccgtgcatgccctgacgtggg

SEQ ID NO: 81479 - DNA, 408 bp, Zea mays
  unsure (1)..(408): unsure at all n locations
tgtgaacagtacaagtacagaagagagaaggctgcttctgctgatcaaccaanacccatgcttctatgtgaagacatagcagagcagaaggtagtgctggggtctcagctatctgaagagcaggagaaaactttgataaggtttttattcaacaacaaagatgtttttgcttggttggccaatgatctctgtggtttcaacagagacgtcattgaacattcactcaatgtcgacccatcctttatgccaagaaagcaaaagcttcggaaaatgtctgatgataaagccgaaggtgctcggaatgaagtaaacagacttctcagtgctggtgttatcagagaggtaaaatatccagagtggctagcaaatactgttatggtgaagaaggccaatggcaaatggagaatg

SEQ ID NO: 81480 - DNA, 411 bp, Zea mays
tcttgtaactactggaaagtatcagtgatatatgatatatgtcgatagtatttttgccaacaattgacaaatatatgcacattctaaggcattaaccaatcttgtgtatgtttttaggtactggtacaatgattttttatgagtcatacatatgatttttatggcatatataatattaaagttcaaccaatgattgtttttattgaattgtttcacccgattccaatataaaattataacgattaacaaacaattttacgattcacaccagcatagcttacacgtatccacaacaacatccgctaattgtaactaccataaaaagatctcctacatctatgcgcttgcacgatctgccgatctgtgagaactgacgtgggtgggggaccgtgggagcgcacatgccgtcta

SEQ ID NO: 81481 - DNA, 401 bp, Zea mays
tgtgaaggtacttcatccacacatgtgctaatctgttatgccacagccagcccatgctagtcttagcaattaagcatgcatctagaccggcctcctctgttgcaaaatcaactaaataaagtgtgccgcctaatacacccttaaaagctaatgaaccatcacttcttctaaagacagacacatctacattggtaaatagacaattatatcccatattacataattgactaacagatagtaaattatatccaagagactcaactaaaaacacattagagatagagtgttcatttgatattgcaatcttgcctaagcctttcaccttgccttggttcccatcaccgaatatgattgaatcttgggaatccttattcttgatgtatgaggtgaacatcttcttc

SEQ ID NO: 81482 - DNA, 403 bp, Zea mays
tggcatgagggcggaggagagagagagatagaaacgccaccatgcggatcttcttcgagcgctgattgctcgggttcgggtgggggatctgtgttgttcatcggtgctcaccagggggagctcgcggcatggctgccattgccgctgggcataggaattggtccggcctatgcctcaatcgcaggtaagtgcacgttcctgctattctcctccctccacttcgtgtagggtctgtccagagtaggaaccgggcgccaaaaccagacggtggcggctcgtcgatgtgaaggccaccgaactaggatgcgccactgtgttcctggcgtccggagaaagaagacggagcgggagcccttgatccgtgaatgaacggtcctgttttgaccaggctgatacctcgttc

SEQ ID NO: 81483 - DNA, 403 bp, Zea mays
  unsure (1)..(403): unsure at all n locations
ntatttcagtgtacccaggaccacgaagaatacctccaggcgtacgtccgaaggtttctacgtctgagggcacaagcgccaacagtgcccaatgaaattgtcattgaggccatgattaaggggcttcggccgggaccttcagcgcagtactttgccaggaagccaccacaaacgttggagaagctgctccaaaagatggacgaatacattcgagctgataatgacttccgccaaagaagggaggaagcattcaggttctctgaaatgaccaggggcttcggaggaagatttcacccgaggcacgtcaggtcaattcataactctgctcaaactgatgatcgagggagccagcagcaaaggccacaatattcttcacaagcttcgggtcagcagcaaagttctt

SEQ ID NO: 81484 - DNA, 402 bp, Zea mays
ttgggtacacatttgaactttagctcggcttatcactcacagacggacggtcagactgagagaaccaatcagatccttgaagatatgctgagagcttgtgcgttgcatgacaagtcaggatgggacaaaaggttaccttatgtagaattcttctacaacaatagttaccaagccagcttgaagatgtcaccgtttcatgcactctatggatggagttgtatgactccggtgcattgggaccagcctggagagagacaggtgtttggcccccacatcttgcttgaagccgaagagaatatcaaaatggttcgggagaatctgaagatagcgcaatcaagacagcgaagctatgctgacagaaagagaatggaatcgagtttcgaagtgggagactacgtctat

SEQ ID NO: 81485 - DNA, 404 bp, Zea mays
cttcacaaaggtgaacgataatagagatttggataatggaattacggttcaaatgagtcaggttgatgtgataaaaatcaaggaggccacggaaaaaaggagatattggaaagccaatgccgcgaataatgaaaggagtgtaaactactgactcgtgggtatcttctgttgggacagtggtcccgtggcaagcccaccaagaacagagttcccgcggaggaagaaccccgatggagacaaggcggagaagctcagcttcagaaattacagacatgtggttacctgcgaaaggtaactggctgttggggtcgattgcggagatcacttgcacagacgagttcgcaatttttctcttgggcgccatcttgcttctcactggcgaaacagagtatgaggcgagtggc

SEQ ID NO: 81486 - DNA, 358 bp, Zea mays
ggcttgagggtggctggagtgggctggccacgatggccgatgctctggcggcaatggcgggcggaattgagctcgtcggagctaaggaaagggggctggccggtgagggtgagtgctgggcgatatgaggtgcacccggggaggctttataagcgcgggcgggcacggccgatggcgcgcggcggacttgaccatacgccggggcgagcgcgcgcgcgggttgggcgagctctggcgtgccgaccagggtcgaacacgtgtgcccgtgtgttctgcccaagttctggctcgtgtggtcgctcatacgagcctgctctcgccttggtcagtgcacaaaacctcttttcctccctacaag

SEQ ID NO: 81487 - DNA, 398 bp, Zea mays
tgtgaaggttcttcatccacacatgtgctaagcggctatgccacagccagcccatgctagtcttagcaattaagcatgcatctagaccggcctcctcttttgcaaaatcaactaaataaagtttgtcgtctaatacacccttaaatgctagtgaaccatcacttcttctaaagacagacacatctacatttgtaaatagacagttataccccatgttgcataattgactaacagatagcaaattatatccaagagactctactaaaaacacattagagatagagtgctcattagaaattgcaattttacctaacccttttaccttgccttgattcccatcaccgaatataattgaatcttgggaatctttattcttgacgtaggaggtgaacatcttc

SEQ ID NO: 81488 - DNA, 402 bp, Zea mays
  unsure (1)..(402): unsure at all n locations
taaggccatgggaataagaagagcagtacttaaatctgactctcaagtaatcataggacaggttgacaaaagcagtaaggcaagggatccgaagcttgaaaaaaatattttgacacaatacgaagaatgaaagtctccttcaaaggattctcaatgaaaaatatcccaagagaggataatgaacaagcagacttgctagccaaatcagcggcacaggggcttccactcccccagaagtattctttgaaactctcaaagcaccttcggttgaactcatggaaagggttgtgcttacaatttcacctgtcatagcgaagattggagaacataaattgtatcctttctctanggcaattacccttcggatgatgaagtctacataaaaaggatgcatgccagaac

SEQ ID NO: 81489 - DNA, 399 bp, Zea mays
tgtggattaagtttcaagtatttaaaggatcacctattcttcccccctctaggtgctctcagtgggaagtagcggcacgttgcacacattgcttaaagaaccaaataattagcttgggttattgacttttgaggttcatattttagagtatgatgtagtcataagctggttcaatcgtggttaattgtccttgatgagaattatatcatactagtatgattcattttgtattgatatatctcttttgcttctgtgatgcttataattacaaaggagatgctgccaaattttattttgcttaatgtttggttgttggtagtgaagtccagtagcatctcggggtgtttgtggatcccggggtgttacagaccttgacctggccggagcggcacctcggtc

SEQ ID NO: 81490 - DNA, 403 bp, Zea mays
tgtgaaggttcttcatccctacatgtgctaagcggcgatgccacagccagcccatgctagtcttagctattaagcatgcatctagaccggcctcttcttttgcaaaatcaactaaataaagtttgccgtctaatacacccttaaaagctagtgaaccatcacttcttctaaagacagacacatctacatttgtaaatagacagttataccccatgttgcatagttgactaacagatagcaaattatatccaagagactctactaaaaacacattagagatagagtgctcattagaaattgcaattttacctaacccttttaccttgccttgattcccatcaccgaatataattgaatcttgggaatccttattcttgacgtatgaggtgaacatcttcttctc

SEQ ID NO: 81491 - DNA, 405 bp, Zea mays
tcttcaccacgtgttcgtagatatcttgaggaagtctagcttggcatcttctccttaattgtctttgtttcttgtttccaagcaatttcctttttgaccctacaacttgttgctcattcaaacattcgcttccttttgagcgacaggggttagcacatggtgatatattatccaaatgtgcacttgtgcaagaatgaggttcacatgaatttaagtttgtaattacaacctcatgagcaacatcaagcatgatatggtcatcaactagtttactatgagaatatgacaacatatcatacttttcacctagagcaagtttttctaaatttatcatttctacttgactcctaagcatagaattttcagttttaagttgataaacattagataaaacatcatcattat

SEQ ID NO: 81492 - DNA, 412 bp, Zea mays
tcatcattgtctattaagcttcggcttcgcgctcttcatcttcgtcaacttgctcctctgcttcgtcatcctgtacatatttaagtattgtaagaattattcaagcttaaagcgaaaggtaagcacaaggtatgcttttgttaccggcttaagatgacttcgagcttcgtcaccagctatgcttcgtccaaccttcgtccatattagttttataaacctgtttcctatgcttcgagcaagattgggaatatcaactaggtctgctggtgacaaactaaagttgggcgtattaacaatgttcccatgtgtacaaccagatttcatgaaggcgacagctgtgcttcgagaagctaccagggcacagaaatcaccatgttcggctataatttcatcaaggtcatcaatttcaccc

SEQ ID NO: 81493 - DNA, 400 bp, Zea mays
ctgtcagttctagccccagaggacttagcatcttgttttgtaaggattcggtcattacctttaaaaattcttccacttcggtagcagaaggtgtcaaaggagctccctcttctatttcagccaccttcggctctggagttgttgttttcctcttcttcgaggatgtcaccttcggctcaggactagactttttctttttcaaaaaaaattcatcttcttttatcatcctagcagcctgtctgttcataacactgacaaccctcttccgctttgacccttctgcacccttgtttaatcgttcatagtcaaggtattcaaagttcagggcatccattactcgattcagccttcgtttcggccgggtgccgaaggctacagtcatcagttgatcttatttttt

SEQ ID NO: 81494 - DNA, 403 bp, Zea mays
tctaaggcaattgaaaaggaagatagtgatgatgaataaaatgaaagtgagagtgatggggatatggctctatttgtaaataaattcaacaaattcatgaagatgaagagaggtcaacctataagaggccaaacatcaagaagaaacactttcaatgatagaaaatgttttgagtgtggggaacccggtcacattgccatgaattgccctaacaagaagaagaagggcaaagatggagatgataagaaaaagaagaaattctacaacaagaagaaagatggcaaagcctacctagttaaatgggattcagatgatagctcggatgatgatgatgatgacacctcatccaaacttaatgccggaattgccatcaaggaagctccttcacttttctcatcccctc

SEQ ID NO: 81495 - DNA, 401 bp, Zea mays
  unsure (1)..(401): unsure at all n locations
tcttcanagctgggctccagttccccttaagcaaattttttgttgaagttttaaagatatatcagattttccttcaccaaattactcccgaagcaattatcagaatggggatcttcatctgggccgtgaggagtcagggtttggagccaagtgcaaaatgcttttgcagcatgcacgaactttcgtatgagacgaagccctagggtaaagaacaatatcataacaattttggttgctatagcttcgttgctcgttctggttcaagctgcccagtgccaacttttcagaagagatggcccggagactggatgaaagaatggttctatgcgaaaaatgatttaaaggcacgagaagacatcaaatagatcatcatgcgccccatctagcagcgcttcggtctc

SEQ ID NO: 81496 - DNA, 410 bp, Zea mays
  unsure (1)..(410): unsure at all n locations
ntagcgagcctagaaaacaaagcacagtggaagaccatctagcccaagccacaggcagactgggtgcagacacaacccccttctagtcgaacatagcgaaaaagaagtcttcagctgctgaaaaacataaataaatctaggtgaatacactaggtattccgcaagcccatcccgcccgtaaagagagagggacctatacaatacatgcttgatatggtggagctgaagtcactcttctttttagagaaaggcaacactttgatggtttaccccagagagagaagtagcacattttcacactcgaccaccactgagcttcctgctcccgtggcactgttttcatttccaaaaacacccacacacactaccctgtttacggagatcaaaacactaattgtcataccacacct

SEQ ID NO: 81497 - DNA, 399 bp, Zea mays
ttaaacgctggcagattaagactcgcatgtggctcactgacctaaaattattttgggtagtgacgtcggctgttccccaagctgcatcagatgattctgatgatgcagcgaaggccgccgcactagcggagaaggccaagtgggacgaagccaatgaggcatgcttgtctcgtctgctgaacgtcttgtcgaaccgcttatttgacgtgtactctggttttacctccgccaagagtctatggactgaacttgagaacgagttctctgaagttgacaatggcaatgagtcattcacaacggaaaactatctcaactataaaatggttgagggaaggtctgttatggagcagctacaggagattcaactccttgttagggacttggtccaatatggctgcg

SEQ ID NO: 81498 - DNA, 399 bp, Zea mays
  unsure (1)..(399): unsure at all n locations
tgtgaaggttcttcatccccacatgtgctaagcggcgatgccacagccagcccatgctagtcttagctattaagcatgcatctagaccggcctcctcttttgcaaagtcaactaaataaagtttgtcgtctaatacacccttaaatgctagtgaaccatcacttcttctaaagacagacacatctacatttgtaaatagacagttataccccatgttgcataattgactaacagatagcaaattatatccaagagactctactaaaaacacattagagatagagtgctcattagaaattgcaattttacctaacccttttaccttgccttgattcccatcatcgaatataattgaatcttgggaatctttattcttgacgtangaggtgaacatcttct

SEQ ID NO: 81499 - DNA, 405 bp, Zea mays
  unsure (1)..(405): unsure at all n locations
taagcatttctcctgaagttctttanaggatatctgcttatttgagtatttatccacttcagttttcaggcttgcttcaagatatttcttttcttgctcgaatttttctgattgtcggagcaattcattctttaatttgtcattctcagtttggacttcagccaaagagccctccatggtctgaataacaaaatccttcttttctaatgcaccttcgtgctctttgaccatgatttcaaggtcttggattatgaaatctttctttttcagattggcttcgtgattttcaactttttcagccaaatcttgaatgacggctttgtttttctcttcttccagatcttgttgcatttgtagaaccttgcttaataatatgctctgttgaaacgatctccgttagaacgc

SEQ ID NO: 81500 - DNA, 400 bp, Zea mays
  unsure (1)..(400): unsure at all n locations
ntctattctggagggaggcagtgttggtggggcttcctcttttcgttcagtctggcatccttggctcttggtctgcttccggatcttcttagtgggggcgagcttctttaacttcttatcgtagtccatcttcagagttcggtaggcctcacgagtgttggcctcttcaccttctgctatttcgagactctcttggagggatgccattttcttctttaattccttgatttgttgttctaagctttccacccgggaatttaagtgggtgcagtgggagaaaaggtcgtcatagtggttgtcaagagtgtggagatatccggccatgtagactatggtggggtcatcctcattaggatctctccctgacagggcctgaagtcttttcctccaagtaggggta

SEQ ID NO: 81501 - DNA, 408 bp, Zea mays
tggtgccaattgagaagcagaagtctttgaagtcctggctgtcaaattgtttgctggtggcaactgtgagctcggacgggactccgaatcggcaaacaatgttttgccagaagaatttctgggcagtcttcgatgttatcgtggatactgccatcgcctcgatccacttggtaaaatactcaacggcgacgaaggtcaactttatggcggaactgcccgaattattccaacttaagtgcctaagtcctgcctcaaaggctagaccacacttaaatgggaataacccgtcaatccctcggatctagtccgacaaggccactgacaggatcaagtaccacaatctcactcgacggtgagtcacagagcaaatacaataaagcataaaaccatacattaaggagtattaac

SEQ ID NO: 81502 - DNA, 403 bp, Zea mays
ctgcctcgggcagactaataccagaataagataccactctatgggagtggagagatggagagagtagcgtgtaccctccatggcaagaggctggacggtggtgtatctgtgctctcggttggcgtgaacctgatctggtcttaagaaccccggtggcgagttgacatatgcaagggttaagtgctacatatgtcatgtgattggagatcctcagctgagtataatcgattcggatcgtcgtaccttcttggttatgaagacttggtcactgccctatacgtagaaatccaatgaagatgaagggtgattaagaaattggctagtgcaggtccagtgattgaactagggtagaaagaactctagcttcaggtaaactcacttaacctaacaagtaaaatttgat

SEQ ID NO: 81503 - DNA, 408 bp, Zea mays
tcacgacggcgagacgcgaacagactgtgaacggcgttgtctatctccggcgaagcacgacggtgagcggtggtgctgctgaacgcgactttgacaatcgacgaacgacagacagagtttcgtcggcgaggagtgaggggcaataggagtgagctcgggatggcttggagagagaggtccggctcctatttatatagggaggagagggagagagatggtcgctgaggaggaacggccggcgtcatcaagcaccaataatggctttcatcaatggagggattaatgggagagaagtaacggctccattgaagtttcttgaacgcagaggaaacggtcggggctgctcggtcttcggccttgggcgtggcgcgctgggctcggcttgagagctgcgcgcggggtgcacgg

SEQ ID NO: 81504 - DNA, 399 bp, Zea mays
tcagctccatctatgttatggatagcttttgtttctttccaattaccttcggcctttctggcagcttcctgacttccatgtatagcgatgggtccttgatccgaaggtatcttcatgcaaagataggcaggatgaagaattgcttcgaaagcattgagggtgccacgaccaataattgcattgtaagggtattccatatcaacaatgtcaaacacaacttgctcagttctagtgttgttgatgaacccgaaggttactgacatggtgatcttgcccaatgctacaatctgtctccctccgaagccacagagaggatgtgtagcatcatgaatcttatcttctggctcttgcatttgtctgaaggccttagcaaatatgatatccgctgcactgcctgtg

SEQ ID NO: 81505 - DNA, 394 bp, Zea mays
  unsure (1)..(394): unsure at all n locations
ctgtgtggagttgggagaggatttgatctctttgtgtttgtcttgtattgaatgctagctcttgtaaggtgtacaagagtggaaaacttggatgccattgaatgtggggtggncctcccctcatccctaccttctgcctatctcccctttcttttcttcccccccccactcctcctccgcctctttccccctcctttcctctctcctactctccctccccctctcttctcctcttccttctacccttcttccccctccctcccccttcttcccccacctctctccttctcttgctctcccctacttttcatacatctcctccctcctccctccttctcctctctcttccgtctctctcccctcttgtcccctcacccccctcttcttcctccct

SEQ ID NO: 81506 - DNA, 398 bp, Zea mays
tgatgtttattaggcacaagaccgtgcatcgatcgtttgatagcaggagaagaggaaaattacagtcttacttttgcgcggaggaggaagacgtggacatggaagccgaataccagagcacggactgcagcatggagaggtgctggccagtagcgtttggctggctatttttagctggcgtgatcagcgtataaataaattgatgaaacagggccagccccatgtggaacgatggaatcgacaatgaggaagcagattgagtagatataggtgagaatggttaattacccccgttgacaaggaagttcatgaggtggaagaccttctgcgtggtccatccgaactcgggcacccggcgctggatcctgacgagctgaatctgcaggggggcatgacag

SEQ ID NO: 81507 - DNA, 401 bp, Zea mays
tgcgatcgctgtatagctgctaggacggcgtgcgttgtcttggcgcacccatgacgtacctgtcccatacagcttccttccattccaacgaaaggatcgcaccatcaaaccgcgggatcaaacacctattggccccggcctccttttcaacatacgacatttgttcatgttcgaagcggccgccgatgctgcccaaactacttgctccccaccgcattctgcctgttttattgaggatcagaaaacggcgaaccgaacatggatttggcatggataggtaccccgccttctaccagtttcgagatccgaagcgcggcaggctgtgagctgctgctggtttcatggacaccgcgacccgcgcgcggctgcatagaaacagtgacagtcgcgaagcggagcat

SEQ ID NO: 81508 - DNA, 404 bp, Zea mays
tggtgccgatggagaagcagaaatccttgaagtcttggctgtcgaattgcttgccgttgtcgactgtgagtccggacgggactccgaagcggcaaacaatattttgctagaagaatttctgggctgtcttcaatgttatcgtggatacagccctcgcctcaatccatttggtgaaatactcaacggcgacgaaggtgaacttgaggttcccctgagccgtgggcaggggcccgacaatgtccaggccctagcgctgaagaggccacgtgtgggcgattagcttcgtgaattgcgaagggcttcccgagcgtggggaaaatttctgacaggcttcgcaggaccttgtgacccgatttgcggcgcaaatcatggcgggccagtagaaaccatgacgaatcaccttt

SEQ ID NO: 81509 - DNA, 388 bp, Zea mays
  unsure (1)..(388): unsure at all n locations
tcgtaattntactctcatcaaccttcgtccattgcccattatcctcaagggaataatgtttcatggacgaaggacgttaacatttaacactttatgttgccttgttcttaaagcaaagcacttgagaacaagtccccaacacgggttgtcggccgccattgtcgctgtcgcgcggcgggggaaggagtatcatgtcgtagctgctgtcgagggacatgaactcaagactcccgaaacggagcaccgtcccgggctggaaaggttgctggagactacccatctggagcttgacgggaagctgttcgtcaacacgcagcatgcccctacctggcgcgccaactgtcgacgtttcgaccccggggggtccctggaccgacgagtaaattgt

SEQ ID NO: 81510 - DNA, 394 bp, Zea mays
  unsure (1)..(394): unsure at all n locations
tcttccacaaccttcattccctaaggaatgactgaaatctctntgccgtttacttttcggctgcaccatttatttttcggtataagttctgcattccctaaataacgtcttttgaacttcttcgccttctatttcggaggtattcgcgttgacttttcgcgcttcgccttatatttcggcggtatttggctctgcattccctaaggaacgacttttgagcagaaaacttacgctgcgctcccttaggaacgactttttgaagcatcggtaaacttacactgcgttctttaagaacgactttttgtagctttagtgaaacttttactgcgatttttatcattgcattcccgaaggaatatctctttgtagcttcagcattttcgtgagtctgtga

SEQ ID NO: 81511 - DNA, 405 bp, Zea mays
  unsure (1)..(405): unsure at all n locations
tctcacaatttctntgaggtcattgtgagaggtcttgagctcctcaaaagacacttggaggtttttatacaattccttcaaggtcttaaatttttctttttctttgtgcatgtagtcatcggcctcacctaacattctaacaagatgatcatatgaatagccatcatcatcaacatcatcgatatcatcatcatcttttatatcatttaaatcggtgatgatttttaccttagcatctccctttgccatgagacaatggggggatgagaagagtgagggagcttccttgatggcaattccggcattaagcttggatgaggtgtcatcattatcatcatccgagctatcatccgagtcccattcaactaagtaggctttgccatctttcttcttgttatagtattt

SEQ ID NO: 81512 - DNA, 406 bp, Zea mays
tgatgtagcaacctcatgtgatgatttgattcaagatcagctaactagtctacatgctgaattgactgagaaagatgaagtcctgactctagacaaccaaaaattgaagaattacttgactgatgcaactactacaggaaaagttgctattgagaataatgatctcaacaatgagttgacagcggataatcaaaggcttaagaatgaggtcaagaaactaaaaagtgaaaatgaacatcttgcaacaagtgtgcaaaagttcaacaagggtcaatacctccaaaatgagctgcttatgaacactgttatgaaaaataacaagagtggtattggatacaatgctcttgtgcaaaaaaaagctatcactcaatacaagcctaagcagactcacaagcctatcaaatgc

SEQ ID NO: 81513 - DNA, 406 bp, Zea mays
tgtgaagcacatcacaagtttattgaagaatgacattatgttcaattggtcttctaagtgtaatgaagcctttgagcaattgaagacactattgaccactgctccggtattggctcaaccggacatcactaagccttttgatgtatattgtgatgcatctggcagtgggctcggctgtgtaccgatgcaagagggccgagtaattgcgtatgcttcaaggtagttgcgccgacatgaggagcattatccaactcatgatctggagctagctgctgtggttcatgccctgaagatttggcgtcactatctgctgggaaatatctgtcacatatatacagatcataaaagtttgaagtacatcttcacccagtcagaattaaatatgaggcaaagacgatggcttgag

SEQ ID NO: 81514 - DNA, 429 bp, Zea mays
  unsure (1)..(429): unsure at all n locations
gtccttcaggaccttaaaactcagcttgaggactgcttcngcaggagagcttccgaacgtgatgactcgttcggtccacgaagtcgctttatccgagcgcaagttacttatcgcagaaggggacgagtgaggtatccgtatcccggaggcgtatgagtccctcggctcggtcagccttggctgcttacgtgtacctcgtcgtttccaggatccgctttccgaagtagtcaagaagcacgaaagaaatcctgctaaaaagagatcctttttcgaggaaaaattcgacgcagagggggtcttcccccttttagcccccgagagagggtcgggctttgccaaagctaggccgaccctttcttgacaactaaactttgcgtatgtgcgaggtatatgaacaacttgaaaacatcttaagggtacaagccacgt

SEQ ID NO: 81515 - DNA, 409 bp, Zea mays
ctagtgttaagtgagagagattggttgtgttcttttgagctcttgcgcttggattgcttctttttctcattcgttcttgcgatcatctcaattgtaaacaaggcaagagacaccaattgtgtggtggtccttgtgggaagtttggttcctaattaatttgagaagagaagctcactcggtctgagggaccgtttgagagagggaaagggttgaaagagacccggtctttgtgaccacctcaacggggagtatgtttgcgagaagcgaacctcggtaaaacaaatccgcgtgtcacactctttattcgcttgcgatttgttttgcaccctctctcgcggactcgtttatatttctaacgctaacccggcttgtagttgtgaattaatttgtaaatttcagtttcgcccta

SEQ ID NO: 81516 - DNA, 409 bp, Zea mays
atgccgaatctaacttacagtacattgataacatcatggtgtcataagataataaataattcattcactatatgtattaaaaaatcatacgtctaaaagttcaatgcgaaacagatgcaacctgattctaggacatctcgatagacgacacaagtcggagatgaggccaagagttatacgaaccgagctcaaaaattacatagatgtaaaaatattgattataatgtttttaaattggttatgaaatatttacaaatgtaataaaattcataatgtttttaaattgattataaaaaattgacaaatataatctcttatatatatatactattaccgagggggattcttccaaaagaccacggccatccatctgatcgcttgctctgaagagctaattgagattataata

SEQ ID NO: 81517 - DNA, 402 bp, Zea mays
tcatgcaactgctgcaaaaaatgagatatgaattgggtgcctctatctgatactatcttctttggaacgccatgcaagcacacaatctgagccatgtataactcgtccaacactgcgctggtgtaagtggtcttgactggtatgaaatgggccgcctttgtcaaacggtccactactacccagatggagtcataaccagtacgagtgtggggcaaactgactataaagtccattccgatctcatcccatttccactgagggatctgcaacggttgcagcaaacctgcaggtctctaatgttctgctttaatcctccgacaactgtcacatacagccacatactctgctatttctcttttcatacggtaccaccagaatctttttttcaagtcttggtacatc

SEQ ID NO: 81518 - DNA, 403 bp, Zea mays
  unsure (1)..(403): unsure at all n locations
nttgaacgtactaagcacatgctgggaaaaatggttaccggtaaacctattacccgagtgaagccgggcgcggactttatccctcatgcgacctgagactgggtctcccatgctagctatggtgggtacaagtgcggtcactgcacggcggcagccggggtcagtggagcattgtatgccaaggcggtgaggcctatacgcgaacggggaatcgatggggacggttgtcatgtgtggggtcggagtaccctgacatgccgtgtgtttaagtttaccttgcaaggttaaaactcgattcgaatcgtctgcttctcgcagctaatgagactgcttgaccccttgtactacatcgagtaagaagtgaaatgagggtacatgagataatttgttgattgaactaaat

SEQ ID NO: 81519 - DNA, 402 bp, Zea mays
ggttccaccacgctcagtctactggtgatcatctcctatgaaaggaagacgtgattccagttcttctgattgctccgatccttctcgtccataacttctagcacgaagcatgtctgctccgaaagatgaattgctggcaccgtggctttctcctctctgatcgtcggtgcaaggatggacaactatgataccaactgtcacagtccctggactagggacgcttgcctccatgtcgtgagcagcaacagaagaactccattgagttcttccaagcatcagttcctatgtaagttggaaacatgtatgagatttgtggatcttgtatttcttattcatcaagatgattgtctcagtacaagaggtattatttatactagtacaaatgactaacatcccattaat

SEQ ID NO: 81520 - DNA, 210 bp, Zea mays
ttgagagtaagaatgagagaaagaagatagtcaaccatgctacaagaacaacaaaagaacacgagccgaccttcccacaagtcctaaaaactagagttgaattgtggactttgatttaatcggaggctttgatttgtgtcttggagtgttgtgtattgctcttgtattgaatgaggagtagtgaatgcttggatgccttgaagagtggtg

SEQ ID NO: 81521 - DNA, 398 bp, Zea mays
  unsure (1)..(398): unsure at all n locations
tcatggaaaagttgaatatgaactatatgtctataactntggtacagagagctagcctggtcaccacacaaaatcaggagtaaatcgagctccaagatgctctgtcaggttcatctgactgaattcacgatggtacagtaccctgaataagatcagaccgccagcgcagccgcttcatcgccgacgaccgatcctcgccgtgattcgcgccaccgccgtgtgattcacgtcgctgatgacccgataaggccgccaggtaaaagccatgccctggggataactccggtgactcaccgtcgtacttcccccctgctttgcggctggagcagataggctcgccggtgaaccgccgcctctcggccttgtgccgcgtggctcagcctttccaccgcgtcgcc

SEQ ID NO: 81522 - DNA, 400 bp, Zea mays
tgtgtctacgtaaagagcattattttcggagggcgcataaaagttggcaaatgttgtgactctttgacgccaaaccgaacaaagaaaaggacctcagaaataccattcagttcttgtgaaaaaaataaaagaaaacattgtttgcctttcttctcttcctggtaaaacatgcatgggaaggagtgtcattcacgtcatttccttctccttcgtagtctcctcgccattaggctcgaaggaggttcagtcgttttatttttcctcctcatcttcgactcatcgttcaccgatgtacagttgaatgaagctttcgattacatgatcgtagtccgaaggtgccttcctgaaaataaactaaggcaatcattttgtattaaatttagaccttcatccaaaggcc

SEQ ID NO: 81523 - DNA, 406 bp, Zea mays
taatcccgagaagtgtgtctttggggttccccgaggcatgctcttggagttcatcgtctccgagcggggcatctatgccaacccggataagatcgtggccatcaccaacatggggcccatcaaggccttgaaaggcgtacagagagtcatgggatgtcttgcggctctgaaccgcttcatctcacgcctcggcgaaagaggcctgcctctgtaccgcctcttaaggaaggccgagtgcttcacttggacctctgaggccgaggaagccctcgggaacctgaaggcgctcctcacgaacgcgcccatcttggtgccccccgctgccggagaagccctcttgatctacgtcgccgcgaccactcatgtggttatcgccgcgattgtggttgagagacgagaagagggg

SEQ ID NO: 81524 - DNA, 408 bp, Zea mays
tgtgcatccatgctcggtgctccacgaagacccaaactatataagcagataattctaacatcgctcatggttcataacttcccatttatacgtcgcacagatcaaatccatcgatagattttccgttagtagctccatacaaatttcaagggcggagggggggacagccaaagccaactcgtgtagcacgagtgtagcactgaataccatcaaatttctgatacatttatgaagtgcaaaagggaaccagtatagcacatagcacaagtggttgttctcggagccgaggagaaggtacacgtataattgcaactcaacgccgctcctttagcaatcttaacaaaccagagagagcaggctgtaatctcgtgatcgagtcaagcagcgccaacgaaagggggcaatatc

SEQ ID NO: 81525 - DNA, 409 bp, Zea mays
tgtcttctaccatacctcgccagagcacggcggcgccccgtcaccgcgtggcgaacaagccggtgagcggctagccgagacccagggtacaatcgccaacatcggagggacctactgaaagcggacatcaaaccgaatagggttaggaacatcataccatcgagggcaccctggtgaagccggcctgcgacagacagcggatctgcgttacacggactgctccggtgagcaatcgggatggcgcaggtgacaaatcctccacggcgcaaccacagcctcccacccgcaggccagaagaagccctaggacacaactccaggacggcgaatcgaagtccacacgcggcagcccaatcatgctcccatggcggccaccgaacaggtgtcgtggttctccgagatggcacaat

SEQ ID NO: 81526 - DNA, 411 bp, Zea mays
  unsure (1)..(411): unsure at all n locations
ttgttatatacgaatcgatgtgtattcacaatgccttgggctattcgtttgacacactcaatgatgattttatcttcataattcatgttcattactcatgtgctcatttcaactgcctactgccaatactagctcaactaaagcacgatactatgtccacatatattaacacaaccatttgttttatgtagaccatggattcggagaacgcatagctccgaagagcactggctcatttaatcaaagtattggaacagcgttgtgccgacatcgtcgatgtcgtccacggtgccttccaaccagttagcggaccagtcctgaatgaaatgaatcgtgctttagttcagatcgaggacctcgccaaagaccttgatcacctatctctggaaaaagactgngagatggagcaca

SEQ ID NO: 81527 - DNA, 399 bp, Zea mays
tggtgccaatggagaagcagaaatccttgaagtcttggctgtcaaactgcttgccgtagtcgactgttagttcggacggcactccgatacggcaaacaatgctttgtcaaaagaatttctgtgcagactttgctgatattgtggaaacagcccttgcctcgatccatttggcaaagtactcaacagcgacggatgtgaacttgaggttcccctgagccatgggcaggggcccgacgatgtccaggccccagcgctggagaagccatgtgagggcgatcagctatgtaaattgcgaagggctgtctgatctaggagaaaacttctggcacgctccgcaagaccttgtgacccgatttgctgcgcacatcattgctggccataaaaaacactggcggatca

SEQ ID NO: 81528 - DNA, 403 bp, Zea mays
tatgaagattcttcatcccaacatgtgctagtcggcgatgccagagtcagcccatgttagtcttagcaattaagcaagtgtcgagttcagctctatcaaaatttactaagtatagctgaccctctaacactcccttaaatgctattgaatcatcacttcttctaaagacagtgacacctacatcagtaaatagacagttgtagcccattttgcataattgagaaactgaaagcaaattgtaatctaatgaatctacaagaaaaacattggaaatagaatggtcaggagatatagcaattttacccaatcctttgaccaaaccttgatttccatccccgaatatgatagctcgttggggatcttggttttttctcgtaggaggagaacatcttcttctcccctg

SEQ ID NO: 81529 - DNA, 406 bp, Zea mays
tccccagtgcttacaggctcacaacgccaaatggctatgacctggagcactcctggaacatcgacaaccttcgcaaattttttgtttgacccatttagggctgatttcgcccttgtaattcgccgcaaacaatcttgtaccggcccacactcttttcctcccggggggtgaggtttttaacgaggcggagccatgtaatatatgtgagaaaaatcccccgcaaaaacatgcgtcgaaaaaagaccgcgacaacggtcttcggcattcgaccaattcgaagtcaccgcaaggctaagcgctagccaccctcgcgtgcgacaaatccgcgcagaagtcgcctaagggtgcagccggactaagcacaacaagtgcgaaaaaatccgatgtctatcgcgaagactatccc

SEQ ID NO: 81530 - DNA, 405 bp, Zea mays
ttctgctagcctctacgcagcgtgcagctctcttccgctcccagctcgccggtgcttctccttgcacgccgagctcgcccctgccctcagctatggcgtccggccaccgctgcccttctctggtgctctcccatggtgccgatctgtctgtcctgccgtcgctcagctcgtgcgcgccctgtgtatttttcctgctcagcttactccctcgctggtggccgaacagctcactcatggtgcccagctcacgtccaccccctctgttgttgacaccgtgcgctcggcttctgtggcgccgatccgcgctcgctcgtgtcgtcatcgtcgtgtcgtcactggtgatagcttcgcgtgctgtcaagcccgtcgttttccgtgtccagtgctcgcgcggattcctgctcg

SEQ ID NO: 81531 - DNA, 403 bp, Zea mays
  unsure (1)..(403): unsure at all n locations
tctcggtatcttcttgggtaaggcacttttctcttgagatgggttaagatgagaatggaagcataaggtgaggattagctctaatttgttatctatgtttttagagaaaacctttcttaaaaagaaagaaaacacataagttcagcaatgataagcacaaacaaatcaaatgttttgaataagggaagaatagagtttttccaaatcacgaactacttggattcggggctaagcataactactattgcttggctcctgaattgagaactatgctaaatgcaacttatgagcactaacgttaaagcatcacatatgcactcaaaaggggagaaaacatcaagcgaaattcattntgaaatgccctagggggccacacaattagagtttttcgaaacacgagact

SEQ ID NO: 81532 - DNA, 396 bp, Zea mays
tgtcaccacagcagctgcattctaccccgacgtcctcttcatcgggggaagagtagaatcgtctcccatcttcgacgacgagccgaccgtgcctggggaagaacccctcagcgagaagctcgccgacggatgaacccacgccggaatgttcggcgacattatgaagctggagaacgagacccggcgcagcctgtatctcgagatgagatctcagaggtgggagatacccctaacgaacgaggctttagggaaaggaggaacttccgccgacgtgatcgacggcgggctcattagcaagctgaataggatgcgaggctacgccgagagaaccctctcttcgtgcgaaacctggaccctgaattcgcccgcgccatgaacacacctagtgagggcggg

SEQ ID NO: 81533 - DNA, 401 bp, Zea mays
taaccgcgtgaggaaaagatcatgtcaggggggacttataaacgaaagtgcttctaagcttgaaaaagttaaggttgtctcgatttcatcttttggtgcagatgttgatcctagggcaatagactttgccatgagaatcgttgaaagaatgttcctcataatgaaggaagataaggcaaagaataggattgaagaagaagaaaatgatcgatggagaccaaatgacgaatccacctcttctcaaggttcgtctttcaaatccacttctcatatgtgctttatcgctaatgggagtgatagtgaaagcgaaagtgaggatgatgaggagcatgaaagtgagagtgaagatgaggatgatcttcaacaattcttcgctcaactaagcaagaaaaatcggatga

SEQ ID NO: 81534 - DNA, 404 bp, Zea mays
  unsure (1)..(404): unsure at all n locations
tgacaacaccattngacattttacataaaatctctattatcaagaatatttagttcattccttaacatgcaaaagtgggtcttatcaagaggcttagtgaaaatatctgctaattgatcttccgacctcactccttctaaaatgatatctcctttagcaacatgatctctaagtgatgacagatatcaatgtgcttggtgcgagagtgttgtacaagattattagcaattttaacggcactctcattatcacacaacaaaggtaccttttctagaactacgccatagtctagaagagtttgtttcatatataaaatttgtgtgcaacaagcacctacggcaatgtattccgcttcgacagttgacaaggcaacactattttgctttttggatgtccatgaaact

SEQ ID NO: 81535 - DNA, 374 bp, Zea mays
gagcaatacaagtacagaagggagaaggctgcttctgtcgatcagccgaagcccatgctcttatgtgaagatatagcagagcaaatagtgttgctgggatctcaattatctgaggaacaggagaaaaacctaacatggtttcttgttcaacaacaaagatgtcttcgcatggtccgccaacgatctctgtggtgtcaacagggatgtcattgaacactcgctcaatgtcgatccatccttcagacccagaaagcagaggcttcggaaaatgtctgatgacaaagccgaaggtgctcggaatgaagtgaaaagacttcttattggcggagtcatcagagaagtaaaatacccagaatggctagctaacactgtta

SEQ ID NO: 81536 - DNA, 405 bp, Zea mays
  unsure (1)..(405): unsure at all n locations
ngagtaatctacttcatcatcactagaatcatcatcacttgaagtagtatacttaggggtatctcgagcacttaccttattttccttggccatgatgcaagtgtggcacttgttggggaagaagtgacgatttgttgaatgttgaggcagcgagtccttcgtcgtctgagtcggaagaagagcagtccgaatcccattctttgccaatgcgcgcctcgcccttcaccttcttgtatgccttcttcttctccctcttcccactcttttcttgttcctggtcattagcattatcgggacaattngctataaagtgatcagtcttaccacacttaaagcaggagtgcttcccccttgttttgctcttgatggggtactccttgcgtcctttaagagcggtcttgaagc

SEQ ID NO: 81537 - DNA, 407 bp, Zea mays
tctaaagggagaacacattctgggactaaccaatgttcattttgagaaagatatggtgtgtagcgcatgtcaagcaggaaagcaagttggtgtccatcatccacacaagatcatgacgaccgacaggccgcttgaactactccacatggatttattcggcccgatcgcttatataagcatcggcgagagtaagtattggcttgtaattgtggatgactattctcttcacttgggtgttctttttgcaggaaaaatcacaaacccaagagactctaaagggattcttgagacgagctcaaaatgagtttgattaagaatcaagaaaataagaagcgacaacgggatggagttcaagaactctcaaattgaaggctttcttgaggaggagggcatcaagcatgaggtct

SEQ ID NO: 81538 - DNA, 397 bp, Zea mays
tctaaagcgagatcatgtgttaggactaaccaatgtctgttttgagaaagacagaccttgtgcagcatgtcaggcagggaaacaagtgggaagcactcatcacggcaagaacgtgatgacaacgtcaagaccaccagagagcttcttcacatggacctcttcggacccgttgcctaccttagcatagggggaagtaagtatggtcttgtaattgttgatgattttttccgcttcacttgggtattatttttgcaggacaaatcataaacccaagggaccctatagagctttctaatgagggctcaaaatgaatttgagctaaaggtgaaaaagataaggagcgacaacgggttcgagatcaagaatctgcaagttgaggagtatcttgaggaggaag

SEQ ID NO: 81539 - DNA, 383 bp, Zea mays
taggctcaatatcctcgactctcggaacttttattgtaatcatgcacatacggctcacgtcatatacatctgatcatgtctctttcatttggtacaaatgcatatttcttattcttcttgagccaaggctaagactaatgtgcctccatgaatatttctatccttagtcttacatcgaaagggaaatataatatttctgcaaggcaatgcttccactacgactctgtcggtatcatttatactttgccctgctcatgcatttacactcatatcttgttcaaggcctctagatctcttcgtttatggcgcttaatgccaaatggggagagagtaatacgcccaaagcaagaggactcccccaccatcctattttctaacacctt

SEQ ID NO: 81540 - DNA, 402 bp, Zea mays
taaattgccttgcaggtttatgcatccgggatatctatctggataatcgacagcggatgcacaaaccacatgacgggggagaagaagatgttcacctcctacgtcaagaacgaggattcccaagatatgattatttttggagatgggaatcaaggcaaggtcaaaggtttgggaaaaatagccatcacaagcgagcactctatttcaaatgtatttttagtagagtcattaggatacaacctcctgtctgtaagtcaattgtgccacatgggctacaattgtttgtttacccatgttgatgtatctgtctttagaagaagtgatggttcattagcatttaagggtgtattagacgacgaactctacttagttgttttttcgaaagaggaggccgatctatat

SEQ ID NO: 81541 - DNA, 403 bp, Zea mays
taaagccatggtgagtatgcatatgcaagtaatatactaattgactcaatcctagctactggtgcataagtttcaccgaaatgcagaccttcgacttatgaatatcccttggccacaagtcgggctttgttccttgtcaccacaccatgctcgtcttgcttgttgcggaatacccactaggttcctacaacattttggttaggatgtggaactaaatgccatacctcattcctcgtgaagttgttgagttcctcttgcattgccagcactcaatctgaatctcttaatgcatcgtccaccctgtatggctcaatagaggacacaaacgagtaatgttcacaaaaatgagagactcaagatcgagttgttacccccttatgaatgtcactgagaattgagttca

SEQ ID NO: 81542 - DNA, 405 bp, Zea mays
attgctcatctcccgacagacagaaatctccttgctgtctgggagacaatacaaaaagacttcttctccactgccattgaatattaacgccccctttggatacttcagtttttgggcgtaaagctgggcctcttgtttttctttttctgataattgtttccccgaagcatgacgaacaatataatcaaggactttgggggatgcttcgggggcaatgacactgatttcttcaataaaagttggctctgttattttttcttcctcggtttccaaggattttatcttcgtgggctctgaggacccagcttcggctccagtttcttgctctggaactttaatatcagaaatttcagttttcgcttcgggaatggcaacagttttcttctgaggtgtgcttgaagattt

SEQ ID NO: 81543 - DNA, 404 bp, Zea mays
taataacagggttaatagcctcatgtgttttgcaagataaaagttcattttcaacaagaagattgtcatgatcaaatttaatttgagtatagtcttccttgatctttactagtctattttgcaactccctattagcttcatttaatttgtcatatttttccttagcatcttttagggaggttgtgagctcatttacagttgatgacatagttttattttcttcttttatttcatcactagcctttataactatgtcatacttggcatttaaagattcattttcatttttcaacctatcacatttagcttttgactttctaatgatttgagtatattctttaagtaagtcagctaactcatcatatgaaggtgaagcaaattcttcatcactatcactatcacta

SEQ ID NO: 81544 - DNA, 398 bp, Zea mays
tatccggtgtgcaacgtatcacgatataagataatgtgtgttgactgagggagttgagggcaaacctctatcaaaatgaaaccttctatgatcatatggtgcttccctataatatcatgtttgaagtgtttgtttcgcaacaaatagcgcaccataacgatgcggtggagcgtaaggttgatgctatgttgagacgcccactgatagttcacaatgacagaaagttggtagaactttctagagtttatagaggatacgaggaatgtaaggtttggtttaagcactcatggaatgatccctttcgatgagcaaagcagtggttatagcacttggcatgtgactatgtatgtactatgtacaacatacctctctagctatatttatagcaaaagttcatt

SEQ ID NO: 81545 - DNA, 401 bp, Zea mays
  unsure (1)..(401): unsure at all n locations
tgtttttggctcgtcttcctttttcatccaaatttgatgatagcctgaataacaatctagtagactcataagctctgacgagnctactgcgtctactaaanannntnttgggcggnaatggaaactcatccttcggacaagccttgttgagatcagtaaaatcgatgcacattctccatttacaattggccttcttcaccatgacagggttagctagccattctgggtattttacttctctgatgactccagcgctaagaagtctttttacctcgttccgagcaccttaggctttgtcatcagacattttccgaagcctctgctttctgggtctgaaggatggatcaacattgagcgagtgttcaataacatccctgttgacaccatagagatcattagct

SEQ ID NO: 81546 - DNA, 432 bp, Zea mays
tcttcagaagatggatgagcatatccgggctgataatgatttccgcccaagaagggaggaagcatacaggttttctgagatggccaagggcttctgaggaagaattcaccccaggcacgtcaggtcgatccataattccatcccaagtgatgatagaggaagtcaacctcaaaagcaacaacatagctcccggtcatcaaggccacaacaaagctccttcaggccaccagccccaagaggcagagggggcagaagcttctgaggaagatacgaggatcagcccagaagactattttgcttattctgcagtgaagacaaaggccacaccacaagaacatgccaagtcacaatttagaagcaaaaagagattgccgaagctgaggcatggcagaattagccgaagcaggtcctacatactgcttcatgctattc

SEQ ID NO: 81547 - DNA, 401 bp, Zea mays
ctagtacattgggtttgtgtactaatatacttgcctatttttataaacagaaagaagaagaaaagagaagagttggctgtgtacagccaagaggctgtttctgtctggggcaccggacagtgttcggtggtgcaccggacagtgtccggtggtgcaccggacagtgtccggtgcgccatgctggctcgggcgaagtggccgctcttgggaatttgatgacggcgtacggctaaaatttaccggactgtccggtgtgcaccggactgtccggtgtgcaccggactgtccggtgagccaactgtcgtgtcgggccaacggtctgccgcgcgatctgcgcgttacacgtggccgagccaactgctataaagaggcaccggactgttcgatgtgcacctgacatg

SEQ ID NO: 81548 - DNA, 423 bp, Zea mays
tttgtcattaagaattcttagataatccatggtttccaaggttttagggctccctctcctctactaaacacatgtgataacaagtcatgggtacaagtagggccttggtaacacctggggtgttacagccctccccccttaaaggaatctcgtcccgagattatggtagggatccttctgtgggtaccaagaaggtgtgcttgggtgttgtagatccttttgtccaagttgttttaattaactgctctttgaatgtcattctctttgcaacttcagaaggaagtccttttaaagttattttcaaaacttactttacccttaacaactaggtttttatcatattaagattcaacgggcaggtggggtggggttttggattacgtactgactcctttgggtagaaagtcggcgaagcgagaacat

SEQ ID NO: 81549 - DNA, 429 bp, Zea mays
tcttccttcttggatcattagctagggttcttgctaagttgcaccaagtctgaaatcaactcaaaattctggagcagaaagacgctaaaaatgccagattgcgtacgctttgtgaaacgtgagaacttgaccgccttcaatgtttgaacgcagagcatcttccgaaccagtaaaaaaaagcggtttcatcttatttgtggacgagtttacatgaaacatttcgattcacataaagtctacagtctagcgtgccaggacgtctcgaatttcttccaaaatattccaaaatgggctatcagcatccgaattccgaaggcacgatgaatttgcacttcatatttgggagctggaactacagtccctcaccctgttcattcattcagaaaagtgcggtgggttctcgtgaacgagcaacccataataagtaca

SEQ ID NO: 81550 - DNA, 423 bp, Zea mays
ctaatgaattcactattgactacggccacttatcttcaatttaatcccaagcgctagcagatttcatcgctgattgacgataggggctcacgaataggggacaagcctagatgttgaagcttggacagtgttttgcgatggttcttggggagacttcagtgcaagagcagctgcggtcctagtggcaccttcaaaagtcaaaacatgttatgcagtcaaactggatttcagttgcacaaataatattgctgagtacgaagcgcttctattggggcttcagaaactaagggcaatgggaataagaagggccatcctaaagactgattctcaagttattgttggccacgtggacaaaagtagcatggcacgagatccgaagcttgatagatatttggatacagtttgaatgttggaagctttcct

SEQ ID NO: 81551 - DNA, 422 bp, Zea mays
  unsure (1)..(422): unsure at all n locations
tatgttcgacggctntggccgtcgaaagttgattcgtttactgtagtgattgcaaatatagatacgaagaacgaaaccatctatgtacgtaaccagcaagttggtaattaaaatagacagacccccagcgccattgccctaatcaaactgcaaagatgagagaactgaatcgtaactcttgttaaaaacaatcagccatagcttaagaaccatcagactggtacgtagattctctagattctgtgtaaagaccttctgtttataaggctagtcacagtgaggatttcatgtctctgtttccaaaaatgccacatcagctttatggatgaatgaaacaccatctcttaatagagagtttcatctcactatttcatatgtcaacatatttcttaaatgctgcatataaataaccaataggattt

SEQ ID NO: 81552 - DNA, 434 bp, Zea mays
ttaccgacctataaatactcagcttttttatatgctgcttcaaccgaaaatgctatttttattctttctctactatatgcgtgaaaacatttgcttacaccgaaataaagatgtcttgatgaccttccgttagacaagccttaacaattacctttattattattactactctggcttaatttttgtagcttaattaagcgctcatggaaattatatatcaagtcgtctcaactgtaggcaataatattatgtttttattttcgaattcgggaatggactgaaaatgtgtatccaaacagacatgaatttacgtgtaaggcgcgtggacagtggtttatttttacacgtacaaaacaaggggtttattattacaaacaagacacgtcgtacagacatacctggcgttaatattacacacgttactcttcccggtg

SEQ ID NO: 81553 - DNA, 377 bp, Zea mays
tatcctgtccggaataatctacggtatttctgacagttttctttagaatagctgcagatgaacttatgcacctgtgaaatgatcaactaggcaaactagttagtccacaaggtttgtgatggtcgtcaaacaccaaaatcgattataggaaatgttgagactatttccctttcaccttgtttggtttaagtgacgggttgaacctaatttcttgcatgattatatggttgaagagggttggagctgcatcgtctattgtttggtttcgtgatgagagatgaatctctactactctataagacaatagtgtagacgtacacacacattctggtgcacggttctttctgcagtgcccagtttctctcgcgcacccgctc

SEQ ID NO: 81554 - DNA, 374 bp, Zea mays
  unsure (1)..(374): unsure at all n locations
tctaaagggagagcacattntgggactaaccaatgttcattttgagaaagacagggtttgtagcgcatgtcaagcagggaagcaagttggtacccaccatccacacaagaacataatgacaacagataggccactggagttactccacatagatttattcggcccgatagcttacataagcatcggcgggagtaagtactatcttgtaattgtggatgactattctcgcttcacttgggtgttctttttgcaggagaaatcacaaacccaagagactttaaagggattcttgagacgggctcaaaatgagttcggattgagaatcaaaaagataagaagcgacaacaggatggagttcaagaactcacaaatag

SEQ ID NO: 81555 - DNA, 413 bp, Zea mays
tgcgtagcgcataagaatgtagcagcattacgagcacatttatgtacaatggcgaatcggtttacagcgggcatacatgcatggtaaggtatagtattatttattaattaccaaaagctatgagttcgctaatcgctatcacaggagttttgttcaatcaacaaagcctacaaaaggcgtgtcctaatcgtcagcctattaattattatcgtttatgagatccacgcacgcgtcaacctagaaaaccatgagacaaaataaacgacgaccagtatagcgtcatcctgtgatcatcgtcatcctgttgtctgagcatcaaatacctacctacgtcgtctaaagcaatgtttgtgttctctagtagttcaaagactaaagtttacatagtagactaaagattaatccctaacatg

SEQ ID NO: 81556 - DNA, 407 bp, Zea mays
tgcctaaaaatggactgtcagtgtattattaacttagtggttcagagctgaaactctaaaaaacagccaatggtgctctgtttggagctcagttgtgattaatccatatggtcttataccaagagctgtgtatcaaaatggaagaccatatataggagaacaaatttatttaaatgagtttggtttggtgctacacaaaaaaaaggaataaaagtggctcaaatctggactgtcacctatgtggctgaaatttgaattctccgatttggaatcgtataagtctgaatttcagtgattgtgactgattatggagcttcctgatgcataatccataagggtttaaactatggtttctatagagaaattgaagaccataagttggggtacaaatgtctttaatggtgatg

SEQ ID NO: 81557 - DNA, 433 bp, Zea mays
gacaaagactctatataggcttaaacaagcaccaacagcatggtactctcttcttagctcaaaattaataaggcatggcttctcaccatcaaaagctggttcatccttattcttctataacaagggaaacactataatattcgcgcttagttatgatgatgatataatcgttgcaagatctacagaagcgaccaccgcagcattggtgaaagacctataggaagaatttgcacttaaagatcttggtgaccttcactatattttgggaatagaggtaaacaaagtacatgatggaattattctcacccactacaagtatgcttcacatttattgaaaaatgtacggatgtcagattgcaaaccattcagctcgccactattcaccatggagaagctatccttgcatgaagaatctttactacgcaacaatgat

SEQ ID NO: 81558 - DNA, 424 bp, Zea mays
  unsure (1)..(424): unsure at all n locations
ntgagtggcaaggccgaccgagccgagggactcctacacctccgggatactgatacctcactcgtcaccttccgcacagggcaactcacacttggttaagcggttcagctagccgacaagcgagacctggtgctcgaaatgaggaagaaacacggtattgcgcccaaaataacaagatgttcaggccccgacagccacaatgaacagacaccggcactcaaggtgccattacaaacggaactccagttccgctcccgcaggtacgaacaaccccccacattggagggcctgcgggacgacaaattccaggtggctcgccgccgcccactccgtcagcagcgacaacgacctccgccccgggcggctaaacagcagcagtgatgacctcatggcagacgctgctgcgacaaggcccacgcccacg

SEQ ID NO: 81559 - DNA, 441 bp, Zea mays
tatacactactcaagcttgtttaggagtaagtgaattgaaggggattgaatgagcttaaatctctttgatatgcaattctgaatagaaagagaattttagcctcctcatttctctccaatccctttgctcccaaacacaccttaaaaataaacttgaacctaacctaactgtaaaattgttgtcatgtgaactattattccggtggttggcacatgtatggacgggatatccgttgctacttgagtgtatcacctatcttgaacagtaaaccaagatggttggacaggggtgtaaacgatatatatattatttgagtgtctaaccgttcgaagaagttaattatttgattggatagtttttttgaatatcagcatcatatccgtatttagatctggatattatagtttggatattggatacgaatatgtgatggatgatat

SEQ ID NO: 81560 - DNA, 331 bp, Zea mays
aaaactaacttgacctggaagtagcatagctatttattgattgatcagcctactcggggcatggtttaccgaaatccaaaccttcacttgggagtatcccttggcacaagtcgactttgtccttgcaccacaccatgctattgcttgttgcggaacacccattttgtcctacacattttgattggacggggactaaagcctcctcgttcctatgaagtgtgactcctttgatcgcaccacccaatttaatctggatgcttctctaccctggtggtaatagagaacaaagagtatgctacaaaatggcacacgaactagggtaccctttaat

SEQ ID NO: 81561 - DNA, 421 bp, Zea mays
tccaccgtaagccacaattcttcttggaaaagccatggacttgcttcccctgcacgacaacaggatgacttgtctccgaagcgtacttcctttataaatacggagtgagccttgcatacttcactcaaccttgcctttacaaactccacaacaatgaacccatacttagaatcgaattttcttgtgaggttgatggaagaaatggaagaggaagaagaagagttggagttggcgaggcacatgctcaataggaggcggcgtgcacgcaacgagcgtcgtcatggtggttcgattccagggcgtgttaggattcatcgtgatcacatgagcggcgatgcaagaatccgagcggactactttggagcgcaaccagtgtacacggatgctcaatttcgtaggaagaatttcacattcccacatt

SEQ ID NO: 81562 - DNA, 325 bp, Zea mays
tgctttgtcactgctcacttgatagagatttctaataatttcagaatccatgtcacccaactctcatgtatgacaacatgactttgctgcttcctcaaaaacaccgaattttaagtgctaatcatctcatatgtccacgaagggacgagggcgcgttcgtaagttcatgtcccgggaccccactgccgtaatcctagctctatatcttcacctggtaaaacgcccgtctggaactcgctgtggccgcacgcaacattccgagctatctctatcggttgccgaaggcacatgctgccccagcggcggtgatattcatcgcctcctc

SEQ ID NO: 81563 - DNA, 414 bp, Zea mays
tcctaaaatataaccataacttctcagaacaaagtattttatagcgcaattttgcagaaaataactatgatgtgttgatcatcatgtttactgaaattcagaagtattatcaaaagtagaatgttagctaagaagacatcacactctaaagaataaaaaataaatcaaaagaagcatacacaagggaactaaattctcggtaatctacaagcacacagaagctcaaatgagtaaaccatttggagtcaatgcatccagtcatgataagaaatgcaccttcaaagtacatgtagacaccatcctttcggcgccatggcttgcgctgtctcacaataacagctggcatcaccttctttctaaggtcaggctttcccttcttcacgggtgccataaccatgtcaccaacacaggcag

SEQ ID NO: 81564 - DNA, 418 bp, Zea mays
tctaaagggacaacacattttaggactaacaaatgttcattttgagaaagacagggtttgtagcgcatgccaagcaggaaagcaagttggtgcccatcatccacacaagaacatcatgacgaccgacaggccgcttgagctactccacatggatctattcggcccgattgcttacataagcatcagctggagtaagtattgtcttgtaatagtggatgattattctcgcttcacttgggtattctttttgcaggaaaaatctcaaacccaagagaccttaaagggattcttgagacgggctcaaaatgagttcggcttaaggatcaagaaaataagaagcaacaacgggacggagttcaagaactcacaaattgaaggcttccttaatgaggagggtatcaagcatgagttctcttct

SEQ ID NO: 81565 - DNA, 367 bp, Zea mays
tgctacatgccttcttctttttttccacggcatgaaccttactggaacactaccccacttaaaagaatgagggtagaactcttgattcttggggatttgaactccttgaagtacctcataacaagggtgttatggggccttcttctgctgttgctgcttgagcatgctgaggagagatgactgacacaaagttgattctgggacaaccttcttcttatcttctcttcactattttcttttctcttcttgctgcctctttctttctctttgttcttcccactggaggattctatcaaagagtattaccatcatacagaggaggaaaccgaagatgttgaaccatgtacaacagtctttcacccaagaa

SEQ ID NO: 81566 - DNA, 411 bp, Zea mays
  unsure (1)..(411): unsure at all n locations
tgtcaaacatattttggtacccatctcttgatgggtccatcaagggtagtcaacaaagatctaggaacccaaacgtcctttgtgttagcactaggtaaactcattacctttctagcacaagttgcaattttgggttgcctagttatatgagaaataattgacaagctatgagtgggattgttgccaatgggacaatccttgcattgatgtcccttctttcggcatatgtagcataggcgatcttcaagtcttgaagatttcttctttccttgtttcttgcttgctacatggntagtgaatattttcttttctaacataatgcctttttgttttaaatagggacaagatctaattaagtgtcccttctttgagcatttaaaacaaagtttatcatccttgttaataatcaag

SEQ ID NO: 81567 - DNA, 409 bp, Zea mays
tagagctgcaggtcaaggaacttaagaaggagaaggcattcctccaagagtgtctcgatatagcagaaggcgaggaggccaacacccgtgaagcctaccgaaccctaaagatggattatgataagaagttgaagaagctcgcccccacaaagaaaatccaaaagaagaccaagaaccaaggaggccaagctgagcggagggagaaggctcccccagcactagcttccgccaggatagagaatttgtccgtcgtcgaggatatgtccctagctagccttgatgaccttctcaaggaatttagggacactttagaaaaagagttcagtagtacctctgagaacgctcgcgtgtagtacgacttgtagtagctgtatgcttgtaatgtattggtgtaatgaataaaataact

SEQ ID NO: 81568 - DNA, 430 bp, Zea mays
  unsure (1)..(430): unsure at all n locations
ngagacattattacttaatggtcatatgttgtccgaaggacacacttgatgtcatcatatagatgcaccaaagaaccatataaagccttcaatgtccatacaatctctgtaatggaccacactcgttcctttgaaacaattcaaagaacttaaccaattcagatcagattttaagataagaggaacttaaaatctcatttctgatgatactcatgaagtatccatcttatgggaaaaacatgaccaatagaattgttcataacttttcatttcatcccaacaatgggatgaccaattcaatcttacccagcatggtaagtatcatcacttgaaaagttataacatatgcaacactttgtatgggaggatgtatgtagaatacagtccataagaaatgtttctgagaaacatatgccatatccatcactat

SEQ ID NO: 81569 - DNA, 425 bp, Zea mays
  unsure (1)..(425): unsure at all n locations
tctccatggagatgttctgagcgttgtggatgcggactttctatgtgagctgaacgtggatgaagctgaacgagtctgcagagtcgcgtgctggtgcatccaagatcttgagtcggatcggcccacgatgattgaggtggtgcagtttctggagggaatatgccaagtagaaattcccccgatgccaaggctactcactgctattgccggaagcggatcacatcagacgagagtgtcatctctgtagcttttcaaacatcagttntgccttgtagtgtataaataaatttattttttgtaacgtgtaatattatgtctcttggcgtataaatgaattttttcctacaacatgtgatatttccaagagtttttactctaaaattgttaattgtagaaacattttcgtaagagtctgtttctatatc

SEQ ID NO: 81570 - DNA, 430 bp, Zea mays
tgacaatgaggagatggcgctcgtcatcaagagcttccgtcaaatcctcaaacaaaggagagggaaagactacaagtcccgctccaagaaggtttgctacaaatgtggtaagcccggtcattttattgctaaatatcctatatcaagtgacagtgaccgaggcgacgacaagaaggggagaagaaaggaaaaaaagaggtactacaagaagaagggcggcgatgcccatgtttgtcgggagtgggactccgacgaaagctctagcgactcctccgacgacgaggacgccgccaacatcgccgtcaccaaaggacttctcttccccaacatcggccacaagtgcctcatggcaaaggacggcaaacggaagaaggttaaatctaactcctccactaaatatgagtcttctagtgatgataatgctagtgat

SEQ ID NO: 81571 - DNA, 362 bp, Zea mays
aagattcttcatcccaacactacaacatatatgaccttctatgacgattgtacgatgacaataaagaaattcgtcattaaatctattcgattatgacgttttctagcatccaaccaagtttagcgacaaaaaaatatctgtcattaaaaacgtcataaattattcaaaaatcatgtttgtgacggtattatgtgacaaatttgcattgtcattgaaaataattcgtcataacttgttgtacatcatgattgtgatgatatcagatagcaatgtgtattcgtctacgatactttgaaaagacttacttttatagaaaggcgctgacaggtggagaattattatgtgttcgagtgatttgcgtg

SEQ ID NO: 81572 - DNA, 420 bp, Zea mays
  unsure (1)..(420): unsure at all n locations
tgtgaagattcttcattccaacatgggctattcggcggtgccagagccaacccatgttagtcttagcaattaagcatgtgtcaagttcagctctatcaaaatctactaactatagctgaccctctaacacacccttaaatgctattgaatcatcatttcttctaaagatagtgacacctacatcagtaaagagacagttgtagctcattttgcataattgagatacagaaagcaaattgtaatctaatgaatctacaagaaaaacattggaaatagaatggttaggggatatagcaattttacccaatcctttgaccaaaccttgatttccatccccgaatgtgatggctcgttggggatcttggtttttctcatangaggagaacattttcttctcccctgtcatgtggtttgtgcacc

SEQ ID NO: 81573 - DNA, 421 bp, Zea mays
tgtagtctgtgttaaggtcaatacggtattcatcaatatttccatattggccaatacttctgaatgtctctgcgtaaggattttcccttatcaagtttgctaatttggtcatcacattctgatctttagctttgaagacttcgtcacgcgcaagacgcattcgatgcgataaaagaggatcatcatcgtagaagtacaactccaggtgttttggatcactttctcgacgaccaaaagagtgtatccggtgatatacctgaccatgtgctttgaatgtataaacaccatctcttgaacttgcaagattttggtcatactcgcagttgaatgtggtgaatgaaaagtgaccattaaaaaaatctagtgttatccaaaaaatgttgtgaatcagcgtccctagttgtgtacaacaagtgaagct

SEQ ID NO: 81574 - DNA, 417 bp, Zea mays
tattacgatgtgttagattgggtgagtgtttatgcatgttaataaatgacattactagtattgttagtgaaattaagtttgttttgttttcgtatttggtcgattcgcatagattactaatagttttgtatttgtgcacagattattgacaaaagaacctagaatggagctattttggaatttgtaattcaacaagtatgggtgttgtgatgttcctaagtggatgtaatgaagtagttagatgaatctgatttgtgttgtaatgtattgtggtactgagtactctctggtactgtgttgtaatgaactccctccggtgtactattagttgtcgtttaggacaacaacacagtctccaaaatataactttgaccaatgtttttattaatatgcacataaactcttaatacatttata

SEQ ID NO: 81575 - DNA, 416 bp, Zea mays
ttatcaaatggacgtgaagagtgccttcctcaatggaccaatcaaggatgaggtctatgttgagcaacctcccggctttgaagatagtgagtaccctaaccatgtttataggctctctaaggcgctttatgggctcaagcaagccccaagagcatggtatgaatgccttagagatttccttattgctaatggcttcaaagtcggcaaggctgatcctaccttattcactaaaactcttgacaatgatttgtttgtatgccaaatttatgttgatgatatcatatttgggtctactaacgaatctacatgtgaagaatttagtaggatcatgacaaagaaattcgagatgtcgatgatgggggagttgaagtattttctaggattccaagtcaagcaacttcaagagggcaccttta

SEQ ID NO: 81576 - DNA, 417 bp, Zea mays
ttaaaggttaatcttcacctaaaatgaagattatgaatgttcaaggcaaaggtatggaacaaattgcttcaattggtagttgatcaatagtagttccttccaagtggcattctttcaattggtaataatatattctatggaaaggaatgtcaatatgaaggttaaattccttttggcttaaatttgtaaattaatgcatattgtgaattcactgctccatgtgcattaacttaaaaggaatttaatttatgcctttacgcttcataaatgatgatttgtttgccattcatatatagatatcatcattcattaaatacttccttgtactactaatacctcttttcaaagtgttttatcgactagttttaaaaggaaaagagataacaaagaaggaagtctccacaaatgatgaaaaga

SEQ ID NO: 81577 - DNA, 318 bp, Zea mays
tgtacttcgcctcaacatggcatgaccagtgattggggcgccatcttagcacgcctgctgacgcgccgcattaattcagcgcttctgtcgacgcacgcgctgtcaatctaccttcggtcacatcaactgtcatatctgtccccgcagccgactgacccatggcccccacgtctggcggtttcgtcgggccatgcacggagcgcctcgttgctgccgccttggttaaaaatattcctccgcagcaaccccgaggcggtgcgcgatcgcgtgcggtggttcgctcttttcgcactcaaagtctagcacacaacccgtatg

SEQ ID NO: 81578 - DNA, 390 bp, Zea mays
  unsure (1)..(390): unsure at all n locations
tgtttaaaatgtttggtgaattatgggattataaattattatctaaaattccagaagtatggattttggctatttaaatgtcccaaaattccctatttgaactaaaaatcaagaaactatttttattaaatactataagaaattagaagcctagcaaaattggtctggtatttttagcatttttctacaattttccagaaattctttaatcctggtagaaaaagaaaaggaaaaacaatgaatagtgttgggctgaattcagcccaaccggcctacagaaggggagaacccatgcgcgcccgcacccgcggggcggttttacaccgaagccctcacgggtttgaatatctaaagaagaatgctgcgcactatntaaccgggtcactgaca

SEQ ID NO: 81579 - DNA, 424 bp, Zea mays
tatgaagattcttcatcccaacatgggctagtcgacgatgccagagccaacccatgttagtcttagcaattaagcaagtgtcgagttcagctctatcaaaatctaccaagtatagctgaccctctaacactcccttaaatgctattgaatcattacttcttctaaaaacagtgacaccaacatcagtgaatagacagttgtagcccatttgacataattgagaaacggaaagcaagttgtagtctaaggaatcaacaagaaaaacattggaaatagaatggtcaggagatatagcaattttaccaagtcctttgaccaaaccttgatttccatccccgaatgtgatagctcgttggggatcttggtttttctcatatgaggagaacattcttttctccccggtcatgtgggttgtgcacccgct

SEQ ID NO: 81580 - DNA, 397 bp, Zea mays
  unsure (1)..(397): unsure at all n locations
nttccaaatggacgtgaagagtgccttcctcaatggacctatcaaggatgaggtctatgttgagcaacctcccggctttgaagacagtgagtaccctaaccatgtctataggctctctaaggcgctttatgggctcaagcaagccccaagagcatgatatgaatgccttagagatttcctcattgctaataacttcaaatatggaaaggctgatcctactttatttactaaaactcttgacaatgatttgtttgtatgccaaatttatgttgatgatnatcatattgggtctactaacgaatctacatgtgaagaatttagtaggatcatgacacaaaaattcgagatgtcgatgatgggggagttgaagtattttctatgattccaagtcaagcaa

SEQ ID NO: 81581 - DNA, 429 bp, Zea mays
gctcgacattgtcccccttttggaagccaatgacatccttaatgttatggcgtttcccactatagagcatgcttctagcaaatttaaaatttccattttctaagtcatgctcattaattttagcactaagttgagctatgtggtcattttgttgtttaattaaagctatgtgatcatgaatagcatcaacattaatgtctctacatctagtacaaatagtaacatgctcaacggtagatgtagagggtttgcaagtatttaattcaacaatattagcatgtaaaatggcattctcatctctaagattggaactagaaacattgcaaacatctaattccttagccttagcaattaatttatcattctcaaacttaaggctagaaagagaggcattcaacttttcaatcttagcaattagactaacattat

SEQ ID NO: 81582 - DNA, 422 bp, Zea mays
  unsure (1)..(422): unsure at all n locations
ngacctccactccggctatcattaggtccacatgcatgtgaatgacattaagaagacggcgttcctcactcatcacagccactttgagtttgatggcgttcgggctcaccaatgcaccagcgacattccaaagcctcatgaacgacgccctgtgcccctttctctacaggttcatgctagttttcattgatgatatactaatctacaatgattcatggtcggatcatctccatcatatcgatgttgttcggatacgacttcatagtcaaatactggcccagatgcatcaacacgatggctgatgcgctctcgcgctatgacgccgactgcatggaggccactacggatgcgactgctgccatcgccgtcattgcgtcgttgacgtccgtctcgggtcccgccatctagctctacaatgacct

SEQ ID NO: 81583 - DNA, 426 bp, Zea mays
  unsure (1)..(426): unsure at all n locations
tgaaggactgcttcngcaggagagcttccgaacgtgatgtctcgttcggtccacggagtcgctttacccgagcgcaagttacttatcgcagaaagggacgagtgaggtatccttatcccggaggcgtaggagtccctcggctcggtcagccttggctgcttacgtgtacctcgtcgtttccaggatccgctttccgaagtagtcaagaagcacgaaagatatcctgccaaaaagagatcctttttcgaggaaaaatttgacgcagagggggtctccccccttttagcccccgagggagggtcgggctttgccgaggctaagccgacccttccttgacgactaaactttgcgtaggtgcgaggtatatgaacaacttgaaaacatctttaacggtagaagcgacgtatctcgttgatgttccaagcg

SEQ ID NO: 81584 - DNA, 422 bp, Zea mays
  unsure (1)..(422): unsure at all n locations
ctagatattgtttagaagccttgggtaaatgttggaatgatttggacaatgttttatgcctaaacctcaaaaccctaatcttctagtgatgcctgccctatgaactatcctattaactccaaaaaccctagtttcctggagtcccatgaaggaaaattgtattcaagaccttagataatatacttttattatctttgcattttcatgagcattcatgattatatatgtggtatatagaaaacgaagaagaagtagaagttgaagaagcaagagctacaccaccaccacctgaagaaccaccagccgggaactgcttttattttgacatctgtggagcagagcccgactcaactataacacaaggcaagctctagtgcatttgccacctccatgctatnttaaaatctttctcacttgcttga

SEQ ID NO: 81585 - DNA, 383 bp, Zea mays
ttgaccacttgatgaacttgaaagaaccatgaagggagttgagaatagctccgttgttgaagacacgcaacgccgcttgctcattttgcatgataataatgaagtcttcacgcgctgaacggtgaactgaaaaacttgcaggatcaaaatcatactccgctgcaacttctgccgccaaaagctcagctgacaccggcggccgcgaaccaatgaccatgacaaacagagcacaccgccgaagattgttctccaccagagttaaatcccttgcacgctcaaggacgcaaaccggtcgtgtcgccgaacctgcagacttcaccacggtcggctgatgggagggtagccgagcaaagcaaaaatcattcactggtggcacgctagca

SEQ ID NO: 81586 - DNA, 417 bp, Zea mays
taagttcaaacagaatttaaatttgaaattggaaccaaattgaattttggaaatgaaataaaaaagaaaaaattgataagaatgaagaactcctaatcgcgcttgggccaataacccttgcctagcccatctctctgattcccttcacacttaaaccgcggcccagacatactttaccacggggcggcccatataagcatgtgtgtgcggctgtccggtgggacccgctcgccatcctcattgcacgctcctgtttccacgctcgaagccacttacacatgggcccctcgtgcactctcttggatgtcgtttgcaccacaggatcacaccgcgtatgacatgtggggcccctatgatagccatctttctcaacaaaccctgacgctgctccgtgaacctcggcaagttcggcatcat

SEQ ID NO: 81587 - DNA, 417 bp, Zea mays
  unsure (1)..(417): unsure at all n locations
ntgcctcggtcggaccaataccagaaaggccaccacgcaatatgagtggagagatggcaagagtagcgtgtagcctccatggcaagaggctggacggtggagtatctgtgctctcagttagcgtgaacccattctggtcttgagaaacccgggtgcaagttgacatatgcaaaggttaagtgctacatatgtcgtgtggttggagatccccatctgggtattaatcgattcggatcgccgttacttcttggacatgaagacttggtcactgacctacacgtagcaacaagtgaactgaaggggtgataaaaagatggctagtataggacaagtgcttgatctaagaatagaaaggaatctagatgcaagtaattacttaacatgacaagtaaaatgaattcttaaagatccactcat

SEQ ID NO: 81588 - DNA, 405 bp, Zea mays
  unsure (1)..(405): unsure at all n locations
tgtacaagctcactattctcgatcaggataagaaatggctggctatcccgatctactacgtgcttcagaagctggaagcacctttgaatcaccagctagtatcgtctcacctgcagaaaagaaaatcgagttatctataaatatatatatatatataaagaggaccggatcctccccaaatcccacccataattccacaaaataatgttttacacggatgaggatgagcttangtagatacatatttactttcttctttttttttcttagggacaattgcatggttgcccctactcagaactctaacaactccatttttacccatatttttcgaactttgcactattgcaccttttttgaaacgaaacctctgttttccatgttctattattagcacataacgat

SEQ ID NO: 81589 - DNA, 336 bp, Zea mays
tcagagatggtggacttttcaaagtccaaatgactaggtttacttggcatcccgcagctgtaatcatcttcggaaccaacttcttcaacatcagcttgggttgcttcggcagcaggtgtgtcctctaatgaaaccaacccacaacgcctcattgcttctgaaatcaaaacagtttcagtggcttcggtctcatctccatcacgctcaaccctagcagtggatcgcactctggccatttgattatgaatatcttgaagtctattaataaccttttttctgaagcccttcttctgacgaagcagaatccaaagtggtgcttcgtttgagtacaaaact

SEQ ID NO: 81590 - DNA, 407 bp, Zea mays
  unsure (1)..(407): unsure at all n locations
tctaaagggagagcacattttgggactaaccaatgttcattntgagaaagacagggtttgtagtgcatgtcaagcacggaagcaagttggtgttcatcatccacacaagaacatcatgacgaccgacaggccgcttgagctactccacatggatctattcggcccgatagcttacataagcatcggcgggagtaagtattgtcttgtaattgtggatgattattctcgcttcacttgggtgttctttttacaggaaaaatcacaaacccaagagactttaaagggattcttgagacgagctcaaaatgagttcggcttaaggatcaagaagataagaagcaacaacgggacggagttcaagaactcacaaaccgaaagctttcttgaggaggagggcatcaagcatg

SEQ ID NO: 81591 - DNA, 432 bp, Zea mays
tgccttcgcctcagtctaccatccgcagtccaacggggtcgtggaacgcgccaatgggaaaatcttcacatctgtcaagaagatgctccttgatgaaaaaagggcagatggaccgatttgttacctgaggcagtctgggcactaaacacaactgagtgcagggcgactgggtttactccctttcgccttctatacggatcggaggccatgaccccgcaagaaataaaacatgggtccccgtgaacagttccgtcagccgtccccgacgtggacgagccaacttcaaaggatctcattgacggagactgagtcttcgccctacaagccctaaacaaataccaagcccagaccaaagcatggcacgaccacacagtcattccgagggagttcagcgaaggggacctcgtactcgttcgaacagctcggacggag

SEQ ID NO: 81592 - DNA, 430 bp, Zea mays
  unsure (1)..(430): unsure at all n locations
tgaaggactgcttcngcaggagagcttccgaacgtgaagacttgttctgtccacggagtcgctttatccgagcgcaagttacttatcgcagaaggtgatgagtgaggtatccgtatcccggaggcgtaggagtccctcggctcggtcagccttggctgcttacgtgtactccgtcgcttccaggatccgctttccgaagtagtcaagaagcacgaaagaaatcctgctaaaaagagatcctttttcgaggaaaaattcgacgcagagggggtctccccccttttagcccccgagggagggtcggtgcttgccgatgctatgccgacccttccttgacgactaaactntgcgtaggcgcgaggtatattaacaacttgaaaacatcttaatggtagaagcgacgtagctgtttgatgtttcaagcgttgcc

SEQ ID NO: 81593 - DNA, 425 bp, Zea mays
  unsure (1)..(425): unsure at all n locations
tgacattgtctccctgttggaagccaatgccatccttaatactcaggtgtctcccattatagagcatacttctagcaaatntaaattnttcattttctatctcatgctcattgattttactagttagttgtgctatgtgatcattttgttgtttaattaaagctaggtgatcatgaatagcatcaacattaatgtctctacatctagtacaaatagtaacatgatcaacactagatgtagagggtttgcaagcattaaattcatcaatcttagcatataacatgacattctcatttctaagattggaaattgaaacattgcaaacatttaaatccttagccttagcaattaatttatcattctcaatcttaaggctagaaatcgattcattcaatttgtcaatcttagcaatcaaactagcattt

SEQ ID NO: 81594 - DNA, 422 bp, Zea mays
  unsure (1)..(422): unsure at all n locations
tggtgccgatggagaaacaaaaatccttgaaatcttggctgtcaaactgcttgccgnngacaactgttagctcggacggtactccgaagcggcaaacaatgttctgccaaaagaatttttgggcagtctttgatgtgattgtggaaacagccctcgcttcaatccatttggtgaagtattcgacggctacgaaggcgaacttaaagttcccctgagcggtgggcaggggcccgacaatgtccaggccccatcgctggagaggccatgtatgggcgatcagctttgtatattgcgaggggttgcctgaccgaagagagaacttctggcaggcttcgcaggaccttgtgactcgatttgcggcgcagatcattgcaggccagtaaaacccttgtcggatcacctttggtgccatggcccttggc

SEQ ID NO: 81595 - DNA, 428 bp, Zea mays
tctaaagggagaacatgtgataggtctaaccaatgttcatttctaaaaatatagaccttgtgcagctcgtcaagcagggaaacaggtgggaggagcgcatcacagctagaatgtgatgaccacttcaagacccctggagctgctgcatatggatctcttcggacccgtcgcctatctaagcatatggggaagtaagcatggtctagttattgttgatgacttttcccgcttcacttgggtgttctttttgcaggataagtctgaaacccaagggaccctcaagcgcttcctcaggagggctcaaaatgagtttgagctctaagtgaaaaagataaagagcgacaacgggtccgagttcaagaaccttcaagtggaggagttccttgaagaagaaaggatcaagcacgagttctccgctccctacacac

SEQ ID NO: 81596 - DNA, 396 bp, Zea mays
tgaaccggggacccgcgtcaccggaatatcttaatcgtgctcaccggagttcaagaacccgccggcgcacgtggaccgggtaagcctctgcaccgattttcaattcgttgcgtacatggcctctacatcaccccgtggagctcctcgtgcaccttaattgaactataccgccgtggtttggccggagcaggagccgctgacgacccccgccgcctgtgctcgcggccagagtagcttcaaccacctacgacgccgacccgcacaccgacgtgaccgtcgcgacctcccggacgtcactgaccaccccgccggagctctactgccgccggtaagccccaccgccgtaatctatgccgcgggtactatataagtcagtcagggagcgcgggttatatt

SEQ ID NO: 81597 - DNA, 398 bp, Zea mays
  unsure (1)..(398): unsure at all n locations
tgaggctgactcgccgaagcaacagagactgttngatggttgcccacatattctgggatgtanggcgaatgatacgaagctgtatgcatgacctgcttcggctgagcttgatgtgctgctgcttcagctatttccttttgcttctgaatagtgacatggcacatcctggtagtatggcctttgttttcaccgcagaataagcaaaagattcttctcggttgatcgctaaatcttcctccgaagcccctagcacctctgcctcttggagctggaggtccgaaagaactttgttgttgccctgaagcctgtgaggagtattgtggcctttgttgctgactccctttatcatcattctgagtggaattgtgaatngacctgacatgcctcgggtaaaacct

SEQ ID NO: 81598 - DNA, 416 bp, Zea mays
  unsure (1)..(416): unsure at all n locations
tggacagtnatttgcgatgggtcttgtggaaccttcggtgcaggggcagctgcggtcctagtggcaccttcaaaagtcaaaacatgttatgcagtcaaactggatttcagttgcacaaataatattgctgagtacgaagcacttctattggagcttcggaaactaagggcaatgggaataagaaaggtcatcctaaagactgattctcaagttattgctgaccacgtggacaaaagtagcaaggcatgggatccgaagtttgaaaaatatctggatgcagttcgaaggttggaagcttccttcgaaggtttttctgtcaagagtattccgagaggtgaaaatgagcatgcagatttgctagccaaatcagcggctcagtggctccccttaccctctgaagtatttttcgaaacaat

SEQ ID NO: 81599 - DNA, 402 bp, Zea mays
tggtgccaatggagaagcacaaatccttgatgtcttggctgtcaaactgcttgcacgtgtcaactgttagttcagacggtactctgaagcggcaaacaatgttttgccaaaagaatatttgggcagtctttgatgttattgtggaaactgcccttgcctcgatccatttggtgaagtactcgacagcgacgaaggcgaacttaaggttcccctgagccgtggcaggggcccgacaatgtccaggccccaacgctggaggggccatgtgtgggcgatcatgcttgtaaattgagaggggctgcctgatcgatgagaaaacttctggcatgcttctcaggaccttgtgacccgatttgcggcgcagatcattgcgggccagtaaaatccttggcggatcacctt

SEQ ID NO: 81600 - DNA, 418 bp, Zea mays
  unsure (1)..(418): unsure at all n locations
tgttgacacgtttaaaaccaatgtctcttatgttcttttaaatttgacatttggtctaagaatggtaaaaaagattatccaacaagagccgataataaaaggaccaattggggtatgatttatggtgatgatgatgataccttttaagccccaatcggtggcacacgttctttttccaaccccatcccctatacttctcaagacataattgtttctgtaagtgatttgctgcaagcagcaagccattgtgcatctcttgctcttgggactagttctgatcagcatacatggatagtgacactgtctagaagtatgatgatgattttaatctaataacttagcggcaagatcataaacttacgcactctgctctttctantgtggctaaagatgttctaactatgtctgatgctataat

SEQ ID NO: 81601 - DNA, 385 bp, Zea mays
tggaggcgtctattggttgtctgcttggtgtagactcctccttcttttcttccgtcgccttgaatgcaacgggttgagcttcagatggctcgccaagctcgttgattatcctcgagccttctatcatgcactcaaaacttacaaaatgcccgatgacttcctcgggggtcattttagtatatctaggattgccacgaatcaattgaacttgagtgggattaagaaaaataagagatcttaaaataacatttaccacttcgtggtcgtcccacttcttgctcccgaggttgcacactctggttatcaaagtcttgagccggttgtacatgtgttgtggctcctcccctttgtgaaacggaaccgaacgagctccccctcgatcgtt

SEQ ID NO: 81602 - DNA, 408 bp, Zea mays
  unsure (1)..(408): unsure at all n locations
tgacattgcctccctgttggaagccaatgccatcctttatgctagggcgtctcccactgttaagcatactacgagcaaatttaatattttcattttcaagttcatgctcggcaattttagcatctagtttagctatatgatcattttgttggttaattaaaatcatgtgatcatgaatagcattaatatcaacatctctacatctagtgcaaatagtgacatgctcagtggtagatgtagaggttttgcaagaattaagttcaacaatcttagcacgcaatatatcattnttatctctaagatcggaaattgtaacattgcaaacatctagttctttagccttagtaagcaatatttcattatcattcctaaagctagcaagagtaatggttaattcttcaatcttag

SEQ ID NO: 81603 - DNA, 411 bp, Zea mays
ttgcacagatgaacataaatggaaacttgcagaatggaatttggattcagatgggtcaaattaagacgatagaaatcaaggaggccgcggaaaaagggagaaatgggaagaccgagaccgcgaagaagaaaaggaacataaattacggattcgtgggtatcctctgtcgggacagcgaccccatggcaaatacgccaagaacaaagctccctcgggggaaggacctcgatggatatgaggtggagaaggtcaggctcggagacaacagacatatggttacctgcgaaaagcaactggctgttgggatcgatggggagaatcaccacagcggatgaactcgaggcctttctcttgggcgccatctcaactctactggcgaacagagcgggagccgaattgtagatatgatct

SEQ ID NO: 81604 - DNA, 404 bp, Zea mays
  unsure (1)..(404): unsure at all n locations
tgccaattcctatcaaagcagcagcatttaccagcacagtttctgcaaaccataccagtgacatggccatttgcgtgctatggattggatatgattggacccttcaagaaatctgagggagattatactcacgtgttggttgccatcgacaaatttactaaatggatagagtacaaacccattgcttctctgacttcaaccaaggcagtggaattcatacaagatataatattcagatttgggataccaaatagcatcataccgacctgnggtacaatatcactagctctgaattctttgatttctgcgaacaacggtgcatccagatcaagtatgcgtcagtggcacatccaagagccaacggtcaggtagaaagggctaatggaatgatattggaagcactc

SEQ ID NO: 81605 - DNA, 425 bp, Zea mays
tcttgaagagcttgacagagtcaccaccaagccatccaggatgcagcaacctcgaaatgttataagccaatgatgctcgcttgatgattcacctagtgtcttaagatcacttcgatgatacaacacaatagaatcactcattagaatgcaatcctaagctaatattgtgagtgagagcgtttggaagactaaagtgtgctcaatgtgtgcaaagaatggccaagagagctaccccacaagagcaccagttgtatttatagcccccaaatagaactagctgttatgagcacactgccctctttctgcgcactcgcggacggtccacgctcaaaggtcgggcgtttcgcccatcactttaacgactactttcagtttgaaaaccatatcagagctatcagaaagagaggcgtggacagtctacaaac

SEQ ID NO: 81606 - DNA, 425 bp, Zea mays
tcggcacagtgacatgtctcaagacgaaggggtgaaccgtcttaaagatgaaatgacttaaagacccatgatattctgtgtcattattgtagttcattgtaaagggtataaatgtaattatatacaggctgtgaactgtgcctataaataggtgaacaatacccctgtactgttcacgcgctctcctgtaatcacgcattgggcatttgtttttgcttcacgctggtatattttcttaccttcaagccaaaggtacatttgtaacttgttatcatttctacaataatgaaatagaaatgagttaataataataatcatgtgtttaaattattttacatatttcttatcctttctcattatatagtgtgtttatgaaggtataaccttcataaccttcgtccggaatccattatatcccaagggaa

SEQ ID NO: 81607 - DNA, 431 bp, Zea mays
actcaagcttatgaagactcttcattccaacatgggctagtcggcggtgctaagagccttaccctgttagtcttagcaattaagcatgtgtcgagttcacctctatcaaaatctactaagtatagctgaccctctaacacacccttaaatgctattgaatcatcacttcttctaaagacagtgacacctatatctgtgaaaagacagttgtagcccattctgcataattgagatacagaaagcaaattgtaatctaatgaatctacaagaaaaacattggaaatagaatggtcatgagatatatctattttaccaagacctttgaccaaaccttgatttccatccccgaatgtgatagctcgttggggatcttggctttcctatatgaagagaacatatttctttaccctgacatgtggtttgtgcacccg

SEQ ID NO: 81608 - DNA, 414 bp, Zea mays
  unsure (1)..(414): unsure at all n locations
tctttgtccttctgaaaaaacttcgtcagttccggcgccagcggacttagctggacaggcaaagattcagtcattaccttcataatctcttccacttcggcagcagaaggtgtcgcaggagtttcctcctcctggcccgacgtcttgggttttggagatgcaggttttggagatgtaccttttcttttccttgaaacagctaccctcatttnttcagaaatntctttttcctttctggccaacttgatgctttctttgtccagggtgctagcaatcctctttccctttgggccttcggcatctccgcccagttgctcgtaatcagggtaatcaaaattcaaagcatctagcacacggttcaatcttcgcttctgacgagtgccgaaggctgcagtcatcaactgatcttctttc

SEQ ID NO: 81609 - DNA, 416 bp, Zea mays
ttatgccaaaggtccaaaaaacaccttcccgtcgccgtatagcgaaatttctgaaatgcgggaaccattttgcagtggtagtttgcgtataaatagaacaaacatcattaaatatttgtcgtgccatctagttgttttgttgctttgagacattgcgagttgcacttgtttttagcttcacttatttttagtttgagcaaagatagccgaagggaccaagagtgaagatcttgcgctagctgggttttacgaggccatggagaaaattaatgatgcgaagattgatgaagggatactggccaaattgtcggatgattccgaggatagcgatgattttgacttcgggagtgatgatgatgatgccaaagatcgaccatggaggccaagccatgttaaaattggtaaatcaactatga

SEQ ID NO: 81610 - DNA, 370 bp, Zea mays
ttatcaaatggacgtgaaaagtgccttcctcaatggaccaatcggagaagaagtctatgttgagcaacctccccgctttgaagacagagagtaccctaaccatgtctataagctctctaaggcgctctatgggctcatgctagccccaagagcatggtatgaatgccttatagatattcttattgcataaggattcaaagtcggaaaggccgatcctacactctttactaaaactcttgcagatgacttatttgtatgccaaatttatgctgatgatattatatctgggtctactaacgagtctgcatgtgaagagcttagcatgattactgacacacatattccagatggctatgatgggggagacgaa

SEQ ID NO: 81611 - DNA, 415 bp, Zea mays
  unsure (1)..(415): unsure at all n locations
tgtcgccagaccatccgcgcccgtctgttattcaatggagctccgcccgtgcctacgcgctgtccgtcgttcgccgtctgcccttccggtcaagacccctgtcccgttccctactagactgaccactccccctcgccgagctccttccctgtgcgtgattaacccaaggtagaagacaacttctaatnttgtgagctacccctcgagatctatagttaatatcgcgtagatcctgtggcgtttgtactttgtctaactgaatattggtaattcaaatgagataagaatagtgttattagcttcaaaaattatgtgatgcgcagtttgaattaatgtctgctacaattcttatatgcttgtaatctgattaaaatatgagtaatttaagtggcttgaatataatttttctaaataa

SEQ ID NO: 81612 - DNA, 394 bp, Zea mays
tgttgatcttcctcgagccttcgatcatgcactcaaaacttacaaaattcccgataacttcctcgggggtcattttagtatatctaggattaccacgaattaattgaacttgagtagggttaaggaaaataagtgatcttagaataaccttaaccacctcgtggtcatcccactttacgctcccgaggttgcgcgcttggttcaccaaggtcttgagccgattgtacatgtgttgtggctcctcccctttgcgaagccggaaccgaccgagctccccctcaatcgtttcccgcttggtgatcttggtgagctcatcaccttcatgcgcgggcttgagtaaatcccaaatctcctttgcgttcttcaacccttgaactatgttatactcctctct

SEQ ID NO: 81613 - DNA, 403 bp, Zea mays
tctagatatgtcgaggtgacaaatgatgagggtgaattgatagttacgaaggtcgcagctaagcaacttcgtcggttgcccatcattcctcggctttcaaggcttttcctcaacaaggaaatagctctgcatatgacgtggccaaagaatggtgtacgtctcgtcactgatccagacataatggtccatccgtcggacggtgatgcgtggaaggcatttgacgagtttgatcccgaatttgcaaacgaccctatgagtgtacggcttggtctatcgacggacggattcacacctttcaataccagtgcaagcccttactcgtgttggcctgtcttcattgtgccatataatcttcctcctgagttggtcaataaagaagaagtcatgttccttgcactagtca

SEQ ID NO: 81614 - DNA, 379 bp, Zea mays
  unsure (1)..(379): unsure at all n locations
tatcttcggctcgtcgntctttttcatccaaatttgatgattgcctgagtagcaatctaataagctcatgagttccgaagtagatgctacatctacaagggaatcattcttggcaatgggaattcatccttcggacatgccttattagctttctttaccatgatagtgttggccagccactctaggtatgttatttctctaataacaccggcacttagaagtcttttcacttcatttcgtgcaccttcggctttatcatcagacattttctgaagcctttgctttcttggtctgaaggacaggtccacattgagtgagtgtcaatgatgtctctattgacaccacagagatcattggctgtccaagcaaaaacatcttt

SEQ ID NO: 81615 - DNA, 427 bp, Zea mays
  unsure (1)..(427): unsure at all n locations
tgcaccacacgttgtgttcttgcaaatgacttctcggaaatttcttttcaaagttcttttgcaaatagtcaaaggtaaatgaataagattttgagaagcattatcaagatttgaaattttctctccctgtttcaaatgcttttcctttgactaaaataaaactccaccttaataaaatcctcctcttagtgttcaagagggttttaagataccaatttgaaaatcctactttctcccccttttgaatacattaagatattaattgaaaaattcatcatttcaagactttttcttaactcaatttttcaaaaatggtggtggtgcgcgccttttgctttgggctatactttctccccctttggcatgaatcgacaaanacggacgcttgagtgaaatataagcccttttaattactttctcccccttt

SEQ ID NO: 81616 - DNA, 435 bp, Zea mays
ctcaagcttatgaagattcttcatcccaacatgggctattcggcggtgccagagccaacccatgtttgtcttaacaattaagcaattgtcgagttcagctctattaaaatcaactaactatagctgaccctctaacactcccttaaatgctactgaatcatcacttcttctaaagacagtgacacctatatccgtaaaaagacagatgtagatcattttacataattgagaaacagaaagcaaattgtaatctaaagagtctacaagaaaaacattggaaatagaatggtcagaagatatagcaattttaccaagtcctttgaccaaacctttatttccatccccgaatgtgatagctctttggggatcatggtttttctcataggaggagaacatccatttctccccagtcatgtggtttgtgcacccgctatt

SEQ ID NO: 81617 - DNA, 408 bp, Zea mays
tcggaataccatgacttcattttcctcaggagttggacaagtcttctctccttcatcagccctcacaacggacaagtcccggaaatatctgcccctcatgttgacaagatgattttctttaatacttgatttgccaaaaaccacatggcttggtcgccaaggtcgatcttcggagtcttcaccaccactatccacatcatagctgtcactgtcaccagtatcttcagataaaccctccaaaatttctttagtaatcttctctgtattagtcttcgacattgattgaagaaaacccagatgcatctcctcagaaagacttagcttcgaatcaccaacaactttcttatcttcagaaatccttgaaaacgctgagaaagtactctctaaaccgaagctttaaaatctaaa

SEQ ID NO: 81618 - DNA, 426 bp, Zea mays
tcacaagtgaactacaacataaatggccataactattctatgggatactatcttgcagatggcatatatccatcttgggctacattggtcaagacaattctagaaccatgaggcaataagaatagatactttgccacaacacaagaagcagtacagaaggacgtggagcgagcttttggggttttgcaatctcgttttgctattgtccgggggccagctcgactttgggatgaagaaacattgagtgacataatgacagcttgtataatcatgcataacatgattgttgaagatgaaggaactgtatatcccgaccaatgttttgagaatgggggaaacaatgtggaacccttccatgatcatactgcggattttgacgaatttattgcgaaacataatgaaataaggaacccagaaactcaccat

SEQ ID NO: 81619 - DNA, 422 bp, Zea mays
  unsure (1)..(422): unsure at all n locations
tggtccccaaagaaatgggcaacgactctttatgaccaatctagaaaaagctagctctcaataagaggcaaaagcagggctcaacaccactagctagaagccaaaagctcatcggagcaacaaaaagctttatcggagcataaaaaccaattcaaagcataaaattagcacaaaggctaaaatcaaagctagttcatctagaaagaggcaaatggctcaacacaactagcaaaagcttcaaatggctcaattttcctccccctgtcacaatactccaaaaaatctcttcgagagaccaacatacagctccaaataacacatctcttccccttggattagaggaagcccaatataccaaatttctcccccttgatagaggaaccaagatatctcanaatctcttcccttgttgacaagtgaac

SEQ ID NO: 81620 - DNA, 421 bp, Zea mays
tcagcttgacctttgaaagtagcttcgtcttcctttattctatttattaatgaatgtaatattttatcgtttttgagaccttcgttccgaagttcaatcacttccgaacgaaagttgctcatggctatagcacacccttcgtcttcagcatctttttgggccctgagggcattgctaagtatcaagccctgcaaagaagaatatgtgtacgtcattagatttaaacaaacgaaaaattttggtctcaacaaaaaatacaaagatcccatttgttgtacctttaagctattatatgccaggctgtcggctagatcattcttcgacagcaccgagagcccgtcttctaatgttgggaatccgaagctcttgctcatcttccgacagacagaaatcttcttggtgtcagggagacaatacaaat

SEQ ID NO: 81621 - DNA, 416 bp, Zea mays
tccatgattgcagtgctctcatgggcgattctcccagttctgtaaggggtactgggaggtggatgacagccgactgaagcaccacttgatgagaggacgcccgacaacaatgcacgaacacgtgcaggggagtatgagaggaggggccacaacactgggttgttggagagggtagccacgccgtccgtgagggagaggaaaggtcggggtcggccgccaactacgcatggtagatgggggagccacgcgacctcagagggggagtagcgactgtgtggacagacgaggcatatcaatgtcggtcgtggggaagatagctggcgtgagatgggtggctgctcacgagggaaagatgagcctctcggtgactataacacggtaactgtatggaaatgacctcggtgctggcgcatgtg

SEQ ID NO: 81622 - DNA, 410 bp, Zea mays
  unsure (1)..(410): unsure at all n locations
tggncattttattgctaactgtcctgattatgaaagtgaccaataaaatggacacaagatggaaaagaagaagcattataagaaggcaaagggtgaggcgcatctatgctaggagtgggactctgattgcttctcatccgactccgacaatgaaggactcgtcgccaccgccttcaacaaatcaaccctcttccccaacgagcgtcacacatgccttatggcaagggagaagaaggtatgtactcgcaactctacctatgcttcttcaagtgaggacgaatctagtgatgaggatgaagtagattattcatgtttgttcaacggcttatatagatctatgatagacaaaatctatgaattaattgatgccttgaatgaaaagaatatacttttagaatagcaagacgatt

SEQ ID NO: 81623 - DNA, 410 bp, Zea mays
taagcatttatcctgaagttctgtaaatgatttctgcagatttgagtatttatccactttagtcttcaggcttgcttcaaaatatttcttttcttgctcaaatttttctgattgacggagcaattcattctttaatttgtcattttcagtttgaatttcagccaaagagccctccatggtctgaataataaaatccttcttttctagtgcaccttcgtgctctttgatcatgatttcaagatcttgaattgcgacatctttctttttcagattggcttcatgattttcaactttttcagccaaatcttgaatgacggttttgtttttctcttcctccagatcttgttgcatcttcaaaaccttgcttaataatatgctctgtcgaaatgatcttcgtcagaacacgacac

SEQ ID NO: 81624 - DNA, 371 bp, Zea mays
tctaaagggagagcacattttaggactaaccaatgttcattttgagaaagacaggatttgtagcgcatgccaagcaagaaagcaagtcggtgcccatcatccacagaagaacatcatgacgaccaacaggccgcttgagctactccacatggatctattcggcccaattgcttacataagcatcggtggaagtaagtattgtcttgtaatagtggatgattattctcgcttcacttgggtgttctttttacaggaaaaatctcaaacccaagagaccttaaagggattcttgagacgggctcaaaatgagttcgacttaaggatcaagaaaataagaagcgacaacgggacggagttcaagaactctcaaa

SEQ ID NO: 81625 - DNA, 410 bp, Zea mays
tgatcattgattcctagaagcttgggaacacatcgcattctcttcgtaataaaacacagtcaacacgagcagacataaagcaataaatgtacatgcataacaacattacatgaaacaaaagaaaaaattataaagcacataacaaacgataggactcgttgctatggtcacatgtgaaaaagaaccgctgaaaacagagctacgtttgaagagatacaactttcgaaagattaacaagattaaacatgaaaactatgttctaagttggttttaattaatataaatcatgtgggaaaggtattttaaagaaatatctaatttaactttaatctaaattataatttgattggaagtaacatttaaaactagcaaattatatttataaaaatattacgtaagatttataatat

SEQ ID NO: 81626 - DNA, 407 bp, Zea mays
tctgcaccatgtcgctgctagccaagttggtgcagctaccttcatcaatgatcaaacaacatgaacgctccttaatgacacactttggttgaaacaacgtatgtcgctgattctgctctgccttctccatttgtgcactaagcacacgctgtacaatgaggctctcataatgctctgcattatctgcaccaatctgttcttctggtggttccttagtgcctgcatcatcagccgcaagcaaagcaagtgtagcttcatccaaatcactatcagaggaatacccaccatcgtcttttaccaccaaaacacgctgattaggacaatcaccctgcacgtgttcatatcccttgcatcgataacacagaacatctcttggtctacccgtggaggctactgaagaggcacta

SEQ ID NO: 81627 - DNA, 413 bp, Zea mays
ttagtgattagagagagtgatttgttgtgttcatttgatctcttgcgcttggattgcttcttttctatctcattctttcttgtgatcaaactcaattgtaaccaatgcaagagacaccaattgtgtggtggtccttgcgggaacttcgtgttccgtttgattgagaagagaagctcactcgatctaagtgaccgtttgagagatggaaagggttgaatgaaacccggtctttgtgaccacttcaatggggagttagtttgcaagaaccgaacctcggtaaaacaaatcatcgggtctcgctctttatttgctcatgatttgtattgcgttctctctctcggacatcgttatatttctaacgctaacccggcttgtagttgtgcttaagattataaatttcagatgtgccctat

SEQ ID NO: 81628 - DNA, 427 bp, Zea mays
  unsure (1)..(427): unsure at all n locations
ntctcgactaagtcagggacagggcctcatggacaggtgaaagtatgcgtaagcggcttggccgaccgagccgagggattcccacgcctctgggatacggatacctcactcgtcccttccgcaaaaagcaactctcgctcacacaaacatccctgttaccgacagagtccagatgctcgaaacaggaggaaaaaagacgcagcttcgctagcgtggcgagggcgtgttcttctggcctcggcgggcgcagaaagcacacgctacaagatgatctgatcctgcaggttcgggtcttcacgccgaagggagccgtagcaccctcggcatcgacgacgtcttcagcaaagcccgacccagcctcgggcggcgccgcggcccaagggccccttcgggaatacggcccgagcaggcggctcaaccggttacc

SEQ ID NO: 81629 - DNA, 302 bp, Zea mays
tgtcaggcagggaaacaggtgtgaagcactcatcacaacaagaatgtgatgacaacatcaagaccactggagcttctccacatggacctcttcagacccgttgcctatcttagcatcggggtaagtaagtatgatttagtaattgttgatgatttttctcgcttcacttgggtattctttttgaaggataaatcagaaacccaagggaccctcaagtgctttctaagaagggatcaaaatgaatttgagctcaatgtgaaaaaagataagaaaccacaatgggtccgagttcaaaaacctac

SEQ ID NO: 81630 - DNA, 409 bp, Zea mays
taaattccttgcaggtttatgcatccggtggctcaagctggattatcgacagcggatgcacaaaccacatgacgggggagaagaagatgttcacctcatacgtcaagaacaaggattcccaggatactctcatctttggagatgggaaccaaggcaaggttaaaggactggacaagatagccatcacaaacgagcactcaatatcaagtgtatttctagtagagtcgctcgggtataatctactgtctgtaagtcaattgtgtcacatgggctacaattgtttatttacaaatattgatgtatctgtctttagaaggagtgatggttcattagcttttaagggtgtataagacgacaagctctatttagttgactcttcgaaagagaatgccgatctagatgtatgctt

SEQ ID NO: 81631 - DNA, 418 bp, Zea mays
  unsure (1)..(418): unsure at all n locations
tctcaagcgacggcacaattaggatttcttatattcatatttctgaaaatcancccttgagccaaagaccgagcgtggtcaccttgattcctatctcaaattctaaggaccccattgacaaaattgtgcctaattaacccctctatctcatgtcntaatatagaatctggacgcgtgccttggacatgttaaacccgcgatcttctttctgtgcgcggtattgagacaaaccaaatttctcccctctctatctcttgatccagtcagcaaaacctacaagcctccacacactaacgacaaaggaatgttagaggaagagatctctctacaggatcatggccataatctcatagatttggagctaatccgcgcttgaactcaacctctctctacgctgcctcgtgctcgacgctgtgct

SEQ ID NO: 81632 - DNA, 414 bp, Zea mays
ttgcctctggcagaccaatatcagaaaggccaacacgcattgggagtggagagatggcgagagtagcgtgtacccttcgtggcaagaggctggacggtggtgtatctgtgctctcggttggcgtgaacccggtctggtcttgagaaccccggtggtgagttgacatattcaagggttaagtgctacatatgtcatgtggttggagatccccagctgggtattaatcgattcggatcgccgttacttcttggacatgaagacttggtcactgccctacatgtagcaatccagtgaaatgaagggttgataaaagatggctagtgtaagccaagtgcttgatctatggttgtaagaactctagatgtatgtaatgacttaacctcgatataaaattgaattttaaggatccactgt

SEQ ID NO: 81633 - DNA, 415 bp, Zea mays
tgacattgtctccctgctagaagacaatgccatccttaatcccagggcgtctcccattatagagcatgcttctagcaaatttaattttttcattctctaagtcatgctgattaattttggcactaagttgagctatgtgatcattttgttgtttaattaaagctaggtgatcatgaatagcatcaacattaatgtctctacatctagtacaaatagtaacatgctcaacggtagatgtagagggtttgcaaacatttaattcatcaatcttagcatgtaacatgacattttcatttctaagattggaaacaatatcattgcaaacatttaaatttttagccttagtaatcagtttatcattttctatcttaaggctaccaattgattcattcaacttgtcaatcttaacaatcaa

SEQ ID NO: 81634 - DNA, 398 bp, Zea mays
tatgttggcctcggtgcacacgatcacccctcccagcggtcggaatcgctcaccggagcacctccgacccgctcggtgcacccccttcgccgttcacccatccctagtccccttctcatggccaaaccccaccaccaggttcgtagggtccccttcatcggccttggcccgcttatgagaccctagacccccttgaacctaagcccgtctcgtctccggtgacctcactgccgcgggtgagagcggcgccgcccataaccgttaaacccctatgcaccccatctcaaccgctcgcctctgatccaatgacatggatctctagatactggttcacgttggcacctctgccgctgggtcccactcgtcagacgctagcgctcttgttgctgggctcgatc

SEQ ID NO: 81635 - DNA, 409 bp, Zea mays
  unsure (1)..(409): unsure at all n locations
ntagaggagaagcatggcagacaaaaggcacttgataagcatttcggtaagtgggatgattaatttgattagttgtatatgttgaatgagaggttgagctaagagttctagtatagtagagatggacactaaaacaattgatgatagtgttggggacttgttctcaaatgctatgtgttaagaacaaggcaacacaaaatattaatggttaaagacctttgtccttcgaagcattatccccctaaggatataatgatcttcagacaaaggttatgaaggacataccttcatcatctcagcatataataatgaaagtagagaagcatatgaaacatggaaaataatatgagcaattatcttgaattgtcagattatttatattctcattatctcatcatgtacaaacatt

SEQ ID NO: 81636 - DNA, 389 bp, Zea mays
  unsure (1)..(389): unsure at all n locations
tgctctcagactctccgaagtagcctagttttttcatcatggtcatgtcaccttctgatacagtagatttttcaaattcaagatgactaggctttgtcgggtttagaatgttgtagtcctcctcgctctagttatcactatcaccctaaatcacagtttgtctagcttcaacattggaggcaccttcgtcagtaactgcacctagcacaattagacctgattgcttcattacttctgagatgggcgcagtctcagcagcttcagcctcgtctccctaacgagacaccctagcggtggatcgaactctggccatttgtgtttatgctttntctaagacgaagctaatcaccagtgacgaagtgtttgctcgaaagtgccatatatagagc

SEQ ID NO: 81637 - DNA, 274 bp, Zea mays
ggctactacggggtataccttagcgctaacagtctgctatgtctttcatgtggtaggttcaaaactgtcgtctaacaacacacaatcagagtttacaatgctttattggagttgctgtagcacatatatgaattgttgcgagcatgaggcataaatggctaacaaactgggtgtgggtacatgaccctttcatgagattgtagaaattgccatcgcgaagacgaggaggagaccccgccatagttgtagtacaaatgttatgactatctacaca

SEQ ID NO: 81638 - DNA, 270 bp, Zea mays
ggactgactactgccgtctctgcgacacgtggtcagtctttttctcctgcgacgctgccttgaaagagttcacctacctactgacttcttaaactccttcttcaccattgaagtgaggccacctcctatttttctttggcctaagatggtaccttcctgcggtttaatgttcctacctgcgcgcactgctgactactatctcttaaaccttttaccaataagacatatcttgctgaccctcctttctgggccggtacactcttgggtctc

SEQ ID NO: 81639 - DNA, 311 bp, Zea mays
tgcgggccgggcggcacaatcgtggcggccgtgggctagtgccctcccgtagtccggactggccaactgtctgcacgagcggcccgaagcggattacgaggtggaaacagaaagcgagccgtttgcacgattcggcacgatcggatagccccccatccaggaggtatatcttggagtaacattcgcccgcctcggacgagcggtcacaggctggcatgctgacaccgctttgtaggcctacctactcctaaaatcccatggggatcccatttgacggaattcttctaagtggttcgtgacctcgtaccccc

SEQ ID NO: 81640 - DNA, 289 bp, Zea mays
  unsure (1)..(289): unsure at all n locations
agtcttttgttctcgccgcctttacataagagaaatgctgttattatatttccgtactggatctttgngaaacgaaccaggacctacctctagaagtaacagtgaccaaggagagatagacacatggccaatcaaactcagtgagattctgagagagataaccagttcgtcccaaccacaatggggaaagaacagacttaactgcagcatctgaagtaacccaccttgtgagcgaacgtgcacatacggtctatgctctaaatttactcacgacaccagtcctcattga

SEQ ID NO: 81641 - DNA, 310 bp, Zea mays
tgcgaaccgctgctaaaacgtgagcacatcaggtatgtcttgctggatggactgctaatatctcgatgctacttgctgaatggctgctactaatcggacaaggtgtaacgtgtagcacctgctggcagacttatcgatgtactgtaaactgattagtccttaacattgatagttgttgcactcgatctaacctgcttagttattcggaatgaagcctgctagttgaccgttgggaaaaaatttgttgcatggccagaattgctgccgagttgccctcatctcttggtgttgcctccctcccactttccct

SEQ ID NO: 81642 - DNA, 272 bp, Zea mays
gtgctagacctagaacctttcgctctggagctggtccttataacaggaggcctgcttggggtcttgtacggcacgaagttacctggacaactgcgggctgtcatgctttgctcaaagtgacatacctgcctcagactatccggcagataagaattctgtcttgactggcgtatggtgatagacctgtcacgcagcagcgcacaactctagcagtggcgcagtgattcagcagtagagagggcttcggcaatgcagtaggcaggacttcagca

SEQ ID NO: 81643 - DNA, 299 bp, Zea mays
atgttaccggaagtccgcaggtctaataggctttatacataaagccacggacatagtgtactgctaaattatgaggacgagacacgttagccttagctgacgtgatttacagcgagagctattatagtaaattcagttaaaatttaattcatgacctcaagatttaatacaaattgatattcatagttatttaaatgtaatttgtatcggatatttagaaaatggctggtgacttagagaataaaaaactaactttttggttgtcaatacaaaaatgtatgatgacaaaaaaaatactg

SEQ ID NO: 81644 - DNA, 91 bp, Zea mays
tcgaacgtgagcttcccaacttgcatgagcgtcgcctcctgtattgcaactctactcacgagagctgctgtatgggtatatctcttctgga

SEQ ID NO: 81645 - DNA, 158 bp, Zea mays
cacacattttgttataattttattactatatatatgactaatagacgattattatattttagatactgtcagagtaactatttcttatatatgaatatatatctactattaaacggcacttgatatttgaactttatttatttggatatttatctatg

SEQ ID NO: 81646 - DNA, 191 bp, Zea mays
agatcttcgtgctgtgttgcgctagcttgctcggacgttcagtctggaaggctcgcctaatagaaacggagaccgtgccgtcggtgttcactcaccagggtttatccgtgcaatgtagcttgactgtttctaaatctgcctcactgcatgataggacacggcatcacgttggctcaagcagactttcatga

SEQ ID NO: 81647 - DNA, 246 bp, Zea mays
cctctataattattctcgtgcccaatgctagagaggacctcgcgaacctcgacgtgaggttttttttgtccattcctgcagatgcatgatttggcaatgacagagtccttttcgctaattaaggtgagctacaactaatgaggtttttgtagaatgcgacggacgagatctgtcacgactagcgcacacacgccgatatcacggtgttctgtccgcgaactcgtttgacatcacccctctctcctg

SEQ ID NO: 81648 - DNA, 362 bp, Zea mays
gccgctcttgtttttattacaatatgatgattccattgacacctgtgtgttgtgcagaggctcactatatgggttgtactgctttacagaaaaaggatgtattgtgttaagactgcatgaacatggatgtattgtgttaagattatttttgagatacatatcacatgtgatacattaatgactcgtgtgactaatgctgtgtcaactgctgtgctgtggtgtgtagctgtacaactgtgtgactactgctgctctatggaagatgttgtgaatgatgtcaactgctgtgactgcgttgtgaatgatctgtcactgtgagtcactgtgtgtgaatgtgctgtgctgtactgttgctaagatga

SEQ ID NO: 81649 - DNA, 193 bp, Zea mays
  unsure (1)..(193): unsure at all n locations
tctctctttcttacttgtggcgaaatcttaggtgctgactctgactangcctatctgcgngtgactgcagcttctttctgcttcgctctctaaagatctgctggtgagtcaaagacagacagcctgcacgtgctttcgagctataagtgcgtatagtacgagtggctatgtgcactgtccatgttccagtaac

SEQ ID NO: 81650 - DNA, 140 bp, Zea mays
tttttctccctacaagggatgagaatcatttgctgagcctctgattaatcacgttgcagcgaccctgcctacgttatccactaaaccttaccacgaaccacttttagctgcagtttgtaagtaatatgctatgagttctg

SEQ ID NO: 81651 - DNA, 285 bp, Zea mays
ttacaagtatacactcaaccggtacctataattatcagtcagaagaggtccaacaatacagcaataaaagggacccggttgttacgagtcatctgcaaccatccgtgaggcacagacggtcttaccttcctttaacgcaaaacattgtgggggaggaaaaactatctatgccctctagaactcatttagtttactcgcagtgcgttatattgactaccatcattaccgtcaatcttaagttggtaacttcgaaaatacagacaatattccaactcaatatcccac

SEQ ID NO: 81652 - DNA, 336 bp, Zea mays
  unsure (1)..(336): unsure at all n locations
gaggagtcggtttttatttcttcgtcatctgtgctcgctactcccctgagagctggctacttttaatcanggatgcccctgcatagtgtgacttggctacggaccgcnggaatgttgaccctgtgagcgactgcgtcggctggtcgtgagtcttgtttaaagtgaacatgacttgcctgcggactatctgtgcgtattatgaacgttgtcttacctaggtataagagtagatgcctgacttgcgagcagcgcagcgatttctagcagcagcgcagtgatctccagcagtagcgcaggagcctcagcagtagcagctagcgcaggacttcagcagta

SEQ ID NO: 81653 - DNA, 201 bp, Zea mays
cttctatttggcgcgtggggctcaccctaaatttattgctattggctatacgtatcatagagagttgagaattaagctataaatctctttaaacggtggagctgtctgtctaataatccaaacatgaaacatctctcaagctgtactaaaaagggcgcaaccacaaacctgcgatgcctaaacatgtatgacttgtgctgc

SEQ ID NO: 81654 - DNA, 390 bp, Zea mays
  unsure (1)..(390): unsure at all n locations
ctcagctctcaccttgacgaccacctttgatacggtgccactgcgccctctgtacttgtttcaaagcttgcacatgaccttcatctacctagctgacatatcttacgcccacattcggccctatggtgctaactgattgcgtcagtcatgcacacataagcactattagatagatcatcgttctgtagcggttactgacagtgatttccagaccttgagtggggcagacgttctttttacctgaacatctagtacgacacttatgttgtcttactatcttcagatgacgcagaatgtgtggtnggcttattcacaatatgaatctaacaaattctgcgatatcttaacttatactctcctaacatatctatgtctatgtaacccacacag

SEQ ID NO: 81655 - DNA, 429 bp, Zea mays
ctaaccactggagtctatccacagagacggagccagcgcctcagctacatagctgcttaacgctctcttgaaacacaataattgcgctaacacataaagtatgacatcctttttaaacaaccttacttgaaagacatgtcctatactatgctacaatcaattatcaggaccataaatcataaatgaggtattgaatgatttgcaacttactgctgatcacacgaatatgatctggaatctgttgacgagggacactattcccgatgagtggctcgtgcaatcactcacccgagcaactgagcaatagtggacagtcaattgtgtctcagtagccatgtagaccaacattatactctttgccattcaactattcttcttcatgcagacttactgtttgtagctctctctgaaacattttagctaacatct

SEQ ID NO: 81656 - DNA, 366 bp, Zea mays
tgtccgatagagatatttttattttataggcgatgaatgatatctcttggcaagcaactagactctggcaaagaagacccttgacgatgaatatttagttggctagcactttaattgcaaaatgggaacttactaactattaataaccacagaatatatatacgcatattgaatgcgagtatgattttataatggcaattaatgttgtagattagcaacctaagctctttgataaagaatacatatcatgaactcattgacaccataatatatgaacgaggcactgtgtgctgatcaaatgagtgagtgtggtctggtatattgacagataagattgagaacacatgtatgctactattcttcctt

SEQ ID NO: 81657 - DNA, 369 bp, Zea mays
  unsure (1)..(369): unsure at all n locations
atgctcatatattatgtcatattctcgaagcactgtaaatccgtgagatgaatggaatcatagtntcagccttgangtgcatcatcacagtgatcatgatctaggtagagctaacctctgaacttacctctaaaaatatanatgtcctttgatttatcattgtagggctgagaccactngaactcatatgcttaggaatcttctatgccatgctcaatcagcttgatatatgtcttacttctgagacagaatgacaacaaactcaatttttcatgcttcatagatgcactcattgcaatgaatcaagccacgtctcacatgcaatgattctcttatggtgagtccgtactctgcttcatgcgtacatgc

SEQ ID NO: 81658 - DNA, 259 bp, Zea mays
gtggaaagactgatgctgctgatggctcacgaactttacctatttaagctacacaaatgtcttctacaccttgagaatttgagaccgaaactctggacgatgaaatggctgtgactaataatctgtttatatgtcatagactcatcagcccagcgtagccacttattgtgataacgcacggctagaggagaacaatagacccaactggcggtttcatgttgggactcgacaacgtgcggtgatactcaagtaactgttc

SEQ ID NO: 81659 - DNA, 285 bp, Zea mays
  unsure (1)..(285): unsure at all n locations
tacgattttaaacactaaagtgcgtaaccctaagtatactatcttaaacatctccatgaacacatgtccatgaccatgctatgacaagtgcccacgattatgaaacttcaatgaggtgtatatgtatttgcagcttgactgcttgtcattcanatacgatctggatctgtctgctagagtacatgacatccaaatcaactaaatctaactcttaatcagagatcaattatcaatgttgtcagtgtatacaaaatatggcatatttcaatctctaaatccaaattc

SEQ ID NO: 81660 - DNA, 150 bp, Zea mays
  unsure (1)..(150): unsure at all n locations
cttactctcggcatgtacccatagggggatgcaatgattcaataccactcacggtacgttataaacagccaaaggcnacaacacatacaagaacgatgttcagtgttgacctcctaggccagcggtttactctttacaccgcagagtttt

SEQ ID NO: 81661 - DNA, 144 bp, Zea mays
gagctccctctttcactagatggggggagtcttctttacccagtcaaactgtgacttttcagagacattacactaggtgggcgggatatttgcatgacagactcgactatctaaatattcactttccaccataaatgcagagat

SEQ ID NO: 81662 - DNA, 356 bp, Zea mays
tgccttcgcttcagtctatcatccgcagtccaacggagtcttttagcgtgccaatgggaaaatcttcacagccatcaagaagatgctcctcgacgagaaaaaaggcagatggaccgacttgttaccggaggcagtctgggcgctaaacacaaccgagtgcagggcgaccgggttcactcctttccgccttctatacggatcagaggcaatgaccccgcaagaaataaaacatgggtctccgcgcacagctccgtcagccacccccgacgtggatgagccaacctccaaagatctcattgacggagaccgggtcttcgccctgcaggccttaaacaaataccaagcccagaccaaag

SEQ ID NO: 81663 - DNA, 350 bp, Zea mays
tgtgaagattcttcatcccaacatgggctagtctgtgtgccagagccaacccatgttagtcttagcaattaagcaagtgtcgagttcagctctatcaaaatctaccaagtatagctgaccctctaacactcccttaaatgctattgaatcatcacttcttctaaagacagtgacaccaatatcagtaaaaagacagttgtagcccatttgacataattgagaaacagaaagcaagttgtaatctagagaatctacaagaaaaacattggaaatagaatggttaggagatatagcaattttaccaagacctttgaccaaaccttgatttccatccccgaatgtgatagctc

SEQ ID NO: 81664 - DNA, 350 bp, Zea mays
ttatttgaagtgtaggacattttgagacaggatcttctattccgctgcaacctactcgaaggatcttctcattccactgcgtactaagtcttcgagtagagtaagaatttaagttttaaattgataagttttattcgcctatttaccccccctctaggcgacatccagatcctgttcccgggtcaaagggaactttcactcgcgccggctcttattccaaggccggcggccacctcaccttcttccccggcatcggccgtcgctcccttatctccctattccggtccaggtgggcgtacgaaggcccaacactggtgtgacgagggcgggcgttctccggcgggtgctct

SEQ ID NO: 81665 - DNA, 351 bp, Zea mays
tattgaggggtcttcttctatttctgagccaatttatttctcccctatcgaagctaggacagaattggccaaagagacagagctgaagaaagcagcagagccatcgaaggcttcgagtccgttgcaagagacggagctgccgaaggtatcaaagattcctgcagcaactccaaagaagaggaggatggctagcatactagatggtgtcatgtaatctgtgaaagttcaaactcctgttgtggcacctgattcagcaagcaaaaccttgaaaaattctaacgaagattgtatggtgccagctacttctgaggcgggaccctcaactcccgccgaagcatgccctctaaggac

SEQ ID NO: 81666 - DNA, 354 bp, Zea mays
  unsure (1)..(354): unsure at all n locations
tgcacacatagctcttttgaatacctttgatcatanctcgntttatatgctatgactaatgtgttttcaagtttatttcaaaccaagtcataggtatattgaaagggaattggagtcttcggcgaagacaaaggcttccactccgtaactcatacttcgccaccactccgagcaactctctcttctttgggggagaaatgagcattaaagaaaaggacttcatccttggggagagagtaaaagctcaaacgcaaaaggacttcgtctttggtataatcttaactcacttatttatgaccaaaggggaagattgcacttcgagggctctaatgattccgtttttggcgattcatg

SEQ ID NO: 81667 - DNA, 351 bp, Zea mays
tacacaccacaggtggcgaagccggcctttttgttgcacaatgcgggctcgatcatgccccgtagccttcaacacagtgcgcaacgaacagaagactgagtgagtgactggccccgtaggccggccgcatccatcacagacacatcttgatcggagccgcatagattctcagcactgttcctgatgaggtgacatgagttcgaccccaagggacttgtagttctcgtccgcactgggcatggcccttccggctttggctgctcgtctttggcgagtttagtcggttggtatttggttcgtgtccagcgtggcgcttgacagcaagtgatgaagaccatcactgcacgcatc

SEQ ID NO: 81668 - DNA, 358 bp, Zea mays
tgtgtgaaggggtgggaaattcttcgggccgagacttatactcgtatcctgcattgacatgcaaaattcccaccgaattcagcagtcttagtttctccaaacctacatgttcaacgtctgaagtgctctctgcgaagtggggccaaaaaaaaaaaacagtttagcgcatagctgggcgattggttgcgtccgcgtggctttctcagatcgtggcgcaccgcggcggcgctgacgccgccggcgaccaggggctctcggctgccgaccgccggagatggggaagcgcgatttcgagcgcctgcaccacgtggcgttcttcgaggccatggccacggagctccccgacgaatacgcctcc

SEQ ID NO: 81669 - DNA, 368 bp, Zea mays
gaccttaaaactcagcttatggtcggaatgaataacaaactctcttggccatttttagtgttgccatgtttcaagcgctcggaccaaagcatacaattctttgtcatacacagaataatttaattgagcacctcccaatttttcactaaaatatgctataggtgttccttgttgcattaaaactcctctatcccaatcccactagcatcacattctacttcaaaagttttagtgaaatcaggaagaataagtacaggtgcttcagtcaaacgtttcttcaattcttgaaaagcatcttcttgtgagtttccccatttaaattcaacacctttctttgtcaattcatttaaaggagaagcgatggtact

SEQ ID NO: 81670 - DNA, 357 bp, Zea mays
acaagccagctgccgatggaaagacaaaaatccttgaaatctttgctgtcgaactgcttgccgttgtcaactgttagctcggacggaactccgaagcggcaaacgatgttctgccacaagaatttttgggcagtctttgatgtgatcggggaaacagccctcgcttcaatccatttggtgaagtattcgacggctacgaaggcgaacttaaggttcccctgagcggtgggcaggggcccgacgatgtccaggccccagcgctggagaggccatgtgtgggcaatcagctttgtatattgcgaggggttgcctgaccgaggagagaacttctggcaggcttcgcaggaccttgggacc

SEQ ID NO: 81671 - DNA, 348 bp, Zea mays
tattcatgacgaggcatgtggccggttaaaatgtcttttatcatgaagcctacatcggctcggtccttaagagactcaaacggagacaatctaccgagacttccttctcgtgcgagtcacccaccggccttgtgtttatcatttacaaccccaaagtttggctcctgacagaagcacattttttcagatgctgaacccatcatggtcatgaaggattcaccatcaagtttttttcttgaaaaagattcccatcccatatgaagcatcatcatttgggttatacaaaagccttttctttctaaagcccagatgggctccctatactcttaagtcaatacgattaaggga

SEQ ID NO: 81672 - DNA, 354 bp, Zea mays
tctaaagggagaacatgtgttaggtctaacatttgttattttctaaaaagatagaccttgtgcagcttgtcaagcaggcaaaaaggtgggaagctctcatcatatcaaaaatgtgatgaccacgtcaagacctttggagttacttcatatggacctcttcggacccgttgcctacctaagcataggtggaagtaagtatggtcttgttatagttgatgattttcccgcttcacttgggtattctttttgcaggataaatctgaaacccaagggaccctcaagcgcttcctaaggagagctcaaaatgagtttgagctcaaggtgaagaagataaggagcgacaacgggtccgag

SEQ ID NO: 81673 - DNA, 359 bp, Zea mays
ctgctgtgatacgcggattgaacatcgccatgtcacttgttattttgatattgacgggacacggagaatctctggtggacttcagccacataaacaatgaatgggaacgtgtaagtgatttaatgggaaaatattgcgctgccgcccgaaagctggaacataaattcgagggtctggagtatcatcttatacaaagagactggatcacagcgggcgatgtactgtccgagctcacatccggtcggactcaggtcccgcccggggtcttcgtgcaagatattctacacccgattatctcaatctatcacacagaagaatgcatcatgcatatgatcaacccgagtcacactctgatgact

SEQ ID NO: 81674 - DNA, 350 bp, Zea mays
tcgctttacaaggaatgattttactgaggacgtatttgagacgttcaatgtaacttcttgtcctccacatttcttaccttgatttcctttttaactaatttggtgcttatgcatttgtttgtcactaaagaaagtgctttgggaagatgacttttgtacaattattaggctgccatctaatgcgttggaccaaagaaacatcatgttgtttcttcaattaaagttgtaagttgactggagagttcatcagtgtgtttctctttactatgatcataaaataatccaaatattccaattatctattcttcaaatcactgtaccaactggaacctgtaaaataaggtatgttg

SEQ ID NO: 81675 - DNA, 347 bp, Zea mays
tggacagtattttgcgatggttcctgtggaacctttggggcatgtgcagctgccgttgtaattgcaccttcaaaagtcagaacatgctacgcagtgaaacttgattttagttgtacaaataatattgctgaatatgaagctttgcttttgggtcttcggaagttgaaggcaatggggataagaagggcggttctcaaaactgattcccaagttatttctggctatgttgacaaaagttgcaaagcaagagatccgaagattgagaagtatttggatacagttcgaagacttgaagcttccttcgaagggttttctgtcaagaatattccacgaggagaaaatgagca

SEQ ID NO: 81676 - DNA, 356 bp, Zea mays
tgatatggttaaggtatgatctctagggtgataaagacttgttttatgctgggctcctcaagtttggtgcctttttctcaaactaaaccatatgtgataacatgttacagatgtaggtactgaggagaaaccctgagtaacacctggggtgttacagccctccctcttaaaagaatctcgccccgagattcgagtcaaagtcttccaggggtgatgaggtggttacatcttgcttgcatagtattggttagctttttaaggttcacgagaaaaatctgctcttcgaatgtcatactctttgaaacttcagaaggaagcccttttcacatagtttcatatcttaatttggttttcat

SEQ ID NO: 81677 - DNA, 353 bp, Zea mays
tgcagcataagaaaagagtatagaattcttcaacatctctgaacagatgagcatcttcactgatctccaacacagaccccacagcttctcagataaagaggaaagtagaataaaggttttcccaactatataactaactttattaacatagtatgtaaaccaaaatgcagggggtacccacactctggtaacaatcattacaaagatccaaaccaaacatagttcatcatgacaaacataaatgcacaggatatagcaaactaccctgtctaactaaaactaactaagaccgagactaacgctaagactgaagcttccatgtatatatttatttcgtattaattacaagatcc

SEQ ID NO: 81678 - DNA, 348 bp, Zea mays
ttgacattttgcaagctctggagatcacataagctttagtgtagctacaaaaaaaatgatcgatttcacacgcatccgcgcatacagtgtgccgagccagcgacaggtttggcgtcatgacgcttcagaagtcgagcaaaaacaagatgccaagggcagcgtcaggttcattatttgctaacccagacagcttcggcgcgacgacgacaaccctactcctatgaacagcaaaatctcctctgcacaagtaatcagaatggtacgttcagttccgccaaatatagcatcaggcaagattgcatcaacaagcctaaaaaaggagttcacgagtggcttaccctaacgctg

SEQ ID NO: 81679 - DNA, 355 bp, Zea mays
tagtcccgggcggtgctctcttctccttcagacagtttttagtgtaaatgcgagttttgcatagttcctatccgaggcacaccttgttgtcgcggacggtccgccggaagggcacgaacggtccacgcataggtgaattcttcaaaaagcttctcatgtccggaataatctacggtattccggacaatcgacttagaattgaaagagatggacttatgcacctgagaattaatcaactaggcaaactagttagtccataagatttgtgatggtcgtcaagcaccaaaatcaaatatagaaaatggttaaggtcgtttccctttaaaatttcccacaaagtgtgatatgggagtgt

SEQ ID NO: 81680 - DNA, 356 bp, Zea mays
tgccggtgcccaccacctctcgcccccttccccgcctttgtcgcctataaaaggaccgtcgagctccctcttttccacaccggccttggccactccttcttcccttccccgagctcgattgagccagcgccgtcgtgcccttcctccgctccggtgagtcccgccctcccctctctattgagttctagcccaattgttgtagctcttaagcttcaccgtgccctcgcgagcacaacacacccaccccctttccctattacacccggtagcctcaccggcgatcccaccaccgcgggcgcccgccacctcgccgtggaccggccattccaagcgccctctggcccaattggccctac

SEQ ID NO: 81681 - DNA, 353 bp, Zea mays
tcggccttcggaggccgaaggttgaaatgaatgaagctgccgaagaatgccagagggccttcggcacagtctgttctttcattggaacgagagacttagtacaagagcatattgccttcagggtatggccgctcgcggagaaatgggaaatgccacaagaaaccgtaaaagaggccgacgaaggtggacttatcaggttgaagtacacttttaaatttggagataaattcgttgagccagatgatgactggctaaaaagcattgaaaatttaagtgatgaactgcttggggcttattcgaaggccgaagacactgcaatgtcagcagccttcggaggccgaaaaaagaagagg

SEQ ID NO: 81682 - DNA, 352 bp, Zea mays
ttaccctgaagtctggactataagtgggatacggtttgtgtttcttatgcagttagaccatttctagcatttgcgtaatgaggactctaatgagaagcctcgtagagagaccctggccattcacctcagaagtgaatacgggtctagactaaccccgggctataagggaatcgcgactcatgggtaaagatgcgccaactctgtctagtgtgaaactgatatatcacccgtgctcacggttatgagcagcctggactcctcacatgataattgaacttgaagatggaaataaatcgacatccgaagatctgccaatggtttgcttaagcggctacactcaagtgcttctgaa

SEQ ID NO: 81683 - DNA, 353 bp, Zea mays
ttcttcttgtccagaccagtcatgcacatctcatggttttccattggttgctctgggtactcagtggcgtagaagacgtgccacttctgtccaggtcttgctggatctccaatcacataagcattaccaccagatttcaggccgccaaagtagcggttaagtgcagcaacttcctcagagaagctcctgtggggggctggctgtgcgccaggaaagatgaacgtcccacgggagtacttcacagcagcaagtggcatagacagctcttcagcaagctcaaggattcttggaatggtgagcaggagcttggtagtgccacaggtcttgatgacaatcttcagaggatagataaa

SEQ ID NO: 81684 - DNA, 352 bp, Zea mays
cctaaagggagaacacgtgataggtctaaccattgtatctttcttaaaagatagaccttgtgcagcttgtcaagcaggttaacaagtgggaggagcgcatcacagcaagaatgtgatgactacatcaagacctctggagctgctacatatggacctcttcggacccgtcgcctatctaagcataagaggaagtaagtatggactagttattgttgatgacttttcccgcttcacttgggtattctttttgcaggataaatctgaaacccaagggaccctcaagcgcttcctaaggagagctcaaaacgagtttgagctcaaggtgaagaaaataatgagcgacaatgggtcc

SEQ ID NO: 81685 - DNA, 348 bp, Zea mays
atactcctggtctgagacacggaccaaacatcgccatatcacttgtttgttttttatagagggcggatggagattctctggttcacatcagccatatacacaaattatgggattgctcaagcgatatagagggaaaacactgcggccctttccgcaagctagagaataaagtccagggtttggagttgcatcctatacaaagagatcggaacactgaggtcgatcgagtgctcaagatcggatcccgtccgactcatgtccctaccggagcctgtagtgctaaacagtgatcaccccaccgtgggcgcggatcaactagaagagtgccagatcttacaagaaccctct

SEQ ID NO: 81686 - DNA, 351 bp, Zea mays
tgacaacaccatttgacatttcacataaaatttctgttatcaagaatatttagttcattcctcaacatgcaaaaccgggtcttatcaagtggcttagtgaaaatatccgctaattgatcttccgacctcactccttctaaaatgatatctcctttagcaacatgatctctaaggaagtgatgacggatatcaatgtgcttggtgcgagagtgttgtacaggattattagcaattttaacagcactctcattatcacacaacaaatgtaccttttctagaactacgccatagtctagaagagtttgtttcatatataaaatctgtgtgcaacaagcacctgcggcaatgtgt

SEQ ID NO: 81687 - DNA, 350 bp, Zea mays
  unsure (1)..(350): unsure at all n locations
ntgagtgattcagaggccgctgctttcttggggccctatacaaagttgtttgctccccttagcgttcgtaggaaaggcaaacatcattctacagactgagagatgaatctgttcagtgcttccagccttcctgtgagcctctgaatgtcttttgttgattgcagaagctgtatctccatgaggtagcccaatattttgccctggcagacaccaaacacacacttttctggatttaggcaaagccttgctttgtgcattcttggaaacgcttccacgaggtcagcgatgtcatcctcctcatttttgcttccgatgacaatgtcgttgacgtaggtaaagacattgcaccc

SEQ ID NO: 81688 - DNA, 352 bp, Zea mays
tggccttttatcttgattcaaaaggcagcacatttccttttttttgatgcttagacttttcttctagagttaaaattgctattagtcttcacggctcacgcattttagctagaaaatttactcattctttagtgaaaaggatcatatgttggtcgttatttcctggttctttccgttagatattgcaggactttgtctatgaacaacctacagaggaataaagtgggttgcccttgcctcgactcttgcttctattgtgttgaattctgtgatcaacagttttcatttactgatgaactgttgcaagttaacttgtaaccttgtaactattttttatttaataccaagtaag

SEQ ID NO: 81689 - DNA, 351 bp, Zea mays
tgacaacgaggagatggctcttatcattaagagctttcgacaaatcctcaaacaaaggaaggggaaggactacaaaccccgttccaagagggtgtgctataggtgtggtaagtctggtcactttattgctaaatgtccatatacaactgacagtgatagggacgacgacaagaaggggaaaaagatagagaagaagagatactacaagaagaagggtggcgaggcacatgtggggcgggaatgggactccgacgagagctccaccgactcctcctccgatgaggacgccaccaacatcgccatcaacaagggccttctcttccccaacgtcggccacaaatgcctaatggc

SEQ ID NO: 81690 - DNA, 343 bp, Zea mays
tgcgtaaaaattgccgtcgaggttggtagtatatatagcgttattactgggggtcacgccttcacttggtgaaacgctgagggttacctcctgctgggggacaccgttgccgtaattatccttcacctcaatatacagactggttgtctcgcctgcggagactgtatcaaaaagtgcctgtagcaaggtgagatgtgccgtaaacacatcatcgttgacattaattgatgtgctaaacgtggagctaccattttccagactggcctcaacggtatccggtctcgctcctgattctatcgaggagcgggtattggtataagagacggtagccttaccctgttcg

SEQ ID NO: 81691 - DNA, 355 bp, Zea mays
tcttcttcattctgatgaaaaccaagccctttgattattttatttaaacgaatgttccaactccgagatgcttgcttcaacccataaatggatttctgaagtttgcatatctttccagcattgatcggatcgacaaaaccctcggactgtatcatatacacgtcctcatctaggtttccattaaggaaagctgttttgacatccatctgccaaatctcataatcgaaatatgcggcaatagctagaatgatccgaatagatttaagcatcgctactggcgagaatgtctcgtcatagtcaactccttgaacttgtcgaaaaccctttgcaacaagtcgagccttatagatgtgaa

SEQ ID NO: 81692 - DNA, 355 bp, Zea mays
taactaaagtcatctaacgagtcggctagctagagaatcgacacaacccgctagacagcatacacgtcagcttgactattactatcacaattcgagacacaacatatataacaatcacttaacacaatcaactcctacctaacatgagttggctaatgacgtgactatttcccaattaccatcacacaccacctttcgccatttttggataaccggcacgacacacagctattgtaatacatctcaagtttattcaacccatcagtagagtactagcgcatttcagaaaatttcctaaggctacgacgacaaggcatcgaccttatcatccacataaaagaatcacaagcgtgtt

SEQ ID NO: 81693 - DNA, 352 bp, Zea mays
  unsure (1)..(352): unsure at all n locations
ctatcaaatggacatgaagagtgccttcctcaatggtccaatttaagaagaggtctatgttgagcaancttccggctttgaagatagtgagtaccctaaccatgtttataaactctctaatgngntttatgggcttaagcaagccccatgagcatggtatgaatgccttagagatttccttatagataatggcttcaaagtcggaaaggccgatcctactctattcactaaaactcttgacaaatatttgattgtgtgctaaatttacgttgatgatattatattggggtctactaacgaatctacatgtgaggaatttagtatgatcatgacacaaaaattcgaaatgtcc

SEQ ID NO: 81694 - DNA, 346 bp, Zea mays
  unsure (1)..(346): unsure at all n locations
ctcaagccncaccaaaaggacgcgaaaagagccggccgcaacggttttattaatgaagaggtctatgttgagcaacctcctggctatgaagataaagagtaccctaactatgtatataaactctctaaagcgctttatgggctcacgcaagccccaagaacatggtacgaaagcctaagaaattaccttatcacaaatggataaaaggtcagaaaggacgaacctacattattaactaaaacaccttggaaatgattagtccgcatgccaaacttatgttgatgatattatatttgggtctactaacgaaactacatgtgaagaagggaatgggatccagacacac

SEQ ID NO: 81695 - DNA, 358 bp, Zea mays
cacgcttagaacttcagagacaaagtatactggggctttctttttgatttgtccttccaatttctcctgcacatgcgccgcactcactgcagagtgcgaagctgccacatacaatagcaacggagcccctggcgcgggtggagttaatgttgttatatcaatcaagtattgcttcagctcttcaaaggctttctgttgagctgggccccattgaaagactttggctgactttagtatttcaaagaatggcaaatttctttctgctgatctagatataaatctattcaatgaagccagtcttcctgccaaccgttgggcccccttctttgtgctcggcggttccattcgaaggatggct

SEQ ID NO: 81696 - DNA, 355 bp, Zea mays
taactaaagtcatctcgctattccgccaagtatctttttcttttcttacgtcgatcaagcacgcgcttgaataagcatgaaagtgccacaatggcatcactgacctcttccagtgatccagagaacattgagatggcccaaacagcagcggcgcataccagtggtgacttcacatgccggagcgcccttagtatacctttcagaagtgggcctcgcaacaactgggcgggattcatgatgtctatgatgtacagaatactatcaatgaacacactgtacttgggatctagtgtgaatgctacaatacaccccggaaaagcagcatggcattctctgatagcctcctctagcatct

SEQ ID NO: 81697 - DNA, 350 bp, Zea mays
tgtgaaaccaatcacaagtttattgaagaatgatatttatattaactggtcctcgaaatgtaatgaagcttttgagcagctaaaagtattattaaccactgctccggtattggctcaaccggatattgaaaagccctttgatgtgtattgggacgcatcaagcagtggtctcggctgtgttttaatgcaagaaggccgagtaatagcttatgcttcaaggcagttgcgccggcatgaggaacattatccaactcatgacctggagttagctgcggtggttcatgccctcaaaatatggcatcattatctactggggaatgtctgtcacatttatacagaccacaaaagtt

SEQ ID NO: 81698 - DNA, 349 bp, Zea mays
ttcatccttcttcacaaacagtgctggacatcccctatgtgaagtacttgggcaaataaatcccttatccagcaactcttgcagttgcttcttcaattctgccaactcggcgggtggcattccgtagggcctcttggaaattggtgtcgttcccggttgcaactcgatggcaaattcaatatcccggtctagtggcattcctggcaattcatcaggaaagacatctgcatactcacagaccactgggatcttcttcaaaggtaactccgtcatagagaaagcacatgactgagtagaaccttgactgggcagaattaaggtgaagttcccacagaacggagaattaatt

SEQ ID NO: 81699 - DNA, 365 bp, Zea mays
ggacacaagaatactcagctgccttacaccaaccgcacccgcatcctattttattaatggctcaacaatagcggtaaggtcaaggtaaccaagctggtacgaattaattttgctattggttcatatcgagatgctgttgactgtgatgttgtggctatggatgcttgaaatattctgctaggcagaccatggcaatttgattcagattgtatgcatcatggtagatcaaatcaatattctctcatataccatgataagaaaattattttgcttcccatgtcccctgaggctattgtgcgtgatgatgttgctaaagctaccaaagctaaaactgagaacaacctgaatattaaagttgttggtaa

SEQ ID NO: 81700 - DNA, 349 bp, Zea mays
ttaattgcgtcaaagttccgtgttgtattatacccagatttaacttttccatttcttgacatagtgtggtgtcaggggtccttatcgtaagacaatgacatgaagctttgtgactctgtgcatctgccaccacattggcttttcttgggtgatagtggatttctaagtcataatctttgatcagctcaagccatcttctctgcctcatattcaattctgactgggtaaagatatatttcagacttttatgatctgtatataaatggcaagtatttcccagcagataatgatgccatatcttgagggcatgaacaactgcagctaattccaagtcatgagttggatagtg

SEQ ID NO: 81701 - DNA, 347 bp, Zea mays
tggcatacaactgacaatctcgtagcctctggagtactttcttcaaatgctcctcatgctcttgctcattctaggaatatataagaatatcatcaataaacaccaccacaaatttgtcgaggtagtccatgaacacactgttcatcaagtacatgaagtaagttggcgcattcgtcaaaccgaatgacataaccgtgaactcatacagtcaatacttggtgatgaatgttgtcttcggtatatccgagggttggattctgagctgacggtagcctgacctcagatctatcttcgagaacacactggctcctctcaactggtcgaataaatcttcaattctgggcggg

SEQ ID NO: 81702 - DNA, 92 bp, Zea mays
tgtactaccaattcttatgtatcgggctaaacaaatttttcataagcttgaccatgaatcagaggcttggttgaacaatgggactttaccca

SEQ ID NO: 81703 - DNA, 350 bp, Zea mays
  unsure (1)..(350): unsure at all n locations
tattcaaaggtgtatatagaactaaaattgataatantttgaattaatcgangctttgaatgagaagaatagattgttagagaagcaagaggatcttctatatgaagagcatgataaatttgtaagtgcgcaaaattctcttgctttagaagttaaaagaaatgaaatgctttcatgtgaattatctacatgccatgaatctatttctagcttaaagggtattaatgatgacttgaatactaagttagaaatagctaataaatcaagctcttgtgtagaacatgttgggatttgcaataagtgtaaggatttcaatgttgatgcttgtagtgaacacttaattttcattt

SEQ ID NO: 81704 - DNA, 353 bp, Zea mays
ttgaacatgacaatcaaggctgagtctgaaaagaatcttatgccgagcgcaacatttaaagctctttgggataaatgcttcggctttgcaacccaatgtacaactcagttaaaaaatatcttcaactctgtcaaggctatgtctgaagaagccaacctttctactgaagatatccctggagcacttggatgtattgagaaggaaattgatgtccttgacgaagttataattggtcatggtgatttttgcgtgctagtggcttctcgtgggacagctgctgctttctccaaggctgggtgcaatcacgtaaggactattaataaaccaaccttcagcctcttgctgtcaactta

SEQ ID NO: 81705 - DNA, 353 bp, Zea mays
tgtgagaaatacaagtactgaagggagaaggctgcttcttttgatcagccgaagcccatgctcttatgtgaagatatagcagagcagaaggtgctgctgggatctcaattgtctgatgagcaagagaaaaccctaataaggttcctgttcaacaacaaagatgtcttcgcatggtcagctaatgatctctgtggtgtcaacagggatgttattgaacactcgctcaatgttgatccatccttcagacccagaaaggagaggcttcggaaaatgtctgatgacaaagccgaaggtgctcggaatgaagtgaaaagacttctcagcactggagtcatcagagaagtaaaataccc

SEQ ID NO: 81706 - DNA, 354 bp, Zea mays
  unsure (1)..(354): unsure at all n locations
tatgacctcgcttttggtgaaggaaagagaatccaagtggtactatatagtgccaagnatacacggaccataagagcttgaagtacatatttactcaaaaggacctcaaccttaggcaacgccgttggctggagcttattaaggattatgatttggaaattcactatcacccgggcaaggcaaatttggttgcagatgccttgagtcgaaaggtgcatgttcattcagctgttgttgcccagctacccgatgagattgttgaggatttcaggagacttaacctggggatagttactcacactaaaggagttattattgatgcggaacctaccttggagcaagaaatccgcaaag

SEQ ID NO: 81707 - DNA, 331 bp, Zea mays
gggctaaacaatattttcataagcttgaccatgaatcataagctcgtttgatcaagtgaccttaccaaatctactgggttggtttggagcaagaaatattgttactccctctcaaattaagataattagcctacaaatatgtaaagaattacaatattagaaattgatttataatgggatgttctctgaaataccacaacattaactaggaaaagcatacactaaaatatatcttgattatcttaggtgttcaaaaaatgttgaatattaacttttatgctagtgttatttcaattgtgtacaagcttatttgtataaaattattcacatg

SEQ ID NO: 81708 - DNA, 345 bp, Zea mays
tctaaagggagaacacattttaggactgtcatttgttcatttcgagaaaaacagggtttgtagcgcatgtcaagcaagaaagcaagttggtgcccatcatccacacaagaacatcatgacgaccgacaggccgcttgagctactccacatggatctattcggcccgattgcttacataagcatcggcgggagtaagtattgtcttgtaatagtggatgattattctcgcttcacttgggtgttctttttgcaggaaaaatctcaaactcaagataccttaaagggattcttgagacgggctcaaaatgagttcggcttaaggatcaagacaataagaagcgataa

SEQ ID NO: 81709 - DNA, 349 bp, Zea mays
tatgaagattcttcatcccaacatgggctagttctttgtgccatagccaacccatgttagtcttagcaattaagcatgtgtcgagttcagctctatcaaaatctactaagtatagctgaccctctaacacacctttaaatgctattgaatcatcacttcttctaaagacagtgacacctacatcagtaaaaagatagttgtagcccattttgcataattgagaaacggaaagaaaattgtaatctaatgaatctacaagaaaaacattggaaatagaatggtcaggagatatagcaattttacccaatctcctcgaatgtgatagctcgttggggatcctggtttttct

SEQ ID NO: 81710 - DNA, 313 bp, Zea mays
gagccgacggaaaaagaaaaagcgccgatttcttgtttgacaaaccgcacgccgacgggaacagccacctccgacaggaccccgcagcggcaaacaaagtgccgccaaaagaagacctgggcccacaataatgcgagggcggacacaggccacacggcaatcacaagggtgaacgacccaaccagacgccaaagccaacccaacgcccccccgagcggggggcacggcgaccaacatgcacaagctccagcgacgaaaaagacgcgtacgggcgagaaccacacgacaagggggcgggagcgcaagaccggcg

SEQ ID NO: 81711 - DNA, 351 bp, Zea mays
  unsure (1)..(351): unsure at all n locations
ttggggttattgttagcttgtatcactaaatctntttgttaaacaaattcttttttttgtttttgttttgagaagtatgtatggtacattctttgctgggatggattattgatactttcttagccgccgtggcgtaaatgtaaccatttgctgggttttagggatggagtcagtgaaagtcagtttacccaggtcatcaacattgagctggatcagatcatcgaggtaatacatttgtttgattcgtcctttgcacatttgcttgcttagttcaggaacgaattgcaaggtaacacatccttgtaattaatgcaggcatgtaagtttctggatgagaagtggtcacccaag

SEQ ID NO: 81712 - DNA, 344 bp, Zea mays
tgcttcagtaagtcaaatgcctgttgatggttggatgtccatataaacaacacattcttctttaacaactcagtcaatggtcacaatatcattccaaaacgacgaacgaatttgcgataaaatctggcaagtctcaaaaaacctctgagctcttttgcattgctcggtgttggccgttgttgaacaacttgaatcttagttgggttggttgccacaccttgcccactgaaaatatgaccgaggtatgctatagaggtttgggcaaaagcacactttgagagttttaccctacattgatctttttgtaacatctgcaataccacatctaaatggtctagatgagt

SEQ ID NO: 81713 - DNA, 351 bp, Zea mays
tagcataataatcttgaacagatttatccccttgctcttaacgcatcaatttcttacgcaattctctatgataagatgggggaacaaatctatcgcgcatagctaccttaagatcttcccaagtcgtaggtgctctaccatccccaactagaccagtccaccaaacaatagcaaaatctttaaattcactagtggcttgtctaacttgatgtcgttcaggtacaaggtgggcagcaaatttctgttctatcgtcatctcccaatcaagatatccctcagcatcataatgacccgaaaaagatggtatagaaaatttaatcttagcataagggtcgtcaggagcacgattgt

SEQ ID NO: 81714 - DNA, 352 bp, Zea mays
atcgtattcaacatgacctttatagacgactaactttattttgctatgtaaccaccaacttaattcaccattccattctttatccattgatcctatctctaatcatgttctgccttactttaccattacgtcttgcttactatttagtgtgcatttaataattacaagtgtgttcatcgcgcgcttttaacttgggtttttaacttgtacaaacacatctgatcatacagaactttgtgtcgcaaggtttggttccttcttaggttcaagtatctggacatcaccacctattttatccacagagatataaccaaaaagggctttccatcttaccctcattaaacctgcatat

SEQ ID NO: 81715 - DNA, 353 bp, Zea mays
tcggaaatgagaggcaagaattccgaagagatgtcttagtataagaaggttgctgccgaaacgaagctgagcctttctgaagagatgcatctgggttttcttgagtcaatagcgaagacgaacacggacaagattacaagggagattttagaaggtttatctgaagatactggtgatagtgacatctatgacgcagatagtgggggtgaagattctgaagatcggccatggcgaccaagtcattcagtcttcgggaaatcaactatcgggcaaagtcaccttgaaaacatgagggggagatattttcgggatatgtctattgtaagagcagatgccggggaaaaaactgtgcc

SEQ ID NO: 81716 - DNA, 353 bp, Zea mays
tgaagcagttggtagtgaaactggaaatccttcttttttttaaaattgcagactgtggttaagtttccaacacaaattctcatgatctgctaaagggagataaaggtataaatagatgaatacaatgtacatctacaaatatttttatgttctttctgcttatctttctaattgacactttttgcagtaagctcaaagacacataaaggtataaatagatgaatacaatgttccatctctttgctgccaaagaatagataaaagttgatgtcatgtttgtgtataaacaaggttgtaatggaaggtttcatgactgcaataattcagtttcttgaagcgttagaatcattcta

SEQ ID NO: 81717 - DNA, 348 bp, Zea mays
ttgccaaatagggcacataattatacctttgttatcttcccgtactttcaggtcattcttcacataaaaccattctgtcatccagtcgccgggccatctcttccgaaaggttggcacgggacagcttgacccagactgagaaacgaaactgtagcagccaaaattattgtgatactgttccttaccccaaggttttgtctcgtatgataatttgtgtatattgcagaaacttttcgcatcaggttccagaccttggcttctcacggcccacacgaagatattcagccttatgattgcttcgggggtaagttggtgaagatagacttcgaatattttcagcacctctac

SEQ ID NO: 81718 - DNA, 349 bp, Zea mays
ttaaccccccccccccccgcgagaccttttcccgtttctttctaaccataatgaatgtgatatcgaatgtcatacttgatgcatattcactttatttgttcccttgtatgatgtactgtttgtttcccaatttgaatggatgaatgtatgtatgcttgcaatcgcatagagaacgatccggttgaagagcccgaggaactcgcaggagaagcccctgagcagcagtcgtttggtggaggcaagtgtcccttgacctatctctgtcctattcattatttaattcacctcccgctttacacatttatgcctaaggattgactagcttttgttatccatgtccttgtttacc

SEQ ID NO: 81719 - DNA, 351 bp, Zea mays
  unsure (1)..(351): unsure at all n locations
ntttgtttgcgccgccgtacgtgtacgtctacgtttataatgaaaagctagagtgcgagggaaatagagatggccaaacaggcggcctggcccggcacgcggcacggtcaggcacggtctagttagggcacggtccgtttagcacgattattaggcgtgccgtgacggcacgacactagtgcctgaacccaagcccaggcacggcactaaggctccttagtcgtgtcgtgccggcacggtaggcccgtttagcactacactatagaattttagtcagacattcacaaacacagttaaaacatactaaaatagctaatattgagttgtttagtgcaatgactgactcattaa

SEQ ID NO: 81720 - DNA, 310 bp, Zea mays
tctaaagggagaacacgtgagaagcctgtttaacttgcaattctaaaaagatagaccttgcgcagcttgtcaggccggttaacaggtgggatgagcgtatcacatcaacaatgtgatgtccacatttagacccctcttgctgctacatatggacctcttcggacccttcgtatatctaagcctatgaggaagacagattcgtatagttattgttgataactgtacccgcttcacttgggtggtcttttttctcgataattctttaaccctacggactctatggcgcttgcttatgacaactgataattgt

SEQ ID NO: 81721 - DNA, 350 bp, Zea mays
ttacccattcagtaattagaaaagggcctggtgtttgtttacccattcagtaatttatgagaattttggtgtacatgtgatttaatgctttcctatatttatttagaaaagggcgctatgtttatcatgctttcctatatttatttagaaaagggcgttatgtttatcatgcttacctatatcttggtgtacatgtgatttaatgccagttgtatatttatgagaattttggtttattttgaaggattctggctctcatcaagtgactcctgcccctcacgctgactttgcggacagatgtctcaattctagtggtggagctacgaacaacaatccgatgtcctgatcga

SEQ ID NO: 81722 - DNA, 347 bp, Zea mays
tctaaaagtagaacacgtgataggtttaactaacgtgcaattcgaaaaagatagaccttgtgcagcttgtcaagcaggtaaacaagtgggaggagcgcatcacagcaagaatgtgatgaccacctcaagacccctggagctgctgcatatggacctcttcggacccgtcgcctatctgagcataggaggaagtaagtatggtctagttattgttgatgacttttcccgcttcacttgggtgttctttttgcaggataagtctgaaacccaagggaccctcaagcgctttctcaggagagctcaaaatgagtttgagctcaaggtgaagaagataaggagcgacaacg

SEQ ID NO: 81723 - DNA, 348 bp, Zea mays
  unsure (1)..(348): unsure at all n locations
tgaagctggactctgcgctatgacgaagaactattttgcttatagncttgcatataatagcctgaaggtatgagaactgtatatttagaaatttataattttcaaatcattcttttattattatactaattcttgtatatatagggtttaatattgagcaacgcgctgagagcgcaaaagaatgccgaagacgagagctatgatattgctttcaacaatctacgatcagaggttattaagctgaggaacgaagctctggaaaaagataaaattctgcttactttggtggacaagataaaggaagacgaagctacctccaaggctcatgctgaagcccaaaaacgcgaa

SEQ ID NO: 81724 - DNA, 350 bp, Zea mays
tgcaggtttgtagctaccagagatgtggtattatatttattctccttcagcaatgacaacaagagcgacagaccaaacatacaagattaaaacatagtggtagttctgcaaaataccttcgagacccaattttaatcacacaacacagctgaaacaaaatagctccagactgagcaaaccacaaaggttatgttcaagagatggacacctgcagctgagagcagtagctccaaacctatcagaagtttttttatcttcaaagggggctacatagcacaaggagttgctggatcttctcaacggagggaacgaaatatctgctcgcacaaggtgtcagtaatcacatattg

SEQ ID NO: 81725 - DNA, 352 bp, Zea mays
tcggctgatcagccgaagcagccttctctcttctgtacttgtactgctcacaagcttcggctccatctatattgtggatggcttttgagtccatccaatttccttcagcctttctggcagcttcctgacttccatgaattgcaataggcccttgttccgaaggtatcttcatgcatagatatgctggatgaagaattgcttcgaaagcattaagtgtcccacgaccaatgattgcattgtaggggtattccatgtcaacaatatcaaacacaacctgttcagtccttgtgttgtggataaatccgaaggtcactggcattgtgattttgccaagtgctacgatctaccttcc

SEQ ID NO: 81726 - DNA, 366 bp, Zea mays
  unsure (1)..(366): unsure at all n locations
tataaaactcagcttctctggacaagcgccgcacttactgcagagngtcaatgctgtcacatatagcagcataggagcccctggcgctggtggagctaacgtccttagatctatcagatactgcttcagctcttcgaaggctttctgctgagctgatctccattgaaagacttcggctgactttagcacttctaaaaatggtaaatttctctctgctgaactagatataaatcgattcaaagatgtcagtcttcctgtcaaccgctgagctcccttctttgtacttggcagctccatccgaaggatagcttcaattttattcggattagcttcgattccttttggtgaaactagaccaccaacgaa

SEQ ID NO: 81727 - DNA, 347 bp, Zea mays
catatggacgtgaaaagtgcctcccttattttttctatcaaggaagaggtctatgttgagcaacctcccggctttgaagatagtgagtaccctaaccatgtttataaactatctaacgtgctttatgggctcaagcaatccccaagagtatggtatgaatgcctaacagattttcttatcactaatggattcaaagtctgaaaagccgatcctactctattcactaaaactcttgaaaatgacttgttcgtatgccaaattcatgttgatgatattatatttgggtctactaacgagtctacatgtgaagaatttagtacgatcatgacacaaaaattcgagatgtc

SEQ ID NO: 81728 - DNA, 352 bp, Zea mays
tgaagccatggtaagtagcataggcaagtatatgtgttttgactcaagcctagctatgggtgcataggtttcaccaaaatccaaaccttcgacttgtgaatatcccttggccacaagtcgggctttgttccttgtcaccacaccatgctcatcctgcttgttgcggaatacccacttggttcctacaacattttggttaggacgtggaacaagatgccataccttattcctcgtgaagttgttaaattcctcttgcattgccaacacccaatccgaatctcttaatgcatcttctaccctgtatggctcaatagaagatacaaaagagtaatgttcacaaaaatgagcgact

SEQ ID NO: 81729 - DNA, 346 bp, Zea mays
tgagcacattagcctccacactactgtattttatctattgtgcttacaacgatgattgtttgtcttggtattcacaatgatatccataaaggatatgatgaatctgtgatagattcaaaaatttcagatcattaatgaccatcactaatgaattgtcatttccaactggttatggttggagtcaggaagctttgcacgctcctgacttgtgattaactgcatgtactgcatgtacaagttcccctatgatttttagtatgtgggaatccgtgaaagatttcccatgcgtacattgggtatgttcccaatctcaccaccgcagcgtacatgtatgggcacacagaaa

SEQ ID NO: 81730 - DNA, 351 bp, Zea mays
tgacatgaagaatgcttttctgcatgggacattctttgataccatctactacattcatcctagggggttcaatgattctgtattcccagacctgatcggcgcctccacaagtccctgtacggactccagcaggcgcccccggcttggtatagtcggtttgccacctatttgacgtcattgggatttgttgaagccaagttggacacctcgctattcatcttctatcgcggttcaaacacgatatatctgttgctttatgttgatgtcatcattctaatcgcctccactaccgagcttctgtactgcactattattgttttgcagcgggaatttgcaatgaaggaccttggg

SEQ ID NO: 81731 - DNA, 356 bp, Zea mays
tggtagcaaaaacactaaataaagtaaattccaggcttagtttctaaacttgccccccccccccccctccggaagttttgtcaagcatgccccctccgccaagaatttacgttaagtgaacactacacatcctacaagcttggtagcaaaaacactaaataaagtaaattccaggcttagtttctaaacttgccccccccctccggaagttttgtcaaactctgctactgcttctgttgctccacattataggctattgtgcattagtgctttgattactattaaacaaaaaaaatgtcaagttgatgggtgcaaagggtaagaaaactagtcgtaccaactaggattcgtttagg

SEQ ID NO: 81732 - DNA, 354 bp, Zea mays
  unsure (1)..(354): unsure at all n locations
tatctgcttgatgttctagcctcccttaagtctccctactcgtagacccgnttaattgaactagactgccctaaatcaccaagaacacatcgggttgttctcagttttcgccatcgtcgtggacagagggattccatgctagaatcgtgcgattggtagagggattagggtcgccgagggtggaattaggtgtcgaacaaaggagaagcctagccattgcgttttccggccagtacaagttcgccggaggtgtgctcgtcgtcgttcaccgtcgtggacttgacgcggtaaagaaatagaactccgagggcctaagtgtgaatgtcaaagagacaatgaatagggcacaagggt

SEQ ID NO: 81733 - DNA, 343 bp, Zea mays
tatctggtacttataccccaaatcttttaatattttataccgatgagcaaatgcataactcatagaggaatgagaagatctataatcaaataagacaacaacggggtgatggttcacagaaacgtactagccataactggctctccttcagcaatctcatctgttgtggtgtgatgcacaccagcgggataaacatcagtctccttttttggaagagggaaaaactttgcaaagtgtcccatttgtccacagttgtagcatgtggtagagccactttgaatgctttataacccttgaatccctattgttgggtcttcttctgaggagggaaaaatcttgcacc

SEQ ID NO: 81734 - DNA, 317 bp, Zea mays
aacctttttttttctctgcgccaaggggtggagatttttcttagataggttacatcgtttacagtctggcaaaattagtttgacccaagttatcggattctaaagtctctgtttgaatttaaatcacgttttaattaagcttctctggaaaaacagattgcgcccaggtccctgggtttaaaccgaatcaaacctctcagatctacccttacgccactattcacttgagtctctgacttttcacttaaccccctggatttctttccctctcacccgcagttctttctttaactgaaacagcatcccctggaaagaaa

SEQ ID NO: 81735 - DNA, 351 bp, Zea mays
taagtgtatcgctattagccggcagtgcactaacattgtttaacagaacaaacttggtacagtaggatgtgacactggcacactgcgtcccctatgcagcagccggctcaacccgtgaatagttggcagagactgtacttacagaggtcaatacatggagctaattagttggaaatgaaatagaagagctcccgagacgcaaatccacgtagtgactcactctgcgcccagaacaatacgaacatcactcccgacccagcacaggcacacaactcagcaccgcctagagaacgtccgttccacgtagcccgaagaggattcaacggcctccgaaggccacaacgaacatcg

SEQ ID NO: 81736 - DNA, 349 bp, Zea mays
tataataggaggatagaggcaagagctcgaccatattttatattataatgggaactatacaagcgtggggtctgttctccattactcaagtgtttatccagagccgaaagtatataattgatgaatgaaatacacgcaagcctgtgtggatcctacattggatctaggcctttgcttggaaaagttttttgtcaaggattttattggccaaaggcagcttcggatgcagcggaattagtccaaaagtgctaaagttgtcacaaatgtgcaatagatcaaaaacaaccttcgtctttaactcagtttatacaacccacttggccgttgcaaaggtggggccttgatttgt

SEQ ID NO: 81737 - DNA, 359 bp, Zea mays
tggacagtattctgcgatggttcttggggaacctttggtgcaggagcggctgcggtcctagtagcaccttcaaaagtcaaaacatgtgatgtagccaaactagatttcagttgcacaaataatattgttgagtacgaagcacttctattggggcttcggaagctcagggcaatgggaataagaagggccatcttaaagactgattctcaagttatttctagccatgtggacaaaagtagcaaggcaagagatctgaagcttgaaacatatctggatacagttcgaaggttgtaggcttctttcgaaggtttttctgttaagaataacccaagaggtgaaattgagcacgtagatttact

SEQ ID NO: 81738 - DNA, 369 bp, Zea mays
ctattaatactaaccttctaagggagagcacattttaggattaaccaatgttctttttgagaaagacagggtttgtagcgcatgccaagcaggaaagcaagttggtgcccatcatccacacaagaacatcatgatgaccgacaggccactggagctcctacacatggacctattcggcccgatcgcttacataagcatcggcgagagtaagtactgtctagttattgtggatgattattctcgcttcacttgggtattctttttgcaggaaaaatctcatacccaagaaaccttaaagggattcttgagacgggctcaaaacgagttcggcttaagaatcaagaaaattagaagcgacaacgggacagg

SEQ ID NO: 81739 - DNA, 356 bp, Zea mays
aacaaagccaacggggacaaaaaaaacggcagagcacccacattttagaacccagaaaaccccgaacgccccaaaagagacacaggcacaccgcgacccgaaaggaaaaaccggcccaaccccagaacagaaggcagagaccggacccacagacgacaaaacaaggagcaaagcaaacggaaacgaaagagaaaagcaccccgagacccaaaaccacggagcgacgcactccgcgcccagaacaatacgaaacaaacgcccgacccagaacaggcacacaactcaacaacgcccagagaacgaacgggccacgcagcccgaagaggaatcaacggcctcccgaaggcacaacgaac

SEQ ID NO: 81740 - DNA, 350 bp, Zea mays
ttgttccagtgcactcaagactcggatgaatatctttagtcattcgtctaaaggtttctctgccttcgggcccaagcactagcagtccaagatgacatcgtcatcaaagctatggtcaatgggcttaggccaggaccaacaaccaaatactttgcaaggaagcctccgcattctcttgagaagttgctgcaaaagatggatgagtacataagagccgacaatgactttcgtcaaaggaaggaggagttacacagatataccgaagctgtcaagggcttcgagggaaggttccatccaaggcatgttcgaagcattcacaaccctgtgcagggcaaagaaaagacgaccct

SEQ ID NO: 81741 - DNA, 218 bp, Zea mays
tccccagccctcggacccagcagaactgcacctgtttgtctatatcgccctcaccggacttcggccgtccgcctgctcacgtatacctagcaatccggagagccgatctttaattactcgcgtgcacaccctccttgatccctggtgaagctctctgacccatatggttggtcaattatgccccggataggccagactcctctccgcggaaattcatc

SEQ ID NO: 81742 - DNA, 357 bp, Zea mays
tcgtgaggatgttctccgaagctacacttccgaagatctttattgtatctgcttgcaacttagcatgatttttcccttttcaaaacattcttccgaagatcgatatcatgtccccttcttgtgccatatgcagcatgatgtatgatgcttatgctatgcgaaatgatgcgatgatgttatgttgtgtaagatggtgtttattccgaagatacacacattcctgcgataaaacacatagtctttttgaatcagcgttgtctttttactataagcctcccttaggagcttcttcgccttttacttcagcggaatcagcgtttatttttcgctgtaagcctcccttaggagcttcttcgc

SEQ ID NO: 81743 - DNA, 330 bp, Zea mays
tcaataaattacaacttcgttttcctctttttttttgaccttgtagtctccgccagccctaacaatagacatgtcccgaaagtatttgaaagggaaatgtgcccttgggctatttttaaagtgttttggtgattaagtgcccaacacatattctctaagtgttaatttgcgccaaagattaaagaagtgcaaatcatgttacaaggtacgtttctagacttaatacattgatttgagtaataatgtattgtgtctaagtgctagaaacatgagaaaatatattggaaaagagttggctgtgtacagccaactcttgctcggtcttggtgc

SEQ ID NO: 81744 - DNA, 348 bp, Zea mays
ttaagctctttgacaataaaatcacttcacctagttgcaacaaaagtgcattaatgcaagaatgaaaatttttgagaggttaaactaggtatgaagcagggatatgcatagacatgctttctcttccttttatacaagatatgcaaggaatgtatagaagatttaggtacatgtgtaaatgagaggaagtagttttacccttttgtaccttcacatagagatgttctctttattgtgctttgtccttagtcttagttatttaagacctatgttcaagacagtgtatggaaatattttgcacaagagagggttctacaactagtgatcctttttaagtcattgttatta

SEQ ID NO: 81745 - DNA, 468 bp, Zea mays
  unsure (1)..(468): unsure at all n locations
aagctgcctcactcttctcatcctcccattgcctcatggcaaagggagatgcttatgttaaaatcatcactgatttaaatgatataaaagatgatgatgatatcgatgatgttgatgatgatgatggctattcatatgatgatcttgctataatgttaggtgaggccgatgactacatgcacaaagaaaaagaaaaatttaagaccttgaaggaattgtataaaaacctccaagtgtcttttgaggatctcaagacctctcacaatgacctataagaaaattgtgagaagcttgcggatgctcaaaaatcatctattgtgcatgaagttgatgtggtcactaaggatgttggagtcacttgtgacttacttgatagtcttacaagtgaaccactacctactaactctatttgtgatatatgcaaaatntctctcaatgataacattgctcttgatgaatcaaaattat

SEQ ID NO: 81746 - DNA, 456 bp, Zea mays
  unsure (1)..(456): unsure at all n locations
atactcactctccgtcagcngacagttcgacgggataacaagatctctatgcataacttgataccgaagctcagcaaaattcggatttgagaaaactactgtcaaatctctaagaaaaatgcctggagtttagcaacaagtgcattcaacgactaagaaagatgtttactctgctggagccactagtggaaaatttaccccctcagctgaagatctgccaaaaaccttctaacacattgagggggagattgacgaactcgactaagtcatagctgggcatggtgacttctgtgcctgggtggcttctcgagggactgctgcagccttcatgaaggctggctgtgatcatgggaatattgtcaataggccaaattttactttgtcaccatccatcctggatgacatccctgatctcgcccgaagcatctcgaatcgatttgataaaatgatatggac

SEQ ID NO: 81747 - DNA, 480 bp, Zea mays
tctgcgcgtcgatccgtcctccgtccgagcaggcgctgcgcccttccacgggatcatccctgggaagcgcgtccagcccctcgggcgactcgacctcccagtctgcttcgggacaccctccaacttccgaagggagaccctgacgttcgaagtggtcgggttccgaggaacctaccacgccgtgctagggaggccatgctacgcgaagttcatggccgtccccaactacacctacctgaagctcaagatgccgggccccaacggggtcatcactgtcggccccacgtacaaacacgcgttcgaatgcgacgtggagtgcgtggagtacgccgaggccctcgccgagtccgaggccctcatcgccgacctggagaacctctccaaggaggtcccagacgtgaagcgccatgccggcaacttcgagccagcggagacggtcaatgccgtccccctcgaccccagtggcgacaccaccaagca

SEQ ID NO: 81748 - DNA, 436 bp, Zea mays
  unsure (1)..(436): unsure at all n locations
ctcagcttcgccttcggagccgaatgtgagataaacgaagccttcgaagagtgctcaatagccttcngcgctgtctgctctcttattggaacaagagatttagtacaagaacatatggccttccgggtgtggccgctcgctgataaatgggaaatgcctcatgaaactattaaagagaccaactaatgtgggcttgtgagactgaagtacacctttaagtttggagattaattcactgatccagatgatgagtggttgaaaagcattgacaatctaagtgatgagctgcttgggacatactcgaatgccgaagatactgcaatgtcagcagccttcggaggccgcaaaataagaggctgaatcgggtatttgatgcaatcgtgtttgtttaccccgactattgctaccccgttcgaaagcagaaaagaaagaacat

SEQ ID NO: 81749 - DNA, 465 bp, Zea mays
  unsure (1)..(465): unsure at all n locations
atctatgatatgtatagccgttgaatctgtccaacttccttcagcccttctagcagcttcttgacttccgtggacagcaatgggcccttgttccgaaagtatcttcatgcataagtatgctggatgaagtattgcttcgaaggcattaagtgtccctcgaccaatgattgcattatatgggtattccatgtcaacaatgtcaaaaacgacttgctcagttcttgtgttgtggacatagccgaagataactatcattgtgattttgccaagtgccacaatctgccgtcctccgaagccacaaagagggtgtgtagaatcatggatnttgtcctttggttcttgcatctgcttgaaggccttcacaaatataatgtccgctgcactgcctgtgtcaccagaacaatgtggaccagataaccccttgatgacacaagatatgaccatagcatcattgtgaggataatc

SEQ ID NO: 81750 - DNA, 428 bp, Zea mays
  unsure (1)..(428): unsure at all n locations
ttttcttgtcgtcatcaaccctgacatagaaccactctgatttcctttctgctgcccacttgcttcggtagctaattacagggaactntgtagttttccgataggcaaagttatagcaaccaaaattatcgtgcaatccatcttttctagcctttgtttgataatgcagctcgtgaacccggcagaagctgtccgcaaatggttccactgcttggcttcggagtgcccagatataaacaataagcctaacgatagcgttaggggtcagctgatgaaaatagataccgaacctcttcagcacctctccaatgatcccatgtagggggaatcttagtccagcctttaaaaagctctttgaaataacaatntcatctttctccgggtttggggtagtctcttctcccccgaagcgcanaagcttcttctga

SEQ ID NO: 81751 - DNA, 448 bp, Zea mays
tctatagggagagcacattttacgattaacatatgtcattttgagaaagacaggatatgcagcgcatgccatgcggtgaagcaagttggagtccatcatccacacaagaacatcatgacgaccgacatgccgcttgagctactccacatggatctattcggcccgattgcttacataagcatcagtgggagtaagtatagtcttgtgatagtggatgattattctcgcatcacttgggtattctttttacaggaaaaatctcatacccaatagaccttatagggattcttgagacgggctcaaaatgagttcggcttaacgatcaagaaaataagaagcgacaacggtactgagctcaagaactctcaaatcggaggcttccttgaggaggagggcatcaagcatgagttctcttcttcctacacccctcatcaaaatggtgtaatgg

SEQ ID NO: 81752 - DNA, 450 bp, Zea mays
  unsure (1)..(450): unsure at all n locations
tcaagcaacgaaaggggaatgactactttccccgttccaagaaggtttgctacaagtgtggtaagcccggtcactttattgcaaaatgtcctatgtctagtgatagtgacaggggcgacgactagaatggaagaagaaaggagaagaagaagtattattagaagaagggcggcgatgcccatgtttgtcgggaatggaactccgacgaaagctcaagcgactcctcctccgacgaggacgccgccaacatcgccgtcaccaagggccttctcttccccaacgtcggccacaagtgtctcatggccaaggacgngcaaaagaaggtaaaatcaaggtcctccaccaaatatgaaacatctagtgatgaggatgatgataaaaatgaggaggataacttgcgcattctttttgctaaccttaacatggaacaaaaggaaaaattaaatgaac

SEQ ID NO: 81753 - DNA, 473 bp, Zea mays
  unsure (1)..(473): unsure at all n locations
ngaatcactttatacccctgagataccagaaaccctaattggaaccctgggaaaccctgaaaccaaaccctatggacctaagtgtaaaattagtccacttttgggctaaagtgcaaaaaccaagtcaaataagtattttaagttatttgggtcacttatatgagaattggcaatccaaaacttgagaattggacttaagtgcaaaagtgccccacttaacactttttttggggttaagtctggattttagtggcattggctcaactttggggctttgtaacttacaaagtatagggtttttaccctatgttaccacatcaaagttgaagacccattatatgagaacaactttgcttaaggttgtgagcttagttgttaagaagaaattatagaaaaccaagcctaaagttgggttgtcaggctgttatgtcntgaatttcagactagcagtgaactgacctcgacttcaagct

SEQ ID NO: 81754 - DNA, 397 bp, Zea mays
tctgacttgtgggcccacctgtgtgtccggtgcacacctgatatgtactgtttgctgtccggtgtgccagcatgggcgattctgactcctgcgcgcgcattaaatgccgttgcaggtagccgttggcgcgaagtatgccgtgctccgaggttgcaccggacagtccggtgcacaccggacggtccggtgaattatagcggagcggcgagggagaaaacccgaggctggcgagttcctgaggccgaccttccttggagcaccggacatgtccggtgtacaccagacagtccggtgaattatagccgagtcgcctctggaaattcccgaaggtggcgagtttgagtctgagtccccctggtgcaccggacatgtccggtggcacaccggacagtccggt

SEQ ID NO: 81755 - DNA, 492 bp, Zea mays
  unsure (1)..(492): unsure at all n locations
ctattcgtgaactatanatactcaagctttctgcaaaggagtccatgaactttgatgatctctatcttgattcccaaaagctagcatacccttgagagtctgttctttagtcgggtaagtcttgctgagtaattgcgtactcagggttttatctcttgctgtgtttgtaagagaagtttttatcccttttctttaagttagttacttcatgtggaggacttgaagcttaaaaggtttttatatatcttttatggaaaggcttcacccttccaattattggaataagttatgcactgcgagtactatcacgacttgcaataaatacatctctttctaccatgtaaaactcgagttcgggaatgtaaagtgtactttgtaaaagtcttccgctctatctctaatgtgtgcgtatcaaatgtgattactgtattatacctgttatgtgggagatccttgcgatgatgattacaattggcgaactcgatagccttg

SEQ ID NO: 81756 - DNA, 475 bp, Zea mays
  unsure (1)..(475): unsure at all n locations
actcagcttacatgtcttcatgtcagtgggtcgtcaaatttccattaatttccaaacatnttttcctggtatgttagctaacgctcaatgagtagttntttaatagaatctcttatgtgtggctgccttccaaaagattataaaagttagtcatactctgtcttttgctaccagtttaagactagctttcctatcgttactttagtttgtatcctccttaattacagatgttggatgaaagcaaaccttcattntttntgtttagtaggcctactaaaacaagcactgactcaaaattttatttgcattcattgcatttagcttgccttgaccctgtcatttaatcacagtcagggcattttatttgtgttggaatccaaacttgcaaatttttaacacanattctttgaaggtgtatggtctggatataaacacaagagttgtgaagattgcgtcgatataaatccaaaatcat

SEQ ID NO: 81757 - DNA, 488 bp, Zea mays
  unsure (1)..(488): unsure at all n locations
tcacgggctactggcggagctagccgaagcactggcttgtcttgtgggtggctggagtgggctggccatggtggccgaagctctggcggcaatggcgggcggaattgagctcgccggagctaaagagagggggctggccggtgaatgtgagcgcggtgtgaagtggggcgcgcctggggaggctttatangcacgacgcggtgcacgggcggtcgtggaccggcgagcgcgcgcgggcgtgcactattatgcgcggtgcgcgaacgggcgtgaaccgaaggtgtcagccacggtcgaacacgtgtgcccgttgcctctgcccatgctcaagcgccggttgggtgcaaatcttcgcgaatttgggcaagattgctgtgaaggatttgctcacctgaccatgctttgtcttttgtgtatggaagtcacgcggttttatgctagggacatggagttgtagcgtcaccaatgtgccaagtgtcagaatgtct

SEQ ID NO: 81758 - DNA, 487 bp, Zea mays
  unsure (1)..(487): unsure at all n locations
ttaaatactcagcttctaaggagagccatttatgataacaaatgtcatttgagaaatacagatttgagcgcatgtcagcatggagcaagtgtgtgtcatcatccacataagaacatcatgacgactgataagccactggagcttctacacatggatctattcacccgatagcttacataagcatttgcgagagtaaatactgtctaattattgtggatgattattctcgcttcacttgggtgttcttttttacgagaaatctcatacccaagagactttaaagggattcttgagatgagctcaaaacgagttcggcttaagtatcaagagaattataagcgacaacgggactgagttcaagaactcacatattgaaggctttcttgaggagganggcatcaagcatgagttctcttctncctacacaccacatcaaaatggtgtagtggagaggaagaatattactctattggacattgcaagaacc

SEQ ID NO: 81759 - DNA, 472 bp, Zea mays
  unsure (1)..(472): unsure at all n locations
tcttgtgctccatngcatagcagtgtcgttccacacggtgtctctcctctcatcgagaaatcgtctccaacgacgacaatggctacgccgagccacctcctgctcgtcgtcttcacggcgcttcttgcgttgctcccggtgacgacgcagctccagccttcgcaggtgtggactctgatcaagatccagcagctcctgaacgcccccccgatgctcagccactggcgccgcagcaccgacttctgcggcggcggcggcggcgccatgggcccggcgggctcggccgccgtcctgtgctacggtgacaccgtgacgcagctccacatcgcgggcgcgggcgcgccgtctctgtccaggaacttctccatcggtgccgtggtcacgacgctgtccaggctccccgacctcaatgtgctcacgctgtccnggctcggcctctggtgccccctgccgggcaagatttgttcgctca

SEQ ID NO: 81760 - DNA, 445 bp, Zea mays
tgatagatatctagacatggttcgaagagtcgaagctttcttctaatgattttctgtcaaaaatatccctcgaggacaaaatgagcatgctgatttactagctaagtcagcagcacatgggctgcctttaccttcggatgtgttcttcgaaacaataaaggcaccttcagtggaactccttgaaagagcagtcctcaatatatctcctgtttatagcgaagattggagaactgagatcatctcttaccttgagggtaaattcctttcagatgacgaagcttataacaggaggatagaggcaagagctcgtccatatgtcatgatagaaggggagttgtacaagcatggagtttgcgctccgctactcaagtgtttatctagaaccgaaggtatagagttgatgaaagaaatatatgcacgcctgtgtggatctcacattggatct

SEQ ID NO: 81761 - DNA, 434 bp, Zea mays
  unsure (1)..(434): unsure at all n locations
tgtataaattcggagaatctgtgggtagctcagaccatttcaaagagctatgctgataatagaagaagaccactggaatttgaggaaggagattatgtgtatctcaaggtgtcaccccttcatggaatgaggagattcaaagntaagggcaaattgtcccctcgctatattggaccattctgagtttttaggcaagttggagagatggcgtaccaactcgagctacctgcacgtctatcggatgtgcacaatgtatttcacgtgtcacaactgaagaaatgtctcatggtacctgaagatcagctaccaatggagaaccttattgttcaagatgatctgacttatgctgagtatcctaccaagattctggacacattgactcaagttacaaggaataatgtgataaagatgtgcaaagtgcactggagtcacca

SEQ ID NO: 81762 - DNA, 495 bp, Zea mays
acggaacttagatactcagcttaacttgtttgcaagacactccttcaatggatcaatgtgggtgctcgataatgaatatataaatcatatttggagatagtagcaagggtggtaacaactgaatctcaagtgcatattattttcaaatcttatctcttttgtgacttgtgtagccactaagggaaaagaagcacttgaagatatacatcagttattgattatgaaataaaggtctaattggaagataaatgaatattatcatatggtcaacaaatccaaaactatgtgatgtactctctctagttaatttggatttgattcttctatattagacactcaccataatatggattaagtcagccctttagactttattgaataatcatgcatattatccatatcattcaaaatatattgagcttaagggctcaagggaaatctagtccatattatgaggttgttctgttttagcaacacgcttgtctttcgcatata

SEQ ID NO: 81763 - DNA, 478 bp, Zea mays
  unsure (1)..(478): unsure at all n locations
tctcacactgatgaccgaccagctgagacgtatcccaatcctcttgctacagatgacaaacttgctaccctttatgcctacaggatagcaaaatgtctctgttataagtgcggcttaacttattcccgaggtcacaaatgtgctgatactgttcaactacacttggtcgatgaaattaggaaattccttcaacttcctgaggaagaggagtcacccacagcagagcctgctgaggaattacatatgctgtccttatctctggccaccacatctgcataggacactcctaaaaccatccgatntttgggtcacattggagatattgcaattttgattttattggattcangcagctcagcgtcatttctcagctctcaagaggcgttcactctacctgatgtcaggcctctggctccactagtgcgagttcaagtcgctagtggcgcccaactcacttgctctgaacaactactagatg

SEQ ID NO: 81764 - DNA, 448 bp, Zea mays
  unsure (1)..(448): unsure at all n locations
tcttagggagaacacgtgataagtctaactaatcttactttcgaaaaagatagaccttgtgcagcttatcaagcagggaaacaggtgggaagctctcatcatgccaaaaatgtgatgacaacatcaagacccctggagttacttcatatggacctcttcggacccgtcgcctatctaagcataggaggaagtaagtatggtcttgttatagttgatgatttttcccgcttcacttgggtattctttttgcaggataaatctgaaacccaagggaccctggcgcttcctaaggagagctcaaaacgagtntgagctcaaggtgaagaagataaggagcgacaatgggtctgaattcaagaaccttcaagtggaggagtatcttgaggaggaaggaatcaagcacgagttctccgctccctacgcaccacagcaaaatggtgtggtagag

SEQ ID NO: 81765 - DNA, 396 bp, Zea mays
tctgccatggcatgattgtccctggccggagagaagagtaccatgtctgggccacacttcggactgtcatgacgaaggactttaccatggcagcggtgttgcctccatatgaggatattgttgcctcatagctcatcaagaattgcttggggtccaagtgcccatcatacatggtgtcggggaccataattaggggtaccctcaaggctcctaaatctcagctggtaacccccatcagcacgaagctgcaaaggcctgatgggtgcgattaagtcaaggatcggtccattcgagggacgcgatcgcgcctcacccgagcccagcctcgggcaagggtagccgaccccatagggtttacgtctcgcccgaggaccccctacggcgacgaacgcacct

SEQ ID NO: 81766 - DNA, 451 bp, Zea mays
cagttcagcttatcacccgcaaatagatggtcatattgagagaaccaaccagattcttgaagatatgttgagagcttgttgcttgcaagacaagttatgttgggacaagaggctaccttatacagaattctcctacaacaacaactatcaggccagtctgaagatgtcaccattgcaagcactctatgggagaaaccgtcgaactttgttgcattgtgaccaacccggcgaaaggcaggtgttcggttaagatattttgcttgaagccgaagagaacatcagaatggtttgagagatttgaagacatcgcagtccaggcagtgaagctatgctaacaccagaagaagagatatgcgttttgaagtgggagactatgtatacttgaaggtgtcacccatcagaggaatcaaaaggttcggagtcaagggcaagctagcacctcgatatatca

SEQ ID NO: 81767 - DNA, 402 bp, Zea mays
  unsure (1)..(402): unsure at all n locations
gcctncttgctcctttgtgccttgagagcaatgggttaaggctcatggattgngccattcaacgcgtcgtccacgtaccttgcttctttgatcatcattcgcccgcttacaaatnttccaagaatttcttcgggcgacatcttgatgtacctaggattttcacgaatattgtttaccaagtgaggatcaagaacggtaaatgaccttatcattatgcggacgacgtcgtgatccgtccatcgcgtgcttccatagctccttattttgttgataaggatcttgagccggttgtatgtttgtgtcggctcctcgccccttatcatcgcgaatcgtccgagctcgccctccaccaactccatcttggtgagtaaggtgacatcattcccctcatgagagatcttg

SEQ ID NO: 81768 - DNA, 286 bp, Zea mays
aaacctaacaaaggctgccctggtctggcgcaccggacagtgtccagtgcaccacggagatccactctgaactgctcagcttcgggtttttggggagccactccgctataattcaccggactgtccggtgtaacaccggactgtccagtgtgccaagcggagcaacggtcgccagcgcaacggtcgagttcaacggtcggctgacacagctttagtgcacggacagcgcgcacagagtcaaagcagcgctagaaggcacatcggacagtgaacagtgactgtccgg

SEQ ID NO: 81769 - DNA, 467 bp, Zea mays
  unsure (1)..(467): unsure at all n locations
ntagccncgtacaccaggaagaatggagtctccccggtggctcggctatgcgtggtccggttcccccacaaaacggatgggagctccctgacccaatttgcgccatgcttttttaagcagtcataggtgcgcgtcttgagcccccctaagaatctctgcatttgccctctccgcctgtccgttactcctagggtgagccacagatgcaaagcagagctgggtgccgatgccctcgcaatattcctgaaagatccgacttgtaaactgggtctcgttgtttgtaatgatacgacttgtgaccccaaatctacagacgatcgacttgaggaaggcgacagcagcaccctgtgtgatgctgaccacaggggtggcctctggccacttggtgaacttgtcgatggcgacaaagaggtaccggtagccactgatggccctatgaaacggtcccaggatatccaccccncata

SEQ ID NO: 81770 - DNA, 484 bp, Zea mays
  unsure (1)..(484): unsure at all n locations
actcagcttctnaggggtgaacacatttaggattaacaaatgttcattntgagaaagacaggatttgtagcgcatgccaagcagggaagcaagttggaacccatcatccacacaagaatatcatgacgaccgacaggccactggagctcctacacatggatctattcggcccgattgcttacataagcatcggtgggagtaagtactatctagttattatggatgattattctcgcttcacttgggtgttctttttgcaggaaaaatctcacacccaagagaccttatagggattcttgagacgggctcaaaatgagttcggcttgaggatcaagaaaattagaagcgacaacgggacggagttcaagaactctcaaatngaaggctttcttgaggaggagggcatcaagcatgagttctcctctccctacacaccacaacaaaatggtgtagtggaaaggaagaatcgaactctattggacat

SEQ ID NO: 81771 - DNA, 464 bp, Zea mays
  unsure (1)..(464): unsure at all n locations
taactctcgcgagaccttgtctcatttctttctaaccatggtaagnttcattatcgcatgtgatattctatgcatatttacttcatttgttctctcgtatggtgtactgtttgttccctaatttgaatggatggatgtatgtatgcttgcaatcgcatagagaacgatccggtcgaagagcccgaggaactcgcaggagaagcccctgagcagcagtcggttggtggaggcaagtgtcccttgacctatctctgtcctattcattctttaattcacctcccgctttacatatttatgcctaaggattgactagctcttgttatccatgtccttgtttacctatttgggttggattattattgtctagctttatgctattgcttaactcttatcaatgaacatgatgagattatctattgatacgttgtntcccctctcttattatgatgttatacttgtggtct

SEQ ID NO: 81772 - DNA, 386 bp, Zea mays
  unsure (1)..(386): unsure at all n locations
cgagtggtgtatctcgacgaagtaagtaatgaagagtaagttgtccttttttgttttccaactaatattaagcgatatatattgtaatgtgttgaatgttggtagagtttattattcatatgtagtggcgtgaacgagtgtgcgaatcggggaaataactgagttatgttgattggacgtgatgtgtaaattttttttaaaaaaaatgtaggtttgtgtgtagagtgtactattgaacatgtatgtcgatgtattagagtcgtttgaagtattttgaatgcatgtcgaatatggttgcattcgaaatacggaaagagacatgttgtgcgatgaanaggctatattgattctatatgtcgtacgantaacattatattaagtgtata

SEQ ID NO: 81773 - DNA, 457 bp, Zea mays
tcactggctactggcggagctagccgaagcactggcttgtccagaagatggctgaggtgggctggccacgaagctctggctgcaatggcgggcggaattgagctcgccggagctaaaggaaagtggctggccggtgagggtgagtgcgggacaaagtggggcgcgcttgggaaggctatataagcacggcgcggtgcacgggcggtcgtggaccggcgagtgcgcgcgggcgtgcactgggaggtgcggtgcgcgaacgggcgtgaaccgggggtgtcagccacggtcgaacacgtgttcccgttgcctctgcccctgttcaagcgccgattgggagcatatcttcgcgaatctgggcaagatcgctgtgaaggatttgttcacctgaccaagctttgtcttttgtgtatggacgtcgcgctgctttatgctttggacagggaagtgtagcatcacc

SEQ ID NO: 81774 - DNA, 456 bp, Zea mays
  unsure (1)..(456): unsure at all n locations
actaagcttatcttaaagtgtatgatcanacaatgagtctttgaagataaaatttcaaccctaattaaaaaccctaagtgagccccatgagcaaaattcaagaaaataagaaaaagggaatgaaaagtttaaaattttgagttgagccaattatataagttaaagtatatttgataagcaacaagaaagattgagaaagcttagccaaaataatccaaataaaaccccaaatcaagcctcttttgttgggactcattgggaattctgaatttcagaattctgaaattcagaccttgagccaaagatcagggatgttcaccttgatccctaactcgaatcctaatggccccattgacaaaattgtgtctaactaacccctctgtcgtgtgccagaagatggcattgggacgcgagccctagacacgacaaaacttgggatttgcctctggtttgggc

SEQ ID NO: 81775 - DNA, 454 bp, Zea mays
gtgtgaaggttcttcatccctacatgtgctaagcggcgtattcacagccagcccatgctagtcttagctattaagcatgcatctagaccggcctcttcttttgcaaaatcaactaaatatatggttgtcgtctaatacacccttaaaagctagtgaaccatcacttcttctaaagacagacacatctacatttgtgaatagacagttatatcccatattgcataattgactaacagatagcatattatatcccaaggactcaactaaaaacacattagaaattgagtgctcatttgagattgcaattttacctaatccttttaccttgccttgattcccatcaccgaatattattgaatcttgggaatccttattcttgacgtaagaggtgaacatcttcttctcccccgtcatatggattgtgcatccgctgacaataatccagcttgaaccc

SEQ ID NO: 81776 - DNA, 414 bp, Zea mays
tcgacatttcaacaagggttgatttgatggctgacgagaagaagactgtcgacccgtcgatgtccgagttttacgaagctatggaaagaaccaatgcagaatagattgcacatgagacactagctgggatatctgagagtttgcagtgatagtgaagactttgatgcagaaagtgagaatgtggatgccaaagatcggccctggagaccaagccatgttgtctttatgaagtcaacaatcaagcatggacaaattgatgcaatgaggggaaggtacttccgtgacatttctattgtgagggctggaggggagaataatgtccccctgcctgaagctgacgagggtggtcattttagaagcttcatgaaagcagggcttcggttccctctagataagatactagtcgaagtcctg

SEQ ID NO: 81777 - DNA, 471 bp, Zea mays
  unsure (1)..(471): unsure at all n locations
ntgtggtgacgtgggatntcatggctatttntctactcttcttatttctggtagatcagatatagattatggttagcatgccaaggggtggaatacaatgtagttctgctacataaaccccagatatatgtctattcagaatcgacctttaccatttggtttatagtatacaccataccagtcaaaggactatcccaagtcaattcagtggctataagtatttaaattctgagagatgtatgcaatacaagcatagaggtcctagataggccgagtaaagtggttcgacgagaacacacaatgtttttttcacaccaacgttgtgaaaaaaatctcagaattacctttcgatgtactcgcaacttcgtgttgctaaggtactagccatttatctcaaagttcgcttcatgtcgttcagcgacaaatagcaatgtgtcagcatcttggtgagcaatgtatgactgagattct

SEQ ID NO: 81778 - DNA, 489 bp, Zea mays
  unsure (1)..(489): unsure at all n locations
tcacatagcatcttttcgatgcagattttcagaacgataatattgcccaccggtagaataaattcagatcttacctcanaattatgtactgactctagcagcatttccagctggctggtgaacattatagaaggagcagagaaggaggaccaacgtctggcatggcaagagttcatccacagaagctggatctgggtgtaggctggttgcagtgcgggagaaattccctggcgccttttgccccctcgggatgtcagaactttcaaagttcaaaggtgatcttctacctttctgcttgcaaacgtcctggtggagatgcccatctgatctgcaggacagtacctatactgcctttattccaagagatcgttagacgttgagtatattcccttcataagggtttgtgttctcactgcaaacttgcatgccttcaagcaacttttccagaagacacgtncaaagtagtagttatctaatagtcaaaaacta

SEQ ID NO: 81779 - DNA, 287 bp, Zea mays
  unsure (1)..(287): unsure at all n locations
acactatcagaatactacagcttcgntcactgtttctcagcttcatcatactgtacatatctcagcggtatgagaaaagtgcaaagttcaatgagaacgttaagcaacaagcacaaatttcttaccggcttaaggtggcttctagcttcgtcgtaagccatagttcgccgcccttcgttcagatttgcctatgaatctatttcctatgcttccagccacactggggatctcagataaatctgccagtgattatctcatagctggtctattaacacattttccatgct

SEQ ID NO: 81780 - DNA, 479 bp, Zea mays
  unsure (1)..(479): unsure at all n locations
nggacagttcttctaagttctcttcaacactaatgaaatcagatccgcgaatccaatcanttgtacagataaggcgctcaaccattgctggggtgagtgaactcctaaactcatctagtgttctcccccctgcgctaaaggctgactcagaagcaactgatgagataggaattgctaaaagatcacgggccatgcgagacattattggcaacctagtagcattgtccttccaatacttaagaatatcaaaaccttttttgtcctcttcattgtcctctaaaagatatttatctaactcagacttgacagtactattgcaacacccattattgctcatctattgagcaattatagacctcataagccttttgttcaatgccggtttatcttgagaatcagaatgttgtggtgtcttgtcactttgaccatacatttcattatactcatcaaacaaagcacganaagaagaagttcacttt

SEQ ID NO: 81781 - DNA, 471 bp, Zea mays
tcagcgctcctccgacggccacgacaccacacgaaccgggtgccataacctctccggctgccacgatggcatgtacttatggcgctagctctcctccgctagacacgttagcactctgctacacccccccaatgtacacctggatcctctccttacacctataaaaggaaggaccagggccctcttacagaaagtcagccgtgcggtgaagaagacgggacatgcgctcgcgtgaggccgctcgctccctctcccgcgtggacgcttgtaaccccatactgcaagcgcacccgacctgtgcacgggacaaacacgaaggccgcgggatttccacctccctctctcgctccggctaccctttcttccccccttcgcgctccgtctcgcgcggacccatctgggctgtggcacgcgacgacatttcactcgtcggcccatggacccctcggtctcgaaacgccaacagttggc

SEQ ID NO: 81782 - DNA, 408 bp, Zea mays
  unsure (1)..(408): unsure at all n locations
tagtcgaaagcgcctccggcattgcagccgtttctcaatcttctgcgtgggaggagcaagttctttcggttcagtagctgaagaagtttcgcagccaaactcatgcactatgtgccggtcaatgtagtgtggtcggtgggtaaggaccttcagctttttcctcttcggcgtatgctcgcttggagcagctgaagtggcaacctttccagaggttgcaccctttattttctgcccccatggcgggtagcgatagtcagggtacacaaatccaatagcatcaaaaaccctttttaatatnttcttttttcggctcctgaaggccacagatagtgcattatctntgtaacacttcatgtgttaccacgacacaggtttcatacttgcactgatgacttgctatcagatgtg

SEQ ID NO: 81783 - DNA, 473 bp, Zea mays
  unsure (1)..(473): unsure at all n locations
tggacgtgaagagtgccttcctcaatggaccaatcaaggaagaggtctatgttgagcaacctcccggctctgaagatagtgagtaccctaactatgtgtataaactctctaaggcgctttatgggctcaagcaagccccaagagcatggtatgaatgccttagagattntcttatcactaatggattcaaagtcggaaaagccgatcctacactctttaccaaaacacttgaaaatgatttgtttgtatgccaaatttatgttgatgatattatatttgggtctactaatgaatctacatgtgaagagtttagtatgatcatgacacaaaaattcgagatgtctatgatgggggagttgaaatatttcttaagatttcaagtaaagcaactccaagagggcaccttcataagccaaacgaagtatactcaagatattctaagcaagtttgggatgaaggatagccaacccatc

SEQ ID NO: 81784 - DNA, 480 bp, Zea mays
  unsure (1)..(480): unsure at all n locations
tctatagggagaacacattntaggattaacaaatgttcantttgagaaagacagggattgtagcgcatgccatgcatgaaagcaagttggagcccatcatccgcataagaacataatgacgaccgacaggccactggagctcctacacatggatctattcggcccgattgcttacataagcatcggcgggagtaagtactgtctagttattgtggatgattattctcgcttcacttgggtattctttttacaggaaaaatctcaaacccaagagaccttaaagggattcttgagacgggctcaaaataagttcggcttaaggatcaagaaaattagaagcgacaacgggacggagttcaagaattctcaaatcgaaggtttccttgaggaggagggcatcaagcatgagttctcttctccctacacgccacaacaaaatggtgtagtggagaggaagaatcgaactctattagacatggg

SEQ ID NO: 81785 - DNA, 466 bp, Zea mays
  unsure (1)..(466): unsure at all n locations
gcttgaagcccatggaagtagcataggcttataatatacgaattgacnctagcttatctacgggngcataggtttcaccgaaatccaaaccttcgacttgtgaataccccttggccacgagtcgagctctgttccttgtcaccacaccatgctcatcttgcttgttgcggaagacccatttggttcctacaacattttgattaggacgtggaaccaaatgccatacctcattccttgtgaagttgttgagctcctcttgcattgccatcacccaatccgaatcttggagtgcttcctctatcctatgtggctcaatagaggaaacaaacgagtaatgttcacaaaaatgtgcaacacgagatctagtggttacccccttatgaatgtcgccaaggatggtgtcgacggggtgatctcgttggattgcttggtggactcttgngtgtggaggtcttggttcttcatc

SEQ ID NO: 81786 - DNA, 463 bp, Zea mays
ctatcaaatggacgtgaagagtgctttcctcaatggaccaatcaaagaagaggtctatgttgagcaacctcccggctctgaaaatagtgagtaccctaaccatgtttataaactctctaaggcgctttatgggctcaagcaagccccaagagcatggtatgaatgccttagagatttccttatcactaatggattcaaagtcggaaaagccgatcctacactcttcactaaaactcttgaaaatgacttgtttgtatgccaaatttatgttgatgatattatatttgggtctactaacgagtctacatgtgaagaatttagtaggatcatgacacaaaaattcgagatgtcaatgatgggggagttgaagtatttcttatgatttcaagtaaagcaacttcaagagggcaccttcctttgtcaaacgaagtatactcaagatattctaagcaagtttgggatg

SEQ ID NO: 81787 - DNA, 458 bp, Zea mays
  unsure (1)..(458): unsure at all n locations
gaagaccgcacttctttgtgcccctggcctggttttctattcngctattaccgtgccagcctcatctgatgataataagtgcagcattaatgcgaagatacgcttctcaataactgtatgtaagtgcgcgtatacctttatttgttcatagacaaatgttccatatcctgattaggaaattaacgaccgtggtttcagtgtctaggctaattgcagaaaacaatctttcgaaggaatctagcaatcgcattatcgtccgcacattagcaggcacttccgaatacgttgctttgtgcatgcaacaactaatataaaagggggaaaagaaaatgatcctgtttgtacctttcccccacacagttgccaccatggtccatggtcatagtctaaaacccttaaaggctagttntgtaacacattnttctaaagatttttattttcctaagaaaaaatgaata

SEQ ID NO: 81788 - DNA, 451 bp, Zea mays
  unsure (1)..(451): unsure at all n locations
cgccaatacctgtcaaagcttcagcacatgccagcacagtagcntttgacncataccagaactnggccttacgcgtgctggggactggatatgactggacctttcaagaaagctcaaggaggatatacccatgtattggtggcgattgacaaattcactaaatggatagagttccagcccattgcttctttaacctctgctaaagccgtggaattcatacaaagcataatattcagattcgggataccaaacagtatcatcactgacttgggatccaacttcaccagttcagaattctttgacttctacgagcaaaagagcattcagatcaaatacgcatctgtagcacatccaagagccaacgggcaggttgagcgagccaacggaatgatattggaggcactcacaaaaagggtcttcgataagaatgataaattcgcaggaaaatgga

SEQ ID NO: 81789 - DNA, 464 bp, Zea mays
  unsure (1)..(464): unsure at all n locations
ngatgctgactcgccgaagcaacagagactgcaggatgtttgctcacatattctggaatgagggcgaatgatacgaagctgtatgcatgacctgcttcngctgagcttgttgtgctgctgcttcagctatttccttttgcttctgaatagtaacatggcacatcctggtagtatggcctttgttctcaccgcagaataagcaaaagattcttctcggttgatcgccaaatcttcctccaaagcccctggcgcctctgcctcttggagctggtggtctgaaggagctttgctgttgccccgaagcctgcgaggaacattgtggcctctgctggtggcttcctctatcatcattttgtgtagaattatgaattgatctcacgtgcctcgggtagaaccttcctccgaagcccctggtcatttcagaatacctgaaagcctcctcccttctttggaaanatcattgt

SEQ ID NO: 81790 - DNA, 439 bp, Zea mays
ggcaccagcatggtgcaccggacagtgtccggtgcctatgctggcgtgcccagcgaaccgaccgctctcaggaaaaactcaacgcccgcgactaatattcaccggactgtccgctgtgcaccgaattgtccggtgagcctatggccaacggtcatcttcaccaacgatcgattggtacgtggtcagaaaggatagaagggcagaagcagtcagagaaagttagtcgcaccggactgtccagtgtgccaccggactgaccggtgcgccacagggcagatgaatccaacagtcgactccaacgggcgactgacgtggcaggcaccggacactgaacagtgccatgtccggtgcgcaccggactgtccggtgtgcccatcgacagaaagctgttgctttgtgtccaaaggccatatgaggggttggagcctataaataccac

SEQ ID NO: 81791 - DNA, 380 bp, Zea mays
cacaatgaggatgactggtatgaagatttccatcatcgaaactttgcttttgatgatgcttctcctctctcaacagaattgcaggctacaccttggccacagacttacaagccacctcagcttcccatatatgacggtcactcagaccctaagcaattcctaatgagctatgaagcaactatatcttcgtacggtggcaatacggcagtcatggcataatcctttgtcatggccgtcaggagtgttgcttagacttggtactcttctcttcggccagagacaatcacttctgtgcagaaattgaaggatatgctgataactaactatcaagggtttcagacgaagccggtcaccgttcaagctctcttccagtgtaccca

SEQ ID NO: 81792 - DNA, 473 bp, Zea mays
gacactattaaactaagcttggcaatgcttcgtcaaatgaaaatgtgctaaagcacgaagtaagcttcgggaaatacagatttatcagccttgtcataagaaggaatcttgttctttacgaagcatgaaaagaagggaaggtgtttttttgccgaaggctcaaaaacggtatgtgcgtaaatttcatgcatcgcaaagaaataaattacaataatttacatattcaattcaatgttacaaatatcaaatgttacatagttttgttacaatagaagcttaatgttcattccattgtcctatacatcaagcatttcaaaatattattataataaaacctattcttctctaagaactttctccgcagcttcattcagtaatttattgacgacttcgtcaataatagattcagccatgtttatgatgtccaatgattccttcatctttggatcagctaggggatcgtacggctctgg

SEQ ID NO: 81793 - DNA, 492 bp, Zea mays
ctcagcttaagcacattggtataacctccttatctgtattaagagcttgccttatggtgccaccaggagctggggtgttgaggtattgttgatgataaaatttggggcataaggcatatgctaagcaatgaaggggaagattcatcttctcccaacggcgcataacgatactttcaacctcaacaaaatcatctttatgcaggttatcatcttttgtcattatatcttttatttcaccaaccatgcaatccattctctcgtagatttctcccatctttggaccttctccatcactaaaccttaatacggagtatattggctctgtgacagcaattatattttcagcctccatccaaaagttgtcatcatttattattaggacaatgacccttgcttggtgcttcacatcattagtgcaagtatttacccaatctttccactgccttgtgactattgtggtggcaagtgcttctctacatgttatgagtcttt

SEQ ID NO: 81794 - DNA, 478 bp, Zea mays
  unsure (1)..(478): unsure at all n locations
tcatgatcggaatgaataacaaactctngtttccatatgttgtgctgccatgtgtcaagcgctcggaccaaagcatacaattcattgtcatacacagaataatttaattgagcacctcccaatttttcactaaaatatgctataggtgttccttgctgcattaaaactcctcctatcccaatcccactatcatcacattctacttcataagttttagtgaaatcaggaagaataagtacaggtgcttcagtcaaacgtttcttcaattcttgaaaagcatcttcttgtgagtttccccatttaaattcaacacctttctttgtcaattcatttaaaggagaagcgatggtactgaaatctcgcacaaatcttctataataaccagcaagaccatgaaaacttcttacttgacttacattcgttggagctggccaatccttgatggctctcaccttggattcatccacctctattactt

SEQ ID NO: 81795 - DNA, 452 bp, Zea mays
  unsure (1)..(452): unsure at all n locations
ttctaaagctctctatgggcttaagcaagctccacgcgctcggtatttattgcttanggatttcttggcttccacagacttcataattgggaaggttgacactactctattcactaaaagaattgggaaagacttatttgtttgtcaaatctacgttgatgatattatctttggatctactaatgaattattntgtgaggagttcggaaaaatgatgtcaaaagaatctgaaatgtctatgataggagaatngagcttctttcttggccttcaaatcaaacaattganagatggaatttttataagtcaatcaaaatatttgaaggacatgctcaagaagtttggtttagaaaatgctaagcctatcaagactccaatggcaacaaatggtcatctagacttatatgaaggangtactatggttgatcaaaaactttatcgttcaataattg

SEQ ID NO: 81796 - DNA, 478 bp, Zea mays
  unsure (1)..(478): unsure at all n locations
agcttagnggcaaggggtacccgcganccgatacccgangggtatnnacttttctttggnangnaagngggctaaatattctacccgnaggtctgntattacgcaaaattcttcacccaatgggtaaacgggtattagaacgttccaccttcactcatacccgttaacccgtgggtataaaatacccaatataaacttatccgaagcatgaacttgaactctagtcatccaacttttttactatttaacaacaaatttaatgaccatgtaatagaacatttaatgtgctatgtagtactatcatagtgttactattttattcaattatctttggtgtgttgaatggatggttaaatgatgctagaaaattttgtaacgatattcatatggatatacttgccatttgtatagtataattctttgatagttgtttaatttttatgggtacgggtgacccgatgggtgacgcatacccaca

SEQ ID NO: 81797 - DNA, 441 bp, Zea mays
  unsure (1)..(441): unsure at all n locations
ggttgatccatggttgcgcgtggacaagcatgaacggtctcatattatggaatgtgtgagggtggcgcagttatgcgttgaccatatcgtgccaagcatcggcctatcatgttagaagttgtcaccatgcttagcatggcagcatcaaagggatagttgtagctgtgcaagacccacaaagggatagatgtgaatgatggaagtgtgaactaattaatgagctctactcaactattttccccttgcgtaggcgagataatatgtgcattctcatgcatgattgtgtaaacatcacggagattagtcagtgaaatatttggcatgcaccttacttgaacgttgtggctaataaattgtgcttggttggaatgcanatggctccatggtgttgttaattggtctaagttggagatgaagtgactgactccatgggcatgtggt

SEQ ID NO: 81798 - DNA, 478 bp, Zea mays
  unsure (1)..(478): unsure at all n locations
tgtgcttgacgagagagagagaggaggtggcgattcgaacaatatggtttcaacttggttggagatagctgaacaaatgggaggagatcgagtctcggcgtgcgctgggagctctatttatagaggaattgccgggggacgatggcgatggatcgcacgggcgcttatccgtaatcaatntattaacgactaggattaggactaatcaagtggacgcgatctagttggagactgacgattgcgtcagcgtacctacccgtccgtccgttccgttgcatgctacggctttttgagcgccgctggcgatcttatctaaattattttatttaatttgtctcgtctgcaggaagcagctattgcctctgcttgacacctgtcctgcacaaacactatccaaccacatattcgcatgcatactacggcagcaaattcatacttgcattgatagcaagtcttgaaaaagcttgagtcccgcgag

SEQ ID NO: 81799 - DNA, 471 bp, Zea mays
tgagaccgacataagccgctaccaatgacagcatcttgtcataagcttattctattctaatatcaaggtaaaaactcttcttcgactcttattattttgaacaacgaaggtgttttctaacgaatgttgcttgtgcacagagtatgctgctgagtaaagctttgagaatgcaacaagatctcgaagataaaaaacatgaagttataattgagggtttagaaagtaaaataaaagatcaagcagctgctcttgaaaagaaggatttcgagcttcagacaacagaagggttattggcagaagctgaagctaaaattgcaaagttaaatacggagcttctctcgaagtcagaaagcttcgaacaagagaagcaaaagttaaatgccaacattaagactgaggtcgagaaaagttcgaatctgcagaaatcattgtcagatcttcaaaacaaatgtctggagtttagtagccgat

SEQ ID NO: 81800 - DNA, 246 bp, Zea mays
  unsure (1)..(246): unsure at all n locations
gaaaagaagggcaaaagacgggcgagaggacccncggaggacgaaagcccccaacaggagccccccgcaaaacaaacgggaaaaaaaaacgcagaacgcgaaaaggacgaaggcctcgagccgaaggtccgaaaaaacaccttccctccgctagaatagcaacaatcactgacaagcggagccctgtaacttgcaacgccctaggccgagaaataagaacacatcgtgaaggcaattgggacacac

SEQ ID NO: 81801 - DNA, 465 bp, Zea mays
aaagtgccttcctcaatggaccaatcaaggaagaggtctacgttgagcaacctcctggcttttgagacagtgagtaccctaaccatgtttataggctctctaaggcgctttatgggctcaagcaagccccaagagcatggtatgaatgcctaagagatttccttatagctaatgacttcaaagtcggcaaggccgatcctactttactcactaaaactcttgacaatgatttgtttgtatgccaaatttatgttgatgatattatatttgggtctactaacgaatctacatgtgaagaatttagtaggatcatgacacaaaaattcgagatgtcgatgatgggggagttgcagtattttctaggattccaagtcaagcaactccaagaaggcaccttcataagccaaaccaagtatactcaagacattctaaccaagtttggaatgaaggatgctaagcccatca

SEQ ID NO: 81802 - DNA, 487 bp, Zea mays
  unsure (1)..(487): unsure at all n locations
taatgcncctanaagaatgtctaattntgttaaaggtaatgctcccatggctcangataacgagggatacattttatatcctgctaattatcccgagcataaaatgaggagaaatcatgctatgaaacctcataatgtttcacatcatgcttttatgtataaaaatgaggcttctagctctatgcaatcaacccatgttaaattgcctaaaaggaaatctcctattgcatcaaatgaacctaatgtttcatttaaaactnttgatgcttcttatgtgcttactaacaaatcatgcaaagtagttgccaaatatgttgggggccaacacaagggctccaagacttgtgtttgggtacccaaggtgcttgtttctagtgtgaaaggacccaagaccgtttgggtacctaagaacaacgcctaaacttgttttgtatgtttatgcatccggnggctcaagttggatcattgatagcgggtgcacaaacta

SEQ ID NO: 81803 - DNA, 503 bp, Zea mays
  unsure (1)..(503): unsure at all n locations
acctgcattacggaccttaaaactcagctagcaaatactattaacttttgtatctccaagaagtgattccaggtttaatcaactcaaacattacagttttcgaaatctgttctgatagtggacagaacaatacaaccagtttgtaaatttcataactcttaaaccgtcaggcctatggttatgaaattttaacacaagcaagatgagaaaagcatatacaactttcttataattggcaaggactgattctaacattacattatgcaaacaatgcagtttctgaaatctgtacagaatttggacagattcagttactgaatttgtaaaaatcataactcctaaacgatcagacttatgcctgtcaaattntaacaccagcaagataataaatgtatctaccacttgtctatagcacatatctacagaaaatacaatttagttcatcatacatacagcatgacatatacagcgcgtgcagcccaaaacagcaattaatataattc

SEQ ID NO: 81804 - DNA, 346 bp, Zea mays
gcgtgacactgtataactctccatcttcctctagagagattattgtacttcgcatcgcggtcgtatctactacctgatgtctatggctacactgatcgacctatgcgaagtgttccacttattatgtgatgtcctacactatgcgaggaagctggcatagaatccatcgttgatatattatcatataattcgtgtgtcgtcgcaacgtcttgccattgtacacgctctttgactcttgtgttgctacaggcgggatggctactgcgctagtcaccaaccatgactgcgctatctctcgttgtactggcctgactaacgactaactccttgatttacattactcgac

SEQ ID NO: 81805 - DNA, 471 bp, Zea mays
tggtggaaaatgatgaagtgatgaagctgtatacactgctatgatttatctctagaaaatttattgaatcaaccttgtaaaaatattgtaatttatgaatcaaacactactctgtaaatttgtccataccttgtaatatatttttacctttctgtctgtgtatgaactactttgatgtggacgaaacttgtattttttgagccgaaggcgataaacaccttcccttcttttcatgcacaacgaagcataaatctgcttctttttgttctcgccgaagccttgtcattagagccgaagcaactgtctgtatttctatgatatgatgatgatgatgatcctacgaatgtctaaatgaatgtatatgaatgcaatgaatgatgtgatgtattgtgcaaatgaatgtccattcacacgcttacgaagccacatccagactcttcattgtggcggaaccacccgaattattccaac

SEQ ID NO: 81806 - DNA, 466 bp, Zea mays
tcagatgtgtgtggtttggcattcatttgcatgattcattacatcatacaatgcataaataaacattcatttagacatacataggatcatcatcatcatcatatcatacagttgcttcggctctaagaatgcagcttcgaaagcagaatcatgcttcattgtgacaaaaagaaggaatggtgttttcgccttcggctcaaaaagaacaaagtttcggtcacatagaagcatttcacacattgatggaaaggtaaaaatatattacaaaggtatggacaaaatttacacagtagaatctaattcttaaattacaatattctgtacaaaggttaatacaagaagtcttagagtgtttccacagctagctattcaagcttcatcaccatctattgagcttcagatcgtctgctaagcttctgctttgtgctcttccgcttcatccatcctgtcatattataagattata

SEQ ID NO: 81807 - DNA, 165 bp, Zea mays
tgacactgtcgctgcagtgctcggaggactcgtacgatactgtcgatgcgccctatgaacacctctcttgtcattgcacttgcatagacccttctgtgatgtgagacaagcggtggcaatcttggctgggaaggacggtcttacgctcttgccttactactctct

SEQ ID NO: 81808 - DNA, 430 bp, Zea mays
  unsure (1)..(430): unsure at all n locations
cagcttgtaagcgcgaaccgaagactgtgggccatctagcanaagattgcatattcacaaaatcgtgttggagttggctcagctcgtggtacaacctctcctctctgccaaagatggactaatgctcgtcggtctatggatggtggaggaagtgcagactaaaagtagagaaaactgctcgcaaggaattcgatggtctctgtatttacttttggtgggagatttggaaagaaagaaatcgaagaatctttcatggtcttgagaagagcgagcgagaagtggccaacttcgtcaaagaagatttcaacccgcagagagcttctagttagttttagcgtgttaagcgttttgtttgtgtggcgtgctgggtttctagtgggctggtntgctagtgcttcttttcttttcttttctttgccgcccctctacc

SEQ ID NO: 81809 - DNA, 449 bp, Zea mays
  unsure (1)..(449): unsure at all n locations
tccttcatcaaaagatggcattgatcaacgaaaagacaatgtattatcccagtggctgcttgaagctgatgacttctcggcagtacctgataaaggagttcagtgctcgatcaatgggaagcatgttttggttagtcataggtgaatgtcatgcttctatatcccttttaatttacattgtctgggctgctgtatatggaatgttatggtaccttccaattttcctccaaaatactccctctgttccaaattgtaagtcgttctagcttttctagatatgtagctatcactatacattgtgtctagatacaataacaattgctatgtatgaatgcagtacaattgttatctaatgttgatgataattggaaactgctaatnatatattntntaagctcatatagccgtagcgtttgattgttagtcggttaaaatacatatattgcatc

SEQ ID NO: 81810 - DNA, 453 bp, Zea mays
  unsure (1)..(453): unsure at all n locations
tctttctccgtgcgtcatcacgggaatgactgagagaactgatggagatagataatgatagagggactagtgatntgagggagaagaatcttgtctagccattatgatccaatggcttatacaaataggagcaattgagctgggcctgcctggttttgtttgtccgaattcacaagctatgccaaatgtagatggatgaatatgcttagatggggatgacttgagtgttgaaaatctgaatttaatgttgttttgtgttcttttgtggacttgttagtttatgtagttatgaactatgcgttgtggactatgttattttgcaaactatgctatgcattaggaattgcatgtcctataatatctacgatctatctatttacttatgcatttttttgttattagtcgccttacttatatgtatatgaagtcgcctcacctcgcgccttatgcgct

SEQ ID NO: 81811 - DNA, 468 bp, Zea mays
aagattcttcatcccaacatgggctagtcggcggtgccagagtctacccatgttagtcttagcaattaagcaagtgtcgagttcagctctatcaaaatctactaagtatagctgaccctctaacactcccttaaaagctattgaatcatcacttcttctaaagacagtaacacctatatcagtaaaaagacagttgtagcccatttgacataattgggaaacagaaagcaagttgtaatctaaagaatcaacaagaaaaacattggaaatagaatggtcaggagatatagcaattttaccaagtcctttgaccaaaccttgatttccatccccgaatgtgatagctcgttggggatcttgcgttttttcatatgaggagaacatccttttctcccctgtcatgtggtttgtgcaaccgctgtcgagtatccaacttgatcctccggatgcataaacctacaaaacaaa

SEQ ID NO: 81812 - DNA, 434 bp, Zea mays
tctaccccctctgcctcttgggctggtggcctataggatgtatgttgcattccctaagattgcgaggcttgctagctgctctgggtgtgatttgccctgtcatcatttgtgttgggaatgtggattgttcttacatgcctagggtggagtcttcctccgaagcccctagtgatctcagaatacctgtaagcttcctcccttctctatcgaaaatcattgtcagctcgaatgtactcatccatcttctggagaagcttctctagggtttgtggtggcttccttgcaaaatatcatgctgtccgtcttggccagagccccttaatcatggcttcgatgtcgatctcattatgcactattggcgtctgggctctcagtcgcaagaacctttcgacgtatgcctgcaagtattcttcatggtcttgcgtgcattggaa

SEQ ID NO: 81813 - DNA, 436 bp, Zea mays
  unsure (1)..(436): unsure at all n locations
tgacctncacttcgtctgcgagcatatcgccgttgaggatgtgcgaattcttcaagtcccattagttcaccgacatcttcaccaagggtctccctacgtcagtgtttgaggagtttcggcctagtctcaacatttgctgtggctaaagtttcgactgcgggggtgttagagctattgtgtaatgcctattgtaatgggttgtatttgtgtaatgggcttaagcccaactaatattataaatatatctcccaaccctagttagggttagggtttcaatcccacactcccactaacattaatgaattacatatttttctcactgaacttcactatagtggatacttacgttgtgacagaaacatatagctaactagtggcaatntaacttgtcagggctactctccatttagtggttatggagtctcccangaagcat

SEQ ID NO: 81814 - DNA, 493 bp, Zea mays
  unsure (1)..(493): unsure at all n locations
aactaagcttctaaaggagagcacgtgacaagtctgactaacgtgctattcgaattatatagaccttgcgcagctggtcaagcaggtaaacaggtgggaggagcgcatcacagcaagaattgtatgaccacttcaagacccctggagctgctgcatatggacctcttcggacccgtcgcctatctgagcatacgagggagtaagtatggtctagttattgttgatgacttttcccgcttcacttgcgtgttctttatgcacgataacgctganacccaaaggacccgtaagcgcttcctcaagagagctcataatgagtttgagctcaaagtgaagaagataaagagcgacaacgggtccgagttcaagaaccttcaagtggaggagttccttgaggaggaaaggatcaagcacgagttctccgcttcctacacaccacagcaaaatggtgtggtagagagaaagaacaggacgctcattgacatggcgagga

SEQ ID NO: 81815 - DNA, 435 bp, Zea mays
tgtgctagtccactcgaactaatcttctgagaaaccctatctcgctgtaacatgacacccgaatgtccaacacaacacgcaatgaatgaattcagaattattgcagagcatatcagtacaagggacctggttcaggagtttttggctttcaaagtttttcctagtttgaaagaatgggaaatgtcgaagctaaagggggagaaaaaagaaggtgaacttgtacgtttaccttaccatttcaagtttaagaaatactttaaagcgccttgccaagagtggctagacacaattgaagtaatgtgtaatgaaatacttggcaattattccaaaaaagaagatcaattaatgactgcggccttcggcacccgttcgaagcgaagactgaaccgagtgttggacgccttgtgtttcgaataccctgactatgataatctg

SEQ ID NO: 81816 - DNA, 437 bp, Zea mays
taacttctccatctcctggcataaggtaacgtctgaagtctccattgttagacagcgacaggaagccttacggctgagtgcatctgccaccacattggccttgcctgtgtgataatgaatttccaattcatagtccttaataagctcgagccattgcctctgtctcatgttcaattctaactgggtgaagatatactgtaagcctttatgatctgtatagatgtgacagacattccccagtagataatgatgccagatttttagggcatgaaccaccacagctaactccagatcatgagtgggatagtgttcctcatgccggcgcaactgccttgaagcataagctattactcggccttcttgcattaaaacacagccgagaccactgcctgatgcgtacaatacacatcatagggcttctcaatatcccgttgagc

SEQ ID NO: 81817 - DNA, 466 bp, Zea mays
  unsure (1)..(466): unsure at all n locations
catcatgcgcccattctggcgttctaccgtggttgaaagtaaaagcaaatgtcgagccaacatggctctatgcaactataataattagatagtaagaataagatctaaaaaacacaacagtacagcagatttaaatgagaagacattagaagctaagattaatatagattgtgtaacgatgacaagtgatatagagcattttaaaataaaattgaaggctcaacatcttttccatcacttctaaggctgtagcagcagcattcactaccccccctagcagagcagaaaggaatcctacccactgcctattgaatctctgagtcctttgtttcagtcgcaatgtcctctatatgcatattaaccaagagagcttcgcctgtaatacatgaagcaacaccagcatttgtaatcactgcagaaaccacaccagatgcatcattctgatccttagtnttaacaacatgag

SEQ ID NO: 81818 - DNA, 440 bp, Zea mays
  unsure (1)..(440): unsure at all n locations
taatgcccctaagaatgtctaactctgttaagggtaaagctcccatgtctcaagataacgagggctatattttatatcctgctagttatcccgagtacaaaatcaggagaattcatgttagtaagtctcattctatatcccatcatgcatttatgtataaaaatgagacttctagctctaggcaatcaacccatgttaaattgcctaaaaggaaatctcctattgaatcaaatgaacccaatgtttcatttaagacttttgatgcttcttatgtgcttagtaacaaatcaggcaaagtagttgccaaatatgttgggggcaaacacaagggatcaaagacttgtgtntgtgtacccaatgtgcttgtttctaatgtcaaaggacccaagaccgtttggtacctaagaataagggctaaatttgttttgtaggcttatgca

SEQ ID NO: 81819 - DNA, 467 bp, Zea mays
  unsure (1)..(467): unsure at all n locations
ntaagggaatagtcataaaatattcncaaatataaagttgaatcacatttatacccctgggataccagaaaccctaattggaaccctggaaaaccctaaaaccaaaccctatggacctatgtgcaaaattagtccacttttggactaaagtgcaaaaaccaggttaaataagtatcctaagtcatttggttcacaaatgtgtggacttgtaagccaaatatttgaatttggacttaattgcaaaatggacctcaattgagttctatactaagtctgaaattcagtgttgagggctcaactttggagccttgtaactttcanagtatagggtttntgccctaagtcaccacatcaaagttataggcctaacataggtggacaactttgcttaagaatgtgagctcagttgtcaagaagatttatgagatattgaagcccacagttggactgtcaggctgatatagtct

SEQ ID NO: 81820 - DNA, 467 bp, Zea mays
  unsure (1)..(467): unsure at all n locations
gctattacgtgacctatgaaactcagcttnaggatattattcaactaaattaagatgaagttgataagaggccaaggtatgaaaacttcctctccttcagttgttttagtattctatccttagtgggatgtaccatagtataggttaatttccttgcaatataaaatgttcaacagtgcatataactttgagatcaactatatgtgtgcactagtttaaaggaatttaatctatccttttgggtttcaagaatgatgattcattctccatccacatataaggattatcatttgtgaaaccctcccttgtttttctaatgctctcttttctaagtgtttcaataaggtccttccaagtgttttcaagatggatttaaaatctacggatataagagtcttggttgtttcaattgatctcatatcaagtatgatcgaatcaagaaaagatgaaagaaagtcaagatcact

SEQ ID NO: 81821 - DNA, 351 bp, Zea mays
  unsure (1)..(351): unsure at all n locations
tctanagggagaacacactttgggactagaaaatgttcattctgagaaagacagggtttgtagcgcatgtcaagcacggaagcaagttggtgttcaccatccacacaagaacatcatgacgaccgacaggccgcttgagctactccacatggacctattcgtcccgatagcttacataagcatcggcgggagtaagtactgtctagttattgtggatgattatcatcccttcactcgcgtgttgtctttgccggaaaaatcacacatccaagagacctttatgggatccttgagacaggcttaaattgagttccgtttaacgatcgtaatgattagaagcgacaatgggac

SEQ ID NO: 81822 - DNA, 468 bp, Zea mays
  unsure (1)..(468): unsure at all n locations
tctaaagggagaacacatgataggtctaaccaatgctcatttcgaataagatataccttgggcagcttgtcaagcaggtcaacaagtgggaggagcacatcacagcatgaatgtgatgaccacgtctagacctctggagctgctgcatatggacctcttcggacccgttgnctatctgagcatatggggaagggtgaaagttgcctagaggggggtgaatatgcaagtttaaactttttcaacaaaaactagaagcatactgcgtaaaactgaattgatctcgaaattcacccaggtaactctggaaatgagatgttctaaatgatccacagggttcaaagtagtagatctgagaagggcacttctcaaaatccacacaccataaagatataaacaatctttcacggaatggtgagagaacgaagaacatgaaccaacactatgagcaagaactcatgagacacaaga

SEQ ID NO: 81823 - DNA, 492 bp, Zea mays
  unsure (1)..(492): unsure at all n locations
ctcaagctttcttggacttctcatccacttgaattctcatcctttctctcagatcgatgtcatagncgtggcaatcttacagaatcctctcataaatctccgataatatcctgcaagtcccacgaaactctggacctcagtaactatagtgggtatgctccacgccactatcttcgttactttagcaggatccactgatattcctccattagaaataatatgaccaaggaatggcaccttgtcaatccaaaactcacacttgctgaacttagccgaaagttgattatctcgtagcttctgtagcaccaaccttaggtgttgttcatgatcactctcattcttagaatagataagaatatcgttgataaacaccacgacgaatctgtccaaatactccattaacaccgtactcatcaaattcatgaaataagctggtgcatctggtaattccaaagacataacagtgaactcatataatccatatcgggttga

SEQ ID NO: 81824 - DNA, 326 bp, Zea mays
  unsure (1)..(326): unsure at all n locations
gtcgctgctagccaagttgttgcagctaccttcatcaatgatcaaacgacatgaacgctccttaatgacacactttgnttgaaacaatgtatgtcgctgattctgctctgccttctccatttgtgcactaagcacacgctgtacaatgaggctctcataatgctctgcatcatctgcaccaatctgttcttcgggtggttccttaatgcctgcatcatcagccgcaagcaaagcaagtgtagcttcatccaaatcactagcagaagaatacccaccatcgtcttttaccaccaaaacacgctgattaggacaatcacgctgcacgt

SEQ ID NO: 81825 - DNA, 473 bp, Zea mays
  unsure (1)..(473): unsure at all n locations
tggcacatataagtcataatgacaccacttggagaatataaatttggaaacaaagcattagtgtcattcatttaggaattttaaataagctatgcgtcgagcttaactaaacattttaaaccatgtaggtttgatcaaggatatgaattgaaaacgagcattcctaccatctgattgacctaatatgcatgcaactctaatcaaaagtaaataccacatgtaaaactaggcatgtaaggtaaaaactagatataagaaaatagatatgcatatttaaaaacaagaaaagcaataaatctagttaccttagtcatgggtggnggatttgggtccaaagtattcactaacccacttggcaatagacttgatctgatgtgatgcatcccatgatatacatcccaattttgtcaagtctccaaattcccccttaaatacttcaacttctcacttccctcttgngacacacaccttct

SEQ ID NO: 81826 - DNA, 431 bp, Zea mays
tgcacgcgcaccggcaatcgtcctcgaccacaccatacccgtagagcgacgatggaggagcgggaccacggtggtgccatctcttctccctctctctctctctccgctcttggttttttatggtggcggctgttcgatctatcgcagtttatggccaaaggggaggcaacctcgacacttatacccggagcaaggagaggccgttccggggtgctcggctggcgaggatcttttgtgaattcgttttacgatccaccagagtttgttacggtcttgcggagttcgttacgatcctgagctatgagacgatgacgctgacgaaacgaggccacaaatcagctgggatcgtcccacgcgcgcgcgcaacggggcactgaagtgcgggccccaccggtcggcgatctgtgtggggctatgggctggcgcgggat

SEQ ID NO: 81827 - DNA, 452 bp, Zea mays
  unsure (1)..(452): unsure at all n locations
tggacgtgaaagtgccttcctcatggaccaatcaaggaagaggtctatgttgagcaacctcccggctctgaagatagtgagtaccctaaccatgtgtacaaactctctaaggcgctttatgggctcaagcaagccccaagagcatggtatgaatgccttaaggattttctcatcactaatgaattcaaagtcggaaaggccgatcctactctattcactaaaactcttgataatgacttgtttgtatgccaaatttatgttgatgatattatatttgggtctactaacaagtctacatgtgaagaatttagtaggatcatgacacaaaagttcgagatgtctatgatggnggagttgaagtacttcttgggatttcaagtgaagcaactccaagaaggcaccttcattatccaaacaaagtatactcaagatattctatagcaaattggaat

SEQ ID NO: 81828 - DNA, 437 bp, Zea mays
  unsure (1)..(437): unsure at all n locations
tcccttcnggctcnctagaatagatcatgtagtttactcgactcctggatgttctatgctctccttcctagactgctactccagataccatcagatcagcttggcaaaagaagatgaggagaaaactgctttcatcacctcatttggagctttctgttatacctccatgtcgttcggcctcaagaacgctagagcgacttaccagagagccatccaaacatgcttagccaatcactggggcaagcgggtgaaagcctacgtcgatgatgtggttatcaaaacagaaaactcagaaaacttcatcgaagatttgcagctggtcttcaacagcttgaggcgctaccggtggaagctgaacccaaaaaagtgtgtcttcaaagtaccagccggaaagctactcggattcattttcggccatcgaggaattgaagcgaatc

SEQ ID NO: 81829 - DNA, 324 bp, Zea mays
ctggtttgagcctatcttgagccctgcgatttcattcattcattcatggggcaatcttttcgcaatctgagtgttttttatttgactcattgatgtcgcggattgacagacaccccgataacccctaaaatacaaaggcgcaggaaagcacattggatgttctgctatgtacgttcttgtccaaactgattcgaactcggtctgaggctactgtgctttgtccaagtgtactacgggtgaccgagcaccgatcgtttgacttacacatacgcaacatgtttcgaatgatatcttggctacctctaagctctcatacaaatcttg

SEQ ID NO: 81830 - DNA, 441 bp, Zea mays
ttcggacctataaatactcacgtgtcttgatagctcaagcttgacataaacactctttttccagcctgctgcccacttgcttcggtagctaattacacggaactttgagttttccgatatgcaaagttatagcaaccaaaattatcgtgtaatccatcttttctaacacttgttagataacgtagctcgtgaaccccgcagaagctgtctgcatatggtacactgcttggcttctgagtgcccaaatataaacaataagcccaacgatagcgttaggggtcaactgatgataatatataccgaacctctcaatacctctccaatatcccatgcacggggaaccttaattcatcctttataaaacgtttaaatataactatctcatccttctctggcttcagggtattctcttctccaccgaatcgcaacagcttcttctga

SEQ ID NO: 81831 - DNA, 469 bp, Zea mays
  unsure (1)..(469): unsure at all n locations
tgcattgcatatttaaattccttgtattgcatctaagacttgtctaacctagttgagataaccgccaacaaagtgagtgaaaaagcttaactcgggtcaaacctgacaagtcttagctttaagcttttagcacttaaattcttcctttttatgcaattattggttcttgaaatatgcatgaggtactgcacttagggggagtattcaaaactcaaatcactcatgaaaacccctagtgcaaaccaaaatgcaaatttcaccatttgcctattttctctaaaaattatctagcctatggcaaaatattttgaaaagtatatgagggtgccaatacctgtcccaacaagtgttattttgagtgattataagttgggaattggtttggttgggagttagatagaaaaattcaaaattttccaaatcntctctgtctgggctcaccngacaagtccggtgcgcaccgacactg

SEQ ID NO: 81832 - DNA, 211 bp, Zea mays
gctggacaacatcaaattcttctttaccaacttttctatcacggccgaggcctgcttagacaccagtttatctaccaatgagtaagcttcctgctccctcgagctcatggcttacccaaaataagactaagcgctgtctttggtatgtgctactccttgcctgccctggcgctggactgtatgtggtccattaacatcacccctatgatag

SEQ ID NO: 81833 - DNA, 476 bp, Zea mays
  unsure (1)..(476): unsure at all n locations
agctagggatggcaatgggcacattttatccgcgtgcccgcgagtaaaaaccctatatggtacgagtttgattctcaacccgacgggttttttctcgtgagtatgaaaatgttgtatccttgtacacaaacccgtatacccgcgtctgtgtctgtgtagactatagagcacatgcatctcaatttagtgccttcccgaacactttgagagagcggaaccaattcaatgatatataagaagacttcacacgcaagggaactcgtataactctttctaagatcggtatatgttttnttcagtttaatacatacttattattatgtgctatcagtgtaataaataattattatatgactgcgctcgcgggtgtacccgcgggtgccatanacccgcgggtagcanggtttggtaacatacgctatctgtcgctggtaacgggtacacacttaacattaatacgggttactatctctata

SEQ ID NO: 81834 - DNA, 332 bp, Zea mays
  unsure (1)..(332): unsure at all n locations
agctnggatgaggggtcattatcatcatcatccgagctatcatccgagtcccattcaactaagtaggctttgccatctttcttcttgttaaagnatttctttttcttcttgtaactttcatctttgcccttcttcttcttgcttgggcaattcatggcaatgtgaccgggttccccacactcaaaacactttctatcattgaaagcacttcttctagatgtttgacctcttctaagttgacctctcttcatcttcatgaacttaatgaatttccttacgaatagagccatgtcaccatcactctcactttcattttcttcatcattactctc

SEQ ID NO: 81835 - DNA, 463 bp, Zea mays
  unsure (1)..(463): unsure at all n locations
agcttatgccccatggatatcagtatgagtagactgtagaaaaactcaagaaactcttgacataacttttgtaaatatggctaaacagatcttaatgaattttgttcatacccttgaatatgctcttacccttccattaatgtatgaagggctctgatgtggacgatattatatttttgagccacatgcgaaagaacacgcttccttcatgttgtacacagcgaagcatataatacaagcttttctttttgccgaagatcttctttcgtacacaacgaagtacataaaacagtttttccttttttgcgaactaccacttatgctatgatgatggtatcctacatatgcctggatgaatggttatgactgcaaatgttatgatgtaatgtggtgtgcacatgaatgtccanacacatatgctgaagcattatcacaacccgtattttcttataaacaatcacat

SEQ ID NO: 81836 - DNA, 482 bp, Zea mays
  unsure (1)..(482): unsure at all n locations
agcttctaaacggagagcacantttgggactaacaaatgttcnatttgagaaagacagtgtttgtagcgcatgtcaagcacggaagcaagttggcgttcatcatccacacaagaacatcataatgactgacaggccgcttgagctactccacatggacctattcggcccgatagcttacataagcatcagcgggaataagtactggctagttatggtggatgattattcttgcttcacttgagtgttcttcttgcaggaaaaatcacaaacccaagagaccttatagggattcttgagacgggctcanaatgagttcggcttaaggatcaagaagattagaagcgacaatgggacagagttcaagaactcacaaatagaaggttttcttgaggacgagggcatcaagcatgagttctcttctccctacacttcacaacanaatggtgtagtagagaggaagaatagaactctacttgacatg

SEQ ID NO: 81837 - DNA, 431 bp, Zea mays
  unsure (1)..(431): unsure at all n locations
agcttgatgttgctttggctcacttgttggaagtcaatgacatccttaatgccagggcgtctcccattataaagcatgctttgagcaaatctaaaatttttattttctaattcatgctcggcaattttagcatttaacttagctatgtgatcattttgttctttaatcatagctaggtgatcattcataacatcaatattaacatctctacatctagtacaaatagtggcatgttcaatagtagatgtagatggttttgcanacattcaattcttcaatcttagtagtcaaattatcattctcaattctaagacaagaaatngaatcattgcacatattaagctctntagataaatnttcacattnttctacctctagagcataagcattntntcaatgtaacaaatntcttattntccttaacgagcaag

SEQ ID NO: 81838 - DNA, 402 bp, Zea mays
  unsure (1)..(402): unsure at all n locations
agcttgtgaaggttcttcattctcacatgtgctaagcggcgatgccacagccagcccatgctagtcttagcaattaagcatgcatctagaccgacctcctcttttgcaaaatcaactaaatagagtttgtcgtctaatacacccttaanagctaatgaaccatcacttattctaaagaccgacacatctacatttgtgaatagacaattatatcccatattacataattgacttacggataacaaattatatccaaacgactctactaagaatacattagaaatagagtgctcatttgagaatgcaatcttgcctaagcctttaaccttgccttgattcccgtcaccgaatatgattgaatcttgggaatctntattcttgacgtaggaggtgaacatcttc

SEQ ID NO: 81839 - DNA, 480 bp, Zea mays
  unsure (1)..(480): unsure at all n locations
agctntaagctctttgacaataaaatcacttcatctagttntaacaaaagatgctttaatgcaggagtgagatttttgagaagttaaactatgtatgaagcanggttaatgcatggacatgctttctcttccttttatacaagatatgcaaagaatgtatataaaaggaagatttatgtatttgtataaatgagatgaagtagttttacccttntgtaccttcacatagagacgctctcttcattggtgcttgtccttagtcttagatgcttaagacctatactcaagacaatatatggaaatatttngcacaagagagagttctacaacttgtgatccttntctaagtcattgtcagcatatatcanatggatcacaaattgcatagatgtatcatgaattctcctttaacttagtgcacatcaagagagatatcgattgatagtatatgcgacacttagaaacatanagtgtaattaa

SEQ ID NO: 81840 - DNA, 433 bp, Zea mays
  unsure (1)..(433): unsure at all n locations
agcttctaaagggagaacacgtgataggttngactaacgttcaattcgaaaaagatagaccttgtgcagcttgtcaggcaggtaaacaagtgggaggagcgcatcacagcaagaatgtgatgaccacttcaagacctctggagctgctacatatggacctcttcggacccgtcgcctatctgagcataggaggaagtaagtatggtttagttattggtgatgactnttcccgcttcacttgggtgttctttctgcaggataagtctgaaacccaaggtaccctncagcgcttcctcangagagctcannaatgagttgagctcaaggtgaagaagataagaagcgacaacgggtccgagttcaagaaccttcaagtagaggaagtccttgaggaggaanggatcaagcacgaagtctccgctccatacacacc

SEQ ID NO: 81841 - DNA, 359 bp, Zea mays
  unsure (1)..(359): unsure at all n locations
agcttcggctacggtcaatatttttggcagcacaacgatgcaatagcagtaaatgttgtggtaacttcacacctacccgtctggttatatagtgctgcaggtgggaaggtgaatcgtcaagccgctcacacccgttgaacagtcacccgcacccgctgaacggtggaccacacagtgcctggaaggtgaatcaccatatcgctcgtatacgctgaacggtggaccacccgatgctgggagtatttaatcgtttctcgcaacgagctcatggaaggtgtttncggacctcggcattcgagcctgtgagagttttacnatcgactcgtacgaaaacgactataccggaagggctctgtggg

SEQ ID NO: 81842 - DNA, 258 bp, Zea mays
atgcgaatctcacttgtatgacccatacgacagtgccacatgtatgtaggacttaaatcattatggcgaggcctctaacactaattatatagataggtgcatcatcgagattaaaatgaataacccacgcataatgtatgcagaagccacagacatgccattcttaaagaacacacaaccattgttgcacttccaaatgaataaccattcttcatcaaacatgaacgagacataatgtttcgactcatactaagaact

SEQ ID NO: 81843 - DNA, 377 bp, Zea mays
atgtgacgatctgagtcaagaagagcacactagtctacatgctgaattgactgaaatagtcgaagtcctgactttagacgaccaacaattgaagaattatttgactgttgcaactactatagggaaagctgctattgagaacaatgatttcaacattggagtggcagtggataatcaaaggcttaagaatgaggtctagaaactaaaaagtgtaaatgaacattttgcaccagtgtgcaaaagttaacaagggcaatacctccaaatgagctgttatgaacactgtataataataacagagtggattggtacatgctttgtgcaagaagctttactcatacaagccaacagactcacacctatcaatgcttgagtgg

SEQ ID NO: 81844 - DNA, 467 bp, Zea mays
  unsure (1)..(467): unsure at all n locations
agcttgtactcctcngtgttaggttcctcctggaccacctgctcttcttctcgtgggggttatatatcgcaagggtgatgttggggacttgttctcanatgctatgaatcaagaacaaggcaacacagaatgataaatgttaaagtccttcgtccttcgaagtattatttcctcaaggatataatggtctttggacgaaggtcatganagacataccttcatcatctcttcacatatgtatatatgtattaatattagcaacgaataaaatatgtaaagcataagaaataatgtatacaataacattattatatatatntcccagtatatagttgtaagttaacatagaaacaatattgaataacacttggtaccttcggattgacaganaacanangtacgagcgtgacgcanaagcanatgccaagtccgcgtgaacagtacgggagcacttgtcatctatntat

SEQ ID NO: 81845 - DNA, 468 bp, Zea mays
  unsure (1)..(468): unsure at all n locations
agcttgttattcatgtcatgaattggagccgtcgtgataaacaaatcaaatcctttgttattaggattctttgcagtcccaatcataaatgcctcatgttttggactgaaaaaaaaaccatagaaatatagttaactttaagagaattgctattgtaaaagatctggtctacaaaactaagattcaagatatttaatatatgcatgcactactgaggaatcaaacctgagatcatcttttccactagctntagctttggttatccattcttgggaagctccatcgaaatcaaaatcacctccttgaattacaaaattttttatgatatgacgaaatggcattcctttgaaatgattactcttgctgcgcaataggataaatattagataatataccaatggccaanaattaataatagctcatcctgaagaatatcaacttggtagcttcaactctcttgactgactc

SEQ ID NO: 81846 - DNA, 488 bp, Zea mays
  unsure (1)..(488): unsure at all n locations
gcttgtcagcacatttgtgtcccttcgcttgagggtccgccaggttagtaaacanagatctaggaacccaaaagtcctttgtgttagcgcttggtaacttcattacctttctagcacaagttgcattcttgggttgcctagttacatgagaattaattgacaagataggagtggagttgttaccaatgggacaatccttgcattgatgctcccttttccggcatatgtagcaaagtcgatcttcaatccttgaagaacttttctttccttgttggttgcttgctacatggttagtaaatattttcttttctaaccctattgccttttgtttcaaatggtgacaagatttgactaagtgtcccttctttgagcatntagaacaacgtctatcatcctttgtaataatcaagccatttttaatgtagggacatgacctaatcaagtggtcctcttcanagcattcactacacttcttacttttcttaatg

SEQ ID NO: 81847 - DNA, 329 bp, Zea mays
  unsure (1)..(329): unsure at all n locations
tacatgtgctaacggcgatgccacagccagcccatgctagtcttatctattaagcatgcatctagaccggcctcttcttttgcaaaatcaactaaataaagtttgtcgtctaatacaccctttatagctagtgaaccatcacttcttctaaagacagacacatctacatttgtaaatagacagttataccccatgtngcatagttgactaacagatagcanattatatccaagagactctactaataacacattatagatagagtgctcattatgaaatgcaattttacctcaaccctttaccttgccttgagtccatcaccgaatata

SEQ ID NO: 81848 - DNA, 399 bp, Zea mays
  unsure (1)..(399): unsure at all n locations
gaactattatgcctattgaaagtcgtctagaggggggtgaataaggcgaatctgaaatatacaaacttaagcacaaatacaagctgggttagcgttagaaatataaacgagtccgagagagagggcgcaacacaaattgtgagcaaataaagagtgagacacaatgatttgttttaccgaggttcggttcttgcaaacctactcccttgtgaggtgatcatgaagaccgagtctctttcaaccctttccctctctcaaacggtcacttagaccgagtgagcttctcttctcaatcaaacggaacacanagttctcgctaggaccaccacacaattggtgtctcttgcctcggtacaattgaagttgatcacacgaagaatgagatagaanagaagcaat

SEQ ID NO: 81849 - DNA, 449 bp, Zea mays
  unsure (1)..(449): unsure at all n locations
tagcttggctatgggtaaaatnttcaacagcacaatagtgcaatggcaatgaatgttgtggtaacttcacaactacccgtctgtttatatagtgctacacgtgggaaggtgaaccgtcaagtcgcccacacccgctgaacaattacccccatccactgaacgatggaccactcgacgcttggaggagaatctgcagaccgcgcgtacccactgcatggtgggccacctcgcgctcggaatattttaatcgtttctcgacaacgagctcagggaaggtgtttttcggaccttcggcattccgaagccttggagatattttcacggatcaagctcgttacgaagaacaatctagcaccgcgaaggggctactattgtgggtctgcttcgtcgccgaaggtcctttaagaagaaacaccttcggaagatcagcacanaagctaacataacgt

SEQ ID NO: 81850 - DNA, 421 bp, Zea mays
  unsure (1)..(421): unsure at all n locations
agcttccaaccttcagactgcatccagatacttttcaagcttcggatctcgtgccttgctgctcttatccacatggctagcaatgacttgagaatcagtctttaggatgacccttcttattcccattgcccttagtttccgaagccccaaaagaagtgcttcgtacttagcaatattatntgtgcaactgaaatccagtttgactggcaaacatgntttgactttngaaggtgccactatgactgcagctgctcctggcaccgaaggttcccaagaaccatcacagaacattgccaggcttcggatctttgcttgcccttcttcggagccctggcgtcagtcagtatgaagtctgtagcgcctgagatgaattgagatctgtcacgtagcnatggtgaattcatgagctcgggccactttc

SEQ ID NO: 81851 - DNA, 465 bp, Zea mays
  unsure (1)..(465): unsure at all n locations
agcttgccttcgcctcattataccacccgcagttcaacggagttgtggaacgcgccaatggaaaaantttcacagctgtcaagaagatgctcctcgacgaanaaagggcaggtgggccgatttgttacctgaagcggtctgggcactaaacatgactgagtgcagggcgactgggttcacccctttccgccttctatatggatcggaggccatgaccccgcaagaaataaaacatggatccccgcgaacggtttcgtcagctgtccccgacgtggacgaacccacttcgaaggatcttatcgatggagaccgcgtcttcgctctacaggctctaaataaataccaagcccagacaaaagcatggcgcgaccatgcagtcatcccaagggaattcagcgaaggggacctcgtactcgttcgaacagctcggacagagtcccagggcaagctagagcccaagtggga

SEQ ID NO: 81852 - DNA, 465 bp, Zea mays
  unsure (1)..(465): unsure at all n locations
agcttgataatgaggagatgactcttatcatcaagatcttctggcaaatcctcaagaaacggaaggggaaaaggtattaaccctattccaagagggtttgctatcggtgtggtaagaacaatcactatattgtcaaatgtccctatgctagtgatagtgatagggatgatgaatagaacgggaacaataagatggagaacaagaagtactaccacaaaaagaagggtggcgacgaacatgttgtgagagagtatgactccaatgagggcttcatcgacaccttctgcgatgaggacgccgtcaacatgatagttacaagggactttctttctaacataanccaagtgcttatggcaagagagcacagggggttaaactagaaccctccaaaatactcttcgatgagaggggaattatgatatgatgatgacttcttacttgaaaattatgaatgtaaatcattat

SEQ ID NO: 81853 - DNA, 478 bp, Zea mays
  unsure (1)..(478): unsure at all n locations
aagctgagaaaatatttctatctgccttctttgatgtcatggngcacttgagtgtccatcttcccgatgaggcaatgcttataggacctgttcaatatggatggatgtacccaatagaaaggcgactaggcactttgaaaaattctgtaaggaacacggctatgccggaaggatcaattgctgaggcatatatggcaagtgataccttaacattntgttctatgtacatgaaggatgtngacactacatntaaccaggatgatgatagtggtacagagatgccattgcctaatgacatgtctngtattaagcatggtgctactcttggtggaggtactaagactgagtacattgatgatgctaccatgaataagatagtttggtatgtgctacataatgctgatgaagacaggaataattgacgtaagtacgtcggatgtgctcataattatgtatgatattaaattgacatatgcta

SEQ ID NO: 81854 - DNA, 490 bp, Zea mays
  unsure (1)..(490): unsure at all n locations
agcttcnggtctttagccttgcaacttttgtcaatatgacccgaaacaatctgagaatcagttttaaggatcgccctcctgatccccatcgcctttagtttccgaagacccaggagcaaggcttcgtactcagcaatattatttgtgcagctgaaatccagtcttgctgcgtagcaagttttaaccttagacggtgaaaccaaaacagcagctgctcctgctccgaagttccccaggagccatcacaaaacactgtccatgcttcggcatctttattcgcttcttcaccctgagcccctggcgtccagtcggcaataaaatcttgcaaagcttgagaatggatcgaggatctgtgcacataatcaatgtanaattcattaagctccgcagcccattntccaattcggccagtagcttctttatttctcatgatatctttcaacggctgcgaagaaagaacaataatantatatgtctcaccctttataca

SEQ ID NO: 81855 - DNA, 523 bp, Zea mays
tcagctcggacccgagatccttagagtcacctgccgcatgcagcttatgctcatgaatatagaaatcatagtaaagtgaatggacaagagacacaacgatttttcctatggtttggccaaatcctactgaaagttgcctagagggggtgaatacgcaagcggaagattttcaacaaaaactagaaacgaactatgtaaaacagggttgatctcactacacgagttcaactaaagaatgagatatagaactcaattgatctcaaaaatcacccagctaacattggaaatgagatgtctagatgatccacacggttcacagtaacagatctgagaatgacacttctcaaaatccacacaccagaaagatataaacaattcttccacggaatagtgagagaatgaagaacatgaacaaacacaatgagcaagaacacaagagacacaagaattatctcgagggtcagtcacaccacaatggtgccctacttcctctgtgatgcgcccacaaagagacgggtctctt

SEQ ID NO: 81856 - DNA, 404 bp, Zea mays
  unsure (1)..(404): unsure at all n locations
agctntagtcattgcgcgcatcatctacttcaattgtagatgggagacacactcaccatcagtaggcttagggcctttatctttcttcgtttgggtctttggtcctatcattgttagtacaaaatagaaacaaaggcaacaaacaaacagtatgaaccctacaactactctntgtggtggtggtggaacacaagttatgaagcatcttacctcgctcttacaagggtcttaccaacaccacaggtggcaaacagtggccggtggacaacacttagagcgtgggtgtgattgcaaaagagaatatgttctgctcgtgaaagtcgcctagaggggggtgaatagggcgaatctgaaattacaaactntaagcacaactacacgccggggttagtgttagaaataaa

SEQ ID NO: 81857 - DNA, 436 bp, Zea mays
  unsure (1)..(436): unsure at all n locations
agcttctatagggagaactcgtgatanggttaactaatgtgcaattcgaanaagatagaccttgtgcagcttgtcaagcaggcaaacaggtgggaagctctcatcacaccaaanatgtgatgaccacatcaagacctttggagatgcttcacatggacctattcggacccgtcgcctatctaagtataggaggaagtaagtatggtcttgttatagttgatgacttttcccgcttcacttgnngtattcttttgcaggataaatctgaaacccaagggaccctcaagcgcttcctaaggagagctcaaaacgagtttgagctcaaggtgaaaaagataaggagcgacaatgggtccgagttcaagaaaccttcagtggaggagtaccttgaggaggaanggatcaagcacgagttctccgctccctacacaccaca

SEQ ID NO: 81858 - DNA, 480 bp, Zea mays
  unsure (1)..(480): unsure at all n locations
agcttncaatgagggattatattntatgactaactaatggtcattttgagaaagacaggatatgtagagcatgtcaagcagagaagcatgttggaactcatcatccacacaaaaacttcatgacgaccgagaggccgcttgagctactccacttggatctattcggcctaattgcttacatacgcatcgacgagagtaagtatagtcttgtaattgcggatgattattctcacttcacttgtgtggtctttctgcngataaatcacaaacccaagaaaccttatagaaattcttgagacgggctcacaatgagtctggattgagaatcaagaagattataagcgacaatgggacgtaattcaagaactctcannatgaatgatttcttgaggagganggcatcaagcatgagttctcttctccctacacacctgaacgaaacggtgtcgtagagagaaagaatagaaatcttttggatat

SEQ ID NO: 81859 - DNA, 462 bp, Zea mays
  unsure (1)..(462): unsure at all n locations
caagctggtgccgatggttataacaaaatccttgaaatcttggctgtcaaactgctttgccgtgtcaactgttagttcagacggtactccgaagcggcaaacaatgttttgccagaagaatttttgggcagtctttgatgttattgtggaaacagccctcgcctcgatccatttggtgaagtactcgacggcgacaaaggcgaacttaatgttcccctgagcggtgggcaggggcccgacaatatccaggccccagcgctggagaggccatgtatgggcgatcagctttgtatactgcgaggggctgcctgaccgangagaaaacttctggcaggctttgcangaccttgtgacccgatttgcggcacagatcattgcgggccagtaaaacccttggcanatcaccttggcagctagggcccttggcctgcgtgtgagccgacgtccactgtggacttacgt

SEQ ID NO: 81860 - DNA, 405 bp, Zea mays
  unsure (1)..(405): unsure at all n locations
agcttggaatgttctttacctcacatgtgctaagcggcgatgccacagccagcccatgctagtcttagctattaagcatgcatctagaccggcttcttcttttgcaaaatcaactaaataaagtttgtcgtctaatacacccttaaaagctagtgaaccatcacttcttctaaagacaggcacatctacatttgtaaatagacaattatatcccatattgcataattgactaaccgatagcaaattatatcctagagactctactaaaaacacattagagatagagtgctcattatgaaatgcaatttacctaaccctttaccttgcttgattccataccgaaatgattgatcttgggaaccttattttgacgtagganggaacatcttttctccccgcatatgg

SEQ ID NO: 81861 - DNA, 301 bp, Zea mays
  unsure (1)..(301): unsure at all n locations
agcttggttatatagatgttagtgcaatagaaccaagtggctatggagcgagctcttgtaaatcacaataatcacagagaaagacaacacangagacacagtggtttatcccattgtcagcgtttcgaccccggggggtccctagaccgacgagtgaattgtcgtcgcgtgtcccagcctagatgggtcggcgcgagacggagcacgaagggggagaaacgacaagggggaatcccgcggcctccgtgttgtcctgcgcccaggtcgggtgcgcttgcagtanggggttacaagcgtccgc

SEQ ID NO: 81862 - DNA, 493 bp, Zea mays
  unsure (1)..(493): unsure at all n locations
agcttgccttaactcgatcttttggtgtgtctttgctggatacctcccttacctttgtaatatctagatctttccataatgcttatcttatgcctaccttttgaattatcatctttcccatctcgatttgagaatggtgtttacctaccctgcccttggttgtattttctcccttgtagattacaatccttactttaactccattctttattgtgctcgtgcccctcacctgcacacacttttctttccctcgtccttcgacaaccttagagagtagttattcctttttcaagaaagaccaccatctaactaacattaacgtatagcaacgagatgtttgggtgtgtgtgctcatgatgttngtctntgtgttatgactgattngcttctttgaaatgagtgttgatgtgttgtgcgccttggttcgcaatggcatcagtttactangtgagtgccatagagttagggtagtgggtgctctctcttttctctc

SEQ ID NO: 81863 - DNA, 303 bp, Zea mays
cagcctatttagaggcgttttgatatgatatattcatctatattcgacagaaccacatatcatagcttcgcatggtagatgaataagtagatattgcattactttgaagagaccaggagaaaatatttctttcaagatagcatatcaaaacttgcatttgttgctcaagcatctctttctttatttctttatcacaaagatgtctataaaagtagcttagctccgctcacgcctttcatatacactacaagaaaactggcaaaaacatcacccaggctatgatcgttggccgcgacattcttg

SEQ ID NO: 81864 - DNA, 436 bp, Zea mays
atagctgtaaggggggcctccatgaccacaacatgtcatcaatggcttctcaatccctggaagaacaatgggaaccatgttataatgcatggaagagaatggtatacgaatctgtgagacctttaattgtgttatcccagtattgttcctgatctcaaaattatttgttttcaacattgaaaaagaactggcacagggacagagactacagactaacttaccatatttctggtggtgggcgacgagatcatacttgatagcgaacatattcacaagacgatagtcgacttttcagtgtcaacgcagctcgccaaggctcactcacaagggattgaacttcttgagacattataatgcttggatgcatcatgctcatgaggtcctgtcgcatcctcgcataaaagctctgggcatgccctaatgctccgtcatgatc

SEQ ID NO: 81865 - DNA, 422 bp, Zea mays
  unsure (1)..(422): unsure at all n locations
agcttctcctcaattggcgccactcctaccctctctcgtatatcatcattccggactcggtctctccttgtgtggccacatatccagcgcaacatacgcatctctgccacgcatagttgttggacatgtcgtcttttagtgggccaacattctgctccatacaacatagccggccggattgctgtcctgtagaaattgccttttagtttgtgtggcacccggnggtcgcataagacacccgccgcttgccgccacttcaaccatccagctttaattctatgactgacatcctcatcgatgtctccatccttctgaagcattgatcctaagtaacgaanagtgtcttttttgggaccacttgcccatcaagactaacatcgccatcttcataccccgtggcactgaatcacacttcatatatt

SEQ ID NO: 81866 - DNA, 477 bp, Zea mays
  unsure (1)..(477): unsure at all n locations
agcttcttataggagaacatgtgtcatgactaaccaatgtatgttttgagaaagacagaccttgtgcagcaggtcatacagggaaacaagtgggaacaactcatccaagtaaaaacgagatgacgacgtcaaggccattagagcttcttcatatggatctcttcgaacccgttgcttagcatcgggggaagtaagtatggtcttgttattgttgatgactattcccgcttcacttgtgtattggttttgcaggataaatctaaaaccaaagaaaaccctcaagcgcttcttaaggtggacacaaaatgagtttgagctaaaggtatagaagataagaagcgataacagatcagaattcaagaatcttcaagtggaggaatatcttgaggaggaaggaatcaagcacgagttctccgctccctatactccacaacanaatggtgtagtggagcggaagaaccggacactcatcgatat

SEQ ID NO: 81867 - DNA, 473 bp, Zea mays
  unsure (1)..(473): unsure at all n locations
agcttctaactttaacatcgcttccaagcttgatcatattcctaattcagatcanagaacaatttcagtcaattgacataaactgtaagactgaattcattcttaatgtcagcaagtcagtacacgacaaaagttaagctacattagtcagataaactcttgaatatgtacatcaatcaaataattttgaacagtgtaacgacaatagaatacgttacactagcatgcatgcacatgcattggtgcaagcaagtacgtagcgcanactggtgcaaaccgctggtaagacattngctatngtttatacaggaaacaactacatctaaactttccagtgatgcananaanatacaatcctatatcanatcacctgcagagaatcatgcannatttaatgcagttatttgagtgtcaaagacaagtactggttatccctcagaattccttttacatctggcagaagcatggtatga

SEQ ID NO: 81868 - DNA, 495 bp, Zea mays
  unsure (1)..(495): unsure at all n locations
agcttgagaggatttttttattgttcaagctcgnntacgaaaacgatctagcgccgcgaaaggggctactgttggngccatgcttcgttgcgccgaaggtcttgcgcgaagaagcagcttctgctgaaatcgtccccaggaaatggccgaaggttcctttntatagagcttcggcgttacaaaccgacataaagatagaatgaaccttttatccatagaggtctaagataatgttgtaaacttttgtaaagggcataatngtaattcgtcacaggctgcgtcctgtgtctataaatagatgaacagtacccccgtactgttcacgcgaacctgtcatttgccttcgcatcacacttgtattcttcaagaccgaaggtacatttgtaattngaagtcatntacattcgtttataataatagaaatggagatgaatttatgataacatttaaatattttcatatctcatgaattatatgaatggcttcgtcctcgtg

SEQ ID NO: 81869 - DNA, 317 bp, Zea mays
catcggcaattcagctcggacccgggatcctcttagacacctgccgcatcaagcttctataggagaacacgtgatatggttgactaacgtacatttcgaaaaagatagaccttgtgcagcttgtcaagcacgtaaacacgtgggaggagcgcatcacagcaagaatgtgatgaccacttcaagacccctggagctgctgcatatggacctcttcggacccgtcgcctatctgagcatatggggaagaaagtatgggctagttattggtgatgactcttcccgcttcacttgggtgttctttttgcaggataagtctg

SEQ ID NO: 81870 - DNA, 438 bp, Zea mays
  unsure (1)..(438): unsure at all n locations
tagcttcngatcccttgtcttgtgctcttgtctacatggccagaaataacttgggagatcaatttaaggattgcccttcttattcccattgcctttagctttcgaagccctaatagaagagcttcgtattcagcaatattatttgtacaactaaagtctatctntactgtaacaccccgggatccacaaacaccccagaatgctactaaactacacatctaacattcgtatataaaatttcgatagcatctcctttgaagatggcatanatggngaagcaacanagtataaatagatatcatgataagaaaacataatagacattaatagtctgctagcaatgggaagacaaccataacagcatgagctaaattatccagtgcgcacaactagttatgaaacaaacatctttgacangaagcttctaataaatcatga

SEQ ID NO: 81871 - DNA, 482 bp, Zea mays
  unsure (1)..(482): unsure at all n locations
tatgcttccggtgtcttcttgggcaaggtgtgtttctcttgagatgagttaagatgagaatggaagcataaggtgaggattanngtctaattgtgatctatgtttttagagaaaacctttcttaaaaagaaagaaaacacacaagctcagcaatgataagcacaaacaaatcaaatgttntgaataagggaagaatagagtttttccaaagcacagactactcagattcggnggctaagcataactattattgcttggctcctgaatngagaactatgctaattgcaacttatgagcactaacgttaaagcatcacatatgcactcanaaggggaganaacatcaagcgaaattcattntgaaatgccctangnggccacacaattagagttntgcanaacacgagtctacacgaatacctctcatacatgcagggctctagccaaagcgaagaanacttcactacccaatggtaataccca

SEQ ID NO: 81872 - DNA, 339 bp, Zea mays
  unsure (1)..(339): unsure at all n locations
agcttcctactatgcactatactgtggtggtagcgtctgagcgcctggntgtatcgtgcatttcggattgctgcttgccacctgtgctcatcgatgaagtccacatcttcatgccgctgctgttcctgcgcagactcatcaaaagactggacccgcggggagcccataatgatttatgggggaaggcaagcttcagccccgtacaccaggaagaatggngtctctccggtggctcggctgtgcgtggtccggttcccccacaacacggatgggagctcaccgacccaanttgtgccatgcttctttaagcagtcataggtgcgcgtcttgagcccccta

SEQ ID NO: 81873 - DNA, 470 bp, Zea mays
  unsure (1)..(470): unsure at all n locations
agctntagtgaataaattctgcttaaccttgtatactcgggcggtcattaattttaaacaggataaccactaggttagggtctccactatttttctcaaccctggtctaacaatatttccatttttccctttattaatggactgtgggcagntttcttatttaattcaaaactctgtaaaacattacaggaaccgggggggttatgattcttgcttgatagtttatatttcacaaagtctagcaaaattggtttgacaaaatttggatgagtattcttcaagttatgcatttattaagttctctgcaatatttaaagaaaaataaattcacaaaggaaaagaattacaggtttgcgctaaagcccctgtgttttctctccttttcctctcacagaatagtcctcggtctacaaattgcatgaagtcactgaccttgcacaaaacccnctggacttagccgaaatctaacc

SEQ ID NO: 81874 - DNA, 410 bp, Zea mays
  unsure (1)..(410): unsure at all n locations
agcttggaacactcttgtatgaatctgctgtagtaaccagctagtccaaggaaacttcggacttgatgtacagtggttggnggtttgcactccaaaatatccttgactatgctgggatccaccgcaatccccttagcagataatacatgtcccaaaaattggatctcctctagccagaacgcgcacttactgaacttagcatataattggtgctcccttaagcgcgttaatacgatccgcatatgctgagcatgctcctcttcattcttggagtatattaagacatcgccaatgaataccaccactaattngtccaactcgggcataaataccgagttcatcagatatgtgaagtggacaggagcattcgttagtccgaaagacataaccagatattcaaatagtccata

SEQ ID NO: 81875 - DNA, 317 bp, Zea mays
  unsure (1)..(317): unsure at all n locations
agcttgcattggcatattaaatgtcttgtattgcatctagggcttgtctaacctatgtgagataaccgtcaacaaagcgagtganaaagcttaactcgggctcaaacttgacaagttctagcttttaaatgtggtactgcacttatggggagtattcacaactcaattcatacatgaaacctctagtgcaatacccaaatgcaaaatctcaccatttgcctaatttttctaaaaaaatatctagcctatggcacaatatnttgaanaatgtgagagaatatgtgagggtaccaatacctgtcccaacatgtgttctt

SEQ ID NO: 81876 - DNA, 382 bp, Zea mays
  unsure (1)..(382): unsure at all n locations
cgcatgaagcttatttgctctctttaaacgctccgcgctgtgtgttggaacagtccggcaggcttanatctgcggtgctcttaaacgagctttagatggagtcgcgcttaatattgagtccctagggagctcaaagttgaatagatgtaagagcaaattgacaaagattataggataggcggcggacaagtcgtggactatccgccgcgtcgggtcgggaccgggatgcaagagaagatggagggtaagtgcatgtatgagacatggaaagggtaggatttatggttttaaagcagggcttcgaagttcacgtggcgccggcggtcccgtgatgagttggtgatgacccacatatagtttcttttttctgcaactgaattgt

SEQ ID NO: 81877 - DNA, 385 bp, Zea mays
  unsure (1)..(385): unsure at all n locations
agctntntggaaaaacaggccaagcgcggaccgtccgggtccctactgcggaccgtccgcgacaccaggatacccttcggacagaaccaatgcaaaaatacaagtctccactactgaccgtccggaggagaagcaaggaccgtncgagccctcgcgcggaccgtccggcctcaggcgcggaccgtccggtaggtgagaaaccaaaaaaatccaaaggtgacgggttgcggagaaatgaatatagcggcctcgcggaccgtccgggccaggcgggcggaccatccgcgactggctntatctgacaactgacgacgcattatatggcgatatagccgtgatatagcccgtactggctgaccgtgcgttntcagccattgatctacag

SEQ ID NO: 81878 - DNA, 489 bp, Zea mays
  unsure (1)..(489): unsure at all n locations
ngcttactattaggtgctcttatgttatgaatagntcttatttgattgggatcaacttctatgccatgttcatgaatgataaatcctaagaatttccaagtcgacactctaaaggcacatttgtgtgggtcccattttagcccatacatatgcatcttatcaaaggctttgtgtaaatcagctagatgagaatcaaatgtagctgatttgactagtatatcatctatgtatactttcacaatgtttcctaataactcatgaaagattaagttcatagccctttgataagtggtgccagcattctctaacccanatgtcataacgacccactcgaacgaaccaataaaacctggacatataaaggttgttttggaagcatcttctcgaccatagagatttcattatatcacgccattccatcaagcaaactaatgactctatttcatgatgcattngtaatcaagacatcggctacatgcatatgacatt

SEQ ID NO: 81879 - DNA, 450 bp, Zea mays
  unsure (1)..(450): unsure at all n locations
agcttcttgaacacctcatcgttctccaagatggtgcagctaccaccgttaatgatggtatgtacacggcaatccttgacgatgaggaacatgttgaagaggttgtggtgctgtctgttgtcgtcgtcactagccgtggtactcaaagctcgttgcacaatcaaggccttataggtcttggtcgctgttgtaccaagaacctcttcatcaccatcataagtctctgcaatgttagctccaacaatatcttcatcttcaatattagaagcactaacatacccaccatcaccagtagcaatgtatgcccgtttgctggngcaatctcgctgaatatggccaagtccctagcagcggtggcacttgatgtcngaggagcggcctgtggaagaggtggtcatagcaggttntgctgcaacacccgaaggcatagctgaagatgtggacgttcgt

SEQ ID NO: 81880 - DNA, 284 bp, Zea mays
  unsure (1)..(284): unsure at all n locations
agcttgtgaagattctttattccaacatgggctagtcggcggtgccagagccaacccatgttagtcttagcaattaagcatgtgtcgagttcagctctatcaaaatctactaagtatagctgaccctctaacacacccttaaatgctattgaatcatcacttcttctaaagacagtgacacctacatcagtaaagagacagttgtagcccattntgcataattgagatacagaaagcaaactgtaatctaatgaatctacaagaaaaacattggaaatagaatg

SEQ ID NO: 81881 - DNA, 316 bp, Zea mays
  unsure (1)..(316): unsure at all n locations
agcttgatggtcaagtcatgaagcaagtcccagtatattttgtatctgaagttcttagtatatcaaagaanaactacacagaattagagaaggtgttatatgctgttttgatggcatccaggaagcttcngcactattttcaagcttacaacataattgttccttcttcacaacctctgaaggatattatgatgaaccgagaagctactggaagggatggaaaatgggctgcagaagctcaatgaatttgtattgaatatgttcatagatcttcgattcagtcgcagacgttagcagacttcattgctgactggac

SEQ ID NO: 81882 - DNA, 374 bp, Zea mays
  unsure (1)..(374): unsure at all n locations
gagaagaagaagcactacaagaaagccaagggcgaggcgcatctaggcaaggagtgggattcngattgctcctcctccgactccgacaatgagggactcgccgccaccgccttcaacaaatcgggcctcttccccaacgagcgtcacacgtgtctcatggctaaggagaagaaagtaagtactcgaaactctacttatgcttcttctagtgataatgattccagtgacgatgatgaaatagactattctagtgtatntaaaggtctagatagaattacaattggcaaaattaatgaattaattgatgcattngatgagaaggatanactcttagagaaacaagaaggattattgatgaagaagcatgataattt

SEQ ID NO: 81883 - DNA, 460 bp, Zea mays
  unsure (1)..(460): unsure at all n locations
agcttggcacaccatgttgtagaccatgtggtgacatgacccagaaccaacactcgtgtgcatagacacaagtcagcaggtgttgaatggtttcctccgcttgatcacaaaacaggcattggttgggatggggcaagatctgttttgccaaatgattcgtaatccaaaaactgtgccatgcagccagccacaggaaaactatccacttgagtggtggtcaagttttccagatccagcgccaaggctcaaagttgatcgatccatgaaagaaggcccggtacactgatttttgtatgaagacgcctcgaagttaaacctccaactatgagagtcttcgtttggagagagaatgaaacatacccaaatgatatgtacatganggccgcttgcatccntgcagcttgtccgcaactttgtcaatccatggtagaagatcagattgcgaagctttcaatcatat

SEQ ID NO: 81884 - DNA, 488 bp, Zea mays
  unsure (1)..(488): unsure at all n locations
tgcttacataagaaatgttttatnagattttgaatcctacggngaaggctcctccccctaaatatgtgcatttcagaagataccaattctgtactcaaatgccaaaagcacatatttggatcaaagtatggagacaacttatatcatactattcatggggtgcactgtgtcataaaataaacgtgatactcatgacatattatgcactcatcaatttcctacatcttatgttttacctatgattctgccccttgtgtcaatcatttctcccccttttcaaaagtcttcgtacacttacataagacttataggtaagctttaatgcacaatttctccccctttgtcatacatctggcaaaaggatacaaacaatataaatgggtagacattatgattaagctagatttgaacacactatcatgaaaagggntcttacatggcacacaggtaatggataattgacatgaagtaatgtaccttttacattt

SEQ ID NO: 81885 - DNA, 376 bp, Zea mays
agcctgtgaacagtacttattcataagggagaaagcagcttcagcagatcagccgaagcctatgctcttatgtgaggacatagcagaacaaaatgtgctggtatgctctcaattatccgaagagcaagagaaaactttgataaggtttttggtcaataacaaagatgtttttgcatggtcgggcaatgatctctgcggagtcaatagaaatgttattgagcactcgctcaatgtcgatccatccttcagacccagaaagcaaaggcttctgataatgtcagatgataaggccgaaggtgctcgcaacaaagtcaaaagactcctcagtgcaggagttatcagagaagtgaagtacccagaatggctagctaacact

SEQ ID NO: 81886 - DNA, 476 bp, Zea mays
  unsure (1)..(476): unsure at all n locations
agcttgaaatagtgcctattcttcctgtatgccatcaaaacagcatacaataccttctccaattctgtagtaattttctttgataaactaagaacctcggatacaaaatatattggggcctgcctcttaacttggccttcaagcttctcctggacaagtgctgcacttaccgctgagtgcgaagctgccacatataataataaaggagcccctggcgtaggtggagttaatgttgttagatctatcaaatattgcttcagctctttgaaggctttctgctggattggtccccattgaaagactacngctgacttcagcactacgaagaatggtaagttctctctgctgatctggatatgaatctgttgagagatgccagccttcctatcaatctttgagccgccttctttgtacttggtggtccattcgaagatagcttcgatttacttgggttggctcaaattccttgttgaact

SEQ ID NO: 81887 - DNA, 425 bp, Zea mays
  unsure (1)..(425): unsure at all n locations
atgcttatcctcatagtctatacatctttcttttctgtatgacaagacgagaatgatcatatgtatgtctaaatgaatgtttatgtatgcaaatgtcatgatgtaatgtatcgtgcacatgaatatccgaatatatattcgaagccataatcatagccttcattcccttaggaatgactcaaatcgtcttgccgcttaattttcggctccactgtgtatttctcagtgtatcagagctgactcttcactgtaagccttccttaagagccttctcgccttttactttggcggaatcaacgtgtatttttcgctgtaagcctcccttangagcttcttcgccttttacttcngtggaatcaagcgttatgtttcgctggaagctctgcattcccttaagaacgactcntgagcttctccctggtttc

SEQ ID NO: 81888 - DNA, 368 bp, Zea mays
acccggatctctaagcactgcagcatgcactttttgggctttttttcttccggagcaatatattgaaactcgctaggtgacatctatcatttacgagaaatcagaccatgccctacatatttcaggattggtcactcttagttgtcctggttgaggatatagcgaactgggacagttatacccagaattatgaattttccaaattaatacaatgggccacaccacactatgcttggatccagagatgaaaacagcgagtcactacataacactgcgtgaatttactgacggagaagggcgactttagcgacatgaaccaatgagtaagcttgcgtctgggaccacaaagcaactgatttcattcattt

SEQ ID NO: 81889 - DNA, 261 bp, Zea mays
  unsure (1)..(261): unsure at all n locations
agcttcgacgaaggcaagtccattcttcccttgatgcataaattacctattctctctaccactgcctangccgggaaattcatggggaatattgcattgtgagtgaaagatggcctgcattaacatacacattctggatacgaaatatggattgggaagaagggcaatgtgtttcttcaaataaaatctctttttgaaaagttatgcgatgaagggtactcaccctcatcaccttgngagtgggatgatcannggactcct

SEQ ID NO: 81890 - DNA, 432 bp, Zea mays
  unsure (1)..(432): unsure at all n locations
actgcagggtggttgcctacatactctgggatgtanggcgagtgataccacactgtatgcatgacctgcttcngctgggcttggtgtgctgcggcttcagctatttccttttgcttctggatgggaacatgacacatnctggtagtatggcccttgatctcaccacagaataagcaaaagattcttctctgttgatcgccaaatcatcctccgaagcccctggcacctctgcctcttggagctggtggtcggaagggagcttgctgttgccccgaagcctgtgaggaaattagtggctttgctgtggctcccttatatcacttgtgagagtatgaatgatctaacatgcctcggaaacctncaccgaacccctgtcatgcagatacctgaggcctactccttcttggcgaaatcgtatcggccgatgactca

SEQ ID NO: 81891 - DNA, 445 bp, Zea mays
  unsure (1)..(445): unsure at all n locations
agcttcattagtatccgttaagcttcggcttcgacttcttactcttcagcttcgtcggcttcgtcattctgtacatattaaagtattgtaaggaagattcaagtttgaaggaagaggtaagcacaaggtatgattttgttaccggcttaagatgactccgagcttcatcaccagccatgcttcgtccaacctttgttcataccagttttataaatctatttgctatgcttcgggcaagggtgggaatattatccaaatctgctggtgataaactganatcgggtctattgacaacctttcaatgttcgcaaccagatttcagcaaggcgacagctgttgcccgagaagctaccatggcacagaagtcaccatgtccagctataatttcgtcaaggtcatcaatttcaccctcgatatgttccaagggcccccacatgtcttcagt

SEQ ID NO: 81892 - DNA, 272 bp, Zea mays
  unsure (1)..(272): unsure at all n locations
tcacaacagcctcgcnacaataattgaaggacataagttgtgacttataacaaatattttgagtctttattttgtgtgacctttgtccccctttttataggcttaatttgagcaacctcttaagccacaaaatgtgaggataaagtgccaaaataccttggaaccttcggcagaggtatcaactgggaatgaagcgcaaaaggataaatcctgtttcttggtaacaggtaaggctatgaagctatttgtgccatccgagctataagctgaat

SEQ ID NO: 81893 - DNA, 354 bp, Zea mays
  unsure (1)..(354): unsure at all n locations
agcttgtgccgatggatatacaaaaatccttgaaatcttggctgtcaaactgctctaccgtgtcaactgttagctcggacggtactccgaagcggcaaacaatgttntgccagaagaatttttgggcagtctttgatgttattgtagaaacagccctcgcttcaatccatttggtgaagtattcgacggctacgaaggcgaacttgaggttcccctgagcggtgggcaggggcccgacaatgtccaggccccagcgctggagaggccatgtatgggcaatcagctttgtatactgcgaggngttgcctgaccgaggagaanacttctggcaggcttcgcaggaccttgtgaccc

SEQ ID NO: 81894 - DNA, 489 bp, Zea mays
  unsure (1)..(489): unsure at all n locations
agcttatgaagattcttcattccaacatgagctagtcggcggtgccagagccaacccatgttagtcttagcaattaagcaagtgtcgagttcagctctatcaaaatctaccaagtatagctgaccctctaacactcccttaaatgctattgaatcatcacttcttctaaagacagtgacacctacatcagtaaatagacagttgtagcccttttgacataattgggaaacggaaaagcaaatgtaatctaatgaatcaacaagaaaaacattggaaatggaatggtcaggagatatagcaatnttacccaaacctttgaccaaaccttggtttccatccncgaatgtgatagctcgttggggatcttggttnttctcgtaggaggagaacatcttcttctcccctgtcatgtggtttgtgcacccgctatcgatgatccaacttgagcccncggatgcataaacnnctacaaacaagttagttcttgac

SEQ ID NO: 81895 - DNA, 104 bp, Zea mays
agcttcgtctatctgtctctgcagctcttctatcctggccatcctctccttcttcctgtgcacctgttgatgtaacatctccatgtccctgatctcttggtcta

SEQ ID NO: 81896 - DNA, 487 bp, Zea mays
  unsure (1)..(487): unsure at all n locations
agcttctgccgaacttcttatgactggttattcctcgtcattggcaatggcagatcaatttcattctgggatgatcagtggagtcagggcatcccgaggcatattttcccagagctcttctcctttgccaagaactcaaaaatgactatcaaagaggtcaaggatcaagagcagnttcatgatctttttcatttacctgtctctgatcaagcgtttggtcaatntctggtactcaaggggatttgggagcaaattattcttaataatgttcatgaccgctggaagtacatttggggatcggacanattctcgtcccanaaagcttacagatctttcatgggccagatgcagactcatcctatntacaaactagttnggaaaagtaagtgtcagcctaagcatagagtcttctatgggctgtggcttaagaacaggctaaacaccagaaatatgttgagaaggagaaacatggagctagattcctatt

SEQ ID NO: 81897 - DNA, 416 bp, Zea mays
  unsure (1)..(416): unsure at all n locations
ngcttgccatgtgactttattatagtgtgcacctatattggctcaagagacttagttcaagaacatattgcatacaaagtatggcctcttgcgagtgagtgggaaatgccaaaagaggccgccactggctccagccagggtggcctagtttattagaagtacacatttcggttcatgaatcagtttgatgagccaaatgatgattggttggatgtcgtacaagcaacaagtgatgagatacttggagcgtattcgaaggtagaagacgaagctatgacaactgcctttggtgcttgtggcaagaagagattgaacagggtgttngatgttatcgcggtcgtatacccagattactgctatcccacgcgcgagcaatggaggagaaggataaccgctacctcgacatctattggtgt

SEQ ID NO: 81898 - DNA, 480 bp, Zea mays
  unsure (1)..(480): unsure at all n locations
agcttctaaagggagagcacactctgggactaacaaatggttcatttgagaaagacaggagttgtagcgcatgtcaagcagggaagcaagttggtgttcatcatccacacaagaacatcatgacgactgacaggccacttgagctcctccacatggacctattcggcctgatagcttatataagcatcggtgggagtaagtattgtctagttattgtggatgattattctcgcttcacttgngtatttttttacgggataaatctcacacccaagagactctgaaaggattcttgagacgggctcanaatgagttcagctggaggatcaagaaaatacgaagcgacaatggaacggagttcaagaactcacaaatagaaggctctcttgaggaggagggcatcaagcatgagttctcttctccctacacgccacaacanaatggtgtagtggagaggaagaatagaactctattggacat

SEQ ID NO: 81899 - DNA, 419 bp, Zea mays
  unsure (1)..(419): unsure at all n locations
agcttgtgaatggtctttatccccacatgtgctaagcggcgatgccacaaccagcccatgctagtcttagctattaagcatgcatctagaccggcctcttcttttgcaaaatcaactataataaagttgccgtctaatacacccttaaaagctagtgaaccatcacttcttctaaagacagacacatctacatttgtgaatagacagttataccccatgttgcataattgactaacagatagcagattataaccaagagactctactaaaaacacattagatatagagtgctcattagagattgcaaatttacctagcccttttaccttgccttgattcccatcaccgaatataattgaatcttgtgaatccttattcttgacgtatgaggtgaacatcttcttctnccccgtcatatg

SEQ ID NO: 81900 - DNA, 439 bp, Zea mays
  unsure (1)..(439): unsure at all n locations
tagcttcagctttagtatatattntcagtagtacaacagtgtaataacaatgaatgttgtggtaactactcaccaactcgtctgtttatatagcctcgcagaagaagaaggcgaaccgccgagacgtgcgtactggctgatcggtggaccggtaagcactatgaattntatatttgtttttaataacaagctcaaggaaggtgtttttcggaccttcggcatcccaaagcctttgtatttttcgtggatcgagctcgttatgaaaaaacaaactagcatcgtgaaggggctactgttgnggatcttcttctccaccgaatggtgngggtatgcttcgtagccgaagatcctaanaagaacaccttcgaaaggtcttctcagaagcaagcgccgaagctatttatctgtaagcttcggcacanagacaaatctcaagatg

SEQ ID NO: 81901 - DNA, 365 bp, Zea mays
  unsure (1)..(365): unsure at all n locations
atattcagagaaaataattataaaggaccaacttcatgaacagatggagctcgatttaatgggtaactgactaagactcttgttacaacattaaagttggtttatagggaagtaacattggggcagtcatcttcactggntgttgtacaaaaattaatgaaacaacagcccgaagttgctctgtcagaaccatgaagtgtcactaaaaactgaattaagaagatgaatggtcacagtggaatgggaccaaattataggcaccatatctttgattccattcagtgttggaccagggatcctatagtaagtttgaaggctattgtttaatgaacaatctttattaatggagcttacnctgttcttaa

SEQ ID NO: 81902 - DNA, 382 bp, Zea mays
  unsure (1)..(382): unsure at all n locations
agcttgtcatttggcacatatacttcatgccaccaaaatgattcacggacaagcggaactcagacccataaggctttgttcgtttgtgtcggattgcacccggaatcgttccagctaaccaaagtttatataaattagagaagcaatccagttaggaatcgttccgacccaccaattcggcacaaacgaacaaggcctaagtgaactatataactgaccactaattaataagatgaacattggaaaccgngaagnttgcttctcacacttgatttccccttgcacataatactctagtaactatcttgggtgttactatcttggcaggtgaataatataaaaacatcaacgcccatgactgcaatattaatcctaagcactc

SEQ ID NO: 81903 - DNA, 426 bp, Zea mays
  unsure (1)..(426): unsure at all n locations
agcttcacctagagagattcacttgaatgccgcttatagaattctaagatatttgaagtatactcccaatattggtctatggtatcccaaaggtgctcaatttgaattaattgggtattcggattctgactatgcggngtgcaaagttgatagaaaaagcacctccggttgttgtcaatttcttggtagatctcttgttcatggtcttctaagagacaaaattcggttgctctatctaccgccgaggcggaatatataatcggcngcanattgttgtgctcaactattatggatgaaacaaaccttactgtgctattggagtgatttcaagaatgtgcctctcatgtgtgataatgagagtgcggtgaaattgcgtccaatccggtccacactcattaccaagcatattgatatanacatcacttt

SEQ ID NO: 81904 - DNA, 378 bp, Zea mays
  unsure (1)..(378): unsure at all n locations
agctttagctcaaaattacattcacatctgaatgagctgctacaatagatatttacctccatgtactcgtctacagtcaagtagacatccgaatattgtcgaatgttgttgatagaatgaccttggcgcttcatgtacgcgttcacaacctgtagacgagcattggaaaatgcatccctgcacaccttcttcgcattnttctctaatactcggtctgcatgctcttgagcctcaggttccacatgatagcgtctctgtccaacatcaaatataaaattagttggaanacagctaataaatgtttgtttgaaacattactcttacccaaaagtcgtgctcgacggtgccttgagcagttccatatgtagcatgtggagc

SEQ ID NO: 81905 - DNA, 331 bp, Zea mays
tggaacgcgccagatctttgatcaactccaaattatcaataacatcagagtcagagggacccacagaaactccaagtttattagctaaatctatcaagtcatcattattagaatcaagcaaggaaaaggaattagaacacatacctttattgaggaaggcatacttggcttctgctctgtatatcgctttgtcgggcaccttcacatcatcattcttctccaacctagaacttttcctgacgccatcagccgtgttagcgggcaagtccagaggcttttgttcttcccatcatgaaccatctcatcattgggggggatcgagatcatagca

SEQ ID NO: 81906 - DNA, 473 bp, Zea mays
  unsure (1)..(473): unsure at all n locations
agcttgagacgggaactactgtggcatgcacaaaatccctcgaagaaaaagtcaaggacttgaggattgtcaagagttaagaacaaaagaagaaaatcaatacctctgccaaaagcctcaaccatgcctccatgcaaggtaacatccaaggtaatgatcaagccacacttcacactaagaaaagtaagaagtgtagtgaatgctttgaaaatgggcacttgattatgtcatgtccctatattaaagaaaatggcttgattattaacaacgatgatacacattcgtttagatgctctaagaagggacatttagttaagtcatgtccctatgaagaacagaaatgcatatgtntagaanagaaaatatntactaaccatgtatcaagcaagatacaaggaaagaagaaatcttcaagatatgatgatcgcctttggacatatgccgaaagaaaggaatcaatgaaggattgtcta

SEQ ID NO: 81907 - DNA, 331 bp, Zea mays
  unsure (1)..(331): unsure at all n locations
cagcttacacccncggctcttctctgtgtgtttctcgggtactccccggaccataagggctaccgatgcttntacctatcctctcaccgggtcctcatctctcgccatgtagtggttgatgagttcgtctttccctactccaccaccacaccacccttctccgaccctgaccttgacctcttcactctntntccgactgacacggtggtcgagccacctattcttcctctctctgcaggtactcgctcaccacttgtcggtcctccgcccggcccggtgccttgcccgggtcctgtggaggtgcctgcggtggtgacgcctctccgcgggt

SEQ ID NO: 81908 - DNA, 308 bp, Zea mays
  unsure (1)..(308): unsure at all n locations
tagcttctgcttngaaaacatgtttttagtggttccgaagatgtctgaagctgctaagaaggctgctgctgagatgaagctgagtcttgatgaagagaagaacttatgatttcttatagcgatgtcgaagaccaacacagaatagatcaccaacgagattctggaagggctgtctgaagatactggcgacagtgaaagatatgatgtggacagcggtggcgaagacttcgaagatcgcccctggcgaccaagccatttcagttatggtaaatcaactatcaaagagaatcatcttgttgtcatgagag

SEQ ID NO: 81909 - DNA, 452 bp, Zea mays
  unsure (1)..(452): unsure at all n locations
agcttagagtatattgataggaaagatctctttcttaattcatttctgatgcacatctttcctatctgtaaggtaggatggtatttaccttaatgtattccaagagtcttatagaggtgagatgttgtcctacagaacatcttttgaggagtacacctatataagtcagactgctggtcatagtctatggaacttgggtaatccctaaatactcatgaaaggcactaaagtgtgactcataggcttcaaaatagcggngatgccttttgcagcctagtatcagcaatggaattgagtgaatctcatctcgcacacaactgttaattcaagacttagtccattgttcagttgtgaatgagagaaactcttattctagatggatgttcaacttaacagtctncatcgagacactggtatatcanagaatngtaattctgatacttcatcattac

SEQ ID NO: 81910 - DNA, 479 bp, Zea mays
  unsure (1)..(479): unsure at all n locations
agcttgacattgtctcctctttggaagccaatgccatccttaatcccagggtgtctcccactatagagcgtgcttctagcaaatataaatttttcattttctaagtcatgctcattaatcttagcactaagttgagctatgtgatcattntgttggttaattaaagctaggtgatcatgaatagcatcaacattaatgtctctacatctagtgcaaatagtgacatgctcaacggtagttgtagagggtttgcngtatttaattcaacaatcttagcatgtaaaatagcattctcatctctaagattggaaatggaaacattgcaaacatttaaatctttagccttagcaattaatttttcattctcnaatttaaggctagagangagatgcattcaattggcaatcttagcannataaaatagcatatcattccctaaggtgacaagagaatcttcattaacannttaattctcaacc

SEQ ID NO: 81911 - DNA, 238 bp, Zea mays
  unsure (1)..(238): unsure at all n locations
ttttcgcaatcactcgaccgggaccttaagtcactgcagctcaactgggtgcatttcttattgtctatcgggctggtagactgagtctcagtcactttgcagctgtagatcgtcactgctagaacncacacaaccaatcattgatttcaaacaataaaaaatatatgcgggtgcggacatcacatattctattgtctactgagaccagttatggaaggattgaaatggcacatcacat

SEQ ID NO: 81912 - DNA, 300 bp, Zea mays
  unsure (1)..(300): unsure at all n locations
agcttgtgaagattctntatcccaacgtgggctagtcggcgacgccagagccaacccatattagtcttagcaattaagcaagtatcgagtttagttctattaaaatcaactaagtatagctgaccctctaatactcccttaaatgctactgaatcatcacttcttctaaagacagtaacacctatatccgtaaaaagacagttgtaacccaatttgcataattgagaatcataaagcaaattgtaatctaaagaatctagaagagaaacattggaaattgaatggtcaggtgatatagca

SEQ ID NO: 81913 - DNA, 342 bp, Zea mays
  unsure (1)..(342): unsure at all n locations
tcagcttgatggcaccaaggaatgatatttagtctgctttattggtatcattcattntctgtagacactctctctatgtaataatgaatgtgacacttatctctatacactatgtcattatacgtgatggtcttctttggcgcacatatgagacgcaccacaagttatcacatacattcgggtgtgcgagaagtggtatcagagcaaatgttgatgtatgacgaaaactatatagaacaggacaaaatccttacctacttaccttactctgattctttctatactattcttgataatgactcacctttggctattctactctgattattcttatcttttcta

SEQ ID NO: 81914 - DNA, 495 bp, Zea mays
  unsure (1)..(495): unsure at all n locations
agcttatgtggatgacttggtgatcaagatagaaaactcagaaaatgtcattgaagagttgcagctagtcttcaatagcctgcggcgatatcagtggaagcttactccagaaaaatgtgtctttggagtaccagcaggaaaattacttagattcgttgttagccaccaaggaattgaagcctacctagagaagatcgaggctatcatgagaatggaagcaccacggtcacagaatagagtacaaagacttactggatgcatggcagctttaagtaggttcatatcaaggttgcgagaaaaaggcctaccattttacaagttgctcaaggatgtggacaagttccaatggacttcataagcccaataagcccttgatgcactanagagatatctgacagcaccaccagtactaataccgccgcatcgagccacatcaagtcagtcgactgaagatctgctgtatatatctcttgatgatcacgtgtgagcccatgt

SEQ ID NO: 81915 - DNA, 375 bp, Zea mays
  unsure (1)..(375): unsure at all n locations
agctntgcacctcctatctaactcggctgcatcacctttcgctgttggccagtagaatcccgacctgaagaccttcccgactagtgtcttggacgctgtgtgtattccacattggccagcatgaacctcatctagaagtcacttcccagtagatgatagaatgcatttcatgaagatgcctgatgcgccccttctgtatagtgtctccccaatgagcgtgtagtgagctgactgtctagcgatgcgctcggctgcatttatatcgactagttcctcttcattcttgatatatctgacgatcggccttctctagtcatcagagcctgactctggttgattcacgatattacactcttctgcctgatccattgagat

SEQ ID NO: 81916 - DNA, 276 bp, Zea mays
  unsure (1)..(276): unsure at all n locations
tagcttgctttcttattaaatgaatntaccacactagaggaggaaggaagggtggtattacatgaagtgtagatggttttttccaacttcgttggtgctgcgtttcagagacagcatacaattgatttgatgaattgtcacagagatgcagtngatctcagtgcccttggattgccccctctctgaaaggaagtgatggacactattgcatgctctccatccgacaaagctaccgggccttgatgtgttactgggagggttataaaacctgttgga

SEQ ID NO: 81917 - DNA, 113 bp, Zea mays
ttggtgcaacctggttgtaacggattcgcgctcaaaacctttcaaatttcaaaggcacaaatccgctaaagaacttttcaggaaaatcaccaagggtccccttatcccaagga

SEQ ID NO: 81918 - DNA, 392 bp, Zea mays
  unsure (1)..(392): unsure at all n locations
gcttgatcaccaagcataaggacttcgtctttggtataatcttaactcagttatttatgaccaaagggaagaaaataatataaaggctctaatgattcctgttttggcgattcatgccaaagggggagaagatatgagcccaaagcanaaggaccgcaccaccaccaatttcaaaaactcaatttttcaaagagtattttcatttggtatcctatcgtgttcaaaagggggagaaagtagtatttcaaaatgatatatcaaaaccctcttgaacactaagaggtggatctcatttatggggagttttgttagtcaaaggataagtgtttgaacaacgcgagaaaatttcaatcttaaaatgcttgcaaatcttattatttgctctgactatt

SEQ ID NO: 81919 - DNA, 356 bp, Zea mays
tcttaatgcgggaactatcaagaacaagtattcgttgcctcgtattgatgttctttttgaccagatggtcggggccaaggtggtttccaagatagaccttcgctctggctaccatcagatcaagatacgagcaagtgatattccgaagacggcattctcaaccagatatgggctatatgaattcttggtgatgtcattcgggctgacaaatgcaccagcatatttcatgtatctgatgaattctggtttcatgccggaattggacaagttcgtagtggtttcattgatgatattttggtgtactcaaagaatgaagaagaaacatgccggcatttgcatgtagtgcttcaacgtct

SEQ ID NO: 81920 - DNA, 506 bp, Zea mays
  unsure (1)..(506): unsure at all n locations
agctcttcctcatttctgaagcacctgtcctctctgggtagnatgatgaagattctatatatgtctaaatgaatggttatgaatgcaaatgacatgatgaaaatgntctatgcaaatgaatattgggacacatgttcaaaaaccataagcacaacccttcatctcctcaagaatgatacaaatctttttgcccgttacttttcggcttcaccgcttacttttcggtgtataagcgttgacttttcgctgtaaagcctccttgnngagctcttcgccttttactttcagcggaatcagcgcttattnttcgctcgtaagcctccttangagcnntcttcgcctttactttcagcggaatcagcgtttattattcgctgtaggctctgcattcccttagngaacgactttgagcttcttcttgnttccttttttntacctttgcgttacatctacatttttggggatgcattctcatagaattgaataaggaaaatacatgttgtgct

SEQ ID NO: 81921 - DNA, 351 bp, Zea mays
  unsure (1)..(351): unsure at all n locations
agcttaggctgaggtccaaaggaatgagatcgaagaccttctgaaacaattggccgagaccaaggaaaaatgcgctctcgccgaagctaaccgagacaccagcaaatattggaaaaactatttataaaaaatagttgaagaacttcgcgcgtccaaggaaatatgttntgaaaaatctctatgctgcgtgaagaagataaaggctagcttcgccaacgtgggcgcatattcaaacgaagataacttcatacgaggcgatcctgagggtgttatcgagtggatcagcggtgaagccgaagctttttgaggaaatttaagtgatcgtggggacgtctgcgcgttctctggtgc

SEQ ID NO: 81922 - DNA, 359 bp, Zea mays
  unsure (1)..(359): unsure at all n locations
tgctcttgtatcattaaattattattttttaaagtaaactaaacacacatcctttaatcatgcggaggatagccatgtatatgtgggaattccataaattacaaaatcaagtcaggggtacatgcatctatcatactctctgaatttgtctgaatcacaagaatacactattacaggatagagggagtaaatatgaatattcagaagaanaaaacatggntctggtttcaccatacatcacatgataggttgtgccctgacttgaaatgcanatngaaatattcaaaactttcaaattaaccaaaaataagtatagttaaatcatataatgcatgngtgactgtaatttgaattggact

SEQ ID NO: 81923 - DNA, 387 bp, Zea mays
  unsure (1)..(387): unsure at all n locations
agcntctaaatgtttatcatgtggtagggttgtccaacgtgcaattcgacaaagatagaccttgtgcagcttgtcaaacaggtaaacaagtgggaggagcgcatcacagcaagaatatgatgaccacttcaagacctctggagctgctgcatatggacctcttcggacccgtcgcctatctaagtataggaggaaggaagtatggtttagttattattgatgactcttcccgcttcactcgggtgttctttntgcaggataagtctgaaacccaatggaccctctagcgctttctcacgagagctcaaaatgagtttgaactcaacgtgaagaagatatggagcgacaacgggtccgaattcataaatcttcagtagaatagttctt

SEQ ID NO: 81924 - DNA, 437 bp, Zea mays
  unsure (1)..(437): unsure at all n locations
agcttgctcaatgttggactgacagacagtgctttaacagcatttggtccagttctgaaatctganattggttgtatggtgccaagtttggagctcttttgtggttgctatataagggtttggactgaggtttatgtagtggaagtgaagaccacctaatggtgaacaactatattaaaggatgatgtacatgattccacataaaaagcagtgtaacagctgctcaaagtttgactgtcaggtggttggtgacttagtctattcagaactganagtctgaaatcagtacgtgatgcaaagnttagagccctattgtgatcaactcttgtggttntggactataactatgtggcanagttggagtccatagtacagagaaataagtttatcaagaggttcggactcggttctacaaaanaatgggagtataacacctc

SEQ ID NO: 81925 - DNA, 468 bp, Zea mays
  unsure (1)..(468): unsure at all n locations
agcttgcaagatatgatctattgaaactcanaatggtaatntcttcggcttgcatcctatataaatgaatgaaacctgcgttagttatttgcaattatgttcttattttctttatatatatatgcattttcttttttccctatgtgcgctgctaaggttttcatgttccttgcaacttttggaattttctctctcctgtgattattgtgtattgtgaaaactcttatatgatcgttctgtgatatgctgcacatgaagctggtgcactgcgtgaggcanagaataagcttgagaataagatggatgatcttgctctaagacttaccctcganaggagactgcgggtgagtaatatgtgccactctattgcattagtgcattattttgtgaatgttactcgttatattcttcttcgcggtatttgacagagtgtcttgttattttatatcacgtcaatattgtatagca

SEQ ID NO: 81926 - DNA, 149 bp, Zea mays
agactgcttgatccattgtactgcattgagaataagcggaaaatcaccactagggacaagatgaccatcgctaattatgcttgctgccacgtatgagttgatagaccacctgtaatcttccgagatgcacacttgactttgccttagct

SEQ ID NO: 81927 - DNA, 312 bp, Zea mays
  unsure (1)..(312): unsure at all n locations
agcttcatgctctgctgtcaganatgagaggtggactgacgtcctctatctgacactatcttctttggcacaccatgaagacgaacgatccgagacatatacaactctgccaatactgcactgctgtagttggtcttgacaggtatgaagtgggctgacttggtcaagcggtccactactacccacatggaatcgtaaccggctcgagtgcgaggcaatccgactatgagatccataccgatttcgtcccatttccactgagggatctgcaacnggtgcaacaatccagcacgtctctggtgctcttgctta

SEQ ID NO: 81928 - DNA, 359 bp, Zea mays
cagcttctactacattttattatggattgccttggaatcagtccagcttccttctgcccttcttggcagtttctgactcccatgaatagcaataagcccttggtccgaatggatcttcatgcagagataagctgggtgaagaatatgctcacaagcatttatggtaccacgaccaatgatggcgttgtaagggattccatgtcaacaatatcaaacacaatatgctcagtcctcgtgttattaacacatcacgaacgttaccagcatggtaatctttccgagtgccacaatctgtcgccctccaagccacatagagggtgcgtagcatcatgaatcttgtcttaggctcttgcatctgc

SEQ ID NO: 81929 - DNA, 272 bp, Zea mays
  unsure (1)..(272): unsure at all n locations
agcttctaaagggagaactcgtgatatgttngactaatgtacaattcgaaaaagatagaccttgtgcagcttgtcaggcagggaaacaagtgggaggagcgcatcacagcaagaatgtgatgaccacatcaagacccctggagctgctacatatggacctcttcngacccgtcgcctatctaagcatangaggaangaaatatgggttagttattggtgatgactnttcccgcttcacttgggtgttctttttgaggataagtctgaaaccc

SEQ ID NO: 81930 - DNA, 181 bp, Zea mays
tgcatgtcaagcaagaaagcaagttggtacccaccattcacacaagaacattatgacgggcgacacgccgcttgagctacttcacatggatttattcggcccgatagcttataagcatcggcgggagtaagtattgtcttgtaattgtggaagactattctcgctacacttgggtattctt

SEQ ID NO: 81931 - DNA, 424 bp, Zea mays
  unsure (1)..(424): unsure at all n locations
gcttcgatccttcngactgtgtctaggtatttntcaagcttcgggtctttagccttgcaacttttgtcaatatgacccgaaacaatctgagaatcagttntaaggatcgccctcctgatccccatcgcctttagtttccgaagacccaggagcaaggcttcgtactcagcaatattatttgtgcagctgaagtccagtcttgctgcatagcaagttntaaccttggacggtgaaaccaaaacagcagctgctcctgctccgaaggttccccaggagccatcacaaaacactgtccaagcttcggcatctttattcgcttcttcgccctgagcccctggcgtccagtcggcaataaaatctgccaatgcttgagactggatcgaggatctgtgcacataatcaatgtaaaattcattaagctccg

SEQ ID NO: 81932 - DNA, 392 bp, Zea mays
acttcggcaattcagctcgacccggatcttaagtcacctgcggctgcagcttgcaaatacttctcgcaagagctaaaaattgagtgagcgggagtggtcggccagaaagcgtgcacaatgagtttgccgtatggccgtatttatacgctcggtgcgttgaaagttgaaagaccccacttgacattgaatgatgctattctaacaaagggaaggtgatctttcagaccttgcgcgtatagccttcgtccatatctgaatatatatctattatttcagacaaattaacattgcgaggggctactgttggggaccattagcgttcgaaggtcctcatcaacaggaattaacatgtttttcgtagacaatgtgtgaacaggtaccctctgtctaaa

SEQ ID NO: 81933 - DNA, 389 bp, Zea mays
  unsure (1)..(389): unsure at all n locations
catgggctagtcggcgatgccagagccaacccatattattcttagcaattatacaagtggtgagttcaactgtgttttcattaagatcaactaattatagctgaccctctaacactcccttagatgctatngaatcatctcttctaaagacagtaacacctaaatctgtaaaaagacagttgtagcccattttacataattgagaaatagaaagcacattgtaatctaaataatctataagaaaaacattggacatagaatggtcaggggatatatcatatttacccagacctttgaccaatccttgagttccatccncgaatgtgatagcttggtggggagtcttagttttcttataggaagagaacatccttttctcccctatcatg

SEQ ID NO: 81934 - DNA, 371 bp, Zea mays
  unsure (1)..(371): unsure at all n locations
agcttcgaatntaactcttatattttagcctcagtttcagccagcaagccttcggtcgattggagctcgaagtctttcttttcaatgatggcagaatgctcttttattatgctttccaagatatcaattatagcttcgtgctttatgttctccaagtcttgttgcatcttcagagctttgctcagtagcatgctctgaacagaaacaacttatgttaagtaatattttcattgttaacagcaataaaaaccacagaaaaaggttgtttaccttgaagttagaataaaacaagctgccgacgatatgtngtcgtcngtagcggctgatgtctgtctctaacttctgaaaaccgatactcttcgatagagtac

SEQ ID NO: 81935 - DNA, 426 bp, Zea mays
  unsure (1)..(426): unsure at all n locations
agcttgctaatgattatttntgatgattgcaactgtgtttaattccgggactaattccagtttactaattaattcgttaactaactctctttntgccctcatggtcacagtataacgagagagttggattcacaggatctggtagagcagctgccagcattgcagcagttactgtaccgactttgtggatgtcaggtgagtatctcttttaactcttggctatctagtctgctagctacttctcatatgcttgttcttttccttgaaatataacatgagctttgtcccccactctgtagcctgaatgagctgcagataataactactttgtgcaatatgctcttgctttggaagctgtgtttttgtacgtagagattgcatgttgctattcagctangnagcagtattattttgcacatttgttct

SEQ ID NO: 81936 - DNA, 380 bp, Zea mays
  unsure (1)..(380): unsure at all n locations
agctntaccttgattcccaaaggccaacatattcttgagagtctttttcctttagtcgggtaagacctgcaaaagtacactccgtactcanggtttacaaacccatgttattgtaggtgatgaaactattgagttctgcttgttctgcttcaagggttgctccaagaaggaggaagaaaattaagaactaccatttaaggtgttttgcctttctatgatgtaataagttaagcactcagaacccagttatgtaataacaactctctctatattgtacttataaatgtaaagtatgttattgtaatctcttccgcttactctgatggtgtgtaatgtctgcgttatgggataaacgctctttggtgatgtgatggtgatac

SEQ ID NO: 81937 - DNA, 357 bp, Zea mays
  unsure (1)..(357): unsure at all n locations
tcactgcccggatcttaagcacgagctgcactatcttttttcaaagcaagctaacggtctcctaattggatataattacatatttttttttatnctatgtgagttgatttttgctgaaatgtatttatttgggccttttcttaaacttatgtttaagcctgtacataacctggttcgcaagaacaccatattaattttatgaacgataccctgctagcaaaaactaccattagttgtgacctcttatatcctgggtgaggtggccttctaggggtgcgttgttttcataagtttcctaacttctttctggactatttgaccagtgctccataggccttatcttatgtacatcttggg

SEQ ID NO: 81938 - DNA, 365 bp, Zea mays
  unsure (1)..(365): unsure at all n locations
agctttaccaaatggacttgaatagtgccttcctcaatggaccgatcatggaagaggtctatgttgagcaacctcccggctttgaagatagtgagtatcctaatcatgtctataggctctctaaggcgctttatgggctcaagcaagccccaagagcatggtatgaatgcctaagagatttccttattgataatggcttcaaagtcggaaaggccgatcctactctattcactaaaactcttgacaatgatttgtttgtatgccaaaattacgttgatgatattatatttgggtcctactaacgaattacatgtgaagaatttagtaggatcatgacacagaaatntgagatgtcaatgatgggg

SEQ ID NO: 81939 - DNA, 389 bp, Zea mays
  unsure (1)..(389): unsure at all n locations
tgcaagctggaggcgtctattggttgtcgacttggtgtagattcctccttcttttcttccgtcgccttgaatgcaacgggttgagcttcggatgggtcgccaagctcgttgattntcctcgagccttctatcatgcactcaaaacttacaaaatgcccgataacttcctcgggggtcattttagtatatctaggattaccacgaatcaattgaacttgagtgggatttagaaaaatgagagatcttanaataacatttaccacttcgtggtcatcccacttcttgctcccgaggttgcgcacttggttcaccaaagtcttgagccggntgtacatgtgttgtggctcctcccctttntgaagtcggaaccgaccgagctccccctcgat

SEQ ID NO: 81940 - DNA, 342 bp, Zea mays
  unsure (1)..(342): unsure at all n locations
gcttagagattaatatgagttntttccaataagctattgcagacaaatttcgattaaagcaagcttggttagtgctgcagcagattaaagcccatttgagcattttatcaatgggtagattagctctggtaggggtgtgtcaagcttctatttcttaaatactaacataagtgggggtttatttaatttaaatgggatcttctcatttgaaattgaagatatcatcttgagtgtgataatataaccagaaagatgatcatattcagtttatcccttatcacacaaccaaacaagagatgatgtagctccaacccatttaaccctctaatcaaataagaaact

SEQ ID NO: 81941 - DNA, 396 bp, Zea mays
  unsure (1)..(396): unsure at all n locations
agcttatgaatattcttcattccaacataggctagtcggcgatgccagagccaacccatgttagtcttagcaattaagcaaatgtcgagttaagctctatcaaaatctactaagtatagttgaccctctaatactcccttaaatgctactgaatcatcacttcttctaaagacagtaacacctatatccgtaaaaagacagttgtaacccattntacataattgagaaactgaaaacaagttataatctaaagaatctacaagaaaaacattggaaatagaatggttaggtgatatatgcaatttacccaatcctttgaccaaatcttgatttccatccncgaatgtgatcgctcttttgggatcttggttnttctcataggaggaaaacatctta

SEQ ID NO: 81942 - DNA, 374 bp, Zea mays
  unsure (1)..(374): unsure at all n locations
aagctgctgtgccatattctgtaatttgcagcatatggcttgtaccatgtgtcacgcaattcttcataccgaatatgccggtgagacaacatggaaccatccctgcttggactgaacgcatgtctagaatgcacctgagcacatggagagccttacagcattagaatatagcacatgaattgatgtcatctttggttattatgccatgattgcaactatgccatataacaacagaatgcanaacatgtaatgaacattcaaagaccacactcaatggtcagggatgtgattcactagacttaagatgcatggcatgaaattacatatgacactgtatcaacatacattggattaaccaacgagactgcaagctg

SEQ ID NO: 81943 - DNA, 342 bp, Zea mays
accgaccggatctaagcactgagctgcagctatcttcattacttttagtctgactttatggagcgagcgtattgggtacggctgatggctaaataatgacagattttcttagaactaaaggaacttggctaaacttgtggggaggattattgtcacggcaagaagatacccactgacgactgtgggctcacgttatggatggactaagaatttctgcgcggcaagctgggtgctccaccctacctgtgcgctaacctcggctagcgcatacaccaagtactagtatgctccaccatcactagccacggatggacgctgcttgctaacgagattttcctcacg

SEQ ID NO: 81944 - DNA, 394 bp, Zea mays
  unsure (1)..(394): unsure at all n locations
tcattgaatagcttcaattaacacttatgcttcttaaggcatcatgtaatctccatcgatatctctcttgatgtgcactaagttaaaaggagaattcatgacacaattatgcaccttgtgaatcatttgatatatgctaaacaatgacttacacaggatcactaagtgtagactctctttgtgcaaaaattttcatgattggcttgagataggcttaaggactaaactaaggacaagctaatgaagagacatctcaagtgaagtacacaggtaaacaactacttttcatctacttgacctaatctcctttctatcatccttgataantttgtaaagagagaagctgtcaccatatccggctatactagttactctcatactcatttgcttttgt

SEQ ID NO: 81945 - DNA, 259 bp, Zea mays
  unsure (1)..(259): unsure at all n locations
agcttcggagttccgatgctataagatggcctctcagtattgtcaaaggatgaattggctgacacgttancatataatagcataaaggtatgaaaatcaattntgtatttgaaaacaaactacttcatctgnttatacttaattctgtactcctcttgcagggcttgatccttagcaatgccctcatatcacagaaaaacatctaagatgaagggtgtacaatggctttgaacaaccttcgttcagaagtgattgaact

SEQ ID NO: 81946 - DNA, 365 bp, Zea mays
agcttaaagccatggttagtagcataggctaataatattcgaattgactcaagcctagctacgggtgcataggtttcaccgaaatccaaaccttcgacttgggagtatcctttggccacaagtcgggctttgttccttgtcaccacaccatgctcgtcttgcttgttgcggaacacccatttggttcctacaacattttgattaggacgtggaaccaaatgtcatacctcatttctagtgaagttgttgagctcctcttgcatcgccaccacccaatccgaatcttgtagtggcttctctaccctgtgtggctcaatagaggaaacaaaagagtaatgttcacaaaaatgagcaacacgagatct

SEQ ID NO: 81947 - DNA, 445 bp, Zea mays
  unsure (1)..(445): unsure at all n locations
tagctgtctcatatatttttatactaaatgcaaaactacaagaacttcaccatgagatgcatanttatgtatntagttatctgttatttgaccaatataatcccattaattgaatatgcacaaagaaaggaaaaccaaataatccccaaagattccataatcccaaaacacccacttatgaacattnttatttatttattattttctccttatacaaaatgtgggctctacacttgttgatatgtcaattgccaaagggaggacgtccaagttcaaaaaccataaattatgtacttcctctgcgcatattattaaatttataacattggagctgtctaaangatatttatattgatccatgcttctgaaaactggaccacgctaatataataataataagtcactaactaagaaatacatggaggcgtagttcctatcgatatgg

SEQ ID NO: 81948 - DNA, 181 bp, Zea mays
  unsure (1)..(181): unsure at all n locations
agcttcggcatagatctattgaagtgtgacgaagcaagcttcgttatgctgacgccggaaggcgacatatggagaaggtgttgttcaagctgctgagtgcaaatgacaatattaatccttatgaataatgtaaaactttgtgtgtcatctatganggcatgaatgtaatatcatatgaagc

SEQ ID NO: 81949 - DNA, 485 bp, Zea mays
agcttaccattgaatgggtactgatagagaacaacacctatgccatcaactattgtcttgaagttcaactcactcactggtgcatttagtgcattatcaaaacaactcttgaaagcaggcacaattggggaaacatctacatcggtatttagtaacatcacaacaatagtcattcagtttgggaaacatgttattttgaagtgaacagtttgggaaacatgacttactacagttgacagcctatgaaatggatagcattacacttgacagcctacacaaacaacggcagaatccaatcaaatgaataacaaatgtttgaaagtttcttaatgctccagtaaaagattctcaacttacataaatgaataaacagaattaccagagatatccttcatttcatgcaagttagagggtggtcagctgctcctgattcaactgaggtggtagactggttctggaaatacaatgaccatgatgattacatg

SEQ ID NO: 81950 - DNA, 289 bp, Zea mays
  unsure (1)..(289): unsure at all n locations
agcttgtctaaaaagtttggtgtaatttgaaattattaattattccctaaaattccagaagtatggattttggctattntaaatgccccaaaattccctattggaactaaaaatcatgaaactatttttattaaatactataagagattagaagtctagcaaaattggtctggtatatttagcatttttgtataattttctgggaattcccacagtctagaagaaaaagaanaaggaaaacatgctacaggattgngctgaaactggcctcggtcggcccatttactga

SEQ ID NO: 81951 - DNA, 377 bp, Zea mays
gcttgtcaatacttattctatcagcaacatctaccagcacagcaactgcgaaccatacctgtaacatgggccgtcgtgtgctggggactggatatgattggacccttcaagaaagctcaaggaggatacactcacctacttgtgctatcgacaaattcactaagtggatagaattcaagcccatttgttctttaacttcagctaaggcagtggaattcatacaggacataatattcaggttcggaataccgaacaacatcataaccgacctaggatccaatttcaccagttcagaaatttttgatttctctgaacaaaagagcatccagatcaaatatgcgtcagtagcacacccaagagctcaacgggcaaaagaa

SEQ ID NO: 81952 - DNA, 340 bp, Zea mays
aatggtaaccggttaacctagtacctgagtgaagccgggcgcggactttatccctcatgcgacctaagacagggtctcccatgctagctatggtgggtacaagtgtggtcactgcacgaccgcagccggggtcagtggagcattgtatgccaaggcggtgaggcctggacgcgaacggtgaatcgatggggactgttgtcatgtgtggggtcggagtaccctgacatgccgtgtgtttaaggttaccttgcagcgttaaaaactcgatcgaatcgtctgctctcgcagctatgaactgcttgattcttgtctgcatcagaagagcgaaagtgatacatga

SEQ ID NO: 81953 - DNA, 276 bp, Zea mays
  unsure (1)..(276): unsure at all n locations
agcttctaaagggagaacacattttggtactaacaaatggtcattttgagaaagacagggattgtagcgcatgtcaagcanggaagcaaagtggtgttcatcatccacacaagaacatcatgacgactgacaggccactcgagcttctacacatggacctatttggcctgataacttacataagcatcggcgggagtaagtactgtctagttattatggatgactattctcgcttcacttgggtgttctttttgcaggaaaaatctcatacccaag

SEQ ID NO: 81954 - DNA, 148 bp, Zea mays
  unsure (1)..(148): unsure at all n locations
agcttattcttagggtcattntattacttttaccctaaagactgttggttttcttaacttgngttaagttttacccctttaaccactatttagggttaagtccattacctacggttctattntgcaaacacttaaaacaatacaactt

SEQ ID NO: 81955 - DNA, 116 bp, Zea mays
tacccccgcctgcactatccagactgttgaattattagcatttgcgactggagcatcacaacgatgtgacctgatcgcacgctcacccttgcgcttgcttatatttgctgtgaaac

SEQ ID NO: 81956 - DNA, 380 bp, Zea mays
  unsure (1)..(380): unsure at all n locations
agcttgcacacatatcttatttgaatacctntgatcatatctcctttatatgctatgactaatggtgtttcaagtctatttcaaaccaagtcatatgtatattgaaagggaattggagtcttcggcgaagacaaaggcttccactccgtaactcatgcttcgccatcactccgagcaactctctattccttgtggagaaatgagcatcaaggaaaaggacttcgtctttggtataatcttaactcatttacttttgaccacaggggaagaaattactttaagggctctaatgattccgtctttggcgattcatgccacaaaggtggagaaatgagcccanagcacaaggaccgcaccaccaccaatctcaaatacttagt

SEQ ID NO: 81957 - DNA, 221 bp, Zea mays
  unsure (1)..(221): unsure at all n locations
agctngtcatgcatgagtgggaggccgtccgcctcaacatcaagtccttatataatgatcacgttgttatgaacgcgatgtgcgacaaaaccatggacaaggtccttcgctccggccggatcctgatgaggaggcctggcgttgtagtgcccgaagatattgttcccgatgttcttgctgttcctgttgtcatgagccgaccttcttcttctactactcct

SEQ ID NO: 81958 - DNA, 324 bp, Zea mays
  unsure (1)..(324): unsure at all n locations
agcttctcattttgactataccgtggccgagcgaattatatggcacagacaggggaaggactctgcgagcagcgacacggagagcaaagcgaggttgcggccgagcatgctcgggcgcaagcgcacccagcgtttcaccgtgtccaacacgcacatcacgggctcgatgtcgactccgagcagttccgcacgtacgacaacacgacgaagaagaactgaatatggagcttcgcgacagcacgcacaggaacaatggaacacgcgcgcatggaagaacgacgagctgggagagcttcacgtgacctctgcacgcanggatgagct

SEQ ID NO: 81959 - DNA, 375 bp, Zea mays
  unsure (1)..(375): unsure at all n locations
agcttgaatgttcaatatcaataacttcaagtgcaactntgaaatagcaagaacatcaatgcctcatctttagtgattgaatctaagtctagcttctcaaacaataatttttgcaaacattgtgccaaatatcatgcttcttgttgtctaactaaccatgcaaggaagaatagcccacaggtgaaggttaaaggaatattgaaaagatgctctagcaatgatgggttaaagaaaagtgaacccaagtacaagtccctaaagcccaacaatggaagaaggggcttgggttcaactcatccaaggaaaaccctagcacagtgcataaggggtggagatcccccaagttcatagagggaaccaccctatatgatgctt

SEQ ID NO: 81960 - DNA, 301 bp, Zea mays
  unsure (1)..(301): unsure at all n locations
ctagcctagctacgggtgcatcgttttaccgaaatacacaccttcgacttgtgaatatcccttggccacaagttgggctttgttccttgtcaccacaccatgctcatcttgcttgttgcngaaacccatttgattctacaacttttggttggacgggaactagatgcctacctcatcctagtgaagtgtgagctctcttgatcgccacacccatacaatcttgaatgcttcttacttatgcgctaatagagaaacaaaatatgtccaaaatgacacacagactatagtacctctttaaatc

SEQ ID NO: 81961 - DNA, 488 bp, Zea mays
gcttatgaagattctttattccaacatgtgctagaccgcgatgccagagccagcccatgttagtcttagcaattaaacacagtggcgagttcatgctttatcaaaatttactaagaatagctgaccctctaacactcccttaaatgctattgaaacatcacttcttctaaagacagcgacacctacatcagcgaatagaccagtggagcccatattgcataattgagatacacaatgcaaattgtaatcttaagaatctacaagacaaacactggaaatagaatggtcaggggatataagcaatttactcaatcctttgaccacaaccttgattccattcgcgaatgcgatagctcgttgggatcttgctcttctcgacgaggagaacaacttttctccctggcatggggttgcgccccgctgcgatatccaacttgaccctgatgcataactacaacatggtagtctgacttaagacccaatggttt

SEQ ID NO: 81962 - DNA, 275 bp, Zea mays
  unsure (1)..(275): unsure at all n locations
agcttaacgaagaggaaccttcngccatcttatacaaacagcttcaggtgataaccgcttcttgctataagaccttctgcgacgaagcatacgcccaacaatatgtatgcaagagattgggcgaaaatgctcattacctctctccgatgcctattaatgagagagtcatctagggtcattgcatacgatgaaacacagaaaagactgaagagaaatttgatatataacacggcgatgcacgtgtctagagtcctgaagaacgtccggaaaagtgg

SEQ ID NO: 81963 - DNA, 60 bp, Zea mays
tcactcgacccggatcttaatcactgagctgcactgcactggtggtttctgaaaaagagt

SEQ ID NO: 81964 - DNA, 377 bp, Zea mays
  unsure (1)..(377): unsure at all n locations
tcgacccgggatcctcttagtcacctgcggctgcaagcttggatttatatagagcanagggcaaccgaagctccttggtctggcgcccggactgttctgttgccaccttaatgtctgtgcaacaggggactatactctactcgcaccttcggaatttcggggcactcagtataatcacggactgccggtaacctgacaggtctggcgccaaggagatgctcagaatcccacctcggaaaaccaacgtttcactatattaccggatgttcggggcacgactgcctggcactcaagcacagtattttggccacgcttctgcgccaataagctgctctgctgccaatggaagcacccatcttccaccgaagaaatatact

SEQ ID NO: 81965 - DNA, 486 bp, Zea mays
  unsure (1)..(486): unsure at all n locations
agcttgatactatggtatgttgtgtgtaggaatgagagcacctagaggngggtgaatangtgatcctattaaattcaacaactaatagacacaaatcttggttatacaacggctagtgcgactaagtagttgcgaagcgagttcttgtggcccagacaatcacaaagagatcaacacacgagatacgcgattttatcccgtggttcggccaagtaacacttgcctacttccacgttgtggcgtcccaatagacgagggttgcactcaacccctttcaagtgatccaatgatcaacttgaataccacggtatccttgcttatagatcatttcccgtntgcgaggaatctccacaagttggagcctcttcccttacaagattgtcacnaagaangcacggagtaatggtggaagagcacacacactanaattaaatccacaccgcataacacgcacacaagtgagaagatgagcacacaaaacacgtg

SEQ ID NO: 81966 - DNA, 402 bp, Zea mays
  unsure (1)..(402): unsure at all n locations
catgtgggttgttcacagtctcagacaagtgaacataagctgcataccgaaatgactttgtctcaaaggtgaaaggacaacttaatttacatgatgcataaaaaatccaacaaggatctaatgtctataaactctaagcaacaatgcacaacttcataaaagatctaagaacaacagaacatctgtatgtacggacagactctnttttggaccaagagcaccaataatctctaatgttttatcacaggggaacttcaaggcagcctcagtgcctcacaatgttcattctcatctttatcgtcaaaaccctctatctagcaaccacatgtcttgtgcctgttacttgaacaccctatatcatctggtgcttcatgtcattgcaacatgtacaatgcggcgagt

SEQ ID NO: 81967 - DNA, 307 bp, Zea mays
agcttatgaagattcttcatcccaacatgggctagtcgaccgtgccagagccaacccatgttagtcttaacaatcaagcatgtgtcgagctcagctctatcaaaatctactaagtatagctgaccctctaacacacctttaaatgctattgaatcatcacttcttctaaagacaatgacaccaatatcagtaaaaagacaagtgagcccatttgacataattgagaaacagaaagcaagttgttatctaaagaatcaacaagaaaaacattggaaatagtatggtcaggtgatatagcaattttacc

SEQ ID NO: 81968 - DNA, 395 bp, Zea mays
  unsure (1)..(395): unsure at all n locations
agcttgtactactactctacaattaattggatatctatgatgttcgaaatattgcatatgcattatgttattcgactatatctataggaaaataacaatatttatgatactaatttgagtctaaaatcataaaccttgtgatagatgtggttcgactacttgtatatatgatgtccaatgcattgcatatatgtcatagtgtcggtgatatacctgtgaatatcagccatcgtgctgctagtgttatttgcaggttntggaaacctcaccgtgcaggggaggtgctgccgatttttttgtcgatatatgtcagatagcggtagatacgcacaagtagtggtaggtttgcgatggcatgcgtggtcctatgatggcggcgttgatgtgaattatat

SEQ ID NO: 81969 - DNA, 333 bp, Zea mays
  unsure (1)..(333): unsure at all n locations
gcttcattaggattcattgagcttctagttccgcttcggctttccgtaagcttcggcttcatcttcttactctatagcttccgcctcggcttcgtcatcctgtacgtattcatgtattgtangcaaaattcaagttcgaaggaagaggtaagcacaacgtatgaatttgttaccagcttaagatgactccgagtttcatcactagctttgcttcgtccacccttttgtccatactaggttataaatctatttgctatgcttccggcacggtcagaatattatccacgtctgctggtgataaactgaaatggggtctatcgacaaccttttcat

SEQ ID NO: 81970 - DNA, 350 bp, Zea mays
agcttggagtggtctattaattcttatctgatatttggaagaagtgtggcaaagaaattagcatagaagaatctataaagaacatggagaaggtgtgtactttgttaccttctgctttaccttcgcggagcatgtacatcctaagtttccaaaatttctacatgcacgagcttgaacagctgtatgtattatgaagaagcttctaagcatataagacgaaggtgttttgactttttgcttctggtaaatatagtgtactcactgtttagcaattgctttactaacccctgctgaaaagtctccacttcatatggtataattgaagtgaaatatactacagcccaagcata

SEQ ID NO: 81971 - DNA, 308 bp, Zea mays
  unsure (1)..(308): unsure at all n locations
atagaatcctgacctgaagacctttccgactagtgtcctaaaggctgcatgtactccacacttgcctgcatggacttccttcagaagatgcttcccggtggaccggagaacgcacttcatgaggacgcctgacgcgccccttctgtattataccttcccaatgagtgtatagtgagctgattgtctggcaatgcgctctgacgagttcttgtcatctggntcttcttcattctttatatacttaataatcggttgtctccagtcatcagagtctgactctgggtgatctatgatagtgcactcttcta

SEQ ID NO: 81972 - DNA, 418 bp, Zea mays
  unsure (1)..(418): unsure at all n locations
agctggtgaaggttcttcatcctcacatgtgctaagcgacgatgccacagccagcccatgctagtcttagctattaagcatgcatctagaccggcctcttcttttgcaaaatcaactaaataaagtttgtcgtctaatacacccttaaaagctagtgaaccatcacttcttctaaagacagacacttctacatttgtaaatagacagntatatcccatgttgcataattgactaacagatagcaaattataaccaagagactctactaanaacacattagagatagagtgctcattatgaaatgcaattntacctaacccttttaccttgccttgattccatcaccgatacaatngaatcttgggaatcctttattttgacgtacgaggtgaacatcttcttctcccccgcatatggg

SEQ ID NO: 81973 - DNA, 416 bp, Zea mays
  unsure (1)..(416): unsure at all n locations
atatcatctcaagaatctcagaatacacaccccttccaaaaaccaagccatatgtgcccaaaataagcattgctttcaatgttggaaataacatataatcgtataaagaataatatcttcaaaatggctctaatttgaggtgcattgctccattgtacaaaggtgcatagcaccataaccacaatgcaacaattcaacgggccgaggctaattggtttcattagtactacctacagtcataanaacatgtcatttangacaaaacttagtaaagctttataagctaatgacatcaataacttttatattatttagtctgaaacatgtacgttaaatgtgtagaattctattggaatatactttgaacaactcatactttgaagggatctaataatatactatataagaaactaatg

SEQ ID NO: 81974 - DNA, 296 bp, Zea mays
  unsure (1)..(296): unsure at all n locations
agcttctaaagggagaacacgtgatatgtctaactaatgtaactttcgaaaaagatagaccttgtgtagcttgtcaagcaagtaaacaggtgggaagctctcatcatgcataacatgtgatgaccacatcaagacctttggagttgcttcatacagacctcttcgaacccgtctgctatctaagcataggagaaagtaagtatggtcttgttataattgatgaatttttccgcttcacttgggtattcttttngcaggatatatctgatacccaatggaccctcaaagcgcttcta

SEQ ID NO: 81975 - DNA, 103 bp, Zea mays
agctttggcttcatctatattatgaatagcctctcgaatccgtccaacttccctcaactctccttgcagcctcttgactctcgtgtaccgcaatgggcccttg

SEQ ID NO: 81976 - DNA, 366 bp, Zea mays
  unsure (1)..(366): unsure at all n locations
ctactaactcagggtgaccactatgccctattaacggagcaatcgacttaattctgtaatgacttaaaggggtgcgacatgctcatgcttacttaactcacggtgatcattaaaccctacccacggagccggcggtttaagataagaaatgaactaaatcggcacggcatgctcgtgactattccattcagcataaacacctttgcgaatgctcgtcttagggccaactctatgccccgtgaaatangaagaagtttcaaaaccatcacactgcacttacttcttgcatcataacgactgttgaatttgtaaagtccctagagggggggggtgaataaggcgaaaactgaaattctcataaataaa

SEQ ID NO: 81977 - DNA, 423 bp, Zea mays
tcctgctgctcttctttgtggggaactatgcgatgtatgtgtatgcgcttattactctcccgccaaagaagaagaagccggtggtcgagaaaacgctgaagagggaaaagctgaagcacggggtctcttctccgggagagtaaacggccatgctgccgatcctcccgttcagagctcctattcacatgattattaaagaaaaaaatttatatatatataccatcctggagccgtagtgttggagtaactttgttctgtaaatgctctgtctttaatggtacatctgtattggagactttaatggcctgagccgagctagcatgcttcctgtttcgtacaagttcttgaaatgctggtgatggcgcatggctctagagaaaaactcaagggagctgagccagcgaaacatgatctacctctacc

SEQ ID NO: 81978 - DNA, 420 bp, Zea mays
  unsure (1)..(420): unsure at all n locations
actcaagctcttgaagcctcaacaggactgcttcgtattctgcaatgtcgttttttttctttaattccaacctaactacatagcaggttttgatntttgatggtgcaattaaaacagctactgcacctacgccaaaggttccccacgagccatcacagaacactattcaagcttcgtcatctatcaaatgtccttcttcatgaacccctagcgtccaatcggcaataaagtctaccagtgcttgagattgtatcgaagatctatgaacaaagtcaatggtgaattcgttcaactctgcagcccacttgtcaaccctttctgagcttctctgtttttatgatgtactttaagggtgagacgaagggctatttatggctagactgcaaaaatactgaatctttctgaagtcatcaatacaca

SEQ ID NO: 81979 - DNA, 365 bp, Zea mays
tttatatgaacaagggacctaatacaatagcatatcggcttcagggagggccgcttgcggagaaatgggaaatgccactagaagacacttaagaagccgacaaagtggacttatcacgtttaagtacacttttaaaattggagataaatctatcgagccatatgatgaatggttgaaaagcattgacaatttaagtgatgagctgcttgggacctactccaacgccgaagataatgcaatgtcagcagccttcggacgccgaaagaagaagagactgaatcgggtatttgatgccatcaggtgttgtctaccctgactattgctatcccattcgaaggcagaacagacaaaacacgactgcaaaa

SEQ ID NO: 81980 - DNA, 365 bp, Zea mays
  unsure (1)..(365): unsure at all n locations
gtataagaagtcatctttatctgtgccgttgaacactaaggcccccttcggatacttcagttctcgggcataatgattaacttcaaaaatctcttcttcagataatctcttccccgaagcatgtcgtacaatataatcatgtattttagaagatgcttcgggggcagcagtgctagtttcttcactcaaaatatgttctgcctttttctgtttttcagtttccaaggatttcaccttggcgggctcttgaggcccngcttcagtttagactgtggctttgaagcttcggcgtcaaaggtttcagtgtgcacttcggaagtttagcaatttctttggagttgtcttgaagattaattgctctaaac

SEQ ID NO: 81981 - DNA, 293 bp, Zea mays
tatatacctcgtgcagcttgtcaagcacgtatacaagtgggaagctctcatcataccacaaatgtgatgaccacatcaagacctttggagatgcttcatatggacctcttcggacccgtcgcctatctatacctaggaggaaagaagaatggccttggtatacctgaagattttaccccgcttactagggaatcctttttgcaggatatatctgataccccagggaccctcaagcgcctcctaaagagagctcaaaacgagtttgagctcaacgtgaataacataacgagcga

SEQ ID NO: 81982 - DNA, 441 bp, Zea mays
ctatgaaactcagcttcaagaatccagccagctagccaaatggtcccatttatcttttcttaccagagaaatatttcaatacaaatctggaccaaaaatgtttctggcagcatatcaaatgtatgtgcccagagattataggttgagtcggcacgaccacattttccgagaggaaacagcgatatccgaatctctggcggatgcatgctcagccaacacttttttcccaatgggcattcacattttgtcgaaatttaatctaccctaaccattataactaaagctgtgtttgtgtttccaaaacaagagcatgtccaaatgcatatgttagttgattataaaccaccactaagggcagatgatagtgatcagcaactaaattaaaaagaaaaatcaaccacaccataatatttaatatcgaacaaagtctttcacaatcaa

SEQ ID NO: 81983 - DNA, 379 bp, Zea mays
  unsure (1)..(379): unsure at all n locations
ccctggactcaanccgagctgtccggacgaattcgaggtccccttctctgaactcccttgggatgactgtgtggtcacgccatgccttggtctgggcttggtatttgtttagggcctgtaaggcgaagactcagtctccgtcaatgaaatcctctgaagttatgtcatccaccgtcgggacggcggacggaactgttcgcggggacccatgctctatttcttgcggggtcatggcctccgatccgtatagaaggcggaagggggtaaacccggtcgctctgcactcaatcgtgtttagtgcccagactgcctctggtaacaactcggtccatctgccctattttcatctaggagcatcttcttgacagctatgaagatt

SEQ ID NO: 81984 - DNA, 418 bp, Zea mays
  unsure (1)..(418): unsure at all n locations
tatccaaaaagtntggtgctctttggagatactaattaatttctaaaattccacgagtatagggtttagcccttttaaatactgaataattcctggtttggactaaaaatcctagaactatttgtataaaatactatagaaatttagtagtccaacaaaactagtctcgtatttttagcattttcctagaattttctatcgatttcctaagtctggaaagaaaagacaaaaggaaagcatcaacagtactgggctcaattcaaccccagccagcccaatacaggcagaacgcgctcgcgcgcgcgttcacgctgccagtttttcaccgggaccctggtgacttgaaaaacctttgaagagtctgcagtactgtttcttgtgtcactgacaattacgaatagacccctcccctttctat

SEQ ID NO: 81985 - DNA, 433 bp, Zea mays
tatctttcccaagatgatgaaacaaatgacatgatcattgagtatctgtcgaaggatctatatggagatttggcataatctcccgtacttggagatttgatctatgatcaatttggcttgtgcatatgtcctatattgtcatttcattgttggtgtaataaagtagagatgcacaaactcatttcatgagttgtatgatactctccagacattttgttgtgtcaagtgagttgtgtggactcatcagattgagtcgccatactattattgtaaagttgtttctataatgtgatgttgaataaaatggttatatagtaccaagttgcatcacaaattcttatttagaagtttctttatttatatacgcatcatgatgtcaactcgatgaaggaggaattatgccttgtggacagttgtaccacaaactctacac

SEQ ID NO: 81986 - DNA, 388 bp, Zea mays
aatcgtggcattttaaaatcgctgtcgatacgggttttgaattcggttcggacatgaaatatttgtccgagtcagataaaattgattagaggacgacatattgagcattccgtttgagagtacaaactcagataaaaatagtcagacatagatcaacgtttgaggaattaaactcgggctcagaccaattaacagccgtcgagagtttgatttaatgagcttcagatgagatttataattcaagaatgatttttgagtttgcattcgttccgagaataaaagttttaacaggctccgaattcggtcttctgtgagactgaataactccgaattcggtgatatgtgtacgaatagtctggataatcagagacatacgcgagcgagaaat

SEQ ID NO: 81987 - DNA, 440 bp, Zea mays
  unsure (1)..(440): unsure at all n locations
aatactcaagctcggatgaggtgtcatcatcatcatcatccgagctagcatttgtatcccattcaactaggtaggctntgtcatctttcttcttggtggaaaatttcttcttcttatcatctccatctttgcccttcttcttcttgttaaggtaattcatggcgatgtgactgagttccccacactcaaaacactttctatcattgaaagcatttcttctttatgtttggctcttctaggttgacccctcttcttcttcatgaatttgttgaatttctttacaaatagagccttatctccatcactctcactttcattttcttcatcatcactatcttctttttcaattgacttagaagctttagctttgagagcgatngattcattcttcactttctttgccaaacttatagcatcaacttgagatttcttgaatatat

SEQ ID NO: 81988 - DNA, 365 bp, Zea mays
  unsure (1)..(365): unsure at all n locations
tgactctagcattcggacgatgctctagtttagcggccgcttcgtctgagcatgggcttcgggagaacagttgttaatttatgatcctttatcacgatattccctgctccaatggccttattgcgctctactgcttcggctgagggctaacgagacgaacccgaacctgccgaaactgttcctattttagaagcaatgaagcaaaatgggtttgtgacatctgagaacacccctgctgtcgaaacagaactcgcatactttggagagactgattctgctgatcatcacaatatctcattgccatgcaagcctagccacctggacttctgaaagacagncctctccaatgctgattgcccgaagat

SEQ ID NO: 81989 - DNA, 439 bp, Zea mays
  unsure (1)..(439): unsure at all n locations
tctaaagggagaacacattntgggtctaacaaatgttcattttgagaaatacagggtttgtagcgcatgtcaagtagggaagcaagttggcgctcatcatccacacaagaatatcatgacgaccgacaggccacttgagctactccacatggatctattcggcccgatagcttacataagcatcggcgggagtaagtactgtctagttattgtggatgattattctcgcttcacttgggtgttctttttgcaggaaaaatcacaaacccaagagaccttaaagggattcttgagatgggctcaaaatgagttcggattaaggatcaagaaaataagaagcgacaacgggacggagttcaagaactctcaaattgaaggctntattgaggatgagggcatcaagcatgagttctcttctccctacacacctcaacaaaat

SEQ ID NO: 81990 - DNA, 420 bp, Zea mays
  unsure (1)..(420): unsure at all n locations
tgaagccatggtaagtagcataggcaaagtaaatgctaattgattctagcctanctaccggtgcataggtttcaccgaaatccaaaccttcgacttgtgaatatcccttggccacaagtcgggctttgttccttgtcaccacaccatgctcatcttgcttgttgcggaaaacccacttggttcctacaacattttggttaggacgtggaactaaatgtcatacctcattcctagagaagttgttgagctcctcttgcattgccaccacccaatccgaatcttgtagtgcttcctctaccctgtgtggctcaatagaggaaacaaaagagtaatgttcacaaaaataagcaacacgagatcgagtagttacccccttttgaatatcgccgaggatggtgttcacggggtgatctcgttgaa

SEQ ID NO: 81991 - DNA, 425 bp, Zea mays
catagagtcatgacatgcagacaattcactagaaagcatttcatttcttttaacttctaaagcaagtgaatgttgtgcactaacaaatttatcatgctcttcatataaaaggtcctcttggttctctaagagtctatccttctcattcaaggaatcaatcaattcattgattttatcaattttatttctatccaatcccttgaacaagctagagtaatctatttcctcatcgctagactcatcatcactagaagaatcataagtagtactatctcgagtacataccttcttctcctttgccatgaggcatgtgtgacgctcgttggggaagagggatgacttgttgaatgcggtggcggtgagtccttcattgtcggagtcggaggaggagcaatccgaatcccaatcctttcctagatgtgcct

SEQ ID NO: 81992 - DNA, 421 bp, Zea mays
  unsure (1)..(421): unsure at all n locations
tgcgaagattcttcatcccaacgtgggctagtcgacttgcctttatgttagtcttagcagttaagcaagtgtcgagttcagctctattaaaatcaactaagtatagctgaccctctaacactcccttaaatgctattgaatcatcacttcttctaaagacagtaacacctatatccgtaaaaagacaattgtagcccattttgcataattgagaaagtgaaagcaagttgtaatctatagaatctacaagaaaaacattggaaatagaatggtcaggtgatatagcaatnttaccaagtcctttgaccaaaccttgatttccatccccgaatgtgatagctcgatgggggtcatggatnttctcgtaagaggagaacatccttctctcccagtcatgtggtttgtgcacccgctatcaata

SEQ ID NO: 81993 - DNA, 420 bp, Zea mays
ggccatgcatgctatcgaagcaccaaaattcattgttgtcttgttctgttggcaatcttacacgtggggtatggtatctacgaactacgtgctccatggatgtagatatggcgataacaaaaaaaatcatccatcgattcatgaaggtcgtggctatcaccgatacgagaaatatacttaactctatgtaagtgtgagaatgtttatatctacggatgagtccggagttctatttgtggttataatcgtagacgcgtgaataaatatcttaccccgcgattggatggatgattgtaatgaatcccttgcctcgttgtgagcgcctcgctgacttggtaagtcaagtggccgtgtgtaacacgttgtaatacgtgccaccctactgagaagcaaatctggccgcttgcgctcggacgtgct

SEQ ID NO: 81994 - DNA, 433 bp, Zea mays
atagaatacctcagcttgagtcaatcattttgcaaaggaatattgatgctcttaaagattatctgggtatgaagcacatacgagagaagataatggttggagtatccaaatgtttcaaggaagacgatcaatgtgtgatatggtttaaaaccgcatagtagtgccaaagaacgaagaactccgccagcaaattcttgatgaagcacatcttagtcgttattctattcatcccggaagcactaagatgtaccaagacttaaagcaacattactggtggacaaagatgaagatcgaaattgcacactatgtggctaagtgtgacacttgcagacgtgtcaaggtcatacacatgaaaactgctggtccattacagtcgctaccaataccgacatggaaatgggaagacataagtatggactttattgtgggattg

SEQ ID NO: 81995 - DNA, 413 bp, Zea mays
ttagattcttggcaatttatagatataattgacacacttgctcatatatgaagggtatgggttcaagtatatttgatatatcttagtgtctttgaagtgcagatgacaataatttcaccattccctattcctttacggtgatgtggtaagttgtttatggcttaatgcttgatataatttatttctaaaattttgatattgttttattaatgcagttgatatcgctggtcatttgtgagattgaagttgttagtacgcttgtgatatacaagtatgcctatgttgttttcaccatgtttttcttggttgagttttattacaataatattgttatatatgcttgattgaggatgtttctaagaggagtgtgaattgcgttgtttggggtacaaggtaatcatcaatttgaattt

SEQ ID NO: 81996 - DNA, 396 bp, Zea mays
tggcagagcgagccgcatacaccgagccccattaacggcatgactgttattcgaactacaccccagttcctctaattattcagctaaaggcatcccattccaccctcatggttgcactgtttttccgggcggtcatccaacaaacaggtccttaccgagaagcactcgaaaaaccgctcgagcccccttgaataccacaagtataacatcataatacaagaggggaaaacaacgtaccattgataattctcatcatgttcattgattagagttgagcaatagcataaagctaaacaataataatacaactcagataggtaacaaggacagggataacaaaagctagtcgatccttaagtataaatgtgtaatgcgggaggtgaattaaagaatgta

SEQ ID NO: 81997 - DNA, 362 bp, Zea mays
  unsure (1)..(362): unsure at all n locations
gtaattatttttgtaagaaggtagaagttcgtccggcctatttcagataatagattacccagctctaaatgcttttatgctttcaccgaacaatattaaattcaacttgttaggtttgaccttgaaaaacattgcagtaaaacatggtaaaaaagatctagttgggagaaaacatatacagcatatacacatcatgaagaatgtatcatgctgcataacaaaattaaaggagcgcgaggagataccgcttttgaaggcggaggcgaagatcacaacagttcatctgagaagaagcanaatgtaacatcaaatcacatgagtgaaaatgaaataataacatgcagaaaattacagttcagcat

SEQ ID NO: 81998 - DNA, 417 bp, Zea mays
aaaactaagcttaactccacaatgctctgctttgtttagatagtggacatcctatatgttggctatcatggtgataaatgacatacattagtatatgtttcattcgtatgagttatcatgctgaatcgatatgcattcggacaagtttaagtccaaacttgtacaaaccattcaccatatttatgaattgtgaacaaaaatggcagacctatgtaccttctgtgtcatgtggatctcatgattttttccatgtgttagtatatgggtcagaacgatacaatatttctgagccaccaacatggtgtgtaaaattataaaagcatctatcagtacctgttacaatactgaattggtcgccattgtctttcagtacttcaatgccacaaatagcttactacttaattggacatactacta

SEQ ID NO: 81999 - DNA, 400 bp, Zea mays
ggcatcaagcatgagttctcttctccctacactccacaacaaaatggtgtagtggaaaggaagaatcgaactctattggacatggcaagaaccatgcttgatgagtacaagacaccggatcggttttgggtcgaggcggtcaacaccgcttgctacgccatcaaccggttatatctacaccaaatcctcaagaagacatcctatgaactcctaaccggtaaaaagcccaatatttcatatcttagagtttttggtagcaaatgctttattcttattaaaagaggtagaaaatctaaatttgctcctaaaactgtagaaggctttttactacgatatgattcaaacacaagggcgtatagagtctttaacaagtcctcaagactagttgaagtttcttgtg

SEQ ID NO: 82000 - DNA, 394 bp, Zea mays
caccagacactattaagcttgtgaagattcttcatcccaacatgggctagtcggcggagccagagcctacctatgttattcttagcagcataggtagcgccgaaatccacaccttcgacttgggagtattctttgggcaccagtagagctttgttacttggtaccagaccatgcttatcttgtttgacgaggacgacccattggtcctacacagttgggctccgttgacataattgagatacagaaagcaagttgtaatctaaagaatcaacaagaaaaacattggaaatagagtggtcaggagatatagcaattttaccaagttctttgaccaaaccttgatttccatcaccgaatgtgaatgctctttggggatcttggcttttctcatatg

SEQ ID NO: 82001 - DNA, 442 bp, Zea mays
  unsure (1)..(442): unsure at all n locations
tagagcaccatgcctttggtcgccaaagcattagcaatttctctgcccccgtcaacgacgacgcaaaagtgcgcccacggatccggcgaggacacagcgccactcttcgctgaagcccctttgtcagcggacagcctcgctagcgccacaaccaactgcccaattttagtccctatacccgacatatatcaccatacaaaatccaaacaccaacaccctacttactagtaggcggtagccccatctaggcatcaaacatagtgacacccccaccaagtagtcgtccacggacaactcctggtcagtccctccagtttccgaaaccaccgcctcaacagcgcgtggtggngaagacaacctctcggcggcagctagcaccggtggagggggcatcgcagcagtcgggacagaccccttcgtggtggacttcgtgtcacgtcgt

SEQ ID NO: 82002 - DNA, 417 bp, Zea mays
ctcttcagcttcgtcatcttgctcctcagctttttcattctgtacatattaaagtattgaaaggaaaattcaagtttaaaggaaaaggtaagcacaaggtatgattttattaccggcttaagatgacttcgagcttcgtcaccagctatgcttcgtccacccttcgtccatactaattttataaatctgtttcctatgcttcgggcaagactgggaatatcaaccagatctgctggtgataaactaaagttgggtctattgtcaatctttccatgtgtgcaaccagatttcaggaaggcgacaactgtgacccgagaagctaccagggcacaaaaatcaccatgtccggctataatttcatcaagggcatcaacttcaccctcgatatgttcgaaggcccctggcaggtcttcagtc

SEQ ID NO: 82003 - DNA, 422 bp, Zea mays
  unsure (1)..(422): unsure at all n locations
tctaaaggaagaacacattntatgactagcaaatgttcatttttagatagacaggatttgtagcgcatgtcaagcaggaaagcaagttggagctcaccatccacacaagaacatcatgacgaccgacaggccactggaactactacacatagatctattcggcccgatcgcttatataagcatcggcgggagtaagtattgtcttgtgattgtggatgattattctcgcttcacttgggtattctttttgcaggaaaaatatcaaacccaagagaccttaaagagattcttgagatgagctcaaaatgagttcagattgacaaccaaaaagattagaagcgacaatggaactgagttcaagaattcacgaattgcggatttcttgaggaggagggcatcaagcatgagttctcttctcccta

SEQ ID NO: 82004 - DNA, 422 bp, Zea mays
tcggcttcatctatattatgaatagccttcgaatccatcgaactcccttcagccctcctggtagcttcttgactcccgtgtacaacaatgggcccttgtttcgaaggtatcttcatgcatagatatgctgaatgaagtattgcttcgaaggcatttagcgtccctcgaccaataattgcattggatggatactccatatcaacaatgtcaaagacaacctattctgttcttgtgttatggacatagccgaaggtaactgacattgttatcttgccaagtgccataatctgtcgtcctccaaatccacaaagagagtgtgttgcatcatgtatcttatccacaataaggattaatgtgcgcatacctgtgtcaagagattgaacgtactaaacatatgtcgggaaatattgaaaccgacaagc

SEQ ID NO: 82005 - DNA, 426 bp, Zea mays
taaagccatggtatgtagcataagctaataatatgcgaattgtctctatcctagctacgggtgcataggtttcaccgaaatccaaaccttcgacttgggagtatcctttggccacaagtcgagctttgttccttgtcaccacaccatgctcatcttgcttgttgcggaagacccatttggttcctacaacattttggttaggacgtggaactaaatgccatacctcatttctagtgaagttgttgagctcctcttgcattgccaccacccaatccgaatcttgaagtgcttcctctaccctgtgtggctcaatagaggaaacaaaagagtaatgttcacaaaaatgagcaacacgagatctagtggttacccccttatgaatatcgccaaggatggtgtcgactgagtgatctcgctggattgctt

SEQ ID NO: 82006 - DNA, 434 bp, Zea mays
  unsure (1)..(434): unsure at all n locations
tgacagtccanaatcaagaacttcaagtgcaacttgttaactgttttatcctcaatgcttcatctttattgggtgaatctaagtctagctcctcaaataataccggttgtaaacattgtgtaaaatatcatgcttcttgttgtttgactaaccatgcaaggaagaaaagctcacaagttaaagtcaaagaaatattgaagaaatgctctagcaatgatgggttaaagaaagttgaacctaagtacaagtccttgaagcccaacaatgggagaaaggggcttgggtacaactcatataaggaaaaccctagcatagtgcataagggggtggagatcccccaagttcatagagggaaccacccaataagatgccttggggaggattcactcctcanatgacaagtcaactcaagtaaggtaaacttgagttcacaa

SEQ ID NO: 82007 - DNA, 326 bp, Zea mays
ctagaaatccataaaaaactatagaaaaatgctaaaaatgcctttcctattttgctaggttcctaattttctatagtatttaataaaaataaattcatgatttttagttcaaatagggaattatagggtatttaaaatagccaaaatccatacttctggaattttagagagtaattaataaacccaaaaatcaccaaactttttagataagctttaaatattatttagaggccttggtaaaatttggcatgatttggaccatgtttggtacctaaagcccaaaaccctaaccccctaccctatgaacttcactttagacttaaaaa

SEQ ID NO: 82008 - DNA, 423 bp, Zea mays
  unsure (1)..(423): unsure at all n locations
tctccagagnttgaggaggcttcctggcgaagtactgagctgacggacctggcctaatccccttgatcatggcctcgatgacaatttcattgggcaccgttggtgcctgtgccctcaaacgcaagaaccttcggacatatgcctgaaggtattcttcgtggtcctgagtgcactggaacagagcctgagcagtgaccggcttcgtctgaaatccttgaaagctggttaacaacaaatccttcagcttctgccatgaagtgattgttcctggtcgaagggaggaataccaagtttgagcaacacttctgacagccataacgaaagatttggcatgactgaagcattgcaccatacgaagacactgttgcttcgtagctcatcaaaaactgcttcgggtctgagtggccatcgaatacagggagc

SEQ ID NO: 82009 - DNA, 205 bp, Zea mays
tggtcggcgtaaaagacgcgtgtcgtgcgattcccgaggaactgggactcgattgcgacgcacatgacgcgagcagtggcgccacgctctgagatcgtgtcagccaggttgtccgtgattgtgcccttgatcccaagttcgaacaacgtccttcatgcgaacccagtctggtgagtggtggacgtcatttgaaagcacatggcac

SEQ ID NO: 82010 - DNA, 390 bp, Zea mays
tatgacaaggtgaactggaactttcttcataacatgaggataaataaagctcttggtgataagagctgcgactgggtaatgaagactgttaaaggaggtaaagtggccatcaagacgaatgacatgattggctcttactttagtactcacaaaagtgttagacaaggtgaccctttctctcctttgctttttaatattgctgcaaatgggcttgccagcatgatccaaaaagctaaggatgaaggtattctcaaaggactcattccccatataatcaccaatggttgttgctgatgacactatctttttacttcaagatgatcttgagggtgctagaaatcttaagtttattcattgcttatttgagcagatgtctggtctcaagattaa

SEQ ID NO: 82011 - DNA, 427 bp, Zea mays
tcggcattgaaaacagtttttagcatttccgaagatgtctgaagacaaaaaggctggtcccgagatgaagctgagtctctctgaagagaagaacctggggttccttatagcgatggcggagaccaatacggaaaaaattaccaaggagatactggaaggcttgtctgaagatactggtgacagcgacagttacgatgtagaaagtggtggggaagagtccgaagatcggccatggcggccaagtcacgcggttttcgggaaaaccaccattaagcagagtcatattgataatatgaggggccgatattttcaagatatatctattgtgagagctgatgctggagaaaaaacttctcccacccccgaagaagatgaagtcgtaatcttccgaagctctctcaaggctgggcttcgattcccctgagca

SEQ ID NO: 82012 - DNA, 314 bp, Zea mays
tctctgatgcagactgggctggctgcccagatgacaggaaatcaactagtggttctgccatcttcttgggtgataatctagtggcatggagctcaaggaagcaagccactgtgtctaggtcgagcaccgaggctgagtacaaggcaatagccaatgcaacagccgagctaatttggatccaagcactactgaaggagttgggaatttatttgcataggccaccaaggatgtggtgtgataacgttggagcaacctacctgactgcaaatcccaccttcaatggcagaacaaaacatgttgaagttaattttact

SEQ ID NO: 82013 - DNA, 382 bp, Zea mays
  unsure (1)..(382): unsure at all n locations
tcaacatttgctgggcgaattgatgaagtgggtgtttgcatcgacatgagcactctttatgagctggttcatgctctcgctatgctgtgtanagaccatcaacccacaatatttatgttggaaaaaagcgggtatccaatccttacaaattttatactttctagtaagactgatgttatcatgcgggtggaaatcataaggcaacattgcccaagcggtctaaaactcatttacagttaagggatgatgtattatatatggaccccttgatgagaaatcctcttcctaaattatagcgcacaactctgaataagacgacatctagctgttgagagcccgccacaaacacaaacgagggattgtgtgaggacacaccctgcct

SEQ ID NO: 82014 - DNA, 418 bp, Zea mays
tgagagtctgacttatctgtaagcggcttggtgattcttaatattttattatttaaattgtatttttaggctggcactatataatagtacatatctgattatatcacttaataactcgtactcatccataccttttaggaatctgtcatcaaatcatctcagtggagcacttccaattgaggttgcaagaatgagaaatttggacactctgtaagttccaccagctgattggccattattttcaagtaattgctttgggtgctatggtatcttacattaacatatctgtagggacttatcctgtaacatgatcactggttcaattccctcggctattgggaaactagagcatcttttgaggctgtaagtcttataacctatcattcaatgcacatgtttgaattatgtcatgatatga

SEQ ID NO: 82015 - DNA, 420 bp, Zea mays
  unsure (1)..(420): unsure at all n locations
ttggctaattgttgatgactttaatctaattcgtcgaccggaggatatgaatatagttggaggtgatattaatctaatgatgaagttcaatgaggcaataagtaacctagatctggttgaaattccccttcatggtctttccttcacctggtcgtataggcagagggcaccccttcttcaaaggctcgattggttcttcatttcgcaggaatggtcagtggtctatcctgaaactcgcgtaagaacgttgccacgtgatatttcagaccatgtgtcgtgtcttgtttcgttcaagtcgagggtcccaaagcccaagatttttangttcgaaaactattggctggaatttgagggctttatgaacatcttccanaattcttggcttagacaacagaatctgcctgataaagcaaagaattt

SEQ ID NO: 82016 - DNA, 437 bp, Zea mays
ttggatttagtgcccaatatggtatataacagttggcgatacaaactaaacaaggagttgagatcagtctaatgatccaatctgttggaccaatgaatttgttccagtcagtggagcaaatactggcacacaaactttagaagaaaacaaaaagattcctcgatagaaactgtcttacatcaatgctcagtctatccgtgaaatacatcagtatgcttatggccacaatgaagcataaacaagatcctaattatcgacatctaaatcgaatagaaagtactaacggcactggaatacaaaaaaacaatctaaattatgacattcaacttgggtacatacactgtcctctctcaaagtcgcaccttagaatgagatagcaaatatgaagacaggacaagcgcacaaacagaactggaaaactacatacatagattaac

SEQ ID NO: 82017 - DNA, 404 bp, Zea mays
ctggccaccgccaaggagtggcgcgagtggttcaccaccgaccacgtcggcggctacacgctcgtctacgaccgactcaccctcgtcaccgttcgcggggccggccacatggtgcccatgatcacccccgtccaggccagccaagtcttcgcgcacttcctccacgggagcgagatgccggccaagcctgtcgtctagatgccatggaaaatatacgatcggtcgatcagaccgatcagggtttgcatactacatatagctactagagtagaggttcattgagttaatagctagctagattggttaggctatagcaatagccagctgtagaagacactttgttacattaataataatctgttcattccgaaagcgtgagattccatcttgatgtgtactgatgc

SEQ ID NO: 82018 - DNA, 399 bp, Zea mays
  unsure (1)..(399): unsure at all n locations
tgtctctaacaaagcattgaaaaggatcttcctcatcaaaatatgatatccataaaaccaaacgcttattcttgaaatcaacaatgaacaaaaaccaatggttcgcatggcacactggaaaaaacaactgaaaaaacagattgaggtaaaataagaacaaggcataaatgtatggcacattaaagctgctgcttggaccaaaaaaatttacaacaaactaagcaaacaaaaaaccttgttagagcgatgcaacttcaaagtagaattagcccccagaaacgatttccttagatcttcaacttcatattggctattgtattccatcatcgaatgctgcagtaacaatagaaattttaaaaaatgaanaacaataaacaaaattacaaaanaatgcaaaac

SEQ ID NO: 82019 - DNA, 427 bp, Zea mays
tcgttgcaatgtaaacaagtagaggtttagtttaagaaagcttgatgcggccggcatgattggagttgaagaacacgtcggatgatcctacaagctagctgccgtcatccactgggatggtcggtcaactccgtgaagttgaatccaaattcggctgccgacctgccgtccaagcccaactgctctccatttgccctcgagcaatcaatgtatacacaagccatggtatcacgccgtatgagatgacaacgagttagtcatgcatcctccccgtccactccatctttgcttgctcacgagcaaggttttaaagtcggctagtcgactctagtcgcctaagcaccgataaggtgactaatcgcgattagtcatcgattagctcgattagtcgactccctagtcgtcctatagtcgtccatctataaca

SEQ ID NO: 82020 - DNA, 439 bp, Zea mays
  unsure (1)..(439): unsure at all n locations
ttctaagaagggcatgagcaaaatctatggtgagaaaattaatgctcatatgatttgctctaacaatgtacctatgtgcttcaacaaaaaaagatcaaagataagcgataggaggtgctatggatgcaaggagaagggccatgaaattgattcatgcccccacatgaagaatcaagaccttgcacgatcaagaaagatgaccatcaaaaaggatgaaagcaaaaggcaaatgcattgcaaggacaagcatcgcatttgctacaattgccgttgaaaaggtcatctattcaaggtttgtccaaagggtaaaactcctaagcctaacttgtcaatacattcaaatatgcttangagacccaaatttgactcttgtgctagaaaggtgatgaattcaccatattctangaccaacgctatttgggtgcctaagtctttattg

SEQ ID NO: 82021 - DNA, 410 bp, Zea mays
ttatctacacatatcagtcgtccgatcaggaatcaagtgcccatatttttacttgcttaagtgaaccggtacgccacccaagccgttggatcagagatccacggattacattttaaatacacgcgatcgccttggatccatccgattcgagatcgacggcccgaacgaaggggtatacaatcctatgatctcgcccattcgcatttgatccaatggcggatatcgaatttggccaaaacacaacccaaaccaaatcccagccgcacgaatccgatcgcacggcaaggagttcttcccttactccgcgacgcgccagtgcagcatcccggcggcgcaatgaattctggcggccggacctcgcctgcgcgaagcggacctggcaccctgttgcccaaattccaaattgccac

SEQ ID NO: 82022 - DNA, 441 bp, Zea mays
acaccatatgaaactcaagcttctctaagtcgatgccacagtcacaagcacagtaaacaatattcatttgtgtttgaaatattttgatacagatccatgtgccaaacatactaaaaaatctccatagaagatattggtatttcaggtaaacttaacttcaaaaccttcaactcagatagtagattgtttacctcaacgttagaactgtcctggtgaaagaggcaagtgaaacagccatactagacacaacatctaagattatatatacatgtacattacttggggcccttccaaaaccggaggcccggtgcgaccgctccacttgcccccctccaggaccggccctgactacaaagcaaaacaaaataggatatgggttcttttaagaaaatggcttggctgcataaggagctcagtcctgagccgctggatcttgatcga

SEQ ID NO: 82023 - DNA, 430 bp, Zea mays
cttatgctattcttattaaacaaattaatgcgaggtgtgccactcttattattgttggcagcggctgtatgcaggtgatccaagtaatacaactacataaaaaggaattacaacgttcaatagcaatgtaagtagacataaccaacatcgaaaaacatgttacataactaccaaaagttagcaaccaaaaattaaataaatgtgcatacggaaaaacactatacttacaaggacaacaatggagcatccatatatagtcgcggagacatttgtggtgatccggttgtgccacttcttggcagcttcacatagatcattaaaaatcaactggcaccagtcgatctcatggaaacggtgcatttcttctgtgagaagcacctcatgatatgtgatgccccaactagcaattggaaacaccaaatggttgaat

SEQ ID NO: 82024 - DNA, 411 bp, Zea mays
cgccgtcgttaaacaccagagcacatgaagtttttttgatgtccccacactatgccgcgtggttcaaagcgtgctccattactttccgctcccctaggcaaaccaccatattttgatggtgaagaatattgtatgtggagtgataaaatgaggcaccatctaacctcactccacgaaagtatttgggatattggggagtatggagcacaggtacctaaggtgggggacaaagactacgactcggacgaggtcacccaaatgaggcactttaactctcaagccacgtgtatactcctcgcctccttgtgccgagaggagcataacaaggtgcaaggggtaaagagcgccatagatatttgggacgtgctcaagaccgcgcacatttaaggactaacatacgcgcaatttgag

SEQ ID NO: 82025 - DNA, 387 bp, Zea mays
  unsure (1)..(387): unsure at all n locations
gtttctgagcagcataggggtagacaaggcacttgtgaatttagagattttgctttcatttggtggaatgaacttggtaacacacgtgctgcaccacanacatggaatccgttaaaagaggaagatgcgagctcgctttggtcccccttcttatagacgtgatcttcaaaaaaaattgcaacgcttagatcagggagacatgtcggtacaggaatactaccaagagctttagaaaggtatgctacgatgtggtgtagttgaggatccggaggatcaaatggttatagtttatggcggattgaggcgggagattcaggatactggtgattataaagaatatcattctatacaacgcttgctccatctttctatgttggcagaaaaaga

SEQ ID NO: 82026 - DNA, 422 bp, Zea mays
  unsure (1)..(422): unsure at all n locations
tctaagggagagcatattntgggactaaccaatgtttatttttttttaacagagnntgtagcacatgtcaagcagggaagcaaattggagtccatcatccacacaagaacatcatgacgaccgacaggccgcttgaactactccacatggacctattcggcccgatagcttacataagcatcggcgggagtaagtattgtcttgtaattgtggatgattattctcgcttcacttgggtattctttttacaggaaaaatctcaaacccaagagactntaaagggattcttaagacgggctcaaaatgagttcggcttaaggatcaagaaaataagaagcgacaacgggacggagttcaagaactcacaaatagaagggcttcttgaggatgagggcatcaagcatgagttctcttctccctac

SEQ ID NO: 82027 - DNA, 419 bp, Zea mays
  unsure (1)..(419): unsure at all n locations
tctaaagggagatcacgtgataggtctaaccatgttctattttttattaatagaccttgtgcagctggtcaggcgggtaaccaagtgggaggagcacatcaccacatgattgtgatgaccacttcaagacttctggagctgttgcatatggacctcttcgaacccggtgcctatctgaccttnggaggaagaaagtatggcctagtttttgtgatgacttttcccgcttcacttgggtggtccttttgcaggataagtctaaaacccaaggaccctcaagcgcttcctcaggagagctcaaatgagtttgagctccaagtgaagaaataatgagcgacaacgggtccgaattcaagaatcttcaagtggaggagttccctgaggaggaagggatcaagcccgagttctccgctccctac

SEQ ID NO: 82028 - DNA, 421 bp, Zea mays
tgagccgaggaccagccccaccggaacagtgcgatcatgctcgccggagctcgtaaccccgccggagcacatggaccgggtaacccactgaaccatttctcgattccttgcgcgcatagcctctacatcacccagaggagctccttgtgcaccttgattgaaccctaccgccgtggtttggccggagtatgtgccaccgacgacctccgccgcctgcgctcgtggccagagcagctccagccacctccgacaccgacccgcacaccgacgtgacctccatgacctccccgacatcaccaaccaccccaccggagctctactgccgccggtgagcctcgccgccgtgatctttgccccggttactgttccagctagccaaggatcgcgggttagatataggataagttcacggggttatgcg

SEQ ID NO: 82029 - DNA, 379 bp, Zea mays
tgaagctcatgctcttatgtgaagatatagcagagcataacgtattgatgggatctcaattgtctgaggaataggagaaaactctcaccaggtttttgttcaacaacaaagatgtcttcgcatggtcagccaacgatctctgtggtgtcaacagggatgtcattgaacattcgctcaatgtcgatccatccttcagacccacaaagcataggcttcggaaaatgtctgatgacaaatccgaaggtgctcggaatgaagtgaaaagacttcttagcgctggagtcatcagagaagtaaaatacccagaatggttagccaatactgttatggtgaagaacgccaatggtcaatagagaatgtgcattgattctactgatct

SEQ ID NO: 82030 - DNA, 128 bp, Zea mays
tttaaatatgatcctaaactttaacacttgataaagcaaaactaaatattgtttaaaaaaattaggggactcacactatttctggaaaaaatatagaaccaaatatgtttaaacatcaagattcctat

SEQ ID NO: 82031 - DNA, 434 bp, Zea mays
  unsure (1)..(434): unsure at all n locations
tggctcgaagcagccaaaagtctgctcagtctgggtgcaccggactgtccggtggtgcacangacagtgtccggtggtgcaccggacagtgtccagtgcgccaagctggcatctgcgaactggctgctctcgggtcttcgaaggccgcgtacgactataaatcaccggactgtccagtggtgcatcggactatccggtgagccaacagtcggcccgaccaacggtcggccgcgtaatccgcgcacgacgcgtggcagagccaacggtcagaaggaggcaccggattgtccggtgtgcaccggacagtgtccggtgcgccaacggctctgaaccgccaacggtcgacttcgccaaagaaggaaagaaatccgcaccggacagtgtccggtggtgcaccggactgtccggtacgccaggcgacagaatgcaagaat

SEQ ID NO: 82032 - DNA, 432 bp, Zea mays
  unsure (1)..(432): unsure at all n locations
nttcacgagcgcgctggcgtcgtccgcttgctcgggattggcgtgtcgcggggagtcngcgctcgtcttcgtctcaagcgcgaagtccatacccggtgcgccccccgttggggtgccggcactgtcgactcgctcgacagccgacgaggcgctggctcctgcttggccttggtcgccctgccttcccctccgtcggcgggggaaagggcaagatgagctcgaaggttgttcttccaccacgcagggaagacgtcgtcgattccgccgccggcgggcgggctgtcggccgccattgtcgttgtcgcgcggcggtggaaggagtgtcatgtcgtanctgccgtcgagggacatgaactcaagactcccgaaatagagcatcgtcccgggttggagaggtgctggatactcccatctggagcttgacgggaagct

SEQ ID NO: 82033 - DNA, 423 bp, Zea mays
  unsure (1)..(423): unsure at all n locations
tgacatcgattccctggtggaaaccaatgtcatccttaatgcctaggcgtctcccattatagagcatggtacgagcaaatttaaacttttcattttcaagttcatgctcattaattttagcagaccaattagctatgtgatcngtttgttggttaatcatggaaatgtgatcatcaatagcttcaacattaatatctctacatctagtgcaaatggaaacatgctcaacagtagatgtagatgatttgcaattgtttagttcatctatcttaacatttaaaataacattctcatctctaagacatganatagaatcattgcacacattcaattctttaatcttagaaattaaactagcatcttgatttctaagactagaaatagaatcatgacaaatgctaagttccttaaataaaattcaca

SEQ ID NO: 82034 - DNA, 422 bp, Zea mays
tggaccgctcggaggcgaacaggcgggacgccgccttggtgcgctcctccaactatgtacgccagtcgctgaggcgctggtgttcagcctcaagcgccttccactcccgcaagattgccgcctcggtctcatgaaaagcctgatgggcatgagacagcacccgggggaggggaatcagcgtcgcttctggctcggcgccggaacggagccgccgcccaaaaatcacctttgtctcctccatagtgggcaacgggatggagctggatgtgccccccacatcgacctcgatggcgggggcgggcacagttggggcctcctctgccgctgtcggcggtgtactcgacggcatcgccatcattgaggctgtggcagccgttggagcaatggggaccccctccgccgctgcgacgccgcttgacgtg

SEQ ID NO: 82035 - DNA, 443 bp, Zea mays
  unsure (1)..(443): unsure at all n locations
actcaagctnttatgcttgacaagtgcagttaccatccttgagacaatagatacctcatctttgctgaagtattcataaggtacagatttggttcatatgacaaaatgagatgagcgggagaaaacagaatcatcagacatcaagcttacatagctaggattatagcagggaagcaataccaagcaaaacacatgcgcgaaagagaagatacatttagaaacattattatttcacttagctgctcctagaacttgaggtcagatcagaatggcattaattaatagcacaaaatgcagtgtcaaaatacagaaatgaatgcattttaaacattgtatacagcacagcagaagcagctaacatcacagtaaacaaatcaagtgataccagtaaaattggaatcgatcttgatgtgaagtcacctgatggaacccgcatccttaat

SEQ ID NO: 82036 - DNA, 432 bp, Zea mays
taagagaacagattctgtacagaattatgagactgaaatactgctataatcaaactgcaataactgtctgagctgatatccgattgaggtgtgcttcgcggccacggaaagatctacaaattatctacgactcatagatagactttctatttttttgagaccactaagaccacggaaaactggaatgaacagaaactattgaatctgccattctgcagaaactaatttcgagattaaaatctaatctcccatccaatctaaccaaaaaaactaattgcagggcctaaaactcatccaaaacaagcgaaaacattcatcaagtggataaaagagagagagaggaaaggaaatccaaccaattcttggagaggaacgacgattatgggcgacggtatgccctcatctcccctctcttctcttcttttattcttc

SEQ ID NO: 82037 - DNA, 414 bp, Zea mays
  unsure (1)..(414): unsure at all n locations
tgtgaaggttcttcatccncacatgtgctaagcggcgatgccacagccagcccatgctagtcttagcaattaagcatgcatctagaccggcctccttttttgcaaaatcaactaaataaagtttgccgtctaatacacccttaaaagctagtgaaccatcacttcttctaaagacagacacatctacatttgtaaatagacaattatatcccatattgcataattgactaacagatagcaagttatatccaagagactcaactaaaaacacattagagatagagtgctcatttgaaattgcaattttacctaatccttttaccttgccttgattcccatcaccgaatattattgaatcttgngaatccttgtttttgacgtaggaggtgaacatcttcttctcccccgtcatat

SEQ ID NO: 82038 - DNA, 426 bp, Zea mays
  unsure (1)..(426): unsure at all n locations
ttctttggcggcatgacgaaagtctatgcttgccgaatgtgttctaatctcaaaaagtggaagtgagttcaccggaggtgggcgccaatgttggggacttgttctcaaatgctaagagttaaaaacaaggcaacataaaaaatgttaaatgttaaagtccttcgtccttcgaagcattatctcccttcggatataatgaattccggacgaaggttatgaaggacaaacattcataagcacaataaatgatgaagaaggattcatatgcnagatatgaaaaataacataaacactgtaaacatcattatcaacttatttttatttgtgttactgtatcaacaataacaaattataaatgtaccttcggctcgaaggaaagcaggggtacaagcgtgacgcgaaagcaaatgccaagtcagcgtgaac

SEQ ID NO: 82039 - DNA, 397 bp, Zea mays
gtctttaaagctctctctatatgacacatccacctatactgtatttgttctgcgaccttagccttgtatggcagatgtgtaaatgagatgctcgcctaccgattgcacaaaacaccggtggacaatacttttttccaatatgctcaaaagcactggtgccactttctcaataggtacatcacatctcttctgattctttcgccacaactggctgtacaaatagctaactctatctaacgatttccacacagcttatgaaatgtatccacgcaacattacaggcatgagcctttccataattatgtggaagtcatggctcttcagtccatacatgttaattgtactgaagctcccaaatcttgtataaccaaccgcatatacaaaggggaatttaata

SEQ ID NO: 82040 - DNA, 440 bp, Zea mays
tgtaaggttcaacacaagtgttcaagagtgatggtccaaaggtctgtttgattatggttgtggacatgacaagtgaaggagaacattgtgtatttgagaatcagtgtgcgtaactcggagacaactgatcaagccaaggatggaggtaagaagagcttcgaggtaccgagtgcactggagaaggtcatggaggctgaggaacccaaagccaggggtgaagaagaagactcgcaaagtcaaggttgatctagttgagaagagatatggtgcatcgaggatcacgacttaagagcatgacttacaaccattgaggtaacatctattgttatgtggtgttagtcataaggctcaagatcaagctcaagacatagagcaaggtcactagaagtagtagtgtgaatcctaagttcactttgaccctaagtttgggttgttcctat

SEQ ID NO: 82041 - DNA, 443 bp, Zea mays
gacctatgaaactcagcttctaaaggagaacacgtgataggtctaaccaatgttcaattctaaaaagatagaccttgtgcagcttgtcaagcagggaaacaggtgggaggagcgcatcacagcaagaatgtgatgaccacttcaagacccctggagctgctgcatatggacctcttcggacccgtcgcctatctaagcataaggggaagtaagtatggtttagttattgttgatgatttttcccgcttcacttgggtgttctttttgcaggataagtctgaaacccaagggaccctcaaacgcttcctcaggagagctcaaaatgagtttgagctcaaagtgaaaaagataagaagcgacaacgggtccgagttcaagaaccttcaagtggaggagttccttgaagaggaagggatcaagcacgagttctccgctccctacac

SEQ ID NO: 82042 - DNA, 417 bp, Zea mays
tcataacaacttcatctacaatagcttcggccatattgataatttctattggcttctttggctctgggtcggccagtgggtcaaatggctctgggggaggagatagttcagctacagtagaagacataacttagtacgaagttacaaaaataaacaacaaagtcaaaagtcattaagtaatacctatccgtctttcaagttccgcagctttttcagccgcttttgttgcctctcgagcgtcatgaatatctttttcgctcttcttcattatttcatgggccatccatcggccaccattttcccagatatcagtaaaaaaatccgcctattgagcttgcttcggccgaggtgtctttcgtatcgtcaatagagaagccagcttcggcctatgcccaaagtttaacatgttcgcaccct

SEQ ID NO: 82043 - DNA, 435 bp, Zea mays
  unsure (1)..(435): unsure at all n locations
tctaaagggagaacacgtgataggtttaactaatgttaccttcgaaaaagatagaccttgtgcagcttgtcaagcaggtaaacaagtgggaggagcgcatcacaacaagaatgtgatgaccacatcaagacctttggagatgcttcacatggacctcttcggacccgtcgcctatctaagtatagaaggaagtaagtatggtcttgttatagttgatgacttttcccgcttcacttgggtattctttntgtaggataaatctgaaacccaagggaccctcaagcgcttcctaaggagagctcaaaacgagtttgagctcaaggtgaagaagataaggagcgacaatgggtccgaattcaagaaccttcaagtggaggaatatcttgaggtggaagggatcaagcacgagttctccgctccctacacaccacaaca

SEQ ID NO: 82044 - DNA, 433 bp, Zea mays
  unsure (1)..(433): unsure at all n locations
tgccttcgcctcagtatatcacccgcagtccaacggagttgtggaacgcgccaatggaaanaatttcacagctgtcaaaaagatgctcctcgatgaaaaaagggcaggtgggccgatttgttacccgaggcgatctaggcgctaaacacgactgagtgcagggcgaccgggttcacccctttccgccttctataaggatcggaggccatgaccccacaagaaataaaacatgggtccccgtgaacagttccgtcagccgtccccgacgtggacgagcccacttcgaaggatctcatcgatggagaccgagtcttcgccctacaggctctaaataaataccaagcccagacaaaagcatgttgcgaccacgcagtcatcccgagggaattcagcgaaggggacctcgtactcgtccgaacagctcggacagagt

SEQ ID NO: 82045 - DNA, 376 bp, Zea mays
  unsure (1)..(376): unsure at all n locations
gaccttgaaactcagcttgggcacatgacgcccatggaggctacaccgacgccactctttgtcgctcatatgcgacgcccatgcctagacaccagcgagggtgaaagggaaatgtgcccttgggccatttctaagtattttggtgattgagtgcaaacacaagtgcttaaatgtgaaaatatgcccatggatgaacaaagtgcatatcacaagttaaggtatgtttctaaaccttagtacattagttttgtgtactaacatcttgtctaagtgttagaaacacgagaaagaagaacagaaagaagtggagagtggctgtgtacaaccaaaggttgcttcggactgnggcaccggactgtccggtgtgcaaccgaca

SEQ ID NO: 82046 - DNA, 430 bp, Zea mays
  unsure (1)..(430): unsure at all n locations
tgtggtttatccaatgtaaaacaagcaccatctcttaacatagattntctatggataaactcaacataagagatggcattagtagcacaagcactagtttcttatttagcaacccttttatatgtgggaggcaagcgagttgctaaaatagagaaacctcataatatggactaaatttccttgaaccctcatgcacaatatattttgaatgacatggataatatgcatggttattcaatgaagcctagagggatgacttaatccatattattgtgtgtgtctaatatagaagaatcaaatccaaattaactagatagagaatacgtcacataattttggattgttcaccatataataatattcattcaacttccaattagacctttatttcataatcaacaactgatgtatatcctcaagtgcttctttt

SEQ ID NO: 82047 - DNA, 438 bp, Zea mays
  unsure (1)..(438): unsure at all n locations
tcggcatgatagcaacaaaatgaaaccgacttaaagatgaaaaggctattcatacctcgatagattacaatagaattattatcaaatgtaaagggcatgaatgtaattttgcataggctgtgacctgtgcctataaataggtgaacagtaccctcgtactgttcacgctgatttggcattcacttttgcgtcacgcttgtactttcatctccttcaagttgaaggtacatttgtaatccaacgattatttctgtttatacatgataataagacataattcgttatgttgttcattatatttcttataattcatccttcgtcattatataatatatttatgaaggtatgcccttcataaccttcgtccgaaaaccattatatcctgagaggaataatgcttcggaggacgaaagactntaccgattaacattttctatg

SEQ ID NO: 82048 - DNA, 415 bp, Zea mays
  unsure (1)..(415): unsure at all n locations
ctggttaatgcgaccagtcatntacagtgggtcagtccggggtcggtcgtgggatccactccagtggctcctttccgacacgttcaacttcccttgcaagctcctccacgtatggctctaaactcaatgccacggggttcgaccataggcgggtccttccagggttagcgcacctgcctcttctgactgaccggcagaccctatcgatcaggggctcccttacttagtaactggcgggtaccatggaccgagggtcattcccctgacaagcagctttcactgcaagctaccaacgactaatctttcgaattaagcaactccccttgagatccctttataaaaggcaagcactggttcactttaaaacaccagaacttatacctcagcatatcttcaatctaatgcactccacttc

SEQ ID NO: 82049 - DNA, 431 bp, Zea mays
  unsure (1)..(431): unsure at all n locations
tacanaatttctgacatcactatgggcttcggagggagtgtccaccatatgcatgtcagatcaatccataactccagttataatgatgacaagggaagccaccttcacaagccgcagcacaccccacattctgtgggacagcagcaaagctccttcaagccaccagctccaaggggcagaggcgccaggggcttcggaggaagatatgtggatcaacccaggaagatctattgattattctgtggttaggacaagggacatgctataagaatgtgccaaatcactattttgaagcaaaaggagaccgccgaaaccgaagctcggcagaatcagccgaagaaggtcttgcacactactttgtgccattctccctacataccagaatatgtgggcaatcatcctgcaacttctgttgcttcngcaagccattc

SEQ ID NO: 82050 - DNA, 425 bp, Zea mays
tctaaagggagagcacattttaggattaacaaatgttcatttttataaagacaggatttgtagcgcatgccaagcaggaaagcaagttggtgctcatcatccacacaagaacatcatgacgactgacaggccactggagctcctacacatggacctattcgggccaatagcttacataagcatcggcgtgagtaagtactgtctagttattgtggatgattattctcgcttcacttgggtattctttttgcaggaaaaatctcatacccaagagaccttgaagggattcttgagacgggctcaaaataagttcgacttaaggatcaagaaaattagaagcgacaacggaacggagttcaagaactcacaaatcgaaggcttccttgaggaggagggcatcaagcatgagttctcttctccctaca

SEQ ID NO: 82051 - DNA, 426 bp, Zea mays
  unsure (1)..(426): unsure at all n locations
tgagtcggttcttctgcagaagattattgatgcacaaagtgattatggtatgagacatattcatgagaaaataaaagccggtaaagcaaattgtttcagaaaggatgagccaggcatattatggtttaataacctcatagttgtgcctaaagatgatgatgtccgctaacaaattttggatgaagcacatattagtcgatattccatccatcccgaaagcactaagatgtatcatgatttaaagcaacattattggtggacaaaaacgaagattgaaattgaacgctatgtggcaaaatgtgacacctgtagacgtgtcaaagccatacacatgaagactgttggtccactgcaatctttgtctatcccgacttggaaatgggaggacattagcatggatntcattgtgggattacctaggacagc

SEQ ID NO: 82052 - DNA, 427 bp, Zea mays
taattcactagctcactcatgccccttcaacaacccatgaactcaactcacactatgaggatccaggggatatctatctccctcaaccactgatcatcaaggtcaaccatgcttgacccttaggctctgggtccctaaagacttcgtctcaaggactttgacgccatctcatttccttacaaacgccactgaaggggagcagctgccctttggccttgccatgccttcgtcttggcctagactgaggggcggtgtgggccagaggccttcaaccccttctagcttgtcttcgattggagaggttgagcccccattgtacatcgtgggcatccaagtctgtggagtgccctcgtcgagtgaactcgtcctttcggggtgggctccaccccttgggctgaaatgtggggctgcgacgtcctgctatcat

SEQ ID NO: 82053 - DNA, 415 bp, Zea mays
tgtggacccgttgcctaccaacttgagttgccacccagcatgtcagctgttcatggtgtattccatgtatctcaattacggaaatgtgttcgcctacccactgaagtgctgcccgaaccggacattgagatagaaccagacttatcctaccaagagtaccccgtcaaggtattagatcagaaggaaagatcaactcgggcaaggtcagtcagaatgtataaggttcagtggagtcaccattcagcagaagaagctacatgggagactgaggattttctacgctctcgcttccccgactttctgcccaaaggagttggtacgtaaccccagaaccccacccccacctgccctttgaattcaattataataaaaacttagataacaaggatagtctcaagtgtggatttaacttaag

SEQ ID NO: 82054 - DNA, 425 bp, Zea mays
  unsure (1)..(425): unsure at all n locations
tcgtcaatntgcctttgcaactcagctaggcgggccaccttcttcttcttcctctgcacctgttgatgtagcatctccatctctctgatttgttgatctaactcttcttcctcaagcgtcgggctaacagcttttctcttctggcttctggcctcccgaagagagacggtctcctggttgtggtccagcggttgtagtgctgcagccccagccgctgaagctttcttcggcgccatagcgaaggtctatagcttccgaaggtgttcacgaagactcgaagtggaagtgagttcaccggaggtgggcgccaatgttggggacttgttctcaagtgctaagagttaagaacaaggcaacataaaaagtgttaagtgttaaaatccttcgtccttcgaagcattatgtcccttccggaaataatgagt

SEQ ID NO: 82055 - DNA, 376 bp, Zea mays
  unsure (1)..(376): unsure at all n locations
ntattntactgtgtccacgggatgaaaaatcactactactactactacggcataaagcacttgtttttagagcctgccatcttcattcttcgcaccggttcaccactatatatacacacacgattgcatttgacacgtgttcctggatcggctatttcatcgaaccgcgaaacctatatgctcccacggcgcgcgagggcggggtaaagggtgcttgccgtcctgtcacagagtcatatcacattcacagccgtcgacgtctccgctccgtcacggaaacagcagctagctgcgacacaacatgcacgtcgcactccgccgggccacgggtttgtgaggccagtgagtctcaggcgagcgagctggctcgcggcat

SEQ ID NO: 82056 - DNA, 238 bp, Zea mays
aactctctcggattgcctgaaccgcagtgccccttttttataccgcccgatgtgaggtaccatttcgacagcatccacctcttcttaacgttagcctaagatttcattcgatacgcccccaaaaagacgtctctgtcaggccacagtgtttgcttaccccaccccaacttttttgtcctacaaggctatacttcgagtctcatcaaccagatgttgtgatccgcatttctcatatgcc

SEQ ID NO: 82057 - DNA, 436 bp, Zea mays
  unsure (1)..(436): unsure at all n locations
tgacaacaccatttgacattttacataaaatttctgagatcaagaatatttagttcattcctcaacatgcaaaagcgggtcttatcaagtggcttagtgaaaatatccgctaattgatcttccgacctcactccttctagaatgatatctcctttagcaacatgatctctaaggaagtgatgacggatatcaatgtgcttggtgcgagagtgttgtacaggattattagcaattttaacagcactctcattatcacacaacaaaggtaccttttctagaactacgccatagtctagaagagtttgttcatatataaaatttgtgtgcaacaagcacctgcggcaatgtattccgcttcggcagttgacaaggcaacactattttgctntttggatgaccatgaaactagtgatctaccaagcagatggcatccccc

SEQ ID NO: 82058 - DNA, 426 bp, Zea mays
tatgaatatatgtgtgttgcatttgattgtgcattacattgcttacttgcatcacatttgtcttattctcttacatacttgtgtgcaagcgtctgctagaaataaaacttggatgataattgttttagcaatattcactgtgacaccccaggtgtcagtttcgtgttatgtcgggagatttgtcctaatctcggacgctcagtgaaaatttctatcttcttatcacatttatatcctttcatcaagttaattgtaaacacttcaccgaattcgaagttattcgatcgcgagaaacggccaattttggagccggctaaaacttttaaattctcggcacgaatgcgaactcaaaaatcattctcgaattataaatctcatctgaagctcatttaatcaaactctccatgactgttagttgatctaagc

SEQ ID NO: 82059 - DNA, 426 bp, Zea mays
  unsure (1)..(426): unsure at all n locations
tctaaagggagagcacattctaagattaacaaatgttcattntgagaaagacagganttgtagcgcatgccaagcaggaaagcaagttggtgctcatcatccacacaagaacatcatgacgactgacaggccactggagctcctacacatggacctattcggcccaatagcttacataagcatcggcgtgagtaagtactgtctagttattgtggatgattattctcgcttcacttgggtattctttttgcaggaaaaatctcatacccaagagaccttgaagggattcttgagacgggctcaaaataagttcgacttaaggatcaagaaaattagaagcgacaacggaacggagttcaagaactcacaaatcgaatgcttncttgaggaggagggcatcaagcatgagttctcttctccctacac

SEQ ID NO: 82060 - DNA, 426 bp, Zea mays
tctggaccaaatctgaactcaccaaattattgcagcttccaccatcaataataacacgggcacgccgattctcgatggtgaagaaagtctggaacaaattatggcgttgctgcttctctgatgattcaggctgagaactaagaacacgttgcaccatgatgcttcgaaggttcactgtagcatcaacaccaagcatggcatcatcattagtagcaacatcactggagtcatcatcgtcaccctcaccgtcggaagcactaatgtagccatcatctgtagcaatgtatgttcgctgactcgggcaatccttcttcacgtgaccaatcccatgacagcggtggcaaacaatacccgaagaacgaccactggaaggtgttgcaagtgctgggtgaattctgttattggcgagtacctgcaaaggaagtt

SEQ ID NO: 82061 - DNA, 432 bp, Zea mays
tcggcccaacaacagagttcttttcggccgccagcgccaaagtgcttatgcgccatgggcttcgggggaagggttggagaccagccaagaaaaatatattgcctattctgtggtgaagacaagggccatactaccaggatgtgtcatgttaccatccagaagcaaaaggaaatagcggaagcagcagcgcaacagagtcagccgaagcaggtcatgcatactgcttcgtatcactcaccttatattccagaatatgtaggcaaccaccctgcagcttctgttgcttcggcgagccaaccccaagcatcttggcagcaacctccaccgccaccgccgatccagcgaggacaacagccagaagggagtcagcacaatcatcttcagagggatttcagagaagagtccgaagctcgcacagtcaacagcactgtg

SEQ ID NO: 82062 - DNA, 432 bp, Zea mays
tagtgcccctaaaagattgtctaactctgttaagggcaaggctcccatggctcaagataacgagggttacattttataccctgccggttatcccgagcacaaaattaggagaattcactctaggaagtctcactctggctctcatcatgcttttatgtataagagtgaggcatctagttctaggcaatccactcatgctaaattgcctaaaaagaaatcttctattgtatcaaatgagcctaacatttcatttaagacttttgatgcttcatatgttttaactaacaaatcaggcaaagtagttgccaaatatgttgggggcaaacacaaggggtcaaagacttgtgtttgggtacccaaggtgcttgtttctaatgtcaaaggacccaagaccgtttgggtacctaagaacaagggcctaaatttgtttgt

SEQ ID NO: 82063 - DNA, 419 bp, Zea mays
  unsure (1)..(419): unsure at all n locations
tggtgccaatggaataacagaaatccttgaaatcttgattgttaaactgcttgccgttgtcaactgttagctcggacggtactccgaagcggcaaacaatgttctgccaaaagaatttttgggcagtctttgatgtgattgtggacacagccctcgcttcaatccacttggtgaagtattcgacggctacgaaggcgaacttgaggttcccctgagcggtgggcaagggcccgacgatgtccaagccccagcgctgaagaggccatgtatgggcgaccagctttgtgtattgcgaggggttgcctgaccgaggagagaacttctggcangcttcgcaggaccttgtgactcgatttgcggcgcatatcattgcatgccagtaaaacccttgtcggatcaccttatcagtcagggccctt

SEQ ID NO: 82064 - DNA, 384 bp, Zea mays
  unsure (1)..(384): unsure at all n locations
gacttctgatcgattatttcctagagctatntgacagctctcggcttctacttccttttgggcctctaaagccttacttataatcaagccctaataataaaaaatatatgagaacataacaatagcaagaaaagctacaaatataatttattttacaaagaaaaagtatatgcaccttcaggctattataaacaaggctatttgcaagatcatccttcgacattaccgataggccgagttcaagcttcgggtaccccatatttttcatcatttctcggcagacagaaatctatttattgtctagcagacaataaaggaaatcatcctcgtcattgccactgtacaccaaggatcctcggnggtacttcaaatccttggtataat

SEQ ID NO: 82065 - DNA, 440 bp, Zea mays
  unsure (1)..(440): unsure at all n locations
acctttaaactaagctcccggcctcttgaggaagctatctgagggctcggatcgagtgtatgtgggcgggaaagggtttggccacggcgggcgccctcgggctgctctggcaggtcgcggtgaggtcaccggagctgcgggctgactcggaaaggctatgcgcggcgcagagggggcaacagggaagatggccgtgcatgaaggtgggctntatagccactcgcgggcacggcacgggcatgggcacaggggcggccaagggcgcgcggtggtgcacgtgcgggcgtgctctgggcgcgttcctgagtgcctgcccacgtcaaacacgtggtggtttacttctatcagcgtttaacggcctggttggtcgccttagcatgcagattntagcaaaaatcccatgtacagtctcttctctgaccatatgctatctttttcat

SEQ ID NO: 82066 - DNA, 471 bp, Zea mays
  unsure (1)..(471): unsure at all n locations
ttgtgtcatccacggagaaggctgcttctgcttgggccagngtcttgacatcgtcgcaccccgccttctccaggatggccgaaattcctctcgcaccagagaacgcacagacatccccgcgatcgcttaaaatgtcttcaaaagcttcggcctatccacatatccattcgataacaccttcagggtcacctcgtatgaagttatcttcgttggaataggcatcgacgttggcgaagctagcctttattcttttccacgcagcccaaggatttttcaaaacatatttctttggatgcgtgaagttcttcaattgttctatctaaatgggtgttccaatattcactgatatctcggttagcttctgcaagaccgcatttttctttggcttcggtcaattggttccgaaggtcttcgatntcattcttctggattnttagcttgagtcttganactagcctcatcttctttcac

SEQ ID NO: 82067 - DNA, 447 bp, Zea mays
  unsure (1)..(447): unsure at all n locations
cttaaaactaagctttaagggaaacatgtgatggtcaactaacgtgcatgtcgaaaaatatataccttgngcagcttgtcaagcagggaaacaggtgggaagctctcatcacaccaaatatgtgatgaccacatcaagacccttggagatgcttcatatggacctcttcagacccgtcgcctatctaagtataggaggaagtaagtatggtcttgttatagttgatgattttccccgcttcacttggatattctttntgcaggataaaactaaaacccaagggaccctcaagcgcttcctcaggagagctcanaatgagtntgagctcaaggtgaagaagataaggagtgacaacgggtccgagttaagaaccttcagtggaggagtccttgaaaggagggatcaagacgagttctccgtccctacacaccacaacaaaatggtgtg

SEQ ID NO: 82068 - DNA, 475 bp, Zea mays
  unsure (1)..(475): unsure at all n locations
gtagcataggctaataatatgcgaattgactcaagcctagctacgggtgcataggtttcactgaaatccaaaccttcgacttgggagtatcccttggccacaagtcgagctttgttccttgtcaccacaccatgctcatcttgcttgttgcggaaaacccatttggttcctacaacattttggttaggacgtggaactaaatgccatacctcattcctagtgaagttgttgagctcctcttgcatagccaccacccaatccaaatcttggagtgcttcctctaccctgtgtggctcaatagaggaaacaaaagagtaatgctcacaaaaatgtgcaacacgagatctagtggttacccncttatgaatgtcgccgaggatggtgtcgacggggtgatctcgttggattgcttgatggactcttgggtagtggtggccttctcttcatcctccttggcttgattatttgcatctcc

SEQ ID NO: 82069 - DNA, 398 bp, Zea mays
  unsure (1)..(398): unsure at all n locations
tgccgacttgtctggtttcaccaagtaacaagagcttatgtatgttgtcatcatncgcattattatggtgnttgaagttttaagcatatcaactaaccacataccaaataaatgccactcgagagaatcgttgcatatatactcatacaccaagatgttatagctttctttgcagcagtacccaagcagcatgacaatatttcggtgtcgagcaaaactgagaacttgcacttccgagaagaattcagtataaccctgtgagctagcttctttgtgcaccttggctgcaatgacctgaccatccttgagctggccctggtacacatgcccaaatccaccctcacccagcatattntcacttgacaaatccgatgttgcagcttgaatctccgagaatg

SEQ ID NO: 82070 - DNA, 413 bp, Zea mays
  unsure (1)..(413): unsure at all n locations
tgtggaggttcttcatcaccacatgtgctaagcggttatgcctctgtcagcccatgctagtcttagctattaagcatgcatctagaccgacctcttctttggcaaaatcaactaaataaagtgtgacgtctaatacacccttacaagctagtgaaccatcccttcttctaaagacagacacatctatatttgtaaatagacagttatatcccatattgcataattgactaaccgatagcaaattatatccaagagactctactaaaaacacattagagatagagtgctcattagaaattgcaattntacctaacccttttaccttgccttgatttccatcaccgaatataattgaatcttgggaatccttgctcttgacgtacgaggtgaacatcttcttctcccccgcatat

SEQ ID NO: 82071 - DNA, 204 bp, Zea mays
actaccaaagatagatgaccctctaacactccactaaaggctagtgaatcatcacttcctctaaagacggagacacctacatcagtaaatatacaggtgtagcccatgagacataatcgggatacggaaagccaatcgcgatcgaaagaatcaacaagacaaacagtgcaaacggaatggtgaggagatatagctatattaccc

SEQ ID NO: 82072 - DNA, 480 bp, Zea mays
  unsure (1)..(480): unsure at all n locations
catggctagtcggttatgccttagccaacccatattattcttagcaattgagcacgtgtcaaggtcagctctatagaaatcaactaagtatacctgaccctctaacactcccttaaatgctactgaatcatcacttcttctgaagacatgaacacctacatctgtaaaaagacagttgtatcccattttgcataattgagagactgaaagcaaattgtaacctatagaatctacaagagaaacattggaaatggaatggtcaggtgatattgtgacaccccagtgtcacctatggtttctcttaacatgccaaaccaagaaccatcattatatgtgaaccatagtgagcatgagcatcatattaacttaagaataaagaattcaccacgcatatactgatgagtatcatgattaanacanatgggtctttcaaaacgtaagaatagtgtaccctataacaaccctaagtgagcccatgag

SEQ ID NO: 82073 - DNA, 411 bp, Zea mays
  unsure (1)..(411): unsure at all n locations
tatcatcaagaacaattcatgaaccacgcggtgccatttgttgaagcatattatgtagagctactagcatagcagtattagaccttaaatcaagtccaagcctcaacctctcactaaagaacaacaattatgcatacaggtgactcaacttcttcgtggcatcaaaatgccacactactgtccatagagtcgatcaatgacgatgtcgcctaccatgaggagtgcatcacgacaaagggtacctgtggcaacgactgacccttctattgtcgatggatcaataatcctggatgatggaacagtcacattagaacatggatcatcatgatttcttcgtctatgtcatttgggcctagcactgtgngcgtcatgcacacactaggattggggtgtactacaacccatgatact

SEQ ID NO: 82074 - DNA, 481 bp, Zea mays
  unsure (1)..(481): unsure at all n locations
tacaagaaacattctaagactccaagactccaacttcacgcattcgattctttgtgatagtgacttgagctccatttgagttgtgaactccgtgtgttgtgttttgagctcaagttgtgacttgtgtgcgtgattgtgctgtggatttgagtcttgtgtgtgttgctctcccctcccttacttctgtacttctttggtgatcatcattgtaagggcgagaggctccaagttgtggagattcctcgcanacggaagaaagactaagaaaggaaaaaccgtggtattcaagttgatcatcggatcacttgaaaggggttgagtgcaaccctcgtccattgngacgccacaacgtggaagtaggcaagtattacttggccgaaccacgggataaaaatcgcgtggctcttgtgtgctttctctttgattggctgtgtcacaagaactcgcttcaagctacttagccattctaactntcataact

SEQ ID NO: 82075 - DNA, 512 bp, Zea mays
  unsure (1)..(512): unsure at all n locations
actaagctataggtcggaggtctcacattccannatgatttaattcgatcatggtctatctctataccatgttcatgaatgatgaatcctaagaacttaccagccgacattgcaaaagcacatttacgtgggttcattttcagaccatatcgacacattntatcaaaggctntacgcaaataagttatatgagaactaaactcagccgatttgactacgatatcatcaatgtagacttccacaatgtttcccaatagctcatgaaagatcaaattcatagccctctgataagtagcaccaacattttcagaccaaatgtcatgacaacccactcaaataaaccaatgaagcctggacatatataggccgttntagacgcatcttcttcggccatgaaaatctgatatatccggcttaccatcaataaagctaataattctattttctgacgcattattgatcaacgtgtcggctatgggtatggggatatcatctttangaagttctctatt

SEQ ID NO: 82076 - DNA, 477 bp, Zea mays
  unsure (1)..(477): unsure at all n locations
tctanagggagaacacattntaggactaacaaaagtccattttgagaaagacatgatttgtagagcatgccaagcagggaagcaagttggtgctcatcatctacataagaacatcatgacgactgacaggccactggagctcctacacatggacctattcggcccgattgcctacataagcatcggcgggagtaagtactgtctagttattgtggatgattattctcgcttcacttgggtattctttttgcaggaaaaatctaatacccaagagaccttagagggattcttgagacgggctcaaaacgagttcggcttaaggatcaagagaattagaagcgacaacgggacggagttcaagaactctcanattgaaggcttccttgaggaggagggcatcaagcatgagttctcttctccctacaccccacaacanaatgttgtagtggagaggaagaatagaactntattggacat

SEQ ID NO: 82077 - DNA, 487 bp, Zea mays
  unsure (1)..(487): unsure at all n locations
actaagcttcaatagtctgtaaaatagctcataaaactcctgtgataacttgtataaagtatgatgtaattgaatttcgctttgcaatataatcttacttttccgtccatgtatgaaacgctntggtgtggacgaaattaatatttttgagccataggcgaaaaacaccttcccttctttgcgtacacaacgaagcataaaattgcctctttttctcttttttccgaagccttctctttcgaagccgaagcaagtttgtatgttatgctgatgatgattctatgtatgtctaagtgaatgtttatgaatgcaaatgtatgatgttatgtatcgtgctaatgaatgttcgaagacacatatganaccaaatctttgccgtttaattttcggcttcaccgcttattnttcggtgtatcagcgctgactnnttcgctgtaagcctccttangagcttcttcntctttatttcagcggaattagcgtgact

SEQ ID NO: 82078 - DNA, 467 bp, Zea mays
  unsure (1)..(467): unsure at all n locations
actcagcttacacgacctcgtgactcgatntgcggcgcagattatagtgttccagctaaatcctcgacagatcaccttggcagcgagggccctgagccctgagtgggagccacaagttccgctgtggacttcgcgtatgatctgaatgccttccgtttcggtgatgcatttcagcatgggttgactgatccccttcttgtatagttggtccccgactagtacgaagtcccagctctggtgcttgaggcgcttggcctcgttgacgtcacttgggtggtagtatccttgcagaaacagtgttattgtggcccgccaatcttcagtcataatgaggttgacgatgtgatggccttcagcgtcattggttacttggaatccctctggggtgcatacggctggtgtgccaatgacgtggtagaacacgtctgagggcaatgtctcgcctctggcccgctgcttatccaaca

SEQ ID NO: 82079 - DNA, 430 bp, Zea mays
  unsure (1)..(430): unsure at all n locations
tgaagccatggtaagtagcataggccaataatatactatattgtctcaagcctagctactggtgcataggtttcaccgaaatccaaaccttcgacttgggagtatcccttggccacaagtcgagctntgttccttgtcaccacaccatgctcatcttgcttgttgcggaacacccacttggttcctacaacattttgattaggacgtggaactaaatgccatacctcattcctagtgaagttgttgagctcctcttgcatcgccaccacccaatccgaatcttgaagtgcttcctctaccctgtgtggctcaatagaggaaacataagagtaatgctcacaaacatgtgcaacacgagatctagtggttacccccttatgaatgtcactgaggatggtgtcgacggggtgatctcattggactgtttggt

SEQ ID NO: 82080 - DNA, 374 bp, Zea mays
  unsure (1)..(374): unsure at all n locations
ngaaccgagggcccgcgtcaccggagaagccaaatcgcgctcaccggagttcaagaactcgccggcgcgcgtggaccgggtaaaccccttcaccatttcccgattcgttgcgcgcatggcctctgtgtcaccccgtgaagctcctcgtgcccattaattgaactctaccgccatggtttggccggagcatgcgtcgccgacgatccccgccgcctgtgttcgtggccaggggagctcctaccacctctggcgccgacccgcacatcgacgtgaccgttgcgacctcctgaacatcaccgaccacctcgccggacctccctcgccgccggtaagccgcgccaccctttcctttcccgcggctactgtttcagttg

SEQ ID NO: 82081 - DNA, 421 bp, Zea mays
  unsure (1)..(421): unsure at all n locations
gatttgcataagaagaggccagtcttatgcatgcttaattgctaagactagcatgggctggctgtggcatcgccgcttagcacatgtggggatgaagaaccttcacaagcttctaaagggagaacacgtgataggtttgactaacgtacagttcgaaaaaaatagaccttgtgcagcttgtcatgcatgtaaacaggtgggaagagcgcatcacagcaagaatgtgatgaccacatcaagacccctggagctgctacatatggacctcttcggacccgtcgcctatctaagcataggaggaagtaagtatgcgttatgtattgttgatgactcttcccgcttcacttgggtgttctttttgcangatangtctganacccaagggaccctcaagcgctttctcattgagagctcaaatgag

SEQ ID NO: 82082 - DNA, 482 bp, Zea mays
  unsure (1)..(482): unsure at all n locations
tcngctatggtgtaaatttaggcagcaaaacagtgctatcgctatgaatgctgtggtaacttcacacctacccgtctgtttatatagtgccgtangtgggaaggtgaatcgtcaaggtctcccgcatcgaacaaacagtcacccgcactcgctgaacggtgggccacagggtccgagagggtgaatcgccagggcgcgcgtaactgctgcaagatggagccaccttgagcgcggattattntaatcgtttctcgccaacgagctcagggaaggtgtttttcggatcttcggcatcccgaagcctagaagactntttcacgaatcaagctcgttacgaanaacgatctagcaccgcgaaggggctactnttggnggtattcttcgtagccgaagatcctaaagaaggagaacaccttctgcagattctctcangagcagcaccatagctattacctatataaagcttcgcacaatgacagatc

SEQ ID NO: 82083 - DNA, 387 bp, Zea mays
  unsure (1)..(387): unsure at all n locations
gtaatcgacaatgctgactacatctntctacacgctctcgggaagagaatgtccgaaggagaaatgttggaagccagacactatgcgcgaaagtagagatatccgaacggtgcctcggtttctaatgggagtagtgaagatgatttcttatactgtctcccggacaacatataaatattcgtttgtcgggagataagtacaagcatcggattctcgaagctagaaaacaacctttcaattctgtcaaaggatgatcttgctgacaacctatcatacaacatcataaaggtatagaagttaactttgaatttgaaaatgaagtattttatttgctatactcaattctgtcctccccttgcatggcttaattcttagtaatgcccttag

SEQ ID NO: 82084 - DNA, 353 bp, Zea mays
  unsure (1)..(353): unsure at all n locations
tctcacttctgcttcatcttaggccgtacggttggactgatatgaccatagggggcatgatgttctgctcagtacacaacagaatacttggcatgtatgagttctttccattacatgtgttgtttcgtccttctaaaagtatatattgtagcatttttcctatgccaactatgcctcaagctgagaattagtagcatgctatgcaaattattctacgacttattcttatgcgttgctcggattcatgtaatgcactaaccatttatcgaataatttgtgcgccnctgcctcttcctcacttctncnctgccacatcgcggagctccgtctataccgatcgctgcgccatcctt

SEQ ID NO: 82085 - DNA, 477 bp, Zea mays
ggccttcgcttcagtctatcatccgcagtccaacggggtcgtgtagcgcgccaatgggaaaatattcacagctgtcaaaaagatgctcctcgatgaaagaaaaggcagatggaccgatttattaccggaggcagtctgggcgctaaacacaaccgagtgcagggcaaccgggttcactcctttccgccttctatacggatcggaggcaatgaccccgcaagaaataaagcatgggtccccgcgtacagttccgtccgccgtccccgacgtggatgagccaacttcaaaagatctcatcgacggagaccgggtcttcgccctacaggccctaaacaaatatcaagcccagaccaaaaaatgacgcgaccgcgcagtcgtcccgagggagttcagcgagggggacctcgtactcatccgaacagctcggacggagtccaaggtgcaagtggagcccaggtgggagggccccttcatagt

SEQ ID NO: 82086 - DNA, 322 bp, Zea mays
tcatagccctagagcgcgagctctgcacagggtatactaacttgtatatcacccgtgcctccagatatgagcgagcttgtgatcctctttgactagacatactatcggcacgctattgactggctctcattaatgcttgtggttcgatgatgaatgcgtcgttcctgataatgatcgaggcatattgtatcaactgtgctgctccgctttgttcctggaatctacttacagtaccatcatcaacaactggtggcatctggtcgcgtgtatggtcagttctctccacacgccctatggataacgggacatctgatgaatatgt

SEQ ID NO: 82087 - DNA, 479 bp, Zea mays
  unsure (1)..(479): unsure at all n locations
ctcagcttctaagggagaacatgtgataggtctaaccaatgttcatttcgaaaaagatagaccttgtgcagcttgtcaagcaaggaaacaggtgggacgagcgcatcacagcaagaatgtgatgaccacttcaagacccctggagctgctgcatatggatctcttcggacccgtcgcctatctaagcatagggggaagtaagtatggtctagttattgttgatgacttttcccgcttcacttgggtgttctttttgcaggataagtctgaaacccaagggaccctcaagcgcttcctcaggagggctcaaaatgagtttgagctcaaagtgaagaagataaggagcgacaacgggtccgaattcaagaaccttcaagtggaggagttccttgaagaagaagggatcaagcacgagttctncgctccctacacaccacagcaaaatggtgtggagagaggaaaacaggacctcattgcat

SEQ ID NO: 82088 - DNA, 484 bp, Zea mays
  unsure (1)..(484): unsure at all n locations
tggagaagcagaaatctttgaagtcttggctgtcaaatcgcttgtcgttgtcaactgtgagttcggacgggactccgaatcggcaaacgatgttttgccagaagaatttctgggcagtcttggatgtntatttggacacagccctcgcctcgatccatttggtaaaatactcgacagcgacgaaggtgaacttgaggttcccctgtgccgtgggtaggggcccgacaatgtccaggccccagcgttgaagaggccatgtgtgggcgattagcttcgtgaattgcgaagggcttcccgagcgtggagaaaatttctggcaggcttcgcaggaccttgtgacccgatttgcggcgcatatcatggcgggccagtagaaaccttgatggattacctttgcggctagttccctaagccctgcgtgagagccgcaagtcccgatgtggactttcatgcagaattggacgccttcggtctcggtgacaca

SEQ ID NO: 82089 - DNA, 417 bp, Zea mays
  unsure (1)..(417): unsure at all n locations
taccacatntgaagcatgagcgcttccncgttgtcttggtcttgcttggctgccccttgcgaccctgtagcgccgtcttgaatctcttgatgatgagggccatctcttcatcattaagtccggccgcctcaatttgtgccaccttgctcggtagcgcctccttgcttcttgttgccttgagagcaagaggttgaggctcattgattggaccattcagagcgtcgtccacgtacctcacctccttgatcatcattcgcccgcttacnaaatttccaaggaattcttcgggcgacattatggtgtacctgggattctcacgaatattattcaccaaatgaggatcaagaacggtaaaggaccttagcatcagtcggacgacgtcgtggtccgtccatcgcgtgcttctgtagctcctta

SEQ ID NO: 82090 - DNA, 474 bp, Zea mays
  unsure (1)..(474): unsure at all n locations
actcagctaatagggcggagaattttcactgacattngggagaatggcggtcgagggatggctcacganataataaagaaaagtgaaaaagatactcatgacactagagaagcgacaaaaacagctganaaggctgcggagcttgagagacgaataggtattacttaacgatttttacttttgatgtttacttttgcgacttcgaaataatttatgttttctaccgcagctgaactatctcctccccaagagcccttcgagccactggccgaagcagaggcaaaagaatcatcagaaattattagcatagctgaaaccattatggacgaagtcgttactcaactgctgaccgaagctgcagacaaagttntgaaagaagaagaatagatattgtaaaaatattgccagaatattaatggaacatttgctggactatgctngtaatacttggtactcatgagttcttaatggaat

SEQ ID NO: 82091 - DNA, 395 bp, Zea mays
  unsure (1)..(395): unsure at all n locations
tgaccacgagaataaactngaatcacttttatacccctgngataccagagaccctaattggaaccctagaataccctgaaaccaaacccttggggcttatgtacaaaattagcccacttttgggttaaagtgtcaaaaccaagccaaataagtattttaagtcatttggttcacaaatatatggacttgaaagccaaaccctaagttttggactcatttgcaaaaaggacctcgatnttgattcctatgctaagtctgagaacagggttgtaggcccaactttggggctgtgtagctttcaaaatagtgagaattcatgttaggtgaccacatcanagctgaagatcaatcatatgagaacaacattgtttaagggttcaagccatggtcttatg

SEQ ID NO: 82092 - DNA, 457 bp, Zea mays
  unsure (1)..(457): unsure at all n locations
gtctcactttgtgaatggcaaggctctcatggttcaggataacgaggggtacatgatataccctgtcggatatcccgaacacaaaattatgagaattctctctaggaagcctgactctggctctcatgatgctnttatgtataacagtgagacatctatctctaggcaatcaacccatgttaatttgcctaaagagaaatctcctatagcatcaaatgaacctatgatctcatttaagactttcgatgcttcatatgttctaactaacaaatcaggcaaagtagttgccaaatatgttggggccaaacacaagggctcaaagacttgtgtttgggtacacaatgcgcttgtttctaatgtcaaaggacccaagaccgtttgcgtacctaagaacacggcctaccattattttgtagggttatgcatccggaggctcaagttggatcattgatagcgg

SEQ ID NO: 82093 - DNA, 502 bp, Zea mays
  unsure (1)..(502): unsure at all n locations
cttgagtttgagggccctatattgcatatgaccagtgactctctcaatcaaagactntgcaacccagatttgtctaggtctactcttgtttggtggacctaagaatgttactttgacctttccatttgcaacctttcttataacataatgagcattgaaagcaaatggtcttgagtgcttaagcaagggagttggtggattggctctgcagttgtgggcaaaatgaccttcatttccacactcaaagcatttgataggcctgtgagtctgctttggcttgtattgagtggtagctctattttgcacaaaagcattgtatccaataccactcttgttgtttttcatgacagtgttcataagcagctcattntggaggtattgacccttgttgaacttttgcacacttgttgcaagatgttcattntcactttntagtttcttgacgctcattttaagcctttgattatccactcgccaactcattgtgaaatcattgntctca

SEQ ID NO: 82094 - DNA, 426 bp, Zea mays
  unsure (1)..(426): unsure at all n locations
cagtttctcaattggtagtcatgcttcacttgtcttgaganagcaaaatntcagttggtatctaataatagaaatctcttcaattagtatctttcaagatcatttttcaaaaatagtatccatttcaaaaccctcttgaaagctaggaggagaatttcattcagggagagttttatttagtcaaaggaaaagcatttaaaacagggggagaagtttcaaatctcgaaaatgcttcttgcaatcttattcatatacctttgactatttgcaaaagattntgaaaagattttccaaaaagtttttgcaaaaataaaacaagtggtgcaaatgtggtccacaatgctaaagaaaagaaaagcaatccattcatatctagtaagaaatatcaatggttcaattccaagtaacctatgcactaccatatgc

SEQ ID NO: 82095 - DNA, 293 bp, Zea mays
tattaacgccgtctgtgccgcaatctccatctatatgggacccgcatatgagaaatacttaaatagtaggtctaatcgcgaagctttggtatagatgatcccatgatcaagaaccgtaccaccttcaaggtacagtctcctttatttgctaaactgtgggaaattgttttgatatataaaaatagtgtagtcatggcatatctatgcatgccgtgtattaggaaaccatgactacgaaacagatatggttgagtccatataacttctctatgtgcgtgttatctgctctctta

SEQ ID NO: 82096 - DNA, 414 bp, Zea mays
  unsure (1)..(414): unsure at all n locations
tcggcttccccgcttatccaatcaataacgccctcgggatcgcctcgaatgaagttttcttcggaagaataggcacctagtttggcaaagctacttttcaattntttcacgcaatccaaggacttctcgaagcacctttccttggattcgcgaagctcctcaacatttttctctagcctagtttttgaccattcactaatttcttgattagcttttgcaagtgcaaaattctcattagcttcggcgagccttttctgaaggtcttcaacctcggctttatgagcttcggctngagcattggatttcgcttcatcttccttcactttgctcaccagtgaatgtagaantttgtccttctccaaggcntttgttctcagcttgatgacttctgatcgaaggttgtcgagagctatc

SEQ ID NO: 82097 - DNA, 443 bp, Zea mays
  unsure (1)..(443): unsure at all n locations
tcctgtggaggtcggatctttttgtctttgcctttcttgacatacacagccttgccaagacgagccacttcttgctttaattgttcattttcctttgcaacctcatcagagcatgtctctataacaatattctcaacatctactagcttgcaggggttagaatcatcaatgaagtcaaagcaggangtagaatcatctttcttaataatttcaagaattgcaactaaagatgctgctggggtgctaccaatgttgtctagcttagtacttagctcattattgtgtatgctaagaatttccattgtctctaacaaaatttcaatagcttcttgggagctagctaactcatccttagagttttcattctttgtaataaagctatcatcagtagcagtggatggagcactagaatctaatagctcaagtttagttgatagctcact

SEQ ID NO: 82098 - DNA, 428 bp, Zea mays
  unsure (1)..(428): unsure at all n locations
ctataaaactaagctcttgaagagcatccttaatatccatgttatagtgaatattgtagaactgagatcatctctttccttcagggtaagtttctttcagacaatgaagcttataacaggagaatagaagcaagagctcgaccatatgtcataatagaaggggagttatacaagcgcggngtctgttccccattgctcaagtgcttattcagatccgaaggtatagaattaatgaaggacatacatgcaggtctgtgtagatctcacattggatctaggcccatgcttgggaaagnttttcgccaagggttntattggccaaaggcagcttctgatgcagcggatttagttcaaaagtgcgaaggttgttataaatgtgcaagagatcaaaaacaaccttcgtctttaactcaattaatacaacccac

SEQ ID NO: 82099 - DNA, 420 bp, Zea mays
  unsure (1)..(420): unsure at all n locations
actaagctgggaaggttcttcatccncacatgtgctaaacggcgatgccacagccaacccatgctagtcttagcaattaagcatgcatctagaccgacctcctcttttgcaaaatcaactaaataaagtttgccgtctaatacacccttaaaagctaatgaaccatcacttcttctaaagacagacacatctacatttgtgaataaatagttataccccatattacaaagttgactcacagacaacaagttatatccaagcgactcaactaagaacacattagaaatagagtgctcggatgaaatagcaatttttcctaaccctttcaccttgccttggttcccatcaccgaatatgattgaatcttggggatccttgttcttgacgtaggaagagaacatcctcttttcccctgtcatg

SEQ ID NO: 82100 - DNA, 471 bp, Zea mays
  unsure (1)..(471): unsure at all n locations
cagctgtgaagttcttcatccgcacatgtgctaagcggcgatgccacaaccagcccatgctagtcttagcaattaagcatgcatctagaccggcctcctcttttgcaaaatcaactaaataaagtttgccgtctaatacacccttaaaagctagtgaaccatcacttcttctaaagacaaacacatctatatttgtaaatagacagttataacccatattgcacaattgactaacagatagtaaattatatcccagagactcaactaataacacattagagatagagtgctcattggatattgcaatcttgcctaaacctttcaacttgccttggttcccatcaccgaatatgattgaatcttgggaatccttattcttgacgtaggaggtgaacatcttcttctcccccgtcatatggtttgtgcatccgctgtcgataatccagcttgagcccncggatgcataaacct

SEQ ID NO: 82101 - DNA, 372 bp, Zea mays
  unsure (1)..(372): unsure at all n locations
cctggtgccaagcaggatttctatggatcctgaatgttaccagccaggcgtcagtatctgatcacccacagaagcagccccagcgtcgcaagcctggaacgcgtgagcgttgtgccaatgtccgcgtcacatgaccggagtgggtgtagttgtgtgcgtggtgttcctgtccctgtctgatggaccagctgcatctggtggagggtattattatgtatcgctaactctgaactgngaaggcatgaaacaaacagaggatatatctattccggccagttcctatctctctctctctctggcgtccttcttctccaaccttttccacatttccttctgttagtatagatcggagctgctaacacagagatcatg

SEQ ID NO: 82102 - DNA, 434 bp, Zea mays
  unsure (1)..(434): unsure at all n locations
tctanagggagaacatgtgatagggttgactaacgtgcaattcgaaaaagatagaccttgtgcagcttgtcaagcaagtaaacaagtgggaggagcgcatcacagcaagaatgtgatgaccacttcaagacccctggagctgctgcatatggacctcttcggacctgtcgcctatctaagcataggagggagtaagtatggtctagttattgttgatgacttttcccgcttcacttgggtgttctttttgcaggataagtctgaaacccaagggaccctcaagcgcttcctcaggagagctcanaatgagttngagctcaaggtgaagaagataaggagcgacaacgggtccgagttcaagaaccttcaagtggaggagttccttgaggaggaanggatcaagcacgaagtctccgcttcctacacaccacagc

SEQ ID NO: 82103 - DNA, 386 bp, Zea mays
  unsure (1)..(386): unsure at all n locations
gaacttcaagtgcaacttgttagttgctagaacatcaatgcccccactgtagttgttgaatctaagtctagctctaatgataattcttgcaagcattgtgccaaatatcatgcttcttggtgtataactaaccatgcaaggaagcaaagcccacaggtgaaggtcaaagaaattttgaaaagatgctctagcaatgatgggttaaagaaagttgaacccaagtacaagtcccttaagcccaacaagggtagaagggggcttgggttcaactcatccaaggaaaaccctagcacagtgcataaggggtggagatcccccaagttcatagagggaaccactctatatgatgccttggggaggatccactcatcanatgacaagtcatc

SEQ ID NO: 82104 - DNA, 434 bp, Zea mays
gttagtatataagctatttggatgacaaatctacataattgtctagtttgtatatatgaaaagttggcatcaatcatccgcttcatcttttgcctctatgctaggttcagctctgcatttgtgaaacctgatccattctcatgttatttgacgtaccagaaatactagagttcattctgtatatttttggttttggctgtttatacaggatcaaattaataatggtaaattacttgtcaccacaattgaatgttagtaactgcatacctgtcactggccgtgaaacagttgctaacctttttacatagcaggttgctggcattggacattggtaaagtgcagagatggccatggacgtcgatccccgatatcccgcggaaaattactccattagagcatggcgatgtagaattttcttctctcatgcagatata

SEQ ID NO: 82105 - DNA, 510 bp, Zea mays
  unsure (1)..(510): unsure at all n locations
tcggcgaccgcaacttcggtagaaagatctgcttctgcagctggtgtcatctntgatgctgaggccagcggtggcgtttcctcaatagcttgcataacaataacaattcttcgcttttttggcccaaccacctttttttctgccgaaggatcgtncttcttctgtaaaagcttcgtcagatgcggccctagaggacttagcagcttgataggtaaggattcagtcattacctttaaaatttcttctacttcggcagcagaaggcgttgaatgagcttcttcttctatctcagccatctttggctctggagttgcagttttcctcttcttcgaagtcgccaccttcgactcaggactgtattntctcttcttcagagntnttttggcttctttcaccatcctagcagcctgtctactcagaacgctgacaacccttttcactttgtctcttcggcatccttgcttagtncgtcataatcagggtattcaaaagttaaagcgtncattactc

SEQ ID NO: 82106 - DNA, 432 bp, Zea mays
  unsure (1)..(432): unsure at all n locations
taacgacgatgagtgtgtctctcagctggaatngaatgagatgatgtgcacgatgactggagctnttaaaaaatatcaggactctgcgacgacatcctatgagcagcttgatcgatgagttgctgaacttgttatatgcatggacgtactggaggctcgtcccccaccaccaactccagccccagctcactctcctgtggacgacgacgacgatgacgacgatgtttatgcaccgctgcgacaacgcctcgcacgtaatcgacaaggtatgggaggtaatggtagacgtcgtcattaatcctgaaccagaccatgatccatttgctaagattaagttctctattccaccgttcatgggttcttatgatgctgaagcttacttagactgggaggtgactgtagaacanaaatctaattcccatcttgttcctg

SEQ ID NO: 82107 - DNA, 363 bp, Zea mays
  unsure (1)..(363): unsure at all n locations
acttcccactttcctggatgagcaacaagcaccttcattgagtaatgcaagagtgagatgaaacatctcatcaagcaatattgttttgatgagatatttaaaccacaaattgaattaatcaacattttaaaagaatcacaattaagattagaaatacttgtagatatagaactcagtagtcccaatataaccaataccatctcatttcctcgaacagccatagtaggttctataacacttccctgcgtcaacaaaacctgcanatatcacttcaatgtatgcatagaaatgcaaagtgtaggtactctgtcttcatacctctgaggatataaaaccacatcatctgcaaatatcacttcaatg

SEQ ID NO: 82108 - DNA, 502 bp, Zea mays
  unsure (1)..(502): unsure at all n locations
tgtggaggaccagattatccaagcatataagtntctagatgagaagtggtcacctaagttccgntgatgaagcaccaaaaggccaatcaaggaagggatccatggataagtttatatgaggaaggtttgcgtgttggcatcgatgcttcttcaataagctagctgccaagcgaaagctagaagcccgaagttgatctttgagtagccagaatcagcgtttgcaatcggcaaccggatgctcctcaaaggccagattntgttgaagctccatctcctcgaagagtctgcaaagtgaagatatgtagctgaagtaaattaaagttatacccataacccttctaagtcgaatctcgaggacgagattcattttaagtggggtagatctatagcaccccaaaaattcaaatcttgaagttttctcanactcgctctagattcaaatgaatgtaatttcgttcagaatgtttgttgcgagtgatataaacaataaatatagtggcta

SEQ ID NO: 82109 - DNA, 493 bp, Zea mays
  unsure (1)..(493): unsure at all n locations
cttgacattgcttggcttccttgttggaacccaatgccatccttaatgctctngcgtctcctattatagagcatgcttctaccaaatttaagattttcattttcatgttcatgctcggcaattttagcatttaatattgctatgtgatcattttgttctttaatcatagtaatgtgatcatcaatagcttcaacatttatatttctacatctagtgcaaatggaaacatgctcgacagtagatgtagatggtttgcatacattcaattcatcaatcttagcatttagactagcattctcatctctaagacatgaaattgaatcattgcaaatgctaagctccttagttaggttttcacattnttctacttctagaagcataagcattttcaatttaacaatctttntgttttctttaacgagcaagtcctcttggcattccaagagatcatncttctcgtaaatggttctatttaattcattaattttttctt

SEQ ID NO: 82110 - DNA, 408 bp, Zea mays
  unsure (1)..(408): unsure at all n locations
tttgcagctgcacaactataggtcttgttttctctctttgtcctcatggatttccttaacggcaaaactttgggcaatattggagaaaggagtgaagaacggtctcatgaattgaatgtaatcggtgcatgatttgtgcggtaggcctctggccgtcctcctgtatctgttaagtcgtggtgactacttttgcctagttttggcctanagtgtccatcaatttgtcagagatcaaactagccgaacctttgccttttgctttgtccagacacattagctatattgcangtgtacatatgtacttcagaatacttgaacttggcaaatggcgatcgctaggtgatatcacgcttccagatgtctgcaggttaaatgcatttacaactatgtncatgcatcaatgcaact

SEQ ID NO: 82111 - DNA, 366 bp, Zea mays
  unsure (1)..(366): unsure at all n locations
tcgcacctctgaactaactcggcggcatcacttntcgctggtggtcaatatatatcccacctgaagaccttcccgactagtgtcttggacgctgcgtgtattccacattgtccagcatgaacctcatccagaagttgcttcccagtagacgatagaatgcatttcatgaagattcctgatgcgccccttctgtatagtgtctccccaatgagtgtgtagtgagccgactgtctggcgatgcgctcggcttgcattttatcggctggctcctcttcattctttatatatctgatgatcggccttctccagtcatcagagcttgactctggttgattcacgatattacactcttctgtctgatccatt

SEQ ID NO: 82112 - DNA, 443 bp, Zea mays
  unsure (1)..(443): unsure at all n locations
tagaactccggagaccaagtatactggggctnggcttttgatttgtcattcgaatttctcctgcacaagcgccgcacttactgcaaagtgcgaagctgccacatacaatagtaacggagcccctggcgcaggtggagttaatgttgttatatcaatcaagtattgcttcagctcttcgaaggctttctgttgagctgggccccattgaaagacttcggctgactttagtatttcaaagaatggcaagtttctttctgctgatctagatataaatctattcaatgaagccagccttcctgccaaccgttgggcccccttctttgtgctcggcggttccattcgaaggatggcttcttgcttgggttagcttcaatccccttcgttgaaaccagacagccaaggaacttacccttcttcactccgaaggcacacttttcaggatt

SEQ ID NO: 82113 - DNA, 412 bp, Zea mays
  unsure (1)..(412): unsure at all n locations
tcacgggctactggcggagctagccgaagcactggctcgactttatggtggctggagtgggctagccacagtggccgaagctctggcggcaatggcgagcggaattgagctcgccggagctaaagaaagggggctggccggtgatggtgagtccggagcgaattgaggtgcgcccggtgaggctttatangcgcgggcgggcactgccgatggcgtgggcgcgcggcggacttgaccggacgctagggtgagcgcgcgcgcgggttgggcgagctctggcgtgccgaccagtgtcgaacacgtgtgcccgtgcgttctgcccaagttctggcgcgtgtggtcgctcatccgagcctgctctcgcctagggcagagcacaaaacctcttctcctcatacaagctaccattctt

SEQ ID NO: 82114 - DNA, 296 bp, Zea mays
aaacctctgatacataatatcttgtggcctgcctcatgacttgaccataactcttttactggacaaacgctggacttaccactgagtgcgaacctgtctcatataataataaaggagcccctgacattgctggagtcagagatgatagacctatcaaatactgctacagctcttctaaagcactctgctggaccgtgccacattgaaagacttgcgctgacttcaacacttcaaagaatggtacgcttctctctgccgagcgatatatgagactattgagagatgccaatcttcct

SEQ ID NO: 82115 - DNA, 489 bp, Zea mays
  unsure (1)..(489): unsure at all n locations
atattcagaggtctgacagtattcacccgaagcgccctctccgagccaatcagcccacttctcctgctgaggggcgagaaaagaagaagagacgtcttcatcgagtgtctagctcggatcaagatgccggtccttctgttcctgctgctgaggaagtgccagtgtctgcctttactgaagctgaaaccaatggtcgtgatcagaccgctgctgaccccaatgggtgtgatcctgctgaagttgaccccaatgggtgtactgtccgcgttgttgatgaagaagaggatgaaatccctctgattcggaagaacagccggcgttacatagctagtggtgaaagtagtggtgttccttctcctgctttgtctgccctcattggtctgcaagaattatctctgacgaacttcgatcagactcttgaanacatggttccagatgatctgttgtcagagccgacagatggtggcgcgatggattgttgtgctgatg

SEQ ID NO: 82116 - DNA, 442 bp, Zea mays
  unsure (1)..(442): unsure at all n locations
tatgaagattcttcatcccaacatgggctagtcggcggtgctagagccaacccatgttagtcttagcanttaagcaagtgtcgagttcagctctattaaaatcaactaagtatagctgaccctctaacactcccttaaatgctactgaatcatcacttcttctagagacagtaacacctatatccgtaaaaagacagttgtagcccattttacataattgagaaacggaaagcaaattgtaatctaaagaatctacaagacaaaacattggaaatagaatggtcaggtcatatagcaattttaccaagtcctttgaccaaaccttgattttcgtccncgaatgtgatagctctttgaggatcttgggttttctcgtaggaggagaacatgcttttctctccagtcatggtggttgtgcacccgctatcaatgatccaacttg

SEQ ID NO: 82117 - DNA, 255 bp, Zea mays
  unsure (1)..(255): unsure at all n locations
attggaactcatacatactgatgtgtgcggaccaatgagtacgacagctaggggaggattccaatacttcataaccttcactgatgattttagtagatatgggtatgtctacttaatgaaacacaagtctgaatccttagaaaagttcanagagtttcagaatgaagtagaaaatcagcgtggcaagaatattaaagcactgcgatcagatcgcggtggtgaatatttgagtcatgagtttagcaatcatctaaa

SEQ ID NO: 82118 - DNA, 397 bp, Zea mays
tcacttcattatttcagctcatatattaagtaatatgtgttcattaacaggagagaactgctaagcctcagtcaacatctcgtttgcatgaacacaagttgcatatggcattgctgaggaagcataaaagttctactgtccatacaagtacagaacttgaaccaaggaagaaactggaagaggcacgtgaacgcaagccaactcatgaaaacagcgtgaataaacgaagcagagaaagaacctacccttctagtgaaatggacagtaacctcttcaggataaaggaagtgacctcctctgtaaataagcaaggcatagaagtcaatggttcaactaataatcctacaaatggtggctatgaaatggtgaaaacttccacagggaccaaagatgatat

SEQ ID NO: 82119 - DNA, 506 bp, Zea mays
  unsure (1)..(506): unsure at all n locations
caacaactagatatcatcctataggacattcttgtgagaacactcctatatgagctgatatttggtcgcggcctatgagatgttggaattctctatgaatctcatgaaagagacgtaaaagaatgacttataagctatacaaaagaggaggtaacctaaagggtgccaagtatcagtcaaattcttgagtgaaactagttcctgcaaaactgtctagttaaggcagagtccattgtgtggttgtgtgctaagtttaagtaaatgttaaacttaatagcctttaccataaaaccggtatataaacaacatttgtggatgtcaagagaataagttatgttttgcctttaagatctggtcgagaattattggagattaataggctcgggccatcttcttaaaaggtaaaattataaanaaatactatagggtcactcatgcatggtgggagtgggagtgatgacttttagttccacgtgaaaagcagaatgtcgtaatccaacctaaat

SEQ ID NO: 82120 - DNA, 413 bp, Zea mays
  unsure (1)..(413): unsure at all n locations
aaaactcaagcttaccacattgaagcatgagcgcttccnctntgtcttggtcttgcttggctgccccttgcgaccctntagcaccgtcttgaatctcttgatgataagggccatctcttcatcattaagtccggccgcctcaatttgtgccaccttgctaggtagcgcctccttgcttcttgttgccttgagagcaaggggttgaggctcattgattggaccattcaatgcgtcgtccacgtatcttgcctccttgatcatcattcgcccgcttacgaattttccaaggacttcttcgggcgacattntggtgtacctgggattctcacgaatattattcaccaaatgaggatcaagaacggtaaaggaccttatcatcaatcggacgacgtcgtggtccgtccatcgcgtgc

SEQ ID NO: 82121 - DNA, 495 bp, Zea mays
  unsure (1)..(495): unsure at all n locations
actcctcgttgtaaggctcctcctagaccacatgttcttctcctatgtgtgtgtttatactatcgcaagggttgagctcacaaaagatcatagctcaacaagttgtggagaataatgtgcatgaactcaccaaatgtgggagttcatgtgaagtgtatggctgatcaacaaataatggttaaagctgagtgttcgctttaataagtgggtcaaattttattaacagttactaaatgtaagtagataccaaaccagagtaataatagatcataattaataataaaccacaatgcgatgcaaatgacacatngagtttaattccataaattaatcatgcgagagtcctgagctgctcatgaccgcgagcacgacctagtatactatgttacactctgcagaggttgtatcctatacccacaagtcatggtaccccatgtgccacggagttgtacgggccccatacacctctaccaatgaagtgagacagggtaacat

SEQ ID NO: 82122 - DNA, 504 bp, Zea mays
  unsure (1)..(504): unsure at all n locations
ctaagcttcgaattatagcgtatccgaagatgtatgatcgaaccgacttatttatggtatgactntttagtccataagggtctgagccataattgtaatcttttataaggggtatgattgtaatttcttacaggctgcgtcctgtgcctacaaatagtgaacagtattcctttactgttcacagagtcctgtaattgctaacgcattactctggaattattgntttctgccaacgcgaaggtataaatgtaatcaaaaatcatgtnctaatatttcaatttatattataaaataagtaaacaatgttatttattcttggtattctctaacgtntatatcttatttcatttcacattattttatctctgaacacgaatgtatgaccttcgtgatttatcattcataacctctgtccgaagctcatanatcctcatggaataatgcttcagcgacgaatggctttatcagttacattctatgttgccttgtctaattatagcattt

SEQ ID NO: 82123 - DNA, 474 bp, Zea mays
  unsure (1)..(474): unsure at all n locations
gttctgtgccaaaataacagaaagttaatagatggttatttagttttgattctctaaagttcaatgccaaaaaggcactttctactgccttgttatttgaaaaatgtcaaacaacacaattcatattattcctatgttcctcataacaaaacattacttatcccaaaggttgcggagttctcaccttgcggttaattttgtagggtttttctaaattccccttgatttcttaacataaaaggtatcctatatatcttatactaaaccagggtataataaaattttctagtgaactacactaaataagtatgctaacaaaaataggggtgctccctggttccttatntaaatcacctttcctaatttctgtaactgtaagcacaatgtgaaataaatggcaaactctaccttaatgtggtatacagacgggtctatcattcttgagtatgtcaagatgtgatcaaccacttcact

SEQ ID NO: 82124 - DNA, 433 bp, Zea mays
  unsure (1)..(433): unsure at all n locations
tttttttcaaatgtgaacttgacaaataactgctaatgtgtganaacaagttcaccattgagtctagctcctatgatgcgtaagatgtgtgaggtacttattctatcaagtctatggcaggttgctatatctcagccttagagtctttctcttccacttgatatgctccaatgaatttgtgctaaaaatcgtctccaagattgatgaaacagaaacatcaatacgatttgcactaccacaccacattgtattgagattgcttctcatttcacatgggatgaacttgagaagtgtagcttatgataaaaactaatggtttgaccttctgatcgtgttttgacatacgctccacccagatggaatttaggcataataatgcttacaacctctcgtaattacatgctttatatctcactttgtaaatgaatgaaat

SEQ ID NO: 82125 - DNA, 467 bp, Zea mays
tgtgaatacctgtcatagcaacagcacatgccagctcattttctacagactataccaataacttggcctttcgcatgctggggattggatatgatcggacctttcacgatagctcaaggaggatacacccatgtattggtggcaattgacaaattcactaaatggatagagttccaacccattgcctctttaacctctgctaaagccgtggaattcatacaaagcataatattcatatttgggataccaaacagtatcatcactgactcgggatccaacttcaccagatcagaattctttgacttctgcgagacaaatagcattcagatcaagtatgcatctgtagcccatccgagagccaacgggcaggttgagcgagccaaccgaatgatattggatgcacttacaacaagggtctttgataaaaatgaagaattcgcaggataatggataagagaattgcctta

SEQ ID NO: 82126 - DNA, 321 bp, Zea mays
  unsure (1)..(321): unsure at all n locations
catgcagtatttctagaaaatcatatgactaaggtaagtatggtacctcgagaattataccttcaaaaaagagggtgtatgccctgatttcgatagttgaagaaccttttttcttgatacctatagagcttccatcatcaattgccccaattgtgaacaaaagccctgctacaaatggtgtatcgccaagcacaacaatcagtgagcaagttgcttcatcgcccgtgtngtcttagccttangagccagcaacacacaggaactcagaaccagagatgatattgtgctagtgatacaccatacagcagctctacaacacat

SEQ ID NO: 82127 - DNA, 323 bp, Zea mays
tctcttgacttgcggccactgttcagatggcgtctttggagatgatcaactctggccatagttcctgtggcgctctgtgaggcgctccttgctgatgttgctcgttcatacgatctggctggagcgaaattggttcccctgggaggacaagtcaagtctggtggattgaaaccacgttcattcgggttcaatcggatttcgttccggttcgtcgcattctgatcagccggcggcattcatatcctcggggcagtcggtaacctgcttattttcaaaatattcaatcccagtcgggtatctgcgtggctttctccggcctctcg

SEQ ID NO: 82128 - DNA, 444 bp, Zea mays
  unsure (1)..(444): unsure at all n locations
tgaggcgctgtcgcaggccaacaggctgctcccggngtcgctgtcggcggacgccatggccacaaccgtgagcgtgcagccgcacccacagcatctggtcgaggtcgaccaccaccagagcctcgccgccgccgcactcgagggcgagcaacagctcagctctgccggtgaaggaggctntttcgagcggcccaaggtagatttttactctccatcagccgaggtcgccgccgccgccgccgccagcgtagagatgaactcggtcgccccgatggttgttggcggctacgcgggcgccgccggattcgggcctcagcaccatcacgacgagctctacgacttcctgtacagcaagtacggatcagtgggcgggctggcgcacgacggcgggcatgttccaacgtngccagagctgcagtgcccggacggcgctgccgccgtcgt

SEQ ID NO: 82129 - DNA, 377 bp, Zea mays
tcgcacctctgaactaactcggctgcgtcactcttcgctggtgtgtaatagttatcctgacctaaagaccttgccgactagcgtctaggatgctgcgtgtattccacatttggccggcatcggacctcatccagaggtcgcttcctagtatatgatagaatgcatcttatgacgacgcctgatgcaccccttctgtataatgtcttgccaatgagagagtagtgagccgactgtctggcacacgctcggctgcagtttgtcatttggctcctcttcattctttatcgacctgatgattgcgcctctccagtcatcagagactgactatgggtgatgcacgatattacactctactgctagatctattgagatgctcg

SEQ ID NO: 82130 - DNA, 487 bp, Zea mays
  unsure (1)..(487): unsure at all n locations
tcagcgccctcgcttccccttgcgcncagcccaccaggccattctctcctggccggcccagcaagcccctttcccacaacccattgccacgcgcggcccacctggcccacctggcgcatgcgcacccctgctccacaccctagctagtgtgctcagtcgccccagccgtcgggctcgcttgtcagtggcgctcagcccactgttcctcttccccacggaacaaccggcaggccgttcccttcggcacccacgtcgcgcacacacggagccgccaaccccccgcctcttctacctcacctcacaccagcttccctctccctggctggacacacgtagcgaccttctacattctctctgttaccacgcctgcgctactccatcttatacgtcctctctaccttggctcgcccttattcctatgcgcgcacaagacgtgatcgtccctcgccgacccgttcggagatcatgtcgcgtcgaacaccgaagc

SEQ ID NO: 82131 - DNA, 367 bp, Zea mays
  unsure (1)..(367): unsure at all n locations
ctcgtcatctgacaggaatntactctgaaggtcagatattatctcatttctccaatcttncctattaacaggagatatattgaggactgctctttcaagaagttccaccgaaggtgcttttattgtttcgaataacacatccgaaagtaaaggcagcccctgtgctgctgacttatctaacaaatcagcatgctcattttgtcctcgagggatattcttaacagaaaatccttcgaaggaagcttcaactcttcgaaccatatctagatatttttcaagcttcggatctttagccttgcaactcttgtcaatatgacccgaaacaacctatgaatcggttttaagtatagcccttctgattcccatt

SEQ ID NO: 82132 - DNA, 439 bp, Zea mays
ctcttgatctcctacggtccaatgtagcgaggagctatactttccttgattcccaatctctggacacccttggtgggtgacaccttaagataaacatgatctcccacctcaaactgtagaggcttccgcctcttatcatgatagctctttagcctggcctgagcagcttctaggttcttcttgatgatcctgacctttgcctctgcttcaagtaccaaatctagcccacaaagttccctctctcccgcttgagaccaattcagtgtggtcctacaccttctcccatataatgcctcatagggtgccatcttcagactggactgatagctgttactgtaagacaactctgccaaagaaagacacttgtcccaatcctatccgtagtgtagtgcacatgcccgacacatgtctttcaaaatctgattcaccctttctgtct

SEQ ID NO: 82133 - DNA, 463 bp, Zea mays
  unsure (1)..(463): unsure at all n locations
tcgacaaaccaactgattntgttntgcagacttcgcttgcggctacatcgtttgctgctgtagagaagaagcccttccatttcttacattgctggtccatattgaaggatcaacctatatggatggaccagcacatgagcactcaaaatcctccacccaacccaattggtacccaatcaaatactattgactgtgatgctgctgaagaatcagctccttcaagctttacttccaaaaggccgcttggtcgtgattcagcaaatgaaaaggcaaagaagcaaagatcagaaaacacatcatccactgattcggagtacctaacacgaatgggtgagctctctntggaacggttatctgtctacaaatcagtagcttcaactgaggagaagaagtnggagttcatgaaataacaggagaggcagaaactgatattggagaggaagaagctaaacttatagaagat

SEQ ID NO: 82134 - DNA, 464 bp, Zea mays
  unsure (1)..(464): unsure at all n locations
tgtggaagctccacaggctctcgaggaagctatccattggctatggcgatgctgtgggttgacagattagactggccacaacggtcgtgcttgggcagtgatggcgggcggtggcgctcgctgtccatggcgaactccggtgatccctggcttgggcggngctctatgtgcgcgagtgcaaatggctaaggcttctgggggcacttataggcgaggggaaggtacagacgcgcgaggcatggcgaccactcgtggggcgcgcgctgccacggccagtccgcgctcgcccggtcaggcaagcgatcgaacacgtggcctcacttagtctggtcattntcaaatgctaattggcaagcgatcttctcttaactctcccaaatccctgcacatgatgtggtctttggtggttactctntggttctcttacaacactcgagtgggattgatctcggaatcgcgagata

SEQ ID NO: 82135 - DNA, 375 bp, Zea mays
  unsure (1)..(375): unsure at all n locations
tgcttcggcaggagagcttccgaacgtgaatacttgttcggtccacggagtcgctntatccgagcgcgagttacttatcttagaaggtgatgagtgaggtatccgtatcccggaggcgtaggagtccctcggctcggtcagccttggctgcttacgtgtactccgtcgtttccaggatccgctttccgaagtagtcaagaagcaccaaagtagtcctgctaaaaagagatcctttttcgaggaanaattcgacgcagagggggtctcccnccttttagcccccgagggagggtcgggctntgccgangcttggccgacccttccctgacgactaaactttagcgatgtgcgaggtatatgaacaacttggaaaca

SEQ ID NO: 82136 - DNA, 340 bp, Zea mays
  unsure (1)..(340): unsure at all n locations
attcaccggctgagcatccacttgtttaatagatcctgaatttcaacagcagcacactgggtgtccgacactatagcctccaactctttctccaaataccccaacgattgttccctatcattgtccatgcaattacatttgtagcgggtgcaagggctgctccgaccgtactacttgacttaaggctcgtttatttggtgcgctggcctggtgatgccggcagataggtccatctagctatcacgtgtncgaaatggacggacttgagaagctcacgacatctncatttgcacgcttcagcagtacatgctttagaagtctcacacctgagtcctacatg

SEQ ID NO: 82137 - DNA, 422 bp, Zea mays
  unsure (1)..(422): unsure at all n locations
tttagttgttagagccacctttggaaagctntagtgtacaacatagctctctagtccacctattttaagcctaccaagttttctacggttagttctgcgtgggattataaatagcgggtatgaccatgcatcgttcatctcttgcactctcttgctgatatccacacacttgagtttgaattaagcctctactcatatttgcttgctagtgattgcattanttggtgagattggagtgatcttagttcatttgcttgagagattgcatagagtgacaccagagatcaagtttggtgcaggttttcttggtactcttggtggttattgtcaccgagaaggtttggagcagtgatactctgtcaaaccactgaattaaagattttgaggtgcttcgtaggtgttntngaagtgtcactgggatc

SEQ ID NO: 82138 - DNA, 459 bp, Zea mays
  unsure (1)..(459): unsure at all n locations
tgtgaggagcactgtggtctntgctggctggctcccctatcattatcttgtgtagagttgtgaattgacctaacgtgccttggatagaacctacctccgaagcccctggtcatttcagaaaacctgaaagcctcctcccttctttgatgaaaatcattatcggcccgaatatactcgtccatcttttggagcagcttctccaaagtttgagggggcttcctagcaaagtactgagctgaaggtcctggccgaagccccttgatcatggcctcaatgacaatttcgtttggcactgttggtgcctgtgccctcaaacgcaagaacctccggacgtacgcctgaaggtattcttcatgatcctgngtgcactggaatagagcttgagcagtgaccggcttcgtctgaaaaccttggaagctggttagcaacaagtccttcagcttctgccatgaagtgatc

SEQ ID NO: 82139 - DNA, 437 bp, Zea mays
  unsure (1)..(437): unsure at all n locations
tcgagggatcgaagatcaagcgttggcgaccatgtgatcaatctctctgttttctatgangctgaagatcctgagcatctgtttggtgaaagcaagtgtcctctgacctattatgtcccattcacttataattcattgtcccgcattactcaattgaaacctaaggattgactagctttctatttaccttatccttgtttaccttttgggttatcatggttagcattatgctattgctttactttaatcaatgaacatgatgtgaatattatgatacgatgatgttatcccgatgatgttcttgtgatactttacggggctcaggctgctttctgagtacctctccataaggacctgttcgtngagagaccaccctggataacagtgcaaccatgatggtgaaatgggacgcccttagctaattaattagaggaact

SEQ ID NO: 82140 - DNA, 475 bp, Zea mays
  unsure (1)..(475): unsure at all n locations
tggcttgaccacacgagagcatccgcacccttatcacattctatggtttaacattagcggtaagttcaaggtaacaaaaacaacaagggtgcattcttctattggctcttaccatgactctgctgatttcgatgtggtgagtatggatgcttgctctgttttactgggacatccttgggagtntgatattgatgctattcattatggtagatctaatagatataatttcatgcataacggaaagaaaattgtgttgcttcctatgactcccactgaaattgtccactctgaacatgagaaaaagactaatgctaagcaaaaaagtgttttgaactctaaaaatcagcagcatattaagttaaaaactcctactctgctagccactaaatctgatcttgatgagttacatgcctctgttggactntgctatgccttagtgtgcaaaaatgctttctattccattgatgatacgtct

SEQ ID NO: 82141 - DNA, 437 bp, Zea mays
  unsure (1)..(437): unsure at all n locations
taaagccatggtaagtagcatacgccaataatatgcgaatagtctcaagcctagctacgggtgcataggtttcaccgaaatccaaaccttctactngggagtatcccttggccacaagtcgtgctttgttccttgtcaccacaccatgctcatcttgcttgttgcggaagacccatttggttcctacaacattttggttaggacgtggaaccaaatgccatacctcatttctagtgaagttgttgagctcctcttgcattgccaccacccaatccgaatcttggagagcttcctctaccctgtgtggctcaatagaggaaacaaaagagtaatgttcacanaaatgagcaacccgagatctagtagttacccccttatgaatgtcgccgagaatggtgtcgacggggtgatctcgttggattgcttggtggactctt

SEQ ID NO: 82142 - DNA, 464 bp, Zea mays
  unsure (1)..(464): unsure at all n locations
gacctataaaactcagcttcgcatgacagcagaaaggggaaccgacctaaagatgaaaatgcacattagacctcgaagaattactatagagttattagcaaatgtaaagggcatgaatgtaattctacatgggctgcgtcccttgcctataaatagatgaacagtactctcgtactgttcacgctgacttggcattcgctttttgtgcatcacgcctgtacccttactttccgtcaaaccgaaggtacatttataatttgttattgtggatatggtaatacaaataaaaataagttgatgataatgtttatattgctctttgtatcttggatatgaatccttcctcgtcatttattgtgcttacgaaggtcttttccttcacaaccttcgtccggaattcattatatccgaagggacataatgtcttgaaggacgaaggactntaacatttaacaatcttcatg

SEQ ID NO: 82143 - DNA, 520 bp, Zea mays
  unsure (1)..(520): unsure at all n locations
tactcagcttacacctctggactaactcggcagcattgttcttctctgttgtccaataganaccagatctaaaagccttcccgaccagagtcctgtatgatgcatgtactctgcactgcccggcatggatttcatcaacagttgcttcccaatggctgagtgaatgcacttcatgaggattcctgccacacatgttctgtacagagtgcctcctacgagggtgtagtgggctgactgccttgcgatgcgtttcgctgtagccttgtcatctggttcttcttcatttntatgtacctgatgataagctctctccagtcattgcggtccgattctagttggctcaagatgttgcactcttccacctgatttgagaggatgcttggttgtgatatttgttggagaaagatcccnggtggagcctgtgcccgactggatcccagctttgacaacgcatctgctgtcgcattgcggtctcttatcacgtgatggaactccaatccttcgaatttgcctacagctt

SEQ ID NO: 82144 - DNA, 463 bp, Zea mays
  unsure (1)..(463): unsure at all n locations
tcgtcatctgagagagacttaccctgaaggtaagagatgatctcggttctccaatcttcgctaaagacaggagatatattaagaactgctctntcaagaagttccaccgaaggtgcttttattgtttcgaaaaatacatccgaaggtaaaggcaccccctgtgctgctgacttatctagcaaatcagcatgctcattttgtcctctagggatatttttgacagaaaacccttcgaaggaagcttcaactcttcgaaccatatccagatatttttcaagcttcggatccttagccttgcaacttttgtcaacatgacccgaaacaacctgngaatcnagtttaagtatggctcttctgattcccattgcttttaactttcgaagacctagaatcaatgcttcgtactcagcaatgttgtttgtgcaattaanatcaagctntgctgcataacaagttntgactt

SEQ ID NO: 82145 - DNA, 377 bp, Zea mays
  unsure (1)..(377): unsure at all n locations
acgacagtgtggcagcgttcgagtcatcgtggtccacggccttcggtgtggcagaggctggtcagcatggattgcgccactccatcgagggaggtgttccagcggaagacaccagtttggagaagaattgctccaccactggatgcggtggctctggcaagtgatgaagaacaggtgatcgctcacaataagagaaagagaagacattctaagaaaggtcgtggagctatggagcataaaatctcgngcgcgcaagatttcgaggctctgcacgtncctccttgctctactgctgctgctcctaggggggggggccgctccaggctcncgtgacaaatacaccctcctgtgtggttgaaattctcattgccatggct

SEQ ID NO: 82146 - DNA, 474 bp, Zea mays
tcacacctctggactaactcagctgcatatctacttgctggtggtcagtacaaaccagacctgaagaccctcccaaccagagtcctggatgctgcgtgtatcccgcactgcccggtgtggatctcatttatcaagtgcttcccagtaaccgatagaatgcacttcatgaggattcctgttgcgccccttctgtatagcgcctccccaatgagagtgtagtgagctgactgccttgcaatgcgttctgctacagatttgtcatccggatcctcttcattccttatatatgtgatgattggctccctgcagtgattacaatctgactctggctgtctcaaaatattacactcttctgcccgactaaagaaatactcgggcatggtacttcttggacgaaaacccaggtgggacctgtgccgactggatcctagttgacaaccgtgtgctgcgcgtgcaactctctcactgatgaaa

SEQ ID NO: 82147 - DNA, 330 bp, Zea mays
tatgaaatattatgatctgcataagttaattttgatgggactcaatcgtttaccccagtttggctatctttataccttgttaccactgacattttgggtagtacatgctattgctttatgtggttttgggtatggagatacacattattcatgatcaggcttttattatcaatttgttatttactgttcatgataagatcatattgttaattggaacatggagaaccacccgggaaaacagtgctaccacaagggtggtatgggacgcacttggctgactaattaggaaagctagtggatgactaccttacttgaaaggggaatgacagt

SEQ ID NO: 82148 - DNA, 364 bp, Zea mays
gaccctgtggtttgggtgaacttgtgatgttgttctttgttctagctttctaatttctgttgcgaataggttcggtatgtcattgatgctttcgttattaaacatgctgcttctatattatcttcatctatctgaatgatgtttcctttcatgtcactcttattggaagtctagaaatgccaaaggatgacatatggcttgtcacagctatcctatctggtctgattgaataatgtgcgaagatataagtcacgtaagtgatttaatttatattacccaacaataaatcacaacagttggtcttgctcgatcatggaagcagtggctatcaatatttgtgaatcagatctttcttggcttctat

SEQ ID NO: 82149 - DNA, 489 bp, Zea mays
  unsure (1)..(489): unsure at all n locations
agctntgaccgctagtccagcggcttctagcttctgcaccataagcttcntggaagcacgcagatccctgatggtggaatccttggtcgataacagctgtccaagtcgcagaacctcgtcttgagatacttgcagctcgtgacgatgatgatccaggtccgacatcgtgaagcggtggctcctctccaatatggtcaagggagtactagcgtcacggtatagcctgtccagatcgtcgcgagaggctgcgagtgctcgtttctcctccttcgaacaagaagaaacgttcagtacccaatcaacaataacatggcatagtcaaccaagggagtntacctcatgcgccatcctttcagagtcaagctaggcattgagggaggaattcataagcgtgcaccatccaaagaagcagagacctangccaagtcggcttgactctgagaataattctcctcaaggtcagagcaccatggggccatatccgacaac

SEQ ID NO: 82150 - DNA, 225 bp, Zea mays
  unsure (1)..(225): unsure at all n locations
agcacatcacaacacgaatgtgatgaccacttctagacccctggagctgctacatattgacctcttctgacccgtcgcctatctaagcataggaggaaagaagnatggtctaattattggtgatgacnttttccgcttcacttgggtgttctttttgcacgataagtctgaaacccaagggaccctcaagcgctttctcacgagagctcaagatgagtttgagct

SEQ ID NO: 82151 - DNA, 478 bp, Zea mays
tgagcatgcaagcttgtgttgatcataatgggctttcatccatatgccatatttccactatttcatcttgcgacctttgctcaacgtgaccttctactccacttagctctacttatctcagtgcaagactactcaacctgtgaagatactttggattaacaggtaagatagctgtctttgaaggcaaaactctaacagggtccacacaaatattgtgcctccaaggttaagtgcagctcttgtgccctctacaaagacaatgaagcttgacatccatcacaagaagatcgactacagaaaaaggcatgtgacaaggtagatatgtaaaaccttcatcagagaactcaataaatgcaaaccaaaaaactgagtggtgatcaccgcatattctgcaattaacaacctaagagagatagctcattaatagagtagcagtctcttgccgatgatgacctgtcttaactgacaacaaaaatgt

SEQ ID NO: 82152 - DNA, 477 bp, Zea mays
  unsure (1)..(477): unsure at all n locations
agcttctgaagttggtattagttcttcctgttgcaactgctgttgttgagagggtcttttcttcaatgaaccacatcaaaagcaagctaagaaataagatgggacaagaattcttgaatggttgtttggttacatttattgaaagagaattcttcttgcaagccaaggataaagacatcatcgctcgttttcaaaatatgaaggatcgaaaacttgtcttataatgtaagcttccttatcatttagatatttattatcctttatatatttcaaatattggctcttatcactggcattgaagaattttattttttgatcaattttatgcccatctaaaacttgatnttgtttgttagatattatatgtatgatataaacttggctggtgttcctatgtaatatattaccgtattatatatatatcgaatagttagactntatatcggattatatataccagnttttttacttctatca

SEQ ID NO: 82153 - DNA, 329 bp, Zea mays
  unsure (1)..(329): unsure at all n locations
tcactgaactcggatactgggtgttccgcccaatacctaataaaaactcatcatgtcaacacggtcatttaaaccttgatctcacggtngcactaagctatgagcctaatgaaatgtaatgataactcaagcctgatagtgctaccctctcctctttacttgctgcttgttgtcatgtggggcacttggaggagggatggaagtcgttcangagaatgagggatgaagtcaagataattgttgaaatggagcactatgtgtacatggtgaggcttcttgcaacatttggccagctgaaggaggcatatgatcttatacagacaatgcaa

SEQ ID NO: 82154 - DNA, 403 bp, Zea mays
  unsure (1)..(403): unsure at all n locations
agctaatgtgcgcatagcttcgtaacgaacattttctttctacaattgtattccgacccactcaagcttcgtcgtgaccataatcttatatacttgtaatccaattccgaagatacctgctcacacatatcacttggaaaacattgttaaatcatgtntttgaggaccttcggaagccgaacgcccccaacaacggaccaatgctattacaaaatataagagaaaaaacatgtagttatacaagctctatctattctttttctttattactagccaagttataattccattactacctacctntcaccaccttgtggatactcatgtattgatgcccattaaatcaatgccttaacttttctagcacgacaaaggtgacgtgcagtcatacaagatgtcacat

SEQ ID NO: 82155 - DNA, 365 bp, Zea mays
  unsure (1)..(365): unsure at all n locations
accagcacccatcccgcgaccacgatcacgtggtgtgggagatccgcgacccagagattgatgcgagggttcgggcacagcacgttcacgaaaagtggagggcgcatttctcagacgccctgctggattgttggatcaatccaaaagggggtgtaagatagatgtcttgtgcctttctcataacgaaattgagtcaccacttcaatcatcttcatgatgaagggggcgtgaagacatcccttnaagagggaagcatgcagcatgaataatttcttgcaaatcatgtcaaaacattgatactttctgaaatattnggcttcataaatgagagcaagactttgctctctccacgatgtcatttgata

SEQ ID NO: 82156 - DNA, 416 bp, Zea mays
  unsure (1)..(416): unsure at all n locations
gaatctgatatattatattccgctaacatagacctagccatatcaatgagagtgctattctttctttcaacaataccatttcgttccggggtatatttggaagagagttcatgtttaatacccttgtcatcacgatattcatcaattcttgcatttttgaattccgacccattatcacttctaactttcttgatatcaaaattaaattgattctgagccaatatagcaaatgacttgaatgttncaaacacattagatttatctcgaagaagattaacccaagtaaatcttgaataatcatccacactcacaagacaataagaattaccaccaatactcacaaaagatgtgggcccactataatacatgtgaagtaattacaaaggtcgatgagtggacatttgactttatttgga

SEQ ID NO: 82157 - DNA, 390 bp, Zea mays
  unsure (1)..(390): unsure at all n locations
acatttaccattcttttcctttttggggtcactgatggccccttttggtattttgctgtcccaatgattgctgtaggactcaaaacttctgatgttntggagcccttcagtgcttctcttacctcctcaattttctctgtgagcggcgcttcggttntctcttttgtttctgacaacaaaatagttgattggtctgattctatctttggtggcacttctgccgtttctgcgatctctggcaacaaggctggctcgattagtntttcagcttccgtggctgaagaagtttcccggttaactccgacaccgaaactggttcaatataacgcagcccgtgcgtaagaacctttatctttttcttttcggtctggctcgctaggagcagctcac

SEQ ID NO: 82158 - DNA, 246 bp, Zea mays
  unsure (1)..(246): unsure at all n locations
attgagcattcacttaatgtggacccatccttcagaccaagatagcataggcttcagaaaatgtctaattgatagccgaacgtgcacgaaatgaataaagagacttctcagtggcggtgttatcagagaagtaacctatccagagtgggtgtcttacaccgttatggtgaagaaagctaatgggaaatggagaatgtcattgatttcacagacctcaataagcatgtccgaangatgagtccctta

SEQ ID NO: 82159 - DNA, 478 bp, Zea mays
agctctggacagaggcatgtcatattatactctttcttattctagacacacgatcacctgctgttttggggatatctcggccgctcatatttgagcttaactggttctctcgagaaggtctccatgccaaagttatagaaatttggagcaggccattaaaaggtagcaattcactccaacgatggaatcataagttgtgtgctcttcgataggctcttcgggggtgggcaagccacaccaacggggtttacaaaaggaagacaaagagtctgcagttaacaataaatgatctatacatatccgcggaagttacaaacctgacagagctcgagagggaacaactagcccaagctcgagatgatctagctcgcctcttgagagaggaggagatcatatattttcaccgagctaaagtgaaagacatccttctaggggataataacactagatactctcagttgatcgcaatggcaacata

SEQ ID NO: 82160 - DNA, 362 bp, Zea mays
  unsure (1)..(362): unsure at all n locations
catgctagncttagctatggggcgtgcatatagaccggnctcttcttttgcaaaatcaactaaataaagtttgccgtctaatacacccttaaaagctagtgaaccatcacttcttctanagacagacacatctacatttgtaaatagacagttatatcccatattgcataattgactcacagatagcagattatatccaagagactcaactaaaaacacattagatatggagtgctcattagaaattgcaattntacctaaaccttttaccttgccttgattcccatcaccgaatataattgaatcttgggtatctttattcttgacgtaggaggtgaacattntcttctcccccgtcatat

SEQ ID NO: 82161 - DNA, 350 bp, Zea mays
tggagaaaggatgtgatctgccagtggtgcagcttgatcaagtggttggcgttagagttgcatacctgttctttgctcacagctggttatatgtgcaggaatgtgaagcaaaatttgtagagatacagttgcggtactctgcatgcaagttagcgtatacttgaacatgttactttgtaccttcttgcccattacatgaccttgcaatttggatgggtggcgtagaatactactgcatatcattagatatttagagatgtcgaaataataagattttccagccttctttaggagttagataaggacatcgtgaatctttaaacataacagctggtagagtatttgctatt

SEQ ID NO: 82162 - DNA, 484 bp, Zea mays
  unsure (1)..(484): unsure at all n locations
acctgcngcatgaagcttaactcttcgaaccatatacaaatacttttcaagcttcggatctttatccttgcaactcttgtcaatatgacccgaaacaacctgtgaatcagttttaagtatggcccttctgattcccattgcttttaacttccgaagacctagaagcaatgcttcgtactcggcaatgttatttgtgcaactaaaatcaagctttgccgcataacaagttttgactttggaaggtgaaaccaacacagcagccgctcccgctccgaaggttccccaagatccatcacaaaacactatccatgcttcgttgtctttattcgtttcttcctcctgagtccctggcgtccagtcagcaatgaagtctgccaacgcctgggactgaatcgaagatctatgaacatattcaatacaaaattcgttgagctctgcagcccattttccaatccttccagtagcttctcggttcctcataata

SEQ ID NO: 82163 - DNA, 427 bp, Zea mays
  unsure (1)..(427): unsure at all n locations
ctgcaagcttaatactagaatcagcaactcacagacagctgggatttctatacatttcttcttatcctatgaggaaagataatcattgtgaaaaatcacaaaaatagcagtcatcttgatcactttgctttggagcggtataatttacaatagaaaccaaccatacctgtgaggtaaaacaaaaatagaagtcattgaacacttgaatagcagtatgtaatgcataccaaggtagaacaaccttgcttatcacagcatgtgtctcttctgtggatctcgtcatacgccgctgtgcttcgcggtgcctttgccatagcatgtgcctttcctgtganggccctgatttacacctcgattaacaaaagaaataaggtctggttctgatacacctncatgtatattatctcattcatggtattcttggaaa

SEQ ID NO: 82164 - DNA, 354 bp, Zea mays
tcgctccctcgttcagctggacctctgcggcgctgcgtacaggagactaacatgaacagcgatatctcaacgatagaatgagagaagggcaaatctgtctagtggagaagagaatacacgtaaaaaaatacaaaagagaggaaatgcggtaaatggtgtctttatcaattagaagacgtttgtagacccatttttgcgagacagttatttaaaatggtattattgcgaagcgtcacgtttatagacctaaaaatacaattgtctcattcgatatcaatagagatctttggatatccagtgccctccaacaactgtatcatcctaatttctgactgatacgaaagtgaaaatggc

SEQ ID NO: 82165 - DNA, 412 bp, Zea mays
  unsure (1)..(412): unsure at all n locations
agctngtggagattcttcatcccaacatgggcttttctgttatgccagagccagcccatatgagtcttagcaatcaagcaagtgtccagttcatctctattgaaatcaactaagtatagctaaccctctaacactcccttaaatgctactgaatcatcacttcttctaaagatagtaacacttacatctgtaaacagatagttgcagcccatatcgcataattgagaaacagaaagcacattgtaatctaatgaatctacaagagaaacattggaaatggaatgatcaggtgatatagcaattttaccaagtcctttgaccaaacctcgattttcatccccgaatgtgatatctctttagggatcttggattttctcgtaggaggagaacaattctttctcctcaggcatgt

SEQ ID NO: 82166 - DNA, 289 bp, Zea mays
gatggtgatggcgcctgttaatgcttttttaccactcccgggaatcgcttggtacgccactgcatatctgtcccccgctgatgaaacgggccccaccttgtggttttcggccacgtgccaagcgccttgttgctgctgcattggttaaaataataacttctgtttttcgcagcgactctaaggaggcgcactacatgcgtgcgttaacggttcgctcttttctcacccgaagttcggcacacacaccgtatgacttgtggacccgggcccccatgtcatagactgggtt

SEQ ID NO: 82167 - DNA, 487 bp, Zea mays
  unsure (1)..(487): unsure at all n locations
agcttatgaagattcttcattccaacatgggcaagtcgactatgccagagccaacccatgttagtcttagcaattaagcaagtgtctagttcagcttggttataattaaaatcaactaagtatagctgaccatctagcactcccttaaatgctattgaatcatcacttcttctaaagacagtaacacctacgtcagtagatagacagttgtagcccattttgcataattgagaaacagaaagcaaattgtaatctaatgaatctacaagaaaacattggaaatagaatggtcaggagatatagctattttacccaaacctttgaccaaaccttgatttccatccccaaatgtgatagctctntggggatcttcatttttctcatatgaggagaacatcattttctcctctgtcatgtggtntatgcacctgctatncaatatccaacttgatccaccggatgcataaacctacannaacaaattatg

SEQ ID NO: 82168 - DNA, 437 bp, Zea mays
agcttctaaagggagaacacgtaataggtctaacaaatgttactttctaaaaagatagaccttgtgcagcttgtcaagcagggaaacaggtgggaagctctcatcatgccaaaaatgtgatgacaacatcaagacctctggagttacttcatatggacctcttcggaccagtcgcctatctaagtataggaggaagtaagtatggtcttgttatagttgatgattcttcccgcttcactagggtattctttttgcaggataaatctgaaacccaagggaccctcaagcgcttcctaaggagagctcataatgagtttgagctcaaggtgaagaagataaggagtgacaacgggtccgagttcaagaaccttcaagtggaggagtaccttgaggaggaaggaatcaagcacgagttctccacttcttgcacaccacag

SEQ ID NO: 82169 - DNA, 304 bp, Zea mays
tcatttggtccattgaatattactggccccttcggatattataactcctttgcataatgggtggcctcatgaatttcttcctcagataactttttccccgaagcatgtccgatgatgtaatcatgcatgccggcaagtgcttctgggatgaccgtgtccgtttcttcaactaatattggttccggaaattttactgcttccgcttcaaaaggaatgtctttgaagggctctgaaggccagcttcagcttcagcttgttgagccgaagcttcagtagaagcttcagcaacttcaacactcttttt

SEQ ID NO: 82170 - DNA, 374 bp, Zea mays
cttctaaagggagaacacatcttatgactatactaatgttcatattgagaaagacagggattgtagcgcatgccaagcaagaaagcaagttggtgcccatcatccacacaagaacatattaacgaccgacaggccactagagcttctacacatggatctattcggcccgattgcttacataagcatcggcgggagtaagtattgtcttgtaataatggatgaatattctcgcttcacttgggtgttctttttacaggagaaatctcatacccaagaaacattaaagggattcttgagacgggctcataatgagttcggcttaacgatcaagaaaattagaagcgacaacgggacggagttcaagaactcacaag

SEQ ID NO: 82171 - DNA, 415 bp, Zea mays
  unsure (1)..(415): unsure at all n locations
gtcttagcaattaagcatgtgtcgaggtcagctctattaaaatctaccaagtatagctgaccctctaacacacccttaaatgctattgaatcatcacttcttctaaagatagtgacacctacatcagtaaagagacagttgtagcccattttgcataattgagatacagaaagcaaattgtaatctaatgaatctacgagaaaaacattggaaatagaatggtcaggagatatagctatnttaccaagacctttgaccaaaccttgatttccatccccgaatgtgatagctcgttggggatattggttnttctcgtatgaggagaacatncttttcttccctgcatatgggtngtgacccgctgtcgagtatcaacttgacccccggtgcataacctacatcacaatttagtctt

SEQ ID NO: 82172 - DNA, 338 bp, Zea mays
  unsure (1)..(338): unsure at all n locations
ttgcaggacgtcgccctcgttctttagacgactgtgcagtcagtcctcgacgtgacttcgtcgccgctcgtcgaccaaaaggtaccgaccgattcccatcctacgtcattaggattcagcctcaacccgcctagcgacctcgctntggcggacgctctcgtagaggcgagtccaaaccctctggggtttcgcatgcggtcgccttgagaccaggtgacggacgtctcgacctacgggccctctgggtccgaggaagacgacgaccccagcatctgttgggatttctctggacttggcaaccccagtgccatgcgggacttcatgaccgcatgtgactt

SEQ ID NO: 82173 - DNA, 438 bp, Zea mays
  unsure (1)..(438): unsure at all n locations
agcttctaaagggagaacatgtgatatgtctaatcaatgttcatttcgaaaaagatagaccttgtgcagcttgtcaagcagggaaacatgtgggaggagcgcatcacagcaagaatgtgatgaccacttcaagacccctggagctgctgcatatggatctcttcggacccgtcgcctatctaagcataaggggaagtaagtatggtctagttattgttgatgacttttcccgcttcacttgggtgttctttttgcaggataagtctgaaacccaagggaccctcaagcgcttcctcaggagggctcaaaatgatgttgagctcaaagtgaacaagataaggagcgacaacgggtccgagttcaagaaccttcaagtggaggagttcctttgagaagaanggatcaagcacgagttctccgctccctacacaccacagc

SEQ ID NO: 82174 - DNA, 337 bp, Zea mays
  unsure (1)..(337): unsure at all n locations
ctgaggtcaacgttttgattaccacatcatctacataagcttctacacgcttggcccagtgatcggctaaacatgtttgaatggctctctgataagtcgcttccagcgttttgagggcaaaccgcatggagggatagcagaaagcactgaatggagtgatgaacgctgtttttttctcgtcttcctttgccaaactaatctgatggtatccggaatagcagtccaggaaagacagcacagaacatccagcggtggagtctaccacctgatctatcctatggagcccgaagggatcctttggacaatgtntgttgagatccgtatagtcgacgcacat

SEQ ID NO: 82175 - DNA, 473 bp, Zea mays
agcttgtgaagattcttcatcccaacatgtgcggttcggcgatgccacagccagcccatgttagtcttagcaattaagccagtgtcgagtgcaactctattgaaatcaactaagtatagctgaccctccaacactcccttaaatgctatggaatcatcacttcttctaaagaccgtgacacctacatcagtaaatagacagttgtagccctatttgcataattgagatatggaaagcaaattgtaatctaatgaatcaacaagaaaaccattggaaatggaatggtcaagagatatatgctatttacccaaacctttgaccaaaccttggttttcatccccgaatgtgagtagctcgtggggatcttgtgttttctcataagaggagcaacatttcttctccctgtcatgtggattgtgcacccgctatcgatgatccaacttgagcccccggatgcatatacctacacaaca

SEQ ID NO: 82176 - DNA, 346 bp, Zea mays
cttattgtctttcttgagctcttgatatgtcccatcatttgttcctagaaattctagctcaaaggaggatatgcttgctggcgagcaacaagcattagcacatggcaacatattttcaatttgaacacatgtgcaagagtgaggttgttgagattataagtttgctatcacaacctcatgagcaatatgtaacatgatatgatcatccataagattttcatgagaacatagaagtgtatcatgtttatcttgaaaagctagactctcaatttctagcatttctacttggtccttaagcacggtatcctattcactaattgagtgatacataataatgagttgtctt

SEQ ID NO: 82177 - DNA, 459 bp, Zea mays
  unsure (1)..(459): unsure at all n locations
agctttatcaaatggacgtgaaaagtgcctttctctatggaccaatcaaggaagaggtctatgttgagcaacctcccggctttgaagatagtgagtaccctaactatgtttacaaactctctaaggcgctntatgggctcaagcaagctccaagagcatggtatgaattcctaagagattttctcatcactaatggcttcaaagtcagaaaggtcgatcctactttatttactaaaactcttgacaatgatttgtttgtatgccaaatttatgttgatgatattatatttgggtctactaacgaatctacatgtgaggaatttagtagtatcatgacaccgaaattcgagatgtcgatgatgggggagttgaagtacttcttgtgatttcaagtanagcaactncaagagggcaccttcattagccaaacgaagtatattcaagatatttaaacaaatt

SEQ ID NO: 82178 - DNA, 448 bp, Zea mays
  unsure (1)..(448): unsure at all n locations
attttgagcccctcaggcatgcaaagatagcaattagttccactacggggtatgaagcttgtcttaggttcatcttcctttttcatccaaatctgatggtagcctgagtaatagtccagcaggctcatgagttccgaagtggctaccgcatctattaagggagtctattcttggcaaaagaaactcatccttctgacatgccctgttgagatatgtgaaatcaatacatattctccactttctgttggcctttttcaccatcatagtattggctagccattctggatatgtcacctctatggttactccgacactcacgagtcttttgacctcatttcttgcaccttcggctntgtcatctgacatcttctaaagcttctgctttcttggtctgatggctaggtccacattgaaagaacgctcgatgacatctctgttgacaccacat

SEQ ID NO: 82179 - DNA, 127 bp, Zea mays
acgagctcagctgaccattttttttatatgatccctaatggctcagagcaagaacctcgagaactaagtgtattaccactgctcagattagctcaaccggacattgaaaagccatttgatgtgtaat

SEQ ID NO: 82180 - DNA, 492 bp, Zea mays
  unsure (1)..(492): unsure at all n locations
agcttggacggtgttctgcgatgggttttgggtatatcttctgtgcacgagtagctgcggtcttagtggcaccttcaaaagtcaaaacatgttttgaagtcaaactggatttcagttgcacaaataatattgctgagtacgaagcacttcttttggggcttcggaaattaagggcaatgggaataagaagggccatcctaaagactgattatcaagtcattgctggccatgtggataagagcagcaaggcacgagatccgaagcttgaaaagtatctggatgcagtccgaaggttggaagcttccttcgaaggtttttccgtcaaaaatattccaagaggtgaaaatgagcacgcagatttgctagccaaatcaggggctcanagggctcccctactctccgaagtattnttcgaagcaataaaagcaccttcgattgagcttatggagagagcagtgcttgctatttctctagtacacagtgaagactgga

SEQ ID NO: 82181 - DNA, 435 bp, Zea mays
  unsure (1)..(435): unsure at all n locations
cacacacattgtatctcatgtatggcatgagtcgaggcttgaacacataaataaaaaagggtggcctatctacaatgtattaactatagtggacatggatatgcgtttcacttttgtaggtgttgggttgcctggttcttgccatgacatggcagtgctcaagaattgcattcatgcattacgatgtagtaaatctttttctgggtttaattgtttgtacatggaggtattatctagtggatgctggttactcaattcgcgaaggttacttgccaccatatcaaatcagagacatcacttagaagaatctaatcaaacaggagtagagagtgtgcangaaaaagttaattttcaacactcgagtctacatgatgtagttgaacgggcttnttgactactcaaatcaagtggcatgtgtacgaagactccatttac

SEQ ID NO: 82182 - DNA, 452 bp, Zea mays
agctcgtactgaattggagttcccggattatatcttaccgtgaccagtgagagtggcctccatacgatgtgccaaagtatgtagctgatccacgcagccgttggaacaagcgtggatccagacagagaaagaggcacaagatggttatggatcagatacctgttagtagtaggcggggaagaagaacaccatttcttaccgaccctgaatagtacgagtgtggcaagtgcggtagacttggtcacactcacgcacctgcagttggcagattagtggggtgtgtattattcgtaaatttaataatctggatattcattactagtatgtagttttattctattatatgaagtatttattttatccgcgctaacccaaattcgattgtgtgtaagatggcgcagtttcacctcctcacctcgtctacgacgagacgcaccgggcacgtattatgg

SEQ ID NO: 82183 - DNA, 462 bp, Zea mays
  unsure (1)..(462): unsure at all n locations
catgcaagctngcctcggccgagggtcttagatcttaatagagaacgcagcttcggattgcgccagaatcttcacatgttcgcatcctgccttctccaaaatagccgcaatttccctggcacctgagaaggcgcagacatctccacgaccactcaaaacttcctcagaggcttcggcttcgccgttgatccagtcgattggaccttcgggatcgcccagtacgaagttgccttcattcaaatatgcgccaatattggcgaagctggttattatcctttgtacacatgctacagattattcatagcatcttttatttgaagaacgaagctccacaactgttctttcccagtaattnttccagtagtcactagcgtctcggtcagcttcggcaatagcacattataacttcgcttcagccagctggttctgaagatcttcaatttcgcacttctgggcttcagc

SEQ ID NO: 82184 - DNA, 373 bp, Zea mays
  unsure (1)..(373): unsure at all n locations
cttcttcctaacaatagcataatcccacatcagcagtgacgaaatactggaatgttgccagaatggccattgtagaaatagagagcacagcacattaggtcctcgatgaattacctatagcacactcttcaaaatcaatatatgcatataataggggcattaaatgctgcattcttatttaagtgtattatagactagcatatgcaaaacgatgacaaggaccctatatggccagctgagctggctttgntggggcgctctaagaaatattgcacttaacaaagtttgggaccaaatctgcatttaccgtgcttatggggccttgacatgacaccgctaatgcatataatcaacataagaacacatggacata

SEQ ID NO: 82185 - DNA, 398 bp, Zea mays
  unsure (1)..(398): unsure at all n locations
tactatgttatgcactccttgttatggtgagaattatctacttcgccttactaaaatagcatggatggctagagatcttgatccattgtgagagaatacaccccaatgagaagcatatcaagatgtaacgagtgaaactgattcctattgaaacaaccacaagatacaatctggatgacaaatgaagattatgctaagcatttattgttgaaccatgtgtccccttctacttatatcatgtncttctcctagcatagcatcctttagtttatgcaagagatgactactcgtcagtgggcgcatcagatgaatgcatcccagctcatctagcatttcttgaacaaagggtaatatgtccattctatacacttgacgtttagctatcttgatcacacaca

SEQ ID NO: 82186 - DNA, 442 bp, Zea mays
  unsure (1)..(442): unsure at all n locations
tatgtgggattgcttttaatctgtccagnttacttcaacttttctaccagctttctgactgccatgaacaataatgggtccttggtctaaaggtatctttatgcacagatatgctggatgaagtattgcttcgaaagcattgagtgtcccacgaccgatgattgcattgtaggggtattccatatcaataatatcaaacacaacctgttcagtccttgtattatggacgaagccaaaagtcactgacatcgtgattttgccgagctctgcaatctgcctctctccgaagccacaaagagggtgtgtagcatcatgaatcttgtcctctgactcttgcatctgtctgaaagccttatcacatatgatgtcagctgcactgcctatatcaaccaaaacattgtgaaccagaaatcctttgatgacacagatataccatatcatc

SEQ ID NO: 82187 - DNA, 305 bp, Zea mays
  unsure (1)..(305): unsure at all n locations
cagttttattcattattaaataaacacgtgataaacacacaagccatcagacgagaaacaggtttagcatggaataatcgtatgggataaagggcaatgaatacctctattcgtagaacttttctatatagaaaagccactaatttgcatagcctaatgccctagtagctaatatacctcatatttaattattgaatgaganagacaattttacttaagacttacaataacatggcccattctctggttgtctgagacatggaatgtacctctctgctataaattctatgttcagctggaaaata

SEQ ID NO: 82188 - DNA, 417 bp, Zea mays
agcttatgctttcatcagattgctatattgttgtcttgatttccgtatgcagtatctcatgtgttgctacctttacgatgcaggcgggtttttggtcgcagttatttactaagtaagacaccttgcggtgaccattaaagagtaaccaatcaccctgtgtaggtcaatttttatctgcaagaactgatgaggccgcttggtaggagtaaatcgcttttcctgggaacgattgttggttagcgccgctactgtatgtatattgagataccttaacgattggtcttttggctgccatttcggtacatggtattcgtattggaggcataagtatcgtgtaatttgtgttatgactagtgtattgactattgaattatgagaagagctgctttagttgtaagatcacatgacacatccaag

SEQ ID NO: 82189 - DNA, 349 bp, Zea mays
cagaaacttggcgctactttcaagcattccatataattggtccttcatctcaacccttgaaatatattatgaggaacagagaagctactggaacgattggaaagtgggctgcataactcaacgaattcaacattgattatgtgcatagatcctcgatccagtcccaggcgttagcagactttatcgctgactggacgccacgggctcatgaagaagaagaagcaaataaagattccgaagcttggacggtgttctgcgatggttcctgtggaaccttccgcgcaagtgcagctgctgtcttggttgcaccttccaagtcagaacatgttatgcagtataactagatttc

SEQ ID NO: 82190 - DNA, 437 bp, Zea mays
atgagaatatgagcacacagttgaatttcactactgcttatcaccctcagactgatggatagactgataggactaatcaagtattataagatatgttgagagcttgtgcccttcagcacggagggagttgggataaaagtctaccgtatgctgagttctcatataataatagttatcaggccagtctgaagatgtcactgctcgagactctatatggcaagaaatgcaggactcctctatattgtgataagactagaggaagacaattctttggacctaaacttattcaagaggcagaagaacaagtccgtataattcgggagcatttgagggtagctcagaccaggcaaaagagctacgctgataatagaagaagaccactggaatttgaagaatgagactatgtgtatctcaaggtgtcaccactctcgtgaatg

SEQ ID NO: 82191 - DNA, 372 bp, Zea mays
gtcttactggcaccatcgtaagtcagaacatgctttgcaataagcttgactttagctgcataaataatattgctgaataccaaactttgcttttggggctctggaagataaaggcaatggtgataaaaagggcagtccttaaaacccgattccaagttatttctggacatgtcgacaagagttgcaaagcaagagatccaaagcttgagaaatacctggatacagttcgaaggcttgaggcttcattcgaagggttttttgttaagaatattccacgacgagaaaatgagcacgctgatctgctaaccaagtcagtggcacaggggctgcctctaccttcggaagtggtttttgaaacaataagagcacctt

SEQ ID NO: 82192 - DNA, 361 bp, Zea mays
tatattgtacgaaaatataaaataaaggaaataaaacaagttaattggaagagagccttcgacaatgacagtgctgttgggactgggattaatgggaacccaagaggaatgaatgaatgaatgaagtcgttgctggtaagtaatggtttgcatgtcatgcatgcacgttaagcagtgcattaaccggcggccggacagagacagatggaacggtcgtctgtccgtgcggccaggccaggccagcccagccacacgtactacgactgcatgcatgaggatggaatggaacgaacacaaaagcactgtgcagtttgaccggcgcggtgctttgcaatgcatgcctagctaacagacagctgga

SEQ ID NO: 82193 - DNA, 271 bp, Zea mays
gtgcgaagctgccacatataataacagaggagcccctggcgtaagaggagttagtgctgttagatctatcaaatactgttcagctcttcgaaggccttctgctggattggtccccattgaaagacttcggctgacttcatcacttggaagaatggtaacgttctctctgctgatctggatatgaatctattgagagatgccagcctttctgtcaacctttgagcccccttatttgagttggtggctccatccgagtatagcttcatcttac

SEQ ID NO: 82194 - DNA, 348 bp, Zea mays
  unsure (1)..(348): unsure at all n locations
acgcatgccaagcaaggaaatcaagatggtggtcattattcacataagaacaatatgacgactgacaagccactggagctccttcacatggacctatttcgtccgatagcttacataagcatccgcgggagtaagtactgtctaattattgtggatgactattctngcttcacttgggtggtctttttgcaggaaaaatctcatacccaagagaccttatagagattcttgagacgggctcaaaatgagttcggcttgaggatcaagaanataagaagcgacaacgggacagagttcaagaactctcanattgaaggcttccttgaggaggaagccatcaagcatgag

SEQ ID NO: 82195 - DNA, 343 bp, Zea mays
  unsure (1)..(343): unsure at all n locations
gaggccatatcggnctcgtcctctattatagtatgtgtagagaacggtataatggtatgggaagaacagacacagccgccaggaagagcagaggttgagtttcttcagatacaagtatttgcttcgtttcttgttacccctctctctccacactcgcattacatatacttggtatgcaagaagatacttagcgccattctggcccactaagccttacattagcccgtcgggcccgttcacttttacgtaggccaggtttctatggttctgtagtctttccaccatcttccttgtccgcaggagcctgacagcttgcttcctttgacatttgatcacacagtgt

SEQ ID NO: 82196 - DNA, 143 bp, Zea mays
aggtttgcgattcccggcatttactgcgtcgtctaatagagcaggcgctactcgagattttaaactaagcacctcgggacttgaagacagtctataattcgtttcgaatggaaacgatattttacttcggcaatttttaagac

SEQ ID NO: 82197 - DNA, 406 bp, Zea mays
agcttgaagccatggtaagtagcatagacaagtttatacgaattgactcaagcctagctacgggtgcataggtttcaccaaaatccaaaccttcgacttgtgaatatcccttggccacaagtcaggctttgttccttgtcaccacaccatgctcatcttgcttgttgcagaaggcccacttggttcctacaacattttggttagtacgtggaactaaatgtcatacctcattcctcgtgaagttgttgagctcctcttgcattgccaacacccaatctgaatcccttaatgcatcttctaccctgtatggctcaacaaaagacacaaaggagtaatgttcacaaaaatgagcaacacgagatcgagtagttaccccttatgaatatcaccgaggatggagttcatg

SEQ ID NO: 82198 - DNA, 384 bp, Zea mays
aaagaagaactattagaaggctaagggcgaggcacatcttggccaggagtgggaatcggaatggctctcgtccgactccgacaatgaaagactcgcccgcacccgctttaacaagtcatctctcttccccaacgagcgtcatacatgccttatggcaaaggagaagaaggtatgtactcgagactctacctatgcttcttcaagtgaggacgaatctagtgatgacgatgaaatagattattcatgtctatttaagggcctagatagaaccaaggtagataaaattaacgaattgattgatgccttgaatgataaaaataggcttttagaaaaacaagaggacttgctgatgtagaacatgacaatttgtagaactcaaaatct

SEQ ID NO: 82199 - DNA, 403 bp, Zea mays
  unsure (1)..(403): unsure at all n locations
acgcataactatacctttaatgtcttctcgtgctttcagaacatatcttacatagaaccattctgtcatccagccgctgggccatctctttcgaaaagttggcacggcgcagcttgacccacaccgagaaacaaaattgtaacagccaaagttatggtgatactggtctttaccccaaggtattggctcgtatgataattcgtgcatattgcagaaactttttgcatcaggcattagaccttggcttcgcacgggccacacgaagatattcagcctaatgattgcctccggggtgagatggcgaagatagacttcganaaatttcagcacctccacgatgaagctgctcaaaggaaatcgtcacccagccttcaaaaagcttctgaacactacgacctcattc

SEQ ID NO: 82200 - DNA, 337 bp, Zea mays
atgtgcttggaggattttttgtttatcttgatgagaagctgcatgttggatggttgatgaaggggtggggatttatagcctcaccacttctaccgtggtgactttgtgtcgatggacataccaacagctggggtgcacgacatggatgatcatgaccggagtgcacgtcaccgaccgtgggttggactgtgaccgtgaagctttgtttttgcgaccggacagtcggggaaatcgacagtcgggcgactgcattgaactgcttgatttgacggcaactgtctgagcgacgtggagtgacatgctcgtggtacggcagccataatttatggaggtggaa

SEQ ID NO: 82201 - DNA, 437 bp, Zea mays
  unsure (1)..(437): unsure at all n locations
acatgttggtactagctttcaaggttttcattctaagccggtcacaactcaggctctgtttcaatgcacacaagaatacgaagaataccttcaggcatatgtacgaaggttcttgcgattgagggcacaagcgcctacagtgcccaatgagattatcattgaggccatgatcaagggtcttcgtccaggatctactgccaaantatttgncaggaagcctccacaaactctggagaagcttcttcagaagatggatgagtacatccgagctgacaatgattctcgccaaagaagggaggaagcttacagattctccaaaatgaccaggggcttcggagaataatccatccgagacatgtcaggtcaatccataccttcactcanagtgacgacaaaggaagttagtctcagaggtcacaatataactcacaatcttc

SEQ ID NO: 82202 - DNA, 412 bp, Zea mays
  unsure (1)..(412): unsure at all n locations
acattacatttattggaactcatacatactgatgtgtgtggaccaatgagtaccacagcttagggaggattccaatactttatatccttcactgatgatttaatagatatgggtatgtctacttaatgaaacacaagtctgaatccttagaaaagttcaaggagtttcagaatgaagtagaaaatcagcgtggcaagacaattaaagcactgcgatcggatcgtggaggtgaatatttgagtcatgagtttagcaatcatctaaggagttgtggaattgttccacagcttacgccgcctggaacacctcacaggaatggcgtgtctgagcgacgcaatcagactttattggatatggttcgatcaatgatgagccagtcggacctacctttgtcgttntggggatacgctct

SEQ ID NO: 82203 - DNA, 387 bp, Zea mays
acactaagaacatgtccaacacttaacacacttgtctgtcctttaattgggttgccatccaaaccaccaaaacccacaagagagctttcatggagatgaagaggtccctgaactggagggagagctggtggtctttgaggcattttttgtagtcgtctttaactgcctgtgcaccgcttcgttaccgaagtcatggctcgctttgaagtctagctccactagctcacactgaattccatggtagccttggcgaagtttatttgggtggaggctatgtatggtgttgagctatctgtggaagttctcgtgaagatttattgcctctattggcaaaataaggttatgagtgccaaaattgtgtagtttggcttgtgcacattcacatcg

SEQ ID NO: 82204 - DNA, 320 bp, Zea mays
agagaatactggtctagatgcatgtttaatctgctagactaacttgggctggctctagcaccggcatctaacacatgttggaatcaagaaccttcataagcttctaaagggagaacatgtgttaggactaacagatgtctgttttgagaaaaacaaaccttgtgtagcgtgtcaaggtgggaaacaggtgggaacaactcattctaccaagaatgtgatgacaacgtcggaccactggaacttcttcatatggatctcttcggacccgttgcttatcttatcaccggcggaagaaaatatgggcttgtaattggtgatga

SEQ ID NO: 82205 - DNA, 466 bp, Zea mays
  unsure (1)..(466): unsure at all n locations
acctgcngcatgcaagctttaagcaccactacaagccggggttagcgttataaataaaagctattcctaatgagagggcgaaaacaaatcacaagcaaatgaagagtgtgacacggtgatttgttttaccgaggttcggttcttgcaaacctactcccagttgaggtggtcacaaagaccgggtctctttcaaccctttccctctctcaaacggtcacctagatcgtttgagcttttcttctcaatacaaggaccaccacacaattggtatctcttgctttgattacaattgtcttgggaacaagaatagaggaagaagaaaagtgatccaagcgcaagagctcataagaacacgacaaaactctctattctagtcactaattgctttgagtggaattgcgacttggagagatttgattcatctattatgtctgtattgatgcctactcttgattgatgtgtgctg

SEQ ID NO: 82206 - DNA, 474 bp, Zea mays
  unsure (1)..(474): unsure at all n locations
tgttccttttatctgaaattctgaagttctattttggaactattagtagctggcgtccactcaataacaagagaaagaaggttacttaataatctagtcaaataccacatgacagtttcaaaagatatccacccactttctcacttctcaaagaagattgcatctttcacatatggtgaagaaaacgatattcttcttctaattggtttctatttcagaaatctgcaagtggagatccattggagacaaaattcccgtaagtaatgaatttctctcattctttggctcattgcccattattttttccattgatacacacttatgttntatggacacagacaccatactatttattaacacaagatcttaatgaaactatgttcaataatcttattccccaacgtatganaacaacttaccatanaacaactacttttgtatattgatgacgtaccagaagtcattnttttcctg

SEQ ID NO: 82207 - DNA, 177 bp, Zea mays
tttttacaaaacactctgtaacatacaacgtcgtgcctggactcgatggggggtttcttaacaaaatttatcctgacaaagaactctcaccatactttcctactagcaactatactttaataacccttgttcaaccacaatataatacatacctatgtacaaaacataattaaaata

SEQ ID NO: 82208 - DNA, 339 bp, Zea mays
agcttatgcaacaccattggcaatgactctgtatttcttcttaacgctagaccgggatacggggggttggcgcttgtacaagcatggctgcgcatgtgtgggcgcacacatatgcacaagcacagggtgctcgtggatagacgcttgcgagcgagtgtgtgaatgtttgctctaacaagctcgagcaagcgtggatgctgctagcggacacaagcactgtggtggatgcagccaagcgacaagcatggccatcactgtggtagatgccataaccaagcggcagtgtgatgggaggtaccatgactaggccacgatgtcttgacaagtgtactcgtgact

SEQ ID NO: 82209 - DNA, 427 bp, Zea mays
  unsure (1)..(427): unsure at all n locations
tgcaagctcaactncatctatgntatggattgtcttttagtcagtacagantccttcggcccttctggcagcttcctgactttcatgaatagcgatgggtccttgattcgaaggtatcttcatgcatagataggcagggagaagaattgcttcaaaagcattgagggtgccacgaccaataattgcattgcaagggtattccatgtcaacaatgtcaaacactacttgctcagttctagtgttggtgatgaacccgaaggtcactgacatggtgatcttgcccagtgctacaatctggcttcctccgaagccaccaagaggatgtgtagcatcatgaatcttatcttccgactcttgcatatgtctgaaggccttaacaaatatgatatcagctgcactgcctgtgtcaaccaagacattgtgaacc

SEQ ID NO: 82210 - DNA, 361 bp, Zea mays
agtgcttccgaagatgtctgaagctgctaagaacgctgctgctgagatgaagctgagtcttgatgaagagaagaacttaagatttcttatagcgatgtcgaagaccaacacagaaaaaatcaccaaggagattctggaagggctgtctgaagatactggtgacagtgaaagatatgatgtggacagcggtggcgaagactccgaagatcgcccctggcgaccaagccattcagtttatggtaaatcaactatcaaagagaatcatcttgttaacatgagaggaaggtatttccgagatttgtccgttgtgagggccgacgaaagggagaagactcgtccacaccccgaagagaatgaagtc

SEQ ID NO: 82211 - DNA, 450 bp, Zea mays
  unsure (1)..(450): unsure at all n locations
agcttggaggcgtctatggggtgtcgacttgtggtagactcctccttcttttcttccgccgccttgaatgcgacgggttgagcctcggatgtagatggatcatcaagctcgttgatcttcctcgagccttcgatcatgcactcaaaacttacaaaatgcccgattacttcctcgggggtcattntagtatatctaggattaccacgaattaattgaacttgagtagggttaaggaagataagagatcttagaataaccttaaccacctcgtggtcgtcccactttatgctcccgaggttgcgcacttggttcaccaaggtcttgagccggttgtacatatgttgtggctcctctcctttgcgaagccggaaccgaccgagctcccccctcgatcgttcccgcttggtgatactggtgagctcatactcctcgtgcgcgggtttgagcaca

SEQ ID NO: 82212 - DNA, 464 bp, Zea mays
  unsure (1)..(464): unsure at all n locations
actaagcctcccaaccttagctggccaattctccataggagactgacccctatactcttatgaccgaaggtctctaaccatatcgtagaactcgaccctcagaagccaaacaagctcgaacttaaaagaatgttgggaggaactacagtttgtgtccccacaattcagtaatagaggagtatggtcggaaatgtcacggcttatggccctcacagaagacaaaggatatttttgatcccactctgtggttaccaggattctatccaactnttcatacttaggtctttcgaggttatttgcccaagtgaattggcgaccagtcatctctagtttcttaagacatagaccatcaataacgacattaaaaagacatgaccaccgatgataaaattgtcttattttttcgctgagaatcttagatataaaatcacaccaatacaagaggagcgtctatggttgccatg

SEQ ID NO: 82213 - DNA, 236 bp, Zea mays
agacacatctatatgtgtaaatagacagctatctcccatatgacataattgactaacagatagcgggttatatccaagactcctcactagaaacacattagagatagaatgctcattagaaaagcaatttacctaaccctttaccttgccttgattcccatcaccgaatataattgaatcttgcgaatctttattcttgacgcaagaggtgaacatcttcttctctcccggcatat

SEQ ID NO: 82214 - DNA, 355 bp, Zea mays
ttaagcgctttgagcgaaagaagtattgttagatgcccctacgctatcccgcatgttaaagcacgctccattacttttcgtacccctaggcaaaccaccatattttgatggtaaggaatattgtatgtggagtgataaaatgaggcatcatttaacctcactccacgaaagaatttgggattttgttgaagttggagcgcaagcaccaaaggtggtggacaaggactacgactcggacgaggccgcccaaattaggcactttaactcccaatccacgtctatactccttggcctcttgtgtcgagaggagtataacacagtgcaagggttaaagagcgccaaagaaatatgggac

SEQ ID NO: 82215 - DNA, 475 bp, Zea mays
  unsure (1)..(475): unsure at all n locations
agcttgtggcacaacctaatcacgtcgggtcgatgctataataggcaataagccncaacaaaatagggacttacgccaccaaaatgttaccgccacttgtcggagagcttggctccaaacggattactctcaggagttgcaggtgaatgagttgctggcgaatcacgtgacgctcgcgagaatataaaagacaacaggtcaaattacctatagataatatcatgaaagaaatcacccttcttctattaaaccatctgcagcaaggcatgtatgtgggagtgcaaaacattgtttcatcaacgcgtgtatgtgggagtttgaaatatgaagtatgatanggaggctctctgcacaaaagcgccagtttgttaaataaacttatcatcattacatattatctagatcttcactgagactaggcctatgacacanagaagctatactacacatagatatgcatatatatcatgtacta

SEQ ID NO: 82216 - DNA, 256 bp, Zea mays
  unsure (1)..(256): unsure at all n locations
tttatatcctgcgaactatctcgaacataagaataggaaaatttatgctagtaaacctcacaatgtctcttaccatgcatttatgtaccaaaatgaggcttttagctctaggcataccactcatgttaaaattcctagaaagaaaatttctgctgcatcaaatgaacataaaggttcttctaagacttttgatgcttcatatngtttaactaacaaatcaggcaaagtagttgccanatattgtgggggcaaacac

SEQ ID NO: 82217 - DNA, 398 bp, Zea mays
  unsure (1)..(398): unsure at all n locations
agcttacacatgtntaaatctctaaggttcttcttttatttattttattaaataaataaaaatacatctacattagttcatattcaatcctaacaattatagtgtgtagacagaaagtgaaaccattttatttaaacagagaataattctatgaacattttgcaatttgaatcactaaatctggagttcatatgcaaaagttatgaaataaacacgtttgggaattcaaaatatgaaattagggctaattctgtgaatatttaaaagtccagggctaaatctgcaagattacaggggcctgcgcgcgaaaaccatggacggcgggttgatatccaataaatcgagggtctctttaagaaaactaccgcgcgaaagggtatcgggtgaatctaaccgac

SEQ ID NO: 82218 - DNA, 445 bp, Zea mays
  unsure (1)..(445): unsure at all n locations
agctngaagccatggtaagtagcatacgctaataaaatatactaattgactcaagcctagctacgggtgcataggtttcaccgaaatccaaaccttcgacttgggagtatcctttggccacaagtcgagctttgttccttgtcaccacaccatgctcgtcttgcttgttgcggaacacccatttggttcctacaacattttgattaagacgtggaactaaatgccataccgcattcctcgtgaagttgttgagctcctcttgcatcgccatcacccaatccgaatcttgaagtgcttcctctatcctatgtggctcaatggaggaaacaaaagagtaatgctcacaaaaatgtgcaacacgagatctagtggttacccccttgtgaatgtcgccgacgatggtgtcgaccgtgtgatctcgctggattgcttcgtggactctagg

SEQ ID NO: 82219 - DNA, 335 bp, Zea mays
aaattgcagaaccagtttagttgaaaaactgacaccgccctctcccgagcacctgccagcatgcgtgattacatgatacgacatgcttcggggaagaagctatctgaagaagacactcatgaagccatccattatgcaaaggaactaaaatatccgaagggggcagtaatattcaatggaacgaatgaagatgacttcttatactgcctgccttgacaacaaaagctatcttgctgccgagaaatggccagaagtattggtttcccgaagcttgaatctggattaagcgccatgacgaaagatgatctcgcagaccgtcttgcgtacaacagcct

SEQ ID NO: 82220 - DNA, 224 bp, Zea mays
gttgataagaaaaaatcagttggggattaatgattagcctgtggaaaggttcacagattatggcaagactctatcacaaatagccaaaggaagtgcaaagcagaacaaacactatatatataaaaccactgcgtgaaggggcttttatagccctcgcaccagaattaaatgtgggggaagatttcaggatgaggagcttcccaaattgactgcaattttacaaa

SEQ ID NO: 82221 - DNA, 395 bp, Zea mays
  unsure (1)..(395): unsure at all n locations
aaacactggtacaaatagctttagacgagaagcacaaaatacattattatcaatttgaagaaagaaacttcaaacaacggttaagatacacagttttaccagttntaagatgtgatgttgtgatctctgggccctacaaaagcacggccgtatattccataaatgagaatgcgttcagcaattaagacctaagaatagaatgccccacagtgataaaattaccgacaaacttaacttctctgaccaactctgcaatagaacagggtgtttgtgcatctcaggctcatctactagagccttctctaattcatctattttctcattattcataagggcccgcttccttctcttatgttggctctcatcatacatactactctctcctttaccctact

SEQ ID NO: 82222 - DNA, 422 bp, Zea mays
  unsure (1)..(422): unsure at all n locations
ccggaccttaagagacgcagctgcaacatgggccgacgaaaacatattcctttatatttggctgacaacagctgctggtgcaactgttacctcggacagcactccgaagcggcaacgacgttctggcagaagaatacttgtgcagtccgtgacgtgatcgtggacacagccctcgccttcatccattcggtgaaagactcgaccgctccgaaagcgaacttaacgtcaccccgagcggcgggcaggggcccgacgatgtccaggccccagcgctggagaggccatgtatgggcaatcagctatgtatattgccaggagttgcctgaccgaagagagaacttacggcaggctaccatgacctcgtgacccgatntgcgaggcagaacattgcaggccaggaagacgcttgtcggacaccttgc

SEQ ID NO: 82223 - DNA, 274 bp, Zea mays
gacccctggaaaaccctatactgaaaccctataggggtatattctaaatatgcacatttttggacctaagtgcaaaaaccatgacaatagggtaccttaactcatatgaatcacaagtatgtggatttgcaaagtaaaccttgagatttggacctacttgcaaaaaagccccacttaaactctattgagtcaagtctgaattcaatgacaatgggtcaactttgaaccctatatcttccaattatgaaatattgcctaagtcaacacataagtt

SEQ ID NO: 82224 - DNA, 406 bp, Zea mays
  unsure (1)..(406): unsure at all n locations
cacttatccttaaggtcatcttatgacatttactctaaagtcattaggctatcttaacttgagttaagtattacccctttaaccactatgtanggttaagtccattacccaacgttctattcgcagaacacttaaaacaatacaacttgtttgaatattttgcctaatgaatgcactctacgtgtgtcaaacatatgcaatgccaatgctcatgatgccatgctcaagctttagttatagtaacaccagcggtgttacacagggcaaggccaccaccagtctccagtggggtcggtcagaacctggctgcagaggcaatacttatccgcgtgatgccggagacatctaccaccgaggggcggcgtatccagcgagagctcaagaatctcctgtaggatgccgcggt

SEQ ID NO: 82225 - DNA, 447 bp, Zea mays
  unsure (1)..(447): unsure at all n locations
gagcttatcatanagggcttcaacaatgggttttattcgttctttgagcacaaagataaagatcggatagattcgaaccgcaattgcaaaggtaataactactatgccagcccacatcatgatcttcaccaactagtgcgtagtagccagagaacttactcacatctgctcgaatcttgtcccatctgctgctaagtgctctattcagtctacaagggtactggcccctttgttcgttgtaccttttttcaattcgagcccaaagcccctccctcctttgtccagtgtgcacaatagggtcactgcttatttgcaaccatgtagtgcaaaggagaaggtcttcaggagcagtaaagntttgttccttcgacttattattattcagaacaggagctgcattctnttctggactattgatgtcctgaacactatgttcagcatctgagt

SEQ ID NO: 82226 - DNA, 276 bp, Zea mays
ctcattcaatgtctattatttatctctctgcactataaacgcactttgaagttagcatccagctatctgcattggatcactaatctgttctaactatatagagggcagtgtagactgcccctcgcttgcgaataccacccggcactccgtcttccacgcctgcgaataccacccgccggtccgcctactcccgctgggaacccgcaccccgcctgcggagccgctcctcaatctctcatgaatagcctgccactcctgcagccaaatcctcgcatg

SEQ ID NO: 82227 - DNA, 338 bp, Zea mays
taactcctagtggtacctatagttactcttagaagcctgacgggctcaagaatgctggatgaacttcacacaatgattcccaagttcttcactctcaaattggcaggaatgtgctgacatatgtccatgacatcatagtgaaaagcacaaagcaagaaaatcatgttgccaatttgcaagagacatttgccaaatttagacacgctggtctcaagttaaatccaacataaatgtgtctttggagtgaagaaaggcaagattcttggttccctagtatcaacacaaggcatcaaagctaatccaagcaaaatcgaagctatgcttcacatggagccacc

SEQ ID NO: 82228 - DNA, 485 bp, Zea mays
  unsure (1)..(485): unsure at all n locations
agcttngtaattttcctttcttatatagctgcattagagcctaatccctcanaagaatgtaaaatctgagcacgcaccatcgagtgcagaataagaaaaaaaaaagcagggagaagctcataagtcgtccccaaggggatgcagagcacgacgaagctacaaaaagtcgttcctaatggagcgcaacataagttttctactcaaaagtcgttcctaagggaatgcagagccaaataccaccgaaatataaggcgaagaagttcaaaagtcgttcctaaggggatgcagaacttataccgccgaaatagaaggcgaagaagttcaaaagacgttcctaaggggatgcagaacttataccaccgaaatagaaggcgaagaagctcaaaagacgttcctaaggggatgcagagcttaagactcaaaagacgttcctganggtatgcagagtctatgtgtggctttgtatgcgtgtgtatgggcattca

SEQ ID NO: 82229 - DNA, 372 bp, Zea mays
gcaggggttttcactgtaagacaatggcaggaagccttgcgacttaacgcatctgccaccacattggcctttcctgggtgatagtggatttctaaatcgtaatccttaatcagctcatcttctctaccttatgtttagttcggactgggtaaaaatatacttcaaacttttatgatatgtatatatatggcagatatttccagcagataatgactccatatcttaatggcatgaacaactgcagctaattccaaagcatgagttggataatgctgctcatgccggcgtaactgccttgaagcatatgctatgactcggcccttctgcatcaagacacattcgagaccactgcctgatgcatcacagtataca

SEQ ID NO: 82230 - DNA, 478 bp, Zea mays
  unsure (1)..(478): unsure at all n locations
acctgangcatgcaagcttgttgaaatgattaatacaacaattgtggtcagaagcttctttgttnaatgggatgacgctggtatgctgctgttttttgttctatatacgccagtaaaatatctgttacagtattattgatcagacatttgattgtagctggtcttgacaaagcaaagcatgcactcatggaaatggttattctgccttctaaacgaagggatttgttcaccggacttcggagacctgctaggggtaagactgtaagagcattctgaaactgttcttttccctacgcttgttctgttaataggatgatctgattaaagttcacatcatcttttaggtttgcttctctttggcccacctgngaatggaaaaacaatgcttgccatagctgttgcatcagaatctgaagcaacatttnttaatggttcngcttctcattgacatcanagtgggtatgtgcctatccttctc

SEQ ID NO: 82231 - DNA, 370 bp, Zea mays
cagccagttaacaagtgggatgagcgcatcatatcaagaatgtgatgaccacttccagacctctggaactgctccatatggaccttttcggacccgtcgcctatctaagcatacgaggaagtaagtacaggcttggtattggtgatgacttttaccgcttcacttgggtggttcttttgcatgataagtctgaaacccaaaggaccctcaagcgcttcctaaggagagctcaaaatgagcttgagcttcaggtgaagaagataatgagcaacaacgggtccgagttcaagaaccttcacgtggatgagtttcttgaggaggaagggatcagcacgaattcttcgttcctaccaccacaacaaatggtgtg

SEQ ID NO: 82232 - DNA, 412 bp, Zea mays
  unsure (1)..(412): unsure at all n locations
agcttgcatcaaaanatgggctangacttcccttgccatattatgccatcacatcttcaagcgtgcatgagaaaattgatcggatcttttctcttcttgacatagtatgacatcaccttgtccaatgtcaacagtttgtactaaggacaacaatagagactgcaacttctcagcatcatatttggacattatgatgaagtactacaaataacgagtagagtgatcagcttgcctataattttaagctggcaacaataagatggtgtacaacgaacaaagcctagtgtcatgtacttatgttggcagccaaatcatcagtatgcctaccatatgaagatgacgtctatcagtagcataccctattagacgaacctatctgcctatgtgtaggaacacccacttctgtcaatac

SEQ ID NO: 82233 - DNA, 449 bp, Zea mays
agcttcggcatggcccactctttcatagttggttacattttgtaagccaaaaattcctgcactaagtccctagtgccgatgtgctccgcgataaccctaaattcagccagtgcaatttgggttggaccctctggtgtcatattgcagggggtctggtctctacgaagatcagctctaacggactctggaccagcttctccttatcatcgtcaactttgacgtagaaccattccgatttccaaccagtcggccacttgctttggtaactgatcaagggaaattttgtagtcttgcggtaggcaaaattgtagcagccgaagttttcatgtaacccatctcttctggccttggtttggtaatgcagctcatgcactcggcagaagccttcggcaaacggttccaccccttggcttcggagagcccaaatgtaaacgctaagcctaacgata

SEQ ID NO: 82234 - DNA, 211 bp, Zea mays
tgccaagcccgaaagaggttggagctcatcattcacaaacttagcatcatgacaacagatataccactcgagctgctgcacatggactatttggccgatagcttacataaacattcgcgagagtaagtattgtctaataattgtggacgactattctcgcttcacttgggggttctttttgcgggaaaaatcacaaacctaatagacctta

SEQ ID NO: 82235 - DNA, 297 bp, Zea mays
aaacattggcaaatcatgtttttgaggacctctggaagccgaacgcccccaacagtacctctcgaatattaattgctgtaatgatcaattcatattgcgacatggacgaaggccttaaaccgaaggtccgaaaaacaccttctttttgctagaatagcaacagtctttgacaagcgggaccctccagttttcaacgcactaggtgtataaataagagctcatcacgaagtttgtttggcacactctctttgcaactgcttttactcacccaacttttagcctgcgcgcaacaacact

SEQ ID NO: 82236 - DNA, 409 bp, Zea mays
  unsure (1)..(409): unsure at all n locations
gataacggacaaacacgcaacagaggatgtgttttagacaaaaacatgcaaggcatcgaagaagggggagcaatcaatggtaaagtaggtgaggcattatcctctaacacggacgaaaaagaggaggctttaaacggtatgttcaaagtaagcatgaaagtaatggtatagatattacaagggttaaaggcgattacatacaagaatgtaagagaggaggtaaatgggcataagaacaaaggatataagtaccacaaaggatggagttaagacagaacctgcatgtggaaaagaataggatacctccaacagccacatatgtaaaattgcactctcaaattgaggtggaagagaggatattnttatagagcatgcataaagattagtatcaaggtaagatcgatggatg

SEQ ID NO: 82237 - DNA, 458 bp, Zea mays
  unsure (1)..(458): unsure at all n locations
gctgtgaagaatctttattccaacatgtgctaatnggcgatgctagagccaacccatgttagtcttagcaattaagcaagtgtcgagttcagctctatcaaaatctactaagtatagctgaccctctaacactcccttaaatgctattgaatcatcacttcttctagagacagtgacacctgtatccgtaaaaagacagttgtagcccattttaccataatgcgaaactgaaagcaagttgtaatctaaagaatcaacaagaaaaacattggaaatggaatggtcaggtgatatagcaattttacccaatcctttgaccaaaccttgattcccatnctcgaatgtgatcgctcgttggggatcttgtgttttctcatatgaagagaacactctcttctcccatgtcatggttgttgtgcacccactatcgatgatccaacttgagcccccggatgcat

SEQ ID NO: 82238 - DNA, 440 bp, Zea mays
  unsure (1)..(440): unsure at all n locations
agcttctgctntgggtactcccttcttccctctttcttctgatgtacctcttcaccctcctcctccagatgtgaatgagtggtaccaccaggcgtatggggtacctttctcctcagccgatgacgtcgaagaagaaacctattntgatgatccggagcagtttgaccctcccccatatcgcggggatccgggtcaatcgtcatcttaccctccgccccaggacccgtctggcagtgctcctcctccggcccagtctggagaggaacactttgcctacgacctggcgcaacacctctttgctcctcatcaacctcctccccactggtgattcttggcttgacgcgtccatctctctcttttnggttcttggtgccaaacaggcggagaacgttactattcagtactttattttgtatgaactctcggctgtatcactctat

SEQ ID NO: 82239 - DNA, 400 bp, Zea mays
tgcgcagcttgtcaagcaggaaaacaggtgggaagctctcatcaagcctaaaatgtgatgacaacatcaagacccctggagttacttcatatggacctcttctgacccgtcgcctatctaagcataagaggaaagtagtatggccttgttatagatgatgatttttcccgcttcacttgggtattctttttgcaggataaatctgaaacccacaggatcctcaagcgcttcctattgagagctctaaacgagtttgaactcaatgtgaataagataataattgacaatgggtccgaattcaagaaccttccagtggagaagataagaatcaagcacgagttcttcgctccctacacaccgcaacaaaatggtgtggtagagaggaagaacatgacgctta

SEQ ID NO: 82240 - DNA, 333 bp, Zea mays
ttgctgccggaatgtctgaatagaacaacgttactgctcaaatgaagctgagcctttctgaagagatgcatctatgttttcttgagtcaatggcgaagacgaatacggagaagattacaagggagactttataagggttatctgaagatactggcgagagtgacagttactatgcagatagtgcgggtgaagattccgaatatcggccatggcgactaagccattcagtcttccggaaatcaactattgtgcaaaatcaccttgaaaacatgaaagggagatactttcggaatatgtccattgtgagagcagatgcccgagaaagaactgtgc

SEQ ID NO: 82241 - DNA, 367 bp, Zea mays
catccccacatgtgctaagcggcgatgccatcatcctttccatgctagtcctagcaattgagcatgcttatataccgggctcttcttttgccacaacgacttagtaaagcttgccgcataatacacccttagaagctagtgaaccatcgcttcttctaaagacagacacatctatgtttgtgaataaacagctatatcccatattgcataattgactaacagatagtaaattatatctcagagactcaactaaaaacacattcgaaatagagtgctcatttgatattgcaattttacctaacccttttaccttgccttggttgccatcaccgaatattattgaatctccggaatcttattcttgacg

SEQ ID NO: 82242 - DNA, 409 bp, Zea mays
caagctttccccatcgctacctcgcccgggcgtgttcgtctgtcgccgtacgttgttcgtcggagctcgtgccccgtcatccgcactcaaccccagccacctcgccccttccttcttctcgcagaggagcacgttccgtcgtccgcgtttccccgccggagttccatccgcgtagcacgacgttcgcgctcgttccctgcccgccaaaccactccccgtcgacgttcgtccctgcgcatgagcaaacccaaggttgaagacaatcccaaccgctaatttactttctaaatcatgttttaaattaaattatggatcttgtgaattattgttataaaattaatgtgatttgtcgaatcgtgtatgagtttagagattcgttgtatatatacgggtagctaaaattgaaccc

SEQ ID NO: 82243 - DNA, 378 bp, Zea mays
tatgggggtgtcctggcaaaatactcagccgtatgttctatctgaagccctttgatcatggcctcaatgacaaatttattgggcactgtaggcacttgtgctctcagacgcaggaaccttctgacatacgcctggaggtactcctcatggtcttgcgtgcactggaacaaagcctgagcagtgactggattcgtccgaaatccttggaagctggtgattagcatatccttaagcttctcgcatgatgtaattgtccctggccgaagagaagaatatcaagtttgtgcgacacttttgactgtcatgacgaaggatttcgccatgactgcggtgttgcccccatatgaagatatggttgcctcgtagctcatcatacat

SEQ ID NO: 82244 - DNA, 311 bp, Zea mays
  unsure (1)..(311): unsure at all n locations
gagtgcaaccttaaatcttccaagagccaacaccaacctctaaaggatgacttgaaatttaaattttattcaagaccctaaaatgaatgtataanacccttaaggaaaaccaaaggaaaccctagtgtaccactgaatttagtactattttgctatgcataacctttacaaattgacatatcattaatatgcatatatctcgttcattgcattcgatagactgtaatctcgttgacggggagtgcatcctcgttccggagcaaggagttgctcatgaggtagtccacgagccagcaccagagtctaccatc

SEQ ID NO: 82245 - DNA, 427 bp, Zea mays
  unsure (1)..(427): unsure at all n locations
atgcagcttacacatgtataaatctctaaggttctccttttatttatatgattaaataaacaagaagacatctacattagttcatattcaatcctaaaataagagtgtgcagacagatagtgaaaccattttatttaaatagagaataattctatgaacgatttgcaatttgaatcactaaatttggagttcatatgcaaaagttatgaaataaacaagttcgggaattcaaaatatgaaattagatctaattctgtgaatatttaaaagtccagggctaaatctgcaagagtacagggacttgcgcgcgaaaaccagtgatggcgggttgatttccaataaacctagggtctctntaagaaaactaccgcgcgaagggtatcaggtgaattaaccgtcagattaaaaccacgaatgccatagatct

SEQ ID NO: 82246 - DNA, 383 bp, Zea mays
cctttaaactcagcttgacgaccgtcaacagttctactctggcgacgagtttctttgagccgaagactttaatggttgaatcttgcagatacagttgtcaagccgctgaacttcgtcttgagatacttgcagctcgtgacgatgatggtccaggtccgacatagtgaagcgatggttcctttccaaaatagtcaaggagttgctagcatcacgatataacctgtccagattatcacgggaggctgcaagtgctcgtttctcctcctacgaacaagaatcaacattcagcacccagtcaacaataagcgtggcaaagtcaaccaagggagtttacctcatgtgccattctctccgagtcaagctgagcatttatggaagagttc

SEQ ID NO: 82247 - DNA, 433 bp, Zea mays
  unsure (1)..(433): unsure at all n locations
agctntgggcacgcatctgaatttcagttcagtctatcatccttagacagatggccaaaccgaaagaaccaatcaaattcttgaagacatgttgagagcctgtgcgttgcaagaccagtccggatgggataagagattgccttatgcagagttttcctataacaacagttaccaggccagtttgaaaatgtcaccatttcacgcgctttatggaaggagttgtacaactccgttgcaatgggatcagtctggagaaaagcaagtgtttgggccatacattttgcttgaagccgaagagaacatcatgatggtccgagagaatctgaagatagcgcaatcgaggcagcgaagctatgcagacacaagaagaagagagctgagtttcgaagtcagagactttgtctatctgaaagcgtcaccgatcagaggagtc

SEQ ID NO: 82248 - DNA, 116 bp, Zea mays
  unsure (1)..(116): unsure at all n locations
aagcacctgagctgcagctnaatatacttagagcccctaatatttgtgttttatggcataacgggtcctgaggatgtgatatcgtcacataccacacatcgaccggagcaaaaggt

SEQ ID NO: 82249 - DNA, 474 bp, Zea mays
  unsure (1)..(474): unsure at all n locations
agctcgtgaagattcttcatcccaacatgggctattcggcggtgctagagccaacccatgttagtcttagcaattaagcaagtgtcgagttcatctctatcaaaatctaccaagtatagctgaccctctaacactcccttaaatgctattgaatcatcacttcttctaaagacattgacacctacatcagtgaatagacagttgtagcccatttgacataattgagaaacggaaagcaaattgtaatctaaagagtctacaaaaaaacattggaaatggaatggtcaggtgatatagcaattntacccaatcctttgaccaaaccttgattttcatccccgaatgtgatagctcgttgggaatcttggtttttctcataggaggagaacatcttcttctctcctgtcatgtggtttgtgcactcgctgtcgatgatccaacttgagcccncggatgcataaacctacaaaacat

SEQ ID NO: 82250 - DNA, 484 bp, Zea mays
agcttcagattcacggctaaatctatttgagttctctttcataagtgttcatgctcccttcagctctttacttaatctttcattctgagcccgagcttcggcaagagtgtcttcggtcgatttgagcaagttgtccttttccttcaatgaattttcaagttcctcaatccttttttccaagcatactagtcttcatctcaataggattcctgagatcatgcaactagggtttcacacaactcctacacttaagtgcacattcaatcctacaatcaataagtgtagtaaaatagcataataacaggttatgcataaatcggggcttgccttccaaggctgtggcaggcagatcctctcgtgcaggctctggtgctggatccggagctacctcctgagcagctccttgctccggcacgcggatgtactctccgtcagcgaggttacagtctatcgaagtgcaatgaacatgtatgtcatgattatg

SEQ ID NO: 82251 - DNA, 367 bp, Zea mays
tttccctttcagtcttctccctgaatcctaagcagaacaagagtgcacggggtctcatggtctaaatatgatggacatgaactcaagagtgtaatcacctgatggttgagttgacgagcaccagcgcgagtaatgggaccagaaaatggtacttggattggtatagatgcatcagcagtgtggatgtcttcatcattaaagtcccttgtgctggtggtagcggacctaacaaatcaacgccccacctttgcaatggcacgtgtgttgtataactgagtaaagacgaaggttgttttgatctctgcacatttctgaaatcttcgcatttttggactcattccgctgcatccgaagctggttttgccca

SEQ ID NO: 82252 - DNA, 439 bp, Zea mays
  unsure (1)..(439): unsure at all n locations
ctcttgaacagcttgatggacaaccactatctgtttattgtgaacaaccccagagataaagccgagatcgccgtagataattcactcaccgcccacgatcactctctgctaaaatgcatggaaacactcactcactcactagaatggcaacccaagctaagattgcgactgatcagagtctggaggactcacacatgctcaacgcgtgcacagaatgaccaagagagctgccacacactgagcaccacttttatntatacccctccaaacaaacctagcctgcatagtgggccaacctgcattcttatttctccaagaattcattactccacatataatcgtcataattaccaaaacactacttaggggcccagatgcctcacaactacgataggcggatatacgagaacgaagcctctttcgatctgaaaattataac

SEQ ID NO: 82253 - DNA, 425 bp, Zea mays
  unsure (1)..(425): unsure at all n locations
atctatattatgtattgtctttgtatccatccagctcccttcaggctttctggcaactatctgacatactgtgaacaccaacaggccctcgatccgaaggtatcttcaagcatagatatgctggatgaagaattgcttcaaaagcattgagtgtcccaccaccaatgattgcatcgtaaggacaccccatgtcgacaatatcaaacacaacttgctcagtccttgtatcgtagacaaatccgaaggtcactggcatcatgatcttgccaagtgctacgatctgccttcctccgaagccacaaagaaggtgtgaagcatcatgaaatcgatcctncggctcttgcatcttgccgaggccttggcaatataaatccgctgcactgcctgatcaaccagacattatgaccagaaatctttgatacaca

SEQ ID NO: 82254 - DNA, 401 bp, Zea mays
  unsure (1)..(401): unsure at all n locations
taactgttccgactttgatagtgatcacgaacaagggaacaagagggagaagaagataaactataagaaggcaaagggcgaggcgcatctatgcaaggagtgggactcggactgctcctcttccgactccgacaatgaaggactcgccgccaccgccttcaacaagtcattcctcttccccaacgagcgtcacacatgccttctggcaagggagaagaaggtgagtactcgagactccacttatgcttcttctagtgataatgagtctagtgatgatgatgacatagactattcatgcttattcaagggcttagatagatctaagatagataagattaatgagttgattgatgccttgaatgacaagaatagactactagaanaacangaagatctttata

SEQ ID NO: 82255 - DNA, 454 bp, Zea mays
  unsure (1)..(454): unsure at all n locations
tgcaagcttgagcttctttaagtgatgtctatattgttgaactttntcctctgcttccgtgaccaagtcaggcctgataaaccaccgctctcctgattcagaccaacttaagggtgttcggcatcgtcgtccgtacaatgctacaagcggtgccatcttaatgctctcttgatagctattattataagaaaattctgccaatggcagacaatcatcccatttttgcggaatatccaaaatacatgctcgtagcatatcttcaaggatttgatttactctttcagtttgcccactcgtttgaggatgataagccgaactgtggagcaacctagtacctaaggacttatgtagatcttcccaaaacttggatacaaatagcggtacacggtctgacactattgtctttggaactccgcgcaaactgagaatacgagcaatataaagttccgcgtat

SEQ ID NO: 82256 - DNA, 418 bp, Zea mays
  unsure (1)..(418): unsure at all n locations
accttaancgactgaagcatgcaactggtctgggaacaaatccctgcagtgttcttgcccaaattcgcgaagattcgctcccaatcggcgcttgaacaggggcagaggcaacgggaacacgtgttcgaccgcggctgacacccctggttcacgcctgttcgcgcaccgcgccttcaccgtgcacgcccgcgcgcactcgccggtccacgaccgtccgtgcaccgcgccgagcctataaagccttaccaagcgcgccccacttcgccccgcactcaccctcaccggccagccacttncccttagctccggcgagcttaattccgcccgccattgctgccagagcttcggccaccgtggccagcccaccccagccatcttccgggcaagccagtgctttggctagctccgccagtagccc

SEQ ID NO: 82257 - DNA, 385 bp, Zea mays
  unsure (1)..(385): unsure at all n locations
gaacttaccgatgtctattttgtgatagacacgaactatgcagcatgtcgagccggagaacagatgggaacaagtcctcctatctagaacatatagacgacatcaagaccattggagctgcttcatatgaatctcttcggacttgatgcttatcatagcatcgggggaagtaagtatggtctcattatagttgatgactattcncgcttcacttgggtattctgtttgcaggataaatttgaaatccaatgaactctcaagatcttcttaaggtgaactcgcaatgagttcgaattgagaacaaaaaagataaggagcgacaacaactttgagttcaataaccttcaagtagcacaatttcttgaggaggaaggcgtcaagcatg

SEQ ID NO: 82258 - DNA, 409 bp, Zea mays
  unsure (1)..(409): unsure at all n locations
gcttctaaagggagaacacgcgatatgtctaactaacgtgcatttcgaaaaagatagaccttgtgcagcttgtcaagcatggaaacaggtgggaggttctcatctcaccaaaaatgtgatgaccacatcaagacccttggagatgcttcatatggacctcttcggacccgtcgcctatctaagtataggaggaaagaagtatggtcttgttatagttgatgattnttcccgcttcacttgggtattctttttgcaggataaatctgaaacccaagggaccctcaagcgctttctcatgagagctcaaaatgagtttgagctccaggtaaagaagaatangagcgacaacgggtccgagttcaagaacctccaagtggaggagttccttgaggaggaagggatcaagcac

SEQ ID NO: 82259 - DNA, 411 bp, Zea mays
  unsure (1)..(411): unsure at all n locations
aacttgtaacccgnactattagcaccccggagctagataatataagcctcatccttcctccgctggaagtagggctctcttagcccgaaccaggataaatcttgtgtttcatcttgcatcaatccatccgggcaaggacacgcgggataaaattcactagtcggttcggttgagggtcctctaggtccgaaacaccgacataatgggaacatggagaaccaccctggaaaatagtgctaccacaagggtttaatgggatgcccttggctgattaactaggaaagctagtggatgactaccttacccgaaaggggcaagggcagtaggggagtggtcagtgtcgggaggtccttgggttgattttgctgcgatggcggtcaagcaagggatccctgcactggagcttcctat

SEQ ID NO: 82260 - DNA, 486 bp, Zea mays
  unsure (1)..(486): unsure at all n locations
acctgaggcatgcaagctctatcaaatggacgtgaatagtgccttcctcaatggatcaatcatggaagaggtctatgttgagcaacctcccagcattgaaaatagtgagtaccctaatcatgtgtataaactctctaaggcgctttatgggctcaagcaagccccaagagcatggtatgaatgccttagagatttcctcatcaccaatggattcaaagtcgaaaaggccaattctacactctttaccaaaactcttgacaatgatttatttgtatgccaaatttatgttgatgatattatattggggtctactaacgaatctacatgtgaagaatntagtaggatcatgacacacaaattcgagatgtctatgatggcggagttgaagtatttcttacgatttcaagtgaagcaactccaagagggcaccttcattagccacacgaagtatactcaagatattctaagcaagtgtgggatgaaaga

SEQ ID NO: 82261 - DNA, 400 bp, Zea mays
ggaagccagttggtgttcatcatccacataagaacatcatgacgactgacaggccactcgagctcctacacatggatctattccgcccgatagcttacataagcatcggcgggagtaagtactggctagttatgtggatgattattctcgcttcacttgggtattctttttgtaggaaaaatctcatacccaagaaatcttaaaaggattcttgagacgggctcaaaatgagttcggcttgaggatcaagaaaattagaagcgacaacgggacggagttcaagaactctcaaattgaaggctctcttgaggaggagggcatcaagcatgagttctcttctccctacacgccacaacaaaatggtgtagtggagaggaagaatcaaactctattggacatg

SEQ ID NO: 82262 - DNA, 486 bp, Zea mays
  unsure (1)..(486): unsure at all n locations
agctntcacttagtgtcgcgtttcacactcagactgatggtctgtcggagcgaacgatccaaaccttggaatatatgttgcgtgcttgtgttctgtcatggaagggtagctgggaggatcatcttgcattggcggagtttgcttataacaacagctaccaggctagcatcaagatggcaccatttgaggctttatatggcaggcggtgtatctcccctctgtgctgagagaccttgggagagagatccctggttggtcctgattgggttcagcagacttctgagaaggttcgggaaattcatcataatattttggtcgctcagagccgtcagaagagttatgctgatgtgaggaggcgggacttggaatttgcagtgggtgaccaagtccttctcagggtatcacctactannaggagtgttcggttcgtgtcttcgganaactcaacccgagatacattggaccgttcactatcttggcccgagt

SEQ ID NO: 82263 - DNA, 450 bp, Zea mays
  unsure (1)..(450): unsure at all n locations
ctgaagctgacaagctggaagttggtctgttcacaatgtttccatgtgtgaagccagccttcaaaaaagcagcagctgtgccccgagaagctaccagggcgcaaaagtcagcgtgcccaccaataacttcgtcaagggcatcaacttcgccttcaatatggtctaatgttcttggcaggttttcaactgaaggtgtaaatttcgaagagctagctccgacagagtgaaacacgtccttcagccgctgcacacatcggatgccgaagcttaagcatttctcctgaagttctgtaaaggatttctggcaaattgagtatttatccacttcagtcttcaggctcgcttcanaatatttcttatcttgctcgaatttttctgaatgacggagcaattcattctttaatttgtcattnntcagttggactctagccaaagagcccctcatggtct

SEQ ID NO: 82264 - DNA, 443 bp, Zea mays
  unsure (1)..(443): unsure at all n locations
gagcgacctgaggcatgcaagctctagtgactanagagagtgattngtacttttcattttatctcttgcgctnggatcacctcttttctttcgcattccttcttgagatcatactcacttgtaattgaggcaagagacatcaattgtgtggtggtccttgcgggaagcttgattcccaagtgatttgagaagagaagcctactcggtccgagggaccatttgagagagggaagggttgaaagagacccggtctttgtgaccacctcaacggcgagtaggttngcgagaaccgaacctcggtaaaacaaatccttgtgtcacactccttatttgctcgagatttgttttgcaccctctctcacggacttgtttctatatctaacgctaacccggcttgtagatgtggttatatttgtaaatattagtttcgtcctatttcaccc

SEQ ID NO: 82265 - DNA, 451 bp, Zea mays
  unsure (1)..(451): unsure at all n locations
atggagagaacgatctctagcctttgacgagcttcggtttgctctctcgctctttctacaaggttgagcatgaccgccttatctttttggcttaggcgagcgtacagttgtaagaagcttctttcctcctactcatcctcatttgtgcttccgctatcantttcattagctaaacaacatatgtgggaatcaaaatgggaagacaaaccttttggagaggtggattcatcgcttgggctccatcgttcattatcttcttcttcttccttcaaagggttagtttcacaaataccacaggaagtagaggcacacaatgaactatcatggttggactcatcaaatttggtttaaattctagtccaaatatcatgcacatcacaaatagctttatcatattntattatgaacgcatgataatcttctttgctaagggatttacttaagatgtcat

SEQ ID NO: 82266 - DNA, 359 bp, Zea mays
  unsure (1)..(359): unsure at all n locations
gggagactgctagtcgtcgtctacttgtgtggtgaccttggccgaactgcatggaatgtgctgtactccacgtgtaaacagcgcagcatggcaagcagaagcaagatcatcctcacaagccggtcagacaagatcgtcaagttcggacaaggccagctctgcgtctcagctacgtgtccagcgaagcgttctggtatttcttcaagactatcacatttggcagcacggatcccaaggtgcacccaaggctcctgcaccttgccatggacatagccaagatgctggacaggtctctcatcggagcaaacatcaccgcttggttgctganggagaacttcgacgtccactactggtccaaa

SEQ ID NO: 82267 - DNA, 394 bp, Zea mays
  unsure (1)..(394): unsure at all n locations
tgcggctgcagctactgagcattattcagtttatcatttgctctatacttcgatatttggaaaggtgaagctaaagaggactgcatttctgttgttgctcatttcgcgaattcgaactgggagcctagaaaaaagttgattggtcttatgctcatagatgtgaaacattctggacataatataacacaacgtgttaacatggntgctgatgagtatggtttatgtgataaaatatttgctattactccttgacaatgcttcctcttgtcaactgctatgattatctaaaccatcggtgtctgctatcttgacctttactgatgtgatgatgatgaatgctttcaactttgcatcacgctggctgtccattatatctaatgaaagccggttgaaa

SEQ ID NO: 82268 - DNA, 458 bp, Zea mays
  unsure (1)..(458): unsure at all n locations
cgagggaaactgtacccgcacccgaaatgggattcgtctatgtgctatatagctcaggtcgcattcagatttcaaaccgaacctgttcagaatttcagagttactcacgcatggcttttctgtttgacaggttgtctgaggtttgctgctcaagaaggcacaccctgaagcccagcgttccctgatactgcaacaggggatgaccaagcagtccagatggccccgaaaggaaaggtagaggccgaggacgaagaggtcaaatggatcagaactgattcagagtgtatttgtagcagtgtgtaaacataagataggaccatgcatctgacatattcttttcattctccagacatcgtgctagagatcctgattcctttgacacttctgtttggacacgcctctctgataggatcttatcagatggccttcgagccagncgaaaacaatatggtttctat

SEQ ID NO: 82269 - DNA, 476 bp, Zea mays
  unsure (1)..(476): unsure at all n locations
agctngatgagcaactaagacaacatcaactatttgttatacaactatctcaacaagttcagatgatgcatggaatgctgatgcatgtaataatattagtaatccgctcagaatctgcccatatgtcttttatctaactcgctctgagccttagacagcccaaaatcggtctggtcaattgttgagtgatttctgcagttattatgaggttttcacagcctgtgatatgaacatacatactatggtgatatgaacatacatactatgtagtcatatgtatggagataaaaatagacaatggttttccctcagagtacatatagaatggtgaaaacaaagggttccttaatctggagcttactagggttacaacctatgtaaactggtcaaacgaacaaatctatgctgcactggttgcgttaccatgatcatgccatgtaaactcagtgatatactgcacaagcacaaccacttca

SEQ ID NO: 82270 - DNA, 296 bp, Zea mays
  unsure (1)..(296): unsure at all n locations
atgctatttggcatatatcattgaatatgtgggcaacccagcacccacgacatcgggtgcttcggcaagtcattctcatgctactngggcttagctaccaccaccaccaccaccactggcgcctaacttgggtcataatcagcagccagaagggcattcgcaggcacaacaacaacatgacactcgggaggaagccgaagctcgcacactcaatgtcactatgcccgaatcaagacactattactaaagcagcacacgggctccatttcatggacgcttttctggcttatatcccc

SEQ ID NO: 82271 - DNA, 390 bp, Zea mays
  unsure (1)..(390): unsure at all n locations
cttcatccccacatgtgctaagcggtgatgccacaaccagcccatggcagtcttagccattaagcatgcatctagaccggcttcttcttttgcaaaatcaactaagtaaagtttgccgtctagtacacccttaaaagctagggaaccatccatcttctaaagacagacacatctacattngtaaataaacaattatatcccatattacataattgactaacagatagtaaattatatccaagactctccactaaaaacacattagagatagaatgctcatttgatattgcaatcttgcctaaacctttcaccttgccttggttcccatcaccgaatataatagaatcttgggaatccttattcttgacgtaggaggtgaacatcttcttc

SEQ ID NO: 82272 - DNA, 297 bp, Zea mays
gtaattgtaggcacttctggtagaaagagctttttatatcttggttatccacacaatagagatattttgagctacttgcttatatgcttatgataaaggagattatctagcatcactatgtaatgctaaagaattctctgataaagacatgttattagaattgtgccaatgttaatacaatagcaagattgcaattgtgggcaaaaaaggctaaactggttggaccaaggctgtttaagcaagaccagaccgtggactaaaaaagctaatgttgagttacatcgggctagtgatatg

SEQ ID NO: 82273 - DNA, 459 bp, Zea mays
  unsure (1)..(459): unsure at all n locations
agcttctgatttgggtactcccttcttctcttgttctcctgatgtacctcttcaccctgctgctccagatgtgaatgagtggcaccagcaagcgtatggggtacctttatccttagccgatgacgtcgaagaagaaacctattttgatgatccggagcagtttgaccctcccccatatcgcggngatgcgggtcaatcgtcatcttagcctccgccccaggacccgtttggcagtgctcctcctccggcccagtctggagaggaacactctgcctacgacctggcgcaacacctctttgctcctcatcaacctgctccccactggtgattcttggcttgacgcgtccatctctctctgtttggttctgggtgccaaaaaggaggagaacggatactattcagtactgtatttatgtaatgaactcttggtctggaataactctatttgctgcatgcatg

SEQ ID NO: 82274 - DNA, 298 bp, Zea mays
  unsure (1)..(298): unsure at all n locations
gtgtgcaatcatcaaactgttatttttaaagctctgtggtggcccatgaagattcgtgattaaacttaaaagggaagttttttctgtcggaataatcatggagagccacctcccgtaatctgtgaccccctttttcgactggtggctcattccaagataactccattttactgcggtggctcaattcctttgttgaactaagcaccaagagatttcccttcttactccgagaccatattttggattagcttaaccagnctgctaaatatcaaggctttgtaatcacaagggtatctgc

SEQ ID NO: 82275 - DNA, 470 bp, Zea mays
  unsure (1)..(470): unsure at all n locations
agcttataacaggaggatagaagtaagagctcgaccatatgtcataatagaaggggaattatacaagcggngggtctgttccccgttactcaagtgtttatccagagctgaaggcatagaattgatgaaggaaatacacgcaggcctgtgtggatctcacattggatctaggcctttgctcggaaaagttnttcgtcaaggattttattggccaaaagcagcttcggatgcagcagatttagttcanaaatgcgaaggttgtcagaaatgtgctagagataaaaaacaaccttcgtctttaactcaattaatacaacccacttggccgttgcaaggtggggccttgatttgtangtccattaccaccagcacaggggaacttaagatatgttgtagtggtagtggaatatttttctaagtggattgaggcanagnctttagccanncataacttcggtactattcaaaag

SEQ ID NO: 82276 - DNA, 281 bp, Zea mays
  unsure (1)..(281): unsure at all n locations
ttctacaaccaacactttatctctatgctcacttcttgtcggcgtttcgaaccagtttcgacaaataaatttgtatgtgcgtgttctgtggtccggatggtgtgcttaatgggcgccagatttatactggtttgagtgaaacgtccctatatccagtctttggtggctcacgctaccgacacccttattgctcaatgctcgtagtangggttacaagcgagcgagagtgggaggagcctccatgtctcttatgcatggctagaactaaacactatgggact

SEQ ID NO: 82277 - DNA, 461 bp, Zea mays
  unsure (1)..(461): unsure at all n locations
tgcaagcttctccgccagtctgagcagttctaacgatataaacaagatctcaatgaanaacttgaagccgaagctcagcagaattcggatttgagaaaactactgacaaatcttcaagaaaaatgcctggaattcagcaacaagtgcattcaacgattaagaaagattttttactcggttggagctagcagcgaaaaatttaccccctcagctgaagatctaccaaaaaccttcgaacacattgagggggagattgacgagctcgacgaagtcatagctgggcatggtgacttctgtgcctgngtggcttctcgagggactgctgcagccttcatgaaggctggctgtgatcatgggaaaattgtcaataggccatattttactttgtcaccatcaatccttgatgacatccctgatctcgctcgaagcatctcgaatcgatttgtanaaatgatatggac

SEQ ID NO: 82278 - DNA, 174 bp, Zea mays
tgccttgacacgctagggcgtgctttgaaggtaacgttaacatgaacaactaagttaaagactaggctctattggaccaaaagatgtttttaagttgtgcgatgctcaaactttgtgaccctgaagttgctctttggaccataatacacacatagactaatctatagtaagaat

SEQ ID NO: 82279 - DNA, 422 bp, Zea mays
agcttgcgttcgcttcttgtggaggagtgcttgcatttagaacctaaggtggctcggccctgggaatctctgtacaggctacatagtgatgccctgctgtgtcaccttggtagtgatcaatggagagtcatgatcttcgggcagaaccggaatcacggcttgtgggtaaagtgcacaactctctgcagagtgtttgaaaactgatatatcaaccgtgctcgcggttatgagcggccaagggagctccagtgattagtggtacttgatcagagacattttggtttacaggtggcgatgagactgatggttttggttatgaccatggtgctggtaagtggtattctttacgtttggaaagggtacatcgggctaataacttcgtgtaatgctaaaacctggctttctattagtgaaatataatc

SEQ ID NO: 82280 - DNA, 415 bp, Zea mays
agcttgtggacccgttgcctatcaactgaaattgtctcccatcatgtcagctgttcacgatgtgttccatgtatctcagttgcggaaatgtgttcgtctacccactgaagtgctaccggaaccggacattgagatagaaccagacttgtcctaccaagagtaccccgtcaaggtattggatcagaaggagagatcaactcgggcaagatcagtcagaatgtataaggttcaatggagtcaccattcagcagaagaagctacatgggagactgaggattttctacgctctcgcttccccgactttctgcccaaaggagtcggtacgtaacctcaaaaccccacccccacctgccctttgaactcaattataagataaacttagataacaagggtagtctaagttgtggatgtaact

SEQ ID NO: 82281 - DNA, 319 bp, Zea mays
  unsure (1)..(319): unsure at all n locations
tctaaccacttggcaattattgtgttaacacttaaccaagtatttggggcttaagtctcaagttttataggatcacctattcaccccccctctaggtgctctcaaagttgtcttcactctatgacccanatatgtgcttttggcatttgagtactgttggaactcgctctctgtcgcaaggaggccaacaagggtgaacagtgatgacaacagggttacgtgctagaaggcaatagctctgataatctggcctctcacgggcactatgcggcggtatttataggtacctgagcgcccagcgccttgtgtaaggacgcat

SEQ ID NO: 82282 - DNA, 362 bp, Zea mays
  unsure (1)..(362): unsure at all n locations
cttcatccccacatgtgcttagttgcgatgccacagcccacccatgctagtcttaactattaagcatgcatctagaccggcctcttcttttgcaaaatcaactaaataaagatttgccgtctaatacacccttaatagctagtgaaccatcaccttttctaaagacagacacatctacatttgtaaatagacagttatatcccatatgacataattgactaacagatagcanattatattcaagactcttcactaagaacacattagagatagagtgctcattagaaattgcaatcttacctaacccttntaccttgccttgattcccatcaccgaatataattgaatcttgggaatcctta

SEQ ID NO: 82283 - DNA, 460 bp, Zea mays
  unsure (1)..(460): unsure at all n locations
agcttgacattgtctccctggtggaagccaatgtcatctttaatgcctgngcgtctnccattataaagcatacttctagcaaatttaaaattttcattttctatttcatgctcattaatcttgctaggtagttgtgctatgtgatcantttgttgtttaattaaagctaggtgatcatgaatagcatcaacatcaatatctctacatctcatgcaaatagaaacatgctcaacggtggatgtagagggtttgcaagcatttaattcatcaatcttagcatgtaacatggcattctcatttctaagattagaaatagaaacattgcaaacatttaaatccttagccttagagaataatttatcattctcaatcttaaggctagaaagagattaattcaacttgtcaatcttagcaatcaaactagcattatcatttnntaaattgacaagagaatcatcac

SEQ ID NO: 82284 - DNA, 290 bp, Zea mays
atctagaatcaccaaaggctacagagcatgagccctctaagaatacgcaactactcactactcaagataccaattcctagacttacacaggtaccccagccctgattgcacgatattgcgctcaccatcacttttccaactagagactacacgagagtgcgcaaagacaattagtctaataggacgcaagttatgtgtgctcccactatacctgcgcatcaagaattgtagataacatgcgcattgcgcaggctaactgagtcagaactacaagggatcacaagatatct

SEQ ID NO: 82285 - DNA, 317 bp, Zea mays
  unsure (1)..(317): unsure at all n locations
aactaacttagtccaaattcaccgaaatttattcttccagaaacggtctataaccacacgaaaaaccgcacacttaggggcacttgttctattgtttttacacattgncgtcggcgccattgactgaaacatgagttattgcattattggtcggattaaacatgcgtttgtacttgaatagcttttaaattggaacagatggcggcattgtgatctattacagattgccctatctcggagagtccgaggacagctttccctcttgaaccgcggcaaccatttaaggagcatgcggcaaattatagctaaaatatatg

SEQ ID NO: 82286 - DNA, 365 bp, Zea mays
  unsure (1)..(365): unsure at all n locations
aagggcatgaatgtaattttgtatgggttgtgtcccgcgcctataaataggtgaacagtactcccgtactgttcacgctgacttggcattcgctttttgcgtcacgcttgtactatcatctccttccagttgaaggtacatttgtaattcaaagatgtttatgtctatgtctgatagtaatatataattatttatgttatcttttatattctctacattttatccttcgtcactgtataataaatttatgaaggcacgctcttcatcaccttcgtccgaaaatcattatatcctaagggaaataatgcttcgaaggacgaaggactttagcgattaacatnttttatgctgccttgntcttaact

SEQ ID NO: 82287 - DNA, 410 bp, Zea mays
  unsure (1)..(410): unsure at all n locations
gagaagaaataagacactcatgtttattgcttggtgggcctgtgccgtgtaagcagccatgtactctgattgctctttgaggaatgccatttgtttgtgtcgcagctcttcacgaaacttttcttgctgctccctcatagcgtcctccatgctagatacagagtggcgactacggctgctactaccacaacccgcctgcgacgaagagccgccacgagaacacaactccgtcgaatcgataacaccggtaaacatagaatatcttgaaaaacaagagaattagctattcggtcatagttccaatattattgaaaaaattcacaagttcatacagtccatgcgccttgcctncaatagaatgcacaacttcagcgtcgatggtaggcgctcctcgccaatcgtagtcttct

SEQ ID NO: 82288 - DNA, 398 bp, Zea mays
  unsure (1)..(398): unsure at all n locations
agcgtgaaaattaaagctaagcaaatctcggtgtgcattagctaaaaatcgagtgagcgggagcaaatagcaagagagcgtgccaaatgcgctngcagtatgatcttatttatacgcccagggcgttgaaaattgaaagaccccgcatgtcagtgaatgttgctattctagcaaagggaaggtggtttttcggaccttcggcttaaagccttcggtcatgtcgcaatctaaatgtattattgtaaacaaatttatattgcgaggggctactggtgggggccttcggcttacgaaggtcctcaaaaacatgatttaacagcatttctggagtataatgtgtgaacaggtatcttccgactcgagtccggatcacagtaggagaagcccacaacaatacg

SEQ ID NO: 82289 - DNA, 439 bp, Zea mays
  unsure (1)..(439): unsure at all n locations
agctnngaaaatatttagatacagntcgaaggttggaggcttctttcgaagatttttctgtcaagaacattccaagaggtgaaaatgagcatgcagatttgctagccaaatcggcggcttatgggctccctttaccttcggaagtattttttgaaacaataaaggcaccttcggttgaactcatggagagagcagtgcttactatttctccagtacatagtgaagattggaggactgaaattatatctttcctccaaggtaattgcctttcagatgacgaagcttataataagagaatggaggcaaggacatgaccgtatgtgataatagaaggggaattatataagcatgagtctattctccacttctcaagtgtttatcaagagctgaaggtgttgaattaatgaaggagatacacacaggtctgtgtggatctcac

SEQ ID NO: 82290 - DNA, 411 bp, Zea mays
  unsure (1)..(411): unsure at all n locations
agcttgggaagattcttcattccaacatgggctattcggcggngccagagccagcccatgttagtcttagcaattaagcaagtgtcgagttcagctctatcaaaatctaccaagtacagctgaccctctaacactcccttaaatgctattgaatcatcacttcttctaaagacagtgacacctacatcagtgaatagacagttgtagcccatttggcataattgggatacggaaagcaaattgtaatctaaagaatctacaagaaaaacattggaaatagaatggtcaggagatatagcaattttaccaagtcctttgaccaaaccttgatttccatccncgaatgtgatagctcgttggggatcttggttnttctcatatgaggagaacatccgtttcttcccggtcatg

SEQ ID NO: 82291 - DNA, 439 bp, Zea mays
  unsure (1)..(439): unsure at all n locations
gcttggcaataacactaagcagttctttgaaatgaagaacactttggatggtccgcttcgaaatgctgtctcggataccaccataaattctttccaccctaaattttccaaaaaaaaacaaagcaccatgaaaatctgtcaaatttgtgaggtgaactgaaacatcacggtcaaattattgtgtgtgctggtgtgatgggccttggcccggctcatgtatttccctctgtgaaatatatacaacagcacaccttgttttcgggttaggggttccaacatgttatctagccagcaatttctcctctcttagccatcgtcgacctctctccgaccatggatggngctccccccatcttttccggtggtgggaggtcatcgttgctagccccgcggtgtctcacgccggtgccgcccctaccgtgggcgcggactctcacgc

SEQ ID NO: 82292 - DNA, 415 bp, Zea mays
  unsure (1)..(415): unsure at all n locations
gcgtctcccactatagagcatgcttctagcaaatttaattttttcattttctaagtcatgctcattaatcttagcactaagttgagccatgtgatcattttgttgtttaattaaagctaggtgatcatgaatagcatcaacattaatatctctacatctagtacaaatagtaacatgctcaatggtagatgtagagggtttgcaaacatttaattcatgtatcttagcatgtaatgaaacattttcatttctaagattggaaataatattattgcaaacatttaaatctttagccttagcaattatattttcattttcaattntaaggctagagagagatgcattcaatttgtcaatcttaacaatcaaattagcattatcatttctaaggttgacaagagaatcatcactaata

SEQ ID NO: 82293 - DNA, 403 bp, Zea mays
  unsure (1)..(403): unsure at all n locations
tcaaatgggatcaaaacccgggacttcattagagcctaaccgctcgaagtgatggccggagcccacgccaagaaggaaatggtgaccggcgagaagcctgccacacgccacgggaaaactccatcgggggagtctggcgacaagaagagggaggaaatcacctcccacgtcaagtcgcaccggagtggcgacaagaaaaagaaaatgaagaaagtggtctactacgagaccgattcttcgtcgccttccacctccggctccgaacacgccgccatcacttctaagcgccatgagcgcaagaagtttagtaagatcccnctacgctatcctcgcatttctaaacatactcctttacttgtctgcccaataggcaaaccaccgagtcttgatggtgaagattata

SEQ ID NO: 82294 - DNA, 117 bp, Zea mays
aagacgacaagcgccaaccggaaaggaccctgcagcacacacgacggagcccaccggggcaaagaaagaaagaaaaggcacgaacaacacccggagccagaggccgggaccggagcg

SEQ ID NO: 82295 - DNA, 409 bp, Zea mays
  unsure (1)..(409): unsure at all n locations
gggaacattgccgctttcacctcttctcaaatggctttggagttggagcgtcgttggtaaacacaaatacttacattttggcttcttttaagggacatactacgtatcagaaacttgctcaagagaagaacaaatcactagatgactataattgtgtttagtgcaattcagaaattgaaaaaaaaaatacaaatacaacttttcctggaatgccccttaaggccttattcggttgcgaagattgagggagctcctttaattttgcctaggggaaaatttaatcctctccaaccncttctctagatacaatataatcgaacaatctttaaggatgtggttggttcgagctcaaagtgggatgagacgggagcgacatcgntccctcgattttttggatcacgccgtcaca

SEQ ID NO: 82296 - DNA, 391 bp, Zea mays
ggaggcaccatacaaagtaccatgaccccaaccatggtgagagtgtaccttcttgaccataataccacccatcgggtcaaagacgagggaacaaagacctatcgtgtctacaccggaccatgtgaccctcctaaacacaaagcaggaggcgctagtgccaaacctccaaataagggccgcctaccacggaggcatatttgtgtaagaccatcccatcccacgggcatcttgaggaatgttcgagagtccttggatgcgggccccgagctaaagggccccaaacctggctgagctaggggctagaaccccaaaagaggaaccaaaggtccaagggccttgaaaaccgaccccctcaatccagagggctctagaggcctaaagtatcccaaga

SEQ ID NO: 82297 - DNA, 324 bp, Zea mays
ggaacatatactggccccacagaccaccacggatcttgaggcacacttcgtcctcactcatgcgcacccgagaaaactccccgggcggtcacccatcccaaatatcaccaagccaggcacgcataacttgcaggatctttcgagataggctaacgaaaaagaagacacactctgctgatatgaatactctataaatcccattaaaccacgggcaaccccaatacaggaacctcccctcttagccacgacagagaggctagcggcatcatatgtcaagccacgagaccactcggtgcccacaagcaccaagcaccatatacccag

SEQ ID NO: 82298 - DNA, 369 bp, Zea mays
  unsure (1)..(369): unsure at all n locations
tttttttacacccccactcacgtgcacacacatagaaaggagcacacgcagccaacgagaaaggcgcaaacgtggaaataaatgggcggaggcacaaataaagcctatgccaagattcgaactctagacctctgacagtgacaccatgctagagtggacgtactaaccagttagacccaaaagcttaagctaatgggagaaggtagcttatccacttatacagttcaacaaattacaggctagcaaacatttgctagtgagatagtgctaaggagacaatgagacatcaacgaagactatgacctagattncatgtacgttcgagcaacacaacaagaaagaatgtaatgaatattaaaacaagctaag

SEQ ID NO: 82299 - DNA, 402 bp, Zea mays
attatgagaaagacaggatttgtagcgcatgccaggcaaggaagcaagttggagtccatcatccacacaagaacatcatgacgaccgacaggccgcttgagctgctccacatggatctattcggcccgagtgcttacataagcatcggcgggagtaagtattggcttgtaatagtggatgattattctcgctttacttgcgtattctttttacaggaaaaatctcaaacccaagagactttaaagggattcttgagacgggctcaaaatgagttcggcttgaggatcaagagaataagaagcgacaacgggacggagttcaagaactctcacattgaaggctttcttgaggaggagggcatcaagcatgagttctcttcttcctacacacctcaacaaaatg

SEQ ID NO: 82300 - DNA, 395 bp, Zea mays
ccaacccaaggacctccctacactgaccactcccctactggtcttgcccccttcggagaaagaagacattcactatgtttcctagttaatcagccaagggcggcccattatacccttgtggtaacactgctttcccgggaggactctccatgttcccattaacgtaatgatcttaacatgagcagcaataataaaaagataactagagtgcaattatgaatagtgtatctccatacccaaatccacataaagcaatagcaggtactacccaaaaatattccactggaaacaaggtataagaaaccaaactagggaacctattggatccatcaatataacctatgtcatcattattgtcgcgaccataatacgggaccctcagaccctaatctcac

SEQ ID NO: 82301 - DNA, 450 bp, Zea mays
tagagacgaaccgcggcatgcaagcttatatctcccatagctctgagtgtgcaaataattcatgcacgtctgaaccatcgagtggtgtatcgtggcgattctgagaacgcatcaagatgcccaggttgcaatgtcagtcgatacacgaagagctacaatcaagactgtgtaaaaaaatttccgaagaaaaataagaacaagatatccactattggacctgaaagtgacgatgacacttttgatgacatggatgggaaaaagaagtcaaagaacccagctttggtgatgtggtatcttccagtaattgatcacttaaaatgtttgttctcaaatcctatggaggctgagcttatgcgttggcatgctgaaaatcgcaagcagaataacaaacagattcgacaccctgctgatgcatcacaatggaaaaaattcgatcttatgtatcctgag

SEQ ID NO: 82302 - DNA, 409 bp, Zea mays
  unsure (1)..(409): unsure at all n locations
gccacagccagcccatgctagtcttaactataagcatgcatctagaccgggctctgtttttgcaaaatcaattaaataaagtttgccgtctaatacacccttaaaagccagtgaaccatcacttcttctaaagacagacacatctacatttgtaaatagacaggtataccccatatgacataattgactaacggatagcaaattatatcctagactctctactaaaaatacattagagatagaatgctcattagaaattgcaattttacctaacccttttacctagccttgatttccatcaccgaatataattgaatcctgcgaatccttattcttgacgtaggaagtgaacatctncttctccccgtcatatnggttgtgcatccgctggcaataagtcagcttgatc

SEQ ID NO: 82303 - DNA, 465 bp, Zea mays
agcttctaaagggtgaacacgtgataggtctatataatgttactttctaaaaagatagaccttgtgcagcttgtcaagcagggaaacaagtgggaagctctcatcatgccaaaaatgtgatgacaacatcaagacccctggagttacttcatatggacctcttcggacccgtcgcctatctaagcataagaggaagtaagtatggtcttgttatagttgatgatttttctcgcttcacttgggtattctttctgcaggataaatctgaaacccaagggaccctcaagcgctttctaaggagagctcaaaacgagtttgagctcaaggtgaagaagataaggagcgacaatgggttcgaattcaagaaccttcaagtggaggagtatcttgaggaggaaggaatcaagcacgagttctccgctccctacacaccacaacaaaatggtgtggtagagagaaagaaca

SEQ ID NO: 82304 - DNA, 443 bp, Zea mays
  unsure (1)..(443): unsure at all n locations
agcttctaagggagaacacgtgataggtttaactatctttctattcgaaaaagatagaccttgtgcagcttgtcaagcaggtaaacaagtgggaggagcacatcacagcaagaatgtgatgaccacttcaagacccctggagctgctgcatatggacctcttcggacccgtcgcctatctgagcataggagggagtaagtatggtctagctattgttgatgacttttcccgcttcacttgggtgttctttttgcaggataagtctgaaacccaagggaccctcaagcgcttccttaagagagctcanaatgagtttgagctcaaggtgaagaagataaggagcgacaacgtgtccgagttcaagaaccttcaagtggaggagttccttgaggaggaagggatcaagcatgagttctccgtccctacacccacagcaaatggtg

SEQ ID NO: 82305 - DNA, 349 bp, Zea mays
gcagccgactaatccacctcggcccctcgggcacaaccacacccgcgttttatatgccgccggcgtggccgaggtcaagcaccgtgacgagctcggagagaaaacgacggcttctgaattgtgatggtaaagaagcaacgggaatcgcggcctgaatggacaccatcagcggtcaccgcgcagttgcagtgaacagactagcagaggctagttgcgcccccaaaagcatgttcttttccatcactaagtgctagtttagcaactctattctctttacaaataattcttattttctaaggaagaatatactttgtttgagaaaatgaacatctctgcgcctgtgcacaca

SEQ ID NO: 82306 - DNA, 478 bp, Zea mays
ttagagtcacccgcggcatgcaagcttgctagccgggccgagacatttttcttctaatgcccaagcgccctcttcgctctgacgagccgaggcgaataccatctaagactgcagggaccggatgaccgaaaccacgaaaacctcaaggctttgtcccccttaaagcaggaaggggcccatgtacaatctgtagggctggaaaataagctcgaggctcgcgagccggctcgagctcggagcggctcgcgagcctcaagcgagccgagccgagcctgtcttttaagctcgttcccgtagcgagccgagcccagacgactcgcgagctccgtcaaattacttaatatgtagaataatgatggatattggctaattctatagattggcagtatgttccttagcgcttcgtgatagatatatgataattaataatttagattgctcatactaacgaatgatatctttataattcatgattata

SEQ ID NO: 82307 - DNA, 449 bp, Zea mays
ctgagcagcagctctgccggaacacagtatagtctttgttcttttggtttccgcgatatatatgctatgctagctcggtggcaaaggaaaactgcgctgtgagtaatatggtcgtgtttgctaatgctactaggaaggcgtactgcgtccattgcaaaaaaaaaaaaaaaaccacacacacacacacacaaacgcatgcatgataaaagatgttgaccgaattctcctcctgattataagtgggttgtttgtgtttagtggccacaacaagtggaatttgcgctaatacaagcatcagaagccacctcaatcggacgacaaatgtgtggtgagggcgagccattcacctgacagctcttggtgaacggaggcggatcactcggtcgtcatctttcttcgtctactggtaatccaattcacccactgcgctgcgctgcgctgcaacgcac

SEQ ID NO: 82308 - DNA, 420 bp, Zea mays
gctttaatgcacaaattctgcccctttgacatcaaacaccaaaaccatattcaagcaagaacataggatgatgtcaagggacagcagggtattaagcagggaaaatgcaacacactaacattactcccccttacacattaaacatatgcaacacaagcattggagaaaaattaaggtacaaatacgcaaaaaggtcaatacctccttttgtacctttaccatgttatggtgtagtttccatctaagtaggcggagttccttttgtcatcaattcaagatttccatcttgaaagttttatctctagggagctcctttacacttatgtctgatcctttatcctgaccttttcttggtgctaagatacaaaacttagaacaagttatagtatggtggcacaagatgaagcttctattctagtg

SEQ ID NO: 82309 - DNA, 384 bp, Zea mays
  unsure (1)..(384): unsure at all n locations
cctcgaagaattactatagagctattagcacatataaagggcatgaatgtaattttacatgggttgcgtcccttgcctataaatagatgaacagtactctcgtactgttcacgctgacttggcattcgcttttttgcatcacgcttgtacctttgcttttcttcaaaccgaaggtacatctataattngttattgtggatatggtaatgcaaataaaaataagttgatgataatgtttatattatttttcgtatttcgtatatgaattcttcctcatcatttattatgcttacggaggttttttcttcacgaccttcgtccggaattcattatatccgaagggaaataatgtctcgaaggacgaaggactttaacatttaacac

SEQ ID NO: 82310 - DNA, 449 bp, Zea mays
gcttgagacgggaacaaccgtggcatgtactacattccttgaagaaaatgtcaaggatttgaggattgccaagaggaagaaacaaaagatgaaattcaacacctcctccaaaagcctcaaccacgccttcacaaaaggtaacatccaaggtaatgatcaaaccacacttcacatcaagaggtgtagtgaatgctttgaagaggggcacttgattaggtcatgtccctacattaaaaatggcttgattattaacaaggatgatagactttgttttaaatgctccaagaagggacacttgcttagatcttgtccccatttaaaacaaaaaggcatagggttagaaaagaaagtttttactaaccatgtagcaggcaacaaacaaggaaagaagaaaacgtcaaatcttggaaaacgccttcgctacacatgccgtaagaagggacatcaat

SEQ ID NO: 82311 - DNA, 434 bp, Zea mays
  unsure (1)..(434): unsure at all n locations
agcttncatctatatcgtctcaggctgttgaataccatctgcaagtcttcgatgaagttttccgaattctccgttttgattaccacatcatctacgtaggcctccacacgcttgccccagtgatcggctaagcatgtttgaatggctctctgataagtcgctccagcgtttttgaggccgaacggcatggaggtataacagaaagcaccaaacggagtgatgaacgccgttttttcctcgtcttccttcgccaaactaatctggtggtatccggaatagcaatccaagaaagacagcacagaacacccagcggtggaatccaccacctgatctatcctcgggagcccgaatggatccttcggacagtgtttgttgagatcggtatagtcgacgcacatgcgcctatccactttattctctctgagtacaagaac

SEQ ID NO: 82312 - DNA, 272 bp, Zea mays
ctcctgacaggagagcggtttatatgccaaccccacagagccccgccttaacggtcgggaggtcttcacgggtttatggctcaaacaaccccaagaacatgggaagaacgccctaaagattgtactatcactcaatggttacaagcttgaaaagcccatcctactctgtttactaaaacacttgagaaagatgagttagtagccaaatctatgtgaagattcataattggtctacaacgaattaccgtgtgagatttaaaagaacatgacca

SEQ ID NO: 82313 - DNA, 391 bp, Zea mays
  unsure (1)..(391): unsure at all n locations
gcttatctcaacctgagaggaaagcttatcctaatgtgttatgtgctaantcaagctttgctagtgtgttattcatatgcttcctgcagtattatatgtggtgcatcatatggactaatgctttctttgctatgaattaattggcatctattgcgttcattctgaaataaacagccatgtggataatgatgcatgtgggtaatggagctttaagatcgctttaaattggtatcttagtttaaatcgagatcttaatggtgaatagccggaggttgatattcctgtgctatatccactaattagaacggtgtctaactctgattatgtgtgttgattatgtgcattcgtgtgatatagtatcatggtttgattcttgccacaatgcatacta
